United States Patent Application Publication US 2005/0228172 A9 - sequence listing, part 10

SEQ ID NO: 32294 - DNA, 632 bp, Homo sapiens
aaaaatcccacgagattctactattattgccatgttactgataaaggagttgaagcaataaaaagttaattaacttgtccatgctcacaaaaccagttaactggtgaagtttatttttaaatcaaagcagtttgcctctatactgtgtttttaaccactgtgctgtagttcattgttaaaacacagaatgtgtgttaagtaattttatgactaaaggacagcacaatatgtatttattgagttaaaacaagacttgtgttccctgattttgccatctctgaccctggttagattcccctttttttgctttgatagtgctctttacagtctctctcattgattttgccatattggattttctaccattagtgytgatgtgtgtcgctcccactaaacagtgatccttttaatggctggagactgaaatcaaatcttgtcatttttttaaaaaaaacatcatgcctgatacagaatagggagacaatatttatttgtggaattaatgagtagattatttaccttatacttaaatgtctactttaatatagttataccatgatttccgttttatttcatgaaaggagaactccaagttttgagtgggtttttgaaaattttaatttcaaactcag

SEQ ID NO: 32295 - DNA, 708 bp, Homo sapiens
ttttgggagtgagctagggggtaagtctttgactgtatgtccctcagaaagttacagtgcactgactatgtgccatatcttatacaggcaggcagcttcccacatgaggcttgatgagcaaagcactgtaattgcctagggttgasctaaaaacaaatcacatatagaagttttggcctggaggcagactcttcatgtacattttatatatatatatatatatatatatatatatatatatatatataaaatataccccatgatacagtaatgttactatgttttgttaaattttaacttttagttaggtttaggaggtacatatgcaggtttgctacctggatatactgtatgatgctgaggtttagggtacagataattccatcacccaggtagtgagcatagtacccaataggtagtttttcagcccttgcccacttctctctctcaccaacagtagttcccagtgtctattgttccatctttctgtccacgtgtacccaatgtttagcttccacttataagtaagaaaatgcagtatttggttttctattccggcactaattcactttagataatggccttctgttgcatccatgttctgcaaaggatgaaatttcattcttttttatggttgtaaaatattccatggtgtatgtgtaccacattttctttatgcaatccactgtcgatggaagcctaggttga

SEQ ID NO: 32296 - DNA, 708 bp, Homo sapiens
ttttgggagtgagctagggggtaagtctttgactgtatgtccctcagaaagttacagtgcactgactatgtgccatatcttatacaggcaggcagcttcccacatgaggcttgatgagcaaagcactgtaattgcctagggttgacctaaaaacaaatcacatatagaagttttggcctggaggcagactcttcatgtacattttatatatatatatatatatatatatatatatatatatatatataaaatataccccatgatacagtaatgttactatgttttgttaaattttaacttttagttaggtttaggaggtacatatgcaggtttgctacctggatatactgtatgatgctgaggtttagggtacagataattccatcacccaggtagtgagcatagtacccaataggtagtttttcagcccttgcccacttctctctctcaccaacagtagttcccagtgtctattgttccatctttctgtccacgtgtacccaatgtttagcttccacttataagtaagaaaatgcagtatttggttttctattcckgcactaattcactttagataatggccttctgttgcatccatgttctgcaaaggatgaaatttcattcttttttatggttgtaaaatattccatggtgtatgtgtaccacattttctttatgcaatccactgtcgatggaagcctaggttga

SEQ ID NO: 32297 - DNA, 566 bp, Homo sapiens
tttattttaaggccctaaataggttatattctctattggcatgagtttttttaatcayaaaaattgcacctcatagccctagactgaccaaaagtgagtcactgtgtccacctaaaacagtagcaattaaaattccttcagtaatggaaatgtttatattcatgatgaacgatatggtagccaaaagccgcaagagactattgagaacttgagaatgtctactgcagagtcagaattacattttaattttaattaatttaaatttaatacaaataactatatgtgactagtggctatcttattggacagaacagatttaatacttagacctccctagaaagtatattaagatttgtatttgtattgatttgtaaatctattacattgtttgccagaggcaattacttgccacctgtgttctaaccaagcttgcccatatttcacatgttgagtttgttcattttaactgtcaattggcctaattttcccatttctagcattttaatttctccagagcttgcatactacattgaacaccaattcagtgacctggaacaattccactc

SEQ ID NO: 32298 - DNA, 566 bp, Homo sapiens
tttattttaaggccctaaataggttatattctctattggcatgagtttttttaatcacaaaaattgcacctcatagccctagactgaccaaaagtgagtcactgtgtccacctaaaacagtagcaattaaaattccttcagtaatggaaatgtttatattcatgatgaacgatatggtagccaaaagccgcaagagactattgagaacttgagaatgtctactgcagagtcagaattacawtttaattttaattaatttaaatttaatacaaataactatatgtgactagtggctatcttattggacagaacagatttaatacttagacctccctagaaagtatattaagatttgtatttgtattgatttgtaaatctattacattgtttgccagaggcaattacttgccacctgtgttctaaccaagcttgcccatatttcacatgttgagtttgttcattttaactgtcaattggcctaattttcccatttctagcattttaatttctccagagcttgcatactacattgaacaccaattcagtgacctggaacaattccactc

SEQ ID NO: 32299 - DNA, 566 bp, Homo sapiens
tttattttaaggccctaaataggttatattctctattggcatgagtttttttaatcacaaaaattgcacctcatagccctagactgaccaaaagtgagtcactgtgtccacctaaaacagtagcaattaaaattccttcagtaatggaaatgtttatattcatgatgaacgatatggtagccaaaagccgcaagagactattgagaacttgagaatgtctactgcagagtcagaattacattttaattttaattaatttaaatttaatacaaataactatatgtgactagtggctatcttattggacagaacagatttaatacttagacctccctagaaagtatattaagatttgtatttgtattgatttgtaaatctattacattgtttgccagaggcaattacttgccacctgtgttctaaccaagcttgcccatatttcacatgtygagtttgttcattttaactgtcaattggcctaattttcccatttctagcattttaatttctccagagcttgcatactacattgaacaccaattcagtgacctggaacaattccactc

SEQ ID NO: 32300 - DNA, 600 bp, Homo sapiens
tccaactaaagtttctaacattagttgttttcgtttatttttcaatcttttcactgacagttgataaactcactacttcatgtcatttcctttagtccccagttttggaaaattataaaaaataaatttatatttttaagtatatacagaagtggcaaaatataaagaaagcaagaagtaataagaaaagttaaagtatttgttgtcattccaggaggagaagagagaaataatcttataaggcctcttgaagggcaggctataaacctggcaatattgtatttttcaggctggaagtttgctttgtaattattcattacatcatcctttatgtattgtgtacttttctatatgcgtaaaatatgtcttaatacaaagaatttaaacactcatgttctctccagcggaaaagaacatcaaatataagaagaaaartatcacactattctcagtcttctctaaaacagagctcaatgtgaaaagagtaaaaaaaattttagagttcagaaaaataaaacaaacctaatcactgtatttccttcatttataaagagtatagatatgcctaaaaatgcacaacattgcatactaccttttaaa

SEQ ID NO: 32301 - DNA, 2310 bp, Homo sapiens
atttaaacgagagaaaccttcacttaaattagagtaacccaggaatattatatgtgagatattattgtaattcatagcaaaacacacgcatcattgtgaaattgagtgagtcttaatgccagatttgagctctaagttcaagtgtttaatcagtgattattttcttattcttataataaaattaaaactatgtagaacaaaagtttcactgcttcattttagcaagtcacaatgcagaatcataggcataacccagcgttgcatgagaacatccctccttttcaaaatcaaatggtctgtgactctttttggagggtgagagacacagtcaccaagagtaagctgcctaacacacatttattgtaccatttattgacattttaaaatgaattagttcaggtgtaatgactcccacttaaaaataatctctatgctatagagaaattttcagtaacaagttatatctgccttttgtattcttgttagaatcttcaaatatgtattcaaactgtttagtggtgattttttttaagttgctttctctgtctagaaaaatcctctcctaagggtttcaaaaacataaagatagtagaaataagaaacagaaaattaccgaaaatgaataaattggaaccagagtaaattttggcaagcatttgaccacaaaggtcttgacagatagaaagttcactatatttgacatttaaacaagcagtcaatatttaaagagaagatattttccttgtttttgagaaattgatttcaagagaaaataaattgttaagaactccagctacctgaagttcaaatctatgtgcatttcaaagccttctcaaggaacacaggtatcagttaccctcatatagattaaaaagtgtaactacagtagaaatgaaaaataattatctttactttcaggtccaatgtaaatgtgaaaaagttttgttcttatggataactctcagaaggtaactaatgccaacattgtgaattattgtagaatatatctaggtatgagcaaaacaaaatgaacaaaataaaaaacgttgattcttttctcactaataaaataatcattgacatgtgtgcagtctttgatatrgcttattgataagaagctattatgtatataatattctccttaagaaaattttcttgtctagattttatagcaaaaggaaaaacattttctactttgtgatcctaacactcaagatgcatgttattttcaaggtagccctaaaagaatcagtaaagatcaattcagagaattttttttcctcgactacctgagtaactttttgagcttctaggatttccaaatgatttaaataatgaagacttaatctctaagttctttatgcactttaaaaatcacattttttatagtacagttgctacacctgtgcataatcaggtttttcagtttcctttttagaagttctccctacctttccttaaatatgcaagttcaccaggtgtttggaatgtcgtagcagagttatgaaatcttaatggtgcttttcccctctgtccttttgaactaacttcatctgtgctataacagacttgtgggtagtctgttatagcatttgtcaggttcacagtaaactaaaatgtcattcatttacttcaaacatctctatatttgagcaaaaagaaatgaaaagacataattgtccctcagccacatggttttaattttcatcttaaaaaaaaaaaggaactgtagtctgtttgctgtatttttttccccccatcattgggtctctctgattttcctttttatgttcagtagggacttttttttaaagcattttaacaagcaacagatttaaaacgtatttaatttttttaattatacttcaagttctagggtacatgtgcacaatgtgcagaaaaagaaacatatttaaaaatatatcaagttcataaaccaaaattggagtgaactttttaaaagttgtcctaaaaaggaaagtaacattatctataaggaatagcctttttttgttcagataccaatttccctgtatcccttagtcgaccagctagaaatttccattaaagaagatgaatgttacagataagaaagaacatgatctacagatttgtgccagtaatgggaaagagagatgagataaaaggtgatttaatgatacctgagcgttaatctgtgtaaattataaaaatatctatggtgaagatacaattaatagagaactgaaggagaacatgataccagtagttacattctttgtcactgtttagtaggagttttgaatatttactcattccttcctttataaa

SEQ ID NO: 32302 - DNA, 587 bp, Homo sapiens
ctaaaagggtggctggtattataaaatgttataacaatttataatattagcaatgcagaagcatgtttacttcttatgattaatttgttaatatctgggtgagaaaaaattggcatctcaatgttgctttatttaaatttccctgaataattatgttaggttatactttagcaaatgtagtggcttgtgtcattttttactctgagagtaagctgtttatctttttaaaaaatgttaattgatktgtagaagacttttcaacattgaatatcatagcacatataatagagaattatttatgtagccacatgaattatcttttctgaaatttttgcattttgtatttacgtagaaagccttcatgcaaaactctctttctaaattatatttctctgatcaaatatgtttggatatgtcctttaatatatatatatatttatgtatattaaaccatacagataattctaaatgaactgaaggtaattgtgaatccatctggaatattctaaacagtttgaataactaataggacattaattgaataacttacagttttcctactggtttgcaattatactttttttttt

SEQ ID NO: 32303 - DNA, 587 bp, Homo sapiens
ctaaaagggtggctggtattataaaatgttataacaatttataatattagcaatgcagaagcatgtttacttcttatgattaatttgttaatatctgggtgagaaaaaattggcatctcaatgttgctttatttaaatttccctgaataattatgttaggttatactttagcaaatgtagtggcttgtgtcattttttactctgagagtaagctgtttatctttttaaaaaatgttaattgatttgtagaagacttttcaacattgaatatcatagcacatataatagagaattatttatgtagccacatgaattatcttttctgaaatttttgcattttgtatttacgtagaaagccttcatgcaaaactctctttctaaattatatttctctgatcaaatatgtttggatatgtcctttaatatmtatatatatttatgtatattaaaccatacagataattctaaatgaactgaaggtaattgtgaatccatctggaatattctaaacagtttgaataactaataggacattaattgaataacttacagttttcctactggtttgcaattatactttttttttt

SEQ ID NO: 32304 - DNA, 578 bp, Homo sapiens
gcagccataaaaaatgatgagttcatgtcctttgtagggacatggatgaaattggaaatcatcattctcagtaaactatcgcaagaacaaaaaaccaaacaccacatattctcactcataggtgggaattgaacaaygagaacacatggacacaggaaggggaacaccacactctggggactgttgtggggtggggggaaggggggagggatagctttgggagatatacctaatgctaaatgacgagttaatgggtgcagcacaccagcatggcacatgtatacatatgtaactaacctgcacattgtgcacatgtaccctaaaacttaaagtataataataatttaaaaaaaaaaagagtgtgaccgtggttttatgatctcctgatgctgctagccatgaatatatactggtgagtcatatatgtatcatgtcctaactttgtcatcttccctttctgaatcagaacatggattgtcaaaggtaagactgattagaagaatgaagggctaagattgctgactaaagactcactctctcagctatttcctaggcacttctctctggcgccagatacc

SEQ ID NO: 32305 - DNA, 1125 bp, Homo sapiens
attcttcctggttatggtaggtttattcttccctttcagttatagccacgacccatcccatctctcttgatgccttcagaactcaaatacagtttatgacgaggtttctagaatgggcaccttcctgtagatgcccaacacctccgttacacaggaactttcaggctggagatacttcctacctgtaataaattatttcaacacttcactattgagaagatttaattcattctcagtagtgaccaacaaggacaaaagacatttaaatatgttgggctcaaaagacatcatgttttaaaaattactatgtttttgtatgagtaagaaaataggaaattgaaaaaggttttgctaagcatctttcataatcaaaatttcatggtttgattttataaccagactgaaacaaaagatgtttattctatgaaatggcttttgccaagattgcagtgaccttgttgttaaaactaacaggcacacttcaatgctgatttcatgtgatctctcagcagcattcaagtgatgacactcccttctttctgaratgttctttttcattggctgctgtaacaccacactcagttttccttccactttgacccctttctttcagtgtcctttgcagggttctcttctattacctgtgccttaaatattaggatcatttggagttgtgacctgggcattttgtcttataattctgtatactctccttgaaaaaatccatctgtttccattgtttaaattaacttttctatgcccatgacttccttacataattcactcatgtgttcaactttctacttctacatcgaaaagtctactctctacatccaaaattctgtttggaattttcatgagcacctaactatagccccctaccatctctgcccttcttccagggcaccttcaatctgcacattgcaccaccaacccaccagccacctacacccctgtgtcaggacggagcttttgtcctgttgactccttgtcacttctaatcctcatagctggtgagaggaagagagctagcataattatcccaaagttatactctgggaggaagcaatgttaggaagagaaagatgtgtttatactgtagattctgtgctctgagaaatacca

SEQ ID NO: 32306 - DNA, 590 bp, Homo sapiens
gagaaatgctggcctgaaggaggaagccacctcggtcctgttggagctgagagcaaaaaataaagacagcaaggacctcggcaattccaggcacaaaggacaagctgggccaaggcggggccctgttgtgggccttcctggcataaggcgacgcttagttcagaggcagctccagatgggacactcctcccttccgtcccgacacmgcccgggcttcctggaggtggccactctttggctgagacctcagcagaccagctgccctggtgccagaatccaaatgaatgaaattaccaggaagagctgcgaggaagggtggggaggaggcgtccccgtgtgtggctgaagccgatctcctcctggtagaagctgcggtggtggttcttttaccggtagcactggaaaaaaacagaaaacgccagctgattctgcttttagagagtacaaacctctctgaggtttacagcagcctcagtaatttgcttggaggcaagtattccaatgaaagcaaacacagagccagtcccgagccccacgaccagcgctgtacccaatatgcacccagggtccagaaacgtccggcggtgaag

SEQ ID NO: 32307 - DNA, 523 bp, Homo sapiens
ccttcctcactcccaaataagaatcctctggaacattcctaaccttcaaaatgacatcttttgttgttgttgttgttgtttttgagacagagctcactctgttgcccaggctggagtgcagtggccaaatctcagctcactgcaacctccgcctcccaggttcaagccattctcctgcctcagcctcctgagtagctgggactacaggtgcccaccaccatggctggctaattttttgtatttttagtagaggcggggtttcacatgttagccaggatggtctcaatctcctgacctcgtgatccgcccgtctcggcctcccaaagtgctsggattacaggcatgagcaccacgcccggcccctagttaatgactttcttaaatatcataatgctaaaaggaatttgtgctagaattttcctaaataaattgataactaccttctctgacctgtaaccccctgccaattgcatatatcagccagacttgaaaagattttttgctgtcctgatgtgattgtccc

SEQ ID NO: 32308 - DNA, 1111 bp, Homo sapiens
ccttctctctgagaccccctttcatgtgcgtgtgtttgtctgtattgtgtgtgcgtgtgtctgtgtctctctgtgtgtgtcgtgtgtgtgcttgtcattgtgagctgaactgtgtgaccaagaggccaggtgttcaactgtgtctgcacagatggtggcagcaggttttgtctttggaagatgtatatgtgggtggagccgtgtgtgattgaacccacattcatggatgtgttccctgcttgtgcatggctgtcaccaggaacctgtctgggtctgagaatgctggagctcagcctgccagtaagccgagagtgggccacaacctgtcactggaactttctggatcttggttcactcaatggtgtctaggtgcctgtggtctagaaggaccagtacccaagccctgagtcttgtacacatcttgctgttggcaggtatcagggcccctgggtgcctgtgtgtgctgtttttgggggaagctgggtcctgccttcctgtttctcatgtgtatgcattccctgtgttccagctgcaattgcggagcgcctgctgtgcatgcttctggggtaagaaggcgttgcacatcctcgttgatgagcatctcacgagtatactcgtggctctctagttacttggccaagtcatcttcctgtgcacaggcaggcttgcataagagcaaagagctaaaggccggacatggtggctcacgcctgtaatcccagcactttgggaggccgaggcgggcagatcacgaggtcaggagatcgagaccatcstggctaacacagtgaaaccccgtctctactaaaaataacaaaaaaattagccaggcacggtggcgggtgcctgtagtcccagctactcgggaggctgtggcaggagaatggcgtgaaccggggaggcggagcttgcagtgagccaagattgcgccactgcactccagcctgggcgacacagcgagactccatctcaaaaaaaaaaaaaagagcaaagagctgggaggcagacatatttgagttcaagttcaggctttgtctagctgtgtgattctagacaaaggatttaacttcagcctcagtttcctcatctgctaaatggggagaatcagagt

SEQ ID NO: 32309 - DNA, 569 bp, Homo sapiens
actatcatgtgtgtattggtttgcttgattgtatcccttacgtctttttgtgtgtgattgaacttttcaaggaggtcaaccagtctccatgagagctttcagcttttggttccctctgattctttacatagtactgcacattctctctcagtgcgagaagacaataagctctgagctctygtatgtcttcagtggtcctcagccatgcaaagtatgcaggtatctcagcattctaagtcagacaagacagaaactcatccctcaggcagccttccccaaatttggattattatatgtacattccactcttctctttcctgtccaaggcagaagctgcaagtttagccctatttttttaatcacaagctatcactacttggtgaagagactaatgtagttaagatgaaattggttttccttttcccatttgaatgcagcagttgttggatttgaggtgcctgtggcattacaacttcctaacagctttctggagttctcatagatgtttttttgagtgtatattgttgttaggtcagggtttctgtaacagaacaatttctagaactccc

SEQ ID NO: 32310 - DNA, 569 bp, Homo sapiens
actatcatgtgtgtattggtttgcttgattgtatcccttacgtctttttgtgtgtgattgaacttttcaaggaggtcaaccagtctccatgagagctttcagcttttggttccctctgattctttacatagtactgcacattctctctcagtgcgagaagacaataagctctgagctcttgtatgtcttcagtggtcctcagccatscaaagtatgcaggtatctcagcattctaagtcagacaagacagaaactcatccctcaggcagccttccccaaatttggattattatatgtacattccactcttctctttcctgtccaaggcagaagctgcaagtttagccctatttttttaatcacaagctatcactacttggtgaagagactaatgtagttaagatgaaattggttttccttttcccatttgaatgcagcagttgttggatttgaggtgcctgtggcattacaacttcctaacagctttctggagttctcatagatgtttttttgagtgtatattgttgttaggtcagggtttctgtaacagaacaatttctagaactccc

SEQ ID NO: 32311 - DNA, 569 bp, Homo sapiens
actatcatgtgtgtattggtttgcttgattgtatcccttacgtctttttgtgtgtgattgaacttttcaaggaggtcaaccagtctccatgagagctttcagcttttggttccctctgattctttacatagtactgcacattctctctcagtgcgagaagacaataagctctgagctcttgtatgtcttcagtggtcctcagccatgcaaagtatgcaggtatctcagcattctaagtcagacaagacagaaactcatccctcaggcagccttccccaaatttggattattatatgtacattccactcttctctttcctktccaaggcagaagctgcaagtttagccctatttttttaatcacaagctatcactacttggtgaagagactaatgtagttaagatgaaattggttttccttttcccatttgaatgcagcagttgttggatttgaggtgcctgtggcattacaacttcctaacagctttctggagttctcatagatgtttttttgagtgtatattgttgttaggtcagggtttctgtaacagaacaatttctagaactccc

SEQ ID NO: 32312 - DNA, 569 bp, Homo sapiens
actatcatgtgtgtattggtttgcttgattgtatcccttacgtctttttgtgtgtgattgaacttttcaaggaggtcaaccagtctccatgagagctttcagcttttggttccctctgattctttacatagtactgcacattctctctcagtgcgagaagacaataagctctgagctcttgtatgtcttcagtggtcctcagccatgcaaagtatgcaggtatctcagcattctaagtcagacaagacagaaactcatccctcaggcagccttccccaaatttggattattatatgtacattccactcttctctttcctgtccaaggcagaagctgcaagtttagccctatttttttaatcacaagctatcactacttggtgaagagactaatgtagttaagatgaaattggttttccttttcccatttgaatgcagcagttgttggatttgagktgcctgtggcattacaacttcctaacagctttctggagttctcatagatgtttttttgagtgtatattgttgttaggtcagggtttctgtaacagaacaatttctagaactccc

SEQ ID NO: 32313 - DNA, 634 bp, Homo sapiens
ggcttccccctccacaccaggctccaggcgtgcagagctccttctgccaagacagcctgagcagtggccatgctggggagccacctgtggagctgccgtgagcaggagctgccctcctccaggtctggctaagacttcccctgtgcccccacctctcctggcccctgcccacctgccgaagcctcaaggagacaggtgagggctgtccccaaactcctcctcagtggcagaaagctctgtgccagccggcatcagggcacctctggcatctcaccttgtaaatgagcttttgatgatttgagaagacttctaattagagcacctgtttatgatctcaactttaattgcatattaacattttttcttccttttccctttccatctggagtgggctgtctggtgatggatggggcagggaggaaggccagaagatttccttgagaackgccttggtctccccaggagggctctgctcctggcacaggccggggccccctcccctggggacccaagccatcccaagtactggggctggcaggcctggagccatcacaggccattttttcgggagcactcaatgagggtatggccaagtttgacctcagaagggagatgagtatgcaccaggctccct

SEQ ID NO: 32314 - DNA, 634 bp, Homo sapiens
ggcttccccctccacaccaggctccaggcgtgcagagctccttctgccaagacagcctgagcagtggccatgctggggagccacctgtggagctgccgtgagcaggagctgccctcctccaggtctggctaagacttcccctgtgcccccacctctcctggcccctgcccacctgccgaagcctcaaggagacaggtgagggctgtccccaaactcctcctcagtggcagaaagctctgtgccagccggcatcagggcacctctggcatctcaccttgtaaatgagcttttgatgatttgagaagacttctaattagagcacctgtttatgatctcaactttaattgcatattaacattttttcttccttttccctttccatctggagtgggctgtctggtgatggatggggcagggaggaaggccagaagatttccttgagaacggccttgstctccccaggagggctctgctcctggcacaggccggggccccctcccctggggacccaagccatcccaagtactggggctggcaggcctggagccatcacaggccattttttcgggagcactcaatgagggtatggccaagtttgacctcagaagggagatgagtatgcaccaggctccct

SEQ ID NO: 32315 - DNA, 561 bp, Homo sapiens
ttgttgagaaaatggaacgactgcagagcttagtaaagtgccaccacacatacgtggtttttgataactcgtcgcaggggcactggggagccatgggaagcgtcagatcagaaaagcagggcctgaagcccccgcccctcctcccacatctgctgggcaccgtgttgcgagaggacaagtttgaggggtatctcttggaatcatcccctttccctggcaccaaccagctgcagccccaagataggaagtttggttgtcattccartatggctggaaccccagaaactttttcctggcaatcatggctgcctccgaagggcctgcagcaacgttctctgaattgctaagcaacagtgtccgttctctcacatggagaaaattgaaacattgattcatctatttgttttgcaactagcactagcggcttcattactctgttccctggggacaccctcccacacactcgaattgaaaattaactctttttacctaggaacagccacaatgggtttttaatttggagaaagtacagaaacaatggtggggctgggtgccagaaat

SEQ ID NO: 32316 - DNA, 561 bp, Homo sapiens
ttgttgagaaaatggaacgactgcagagcttagtaaagtgccaccacacatacgtggtttttgataactcgtcgcaggggcactggggagccatgggaagcgtcagatcagaaaagcagggcctgaagcccccgcccctcctcccacatctgctgggcaccgtgttgcgagaggacaagtttgaggggtatctcttggaatcatcccctttccctggcaccaaccagctgcagccccaagataggaagtttggttgtcattccaatatggctggaaccccagaaactttttcctggcaatcatggctgcctccgaagggcctgcagcaacgttctctgaattgctaagcaacagtgtccsttctctcacatggagaaaattgaaacattgattcatctatttgttttgcaactagcactagcggcttcattactctgttccctggggacaccctcccacacactcgaattgaaaattaactctttttacctaggaacagccacaatgggtttttaatttggagaaagtacagaaacaatggtggggctgggtgccagaaat

SEQ ID NO: 32317 - DNA, 498 bp, Homo sapiens
ctaagccaacagaggctcaatggataaaggttctcttttctctgtaaacagacacagtcaagggctagtgtggtgactgcacaatttccaagggacccaggctccttctagcttgttgctgtaacatccactccagcagcttctggtccagtgtggctgctctaactccagccatcgtgtcttcatcccagccactacaaaggagagaggcacagccctccttttaagaacacttcctggaactcacacatactactttcgctcacaaaccactggccaagcagagtcacatggctagctgcagagggagctgggaagtgtcacacagctgtccaggcagctgtgcacccrggagactggggactgaggaaccagaaggaaatgggccctgggacatatagcagcctctcggtgggtttcatggctgtaacccagaccttaccctggcccgtcctctctcagcacagtatcacctgtctgtctgcccctagctgctgg

SEQ ID NO: 32318 - DNA, 871 bp, Homo sapiens
cagaaatgacgtcaagaatctttcaagtgatgaaattcttggggcgagaatgtgtggtttatacaagcagcctttacctccagcctttccagaaactcacataaaatgagtttcctccattgtgtttaccctactggggacagcaggacctttgtcctcctgctccaggatggctctctaccttccaggcatcccagttcataaacacacactgtaattcctacttttgtttgagagcattgcttggggtcccggtggtttgggagtcactgtacctttgccagcgtgaccctgccccatctgcctgtccacatcctacaccctccatcgccccactctaaagccaccttttccagggaggctcctgggagcttcgagcctcccctctttaaactctccgtgtgtgttactccttcggcactcgcccgattgcccgaggcattctttccacagccagaaactcagcacctgctactgggtgtcagccgagcctcctggaaggcaggaactgtgcctacgagcatttccaacccccttcccaattagcagggcaccttgcatagtaggtttatcaactttcagttaagccaggataatgcaggatagcaccaggggacacttcagacttcgaatcagaaagccttgagttcacatcctggagggacaccctagtagctccgtgaccttgagtgtccactttctttcctgtaatgtggggatcatcacccatatattaagtgttatgagaaaaagaaataatgaatgtaaatcacttggcatctttgtggcatttaagcatgtgcaggatgataattatcatyatcaccatggacacaagctcctgttctgggagaatagcccaaaggcacag

SEQ ID NO: 32319 - DNA, 624 bp, Homo sapiens
tccctcatggcaggacttctctttaagggaccttggctcaaacctctgcctggacatcctccaggggtgtactccgaaagtacatcgccaggactgaatggatatcgtgttctctccctgatgggggatgcccagacatggtagacagaggatgtgttggttgctctaagtgtttctgaccctgaagatttgagaataagccccagccgtcagcccctgctcaattgcagtcacccacccaggaatttccccaasccttcttgagacttcatatctgttttactttttccttcctttggaatcataacattaaaggatgatatataccaaagcactttgtgaaaggagagttagcagcaactactcagaaaaggagctaacatttagtagaacctactaaatgccaggttctgtgccaggtcctgcaatccttgccattatcagaacaggattcgtgtacccatttcacaggttggggaacagctttagggaaattaaagtccttggccaaggttgcaggtagaagtggaactttcctgtgaggttcccctgtgacccagcaatcccatctctagggatttatccaagggtataaccagaccaacatgaaaaggataattagaa

SEQ ID NO: 32320 - DNA, 624 bp, Homo sapiens
tccctcatggcaggacttctctttaagggaccttggctcaaacctctgcctggacatcctccaggggtgtactccgaaagtacatcgccaggactgaatggatatcgtgttctctccctgatgggggatgcccagacatggtagacagaggatgtgttggttgctctaagtgtttctgaccctgaagatttgagaataagccccagccgtcagcccctgctcaattgcagtcacccacccaggaatttccccaacccttcttgagacttcatatctgttttactttttccttcctttggaatcataacattaaaggatgatatataccaaagcactttgtgaaaggagagttagcagcaactactcagaaaaggagctaacatttagtagaacctactaaatgccaggttctgtgccaggtcctgcaatccttgccattatcagaacaggattcgtgtacccatttcacaggttggggaacagctttagggaaattaaagtccttggccaaggttgcaggtagaagtggaactytcctgtgaggttcccctgtgacccagcaatcccatctctagggatttatccaagggtataaccagaccaacatgaaaaggataattagaa

SEQ ID NO: 32321 - DNA, 804 bp, Homo sapiens
gctcacttgttttagctccttcctactagcaggcaaggtccatgaagactggcccatgaagactgtgtccgtgtgggcacagagggggtgctcgggagtctggcagcatgtgaaatgctcctagtgccaatctggggcttgggctggtctcattgccctccccgcacgatgaagcccactgggcatagaagggaaagactggacatctcgttgtcttccctcctgatgtgcagggatgaggctgagagagccttctaagtgtgacacagcccagagggactcaggcctctgggtgcctgtggagggctctgtggccagccaggctgaggtctgggtgtcacatcggttttgagatctgcaaagccatggtcatgtgattttcttggagctggggctgcctgcctgcttaggccaggttctctctgctcatcaacaaccacgggagggagggaagaaaggaagcgaggcaggggctggtgggaagtttgaggggctgggctgggttctctttggtattctgtgcagtgcctgcctgcaactcggtgggtgcttaataaatgtttattacgagtaacaaaaccagccttatttacactaggcctatctccaaaggctgctttccatacttaaaaataaccttaatcatctctcccaacatcctccagagacagggtcgatggctctttgccatttataaatggaaagaaaggtctagagagggacagtgagtgcctgggggtcacccgagggcccagcccggctcgcaccagatcccwtgtctccagtctctagagagcacaggca

SEQ ID NO: 32322 - DNA, 964 bp, Homo sapiens
cagtgaacccaggaaatagacacctgaacgcagttctgaaatgaaaatacaattcccatagagatgctgcataaagtactgaagaaaaaggggaattaaataggttaaattgatggtggaaaattgaatgtatatacttttaatgttataataaaataataatctcattaaatggtaaaaacaatgatatcatattgtgtgtcaatttttcacgttgatgaaattcaaaatatcctgaaattcatgatttaatttctgaaagctatcctaatgttcacaaatcctggatgtatttcaatttcatgtaattaaaaagcaatatttcaaaagacaatggatttttttggcttattcatataatggaatttccatatttaaaaagagtacttaactaatcattgaaaggtcagttaagatgtgcagtggcatgcacctgtaatcccagcactttgggaggctgaagtgcgaagatcccttgagcccaggaggtggatacttcagtgggctttgatcacaccattgtgatgtaacctgagtracagagtgaaacactgtctcaaaaaaatgaaacacaagtaaaaataaaggtcagttactattacagtaatgctaaactttgagacatctaaaatgacaacatctaaaactaggaaaacatcaagttaccaagtgttgggagttctgttgactaagataaaaattagagcaagaaattcaacatgccggaaaacactaaattgatttttcatttttttaagaagaaaattatttggtcaagggcagtggctcactcttgtaatcctaataatttgggatgcagaagcaggaggcttacttgagggttggagtttgagaccagtctgggcaacatagtgagaacctgtctacaaaaaaaaaatttaaagaattagccaagtgtcgtggcatgtgcctgttgtcttggctatttgggaggctgatatgg

SEQ ID NO: 32323 - DNA, 964 bp, Homo sapiens
cagtgaacccaggaaatagacacctgaacgcagttctgaaatgaaaatacaattcccatagagatgctgcataaagtactgaagaaaaaggggaattaaataggttaaattgatggtggaaaattgaatgtatatacttttaatgttataataaaataataatctcattaaatggtaaaaacaatgatatcatattgtgtgtcaatttttcacgttgatgaaattcaaaatatcctgaaattcatgatttaatttctgaaagctatcctaatgttcacaaatcctggatgtatttcaatttcatgtaattaaaaagcaatatttcaaaagacaatggatttttttggcttattcatataatggaatttccatatttaaaaagagtacttaactaatcattgaaaggtcagttaagatgtgcagtggcatgcacctgtaatcccagcactttgggaggctgaagtgcgaagatcccttgagcccaggaggtggatacttcagtgggctttgatcacaccattgtgatgtaacctgagtaacagagtgaaacactgtctcaaaaaaatgaaacacaagtaaaaataaaggtcagttactattacagtaatgctaaactttgagacatctaaaatgacaacatctaaaactaggaaaacatcaagttaccaagtgttgggagttctgttgactaagataaaaattagagcaagaaattcaacatgccggaaaacactaaattgatttttcatttttttaagaagaaaattatttggtcaagggcagtggctcactcttgtaatcctaataatttgggatgcagaagcaggaggcttacttgagggttggartttgagaccagtctgggcaacatagtgagaacctgtctacaaaaaaaaaatttaaagaattagccaagtgtcgtggcatgtgcctgttgtcttggctatttgggaggctgatatgg

SEQ ID NO: 32324 - DNA, 895 bp, Homo sapiens
tggttgcagcagtggcatctctgggggacatttgtctttttttctgtctgtccagtgcctttggaacaccctttcaatgtttgggaagttttatgcctcactggtcttcattccccaaggtaaattgcttttccagattctacagaggaggatgcagaattcaccatctaatgagcttgtagggaaggcatctggcagagcccaggcctgtcrtcccgagagccagctgtaggcactgggcagtgctgtgtgaactgtgctgccagtgccgtggagttgacactggagctgcccttgcgggtgctgagtgtcaccctggccacacggctggtaaacctgttccccttggagacgctgtgcactgtgaaatcttctttgaataattagtctctgcttaagatgatcagagtggaatctgtcgtttgcaactaagtgccctgactgatggactggtttgtggtctctgtgtctctttttggtgcctctattacctattttccataccacagctagagtgatcttttaaaaactcaaacctggtcttgtcactgaggatgagcccccaagttctcaagtggcccacaacatccttatggtctgtacccagtggaggtgggagcactagtaattaccctgatccttaggctttccacaaggtgaagggattttttattccactcccagagagaaacaagtgtagaaacacttcctgccgtcctctctggcccctgacttgcttcttcataggtggaggagtgaccttagttactcatggtactgtagagagcatttttgccttctttggtttttctttcaggctgtcttgcctttggccacatgtactcttttcccttcaaatggtgagcccctgcttggagtgacctgtaatttgtat

SEQ ID NO: 32325 - DNA, 895 bp, Homo sapiens
tggttgcagcagtggcatctctgggggacatttgtctttttttctgtctgtccagtgcctttggaacaccctttcaatgtttgggaagttttatgcctcactggtcttcattccccaaggtaaattgcttttccagattctacagaggaggatgcagaattcaccatctaatgagcttgtagggaaggcatctggcagagcccaggcctgtcgtcccgagagccagctgtaggcactgggcagtgctgtgtgaactgtgctgccagtgccgtggagttgacactggagctgcccttgcgggtgctgagtgtcaccctggccacacggctggtaaacctgtyccccttggagacgctgtgcactgtgaaatcttctttgaataattagtctctgcttaagatgatcagagtggaatctgtcgtttgcaactaagtgccctgactgatggactggtttgtggtctctgtgtctctttttggtgcctctattacctattttccataccacagctagagtgatcttttaaaaactcaaacctggtcttgtcactgaggatgagcccccaagttctcaagtggcccacaacatccttatggtctgtacccagtggaggtgggagcactagtaattaccctgatccttaggctttccacaaggtgaagggattttttattccactcccagagagaaacaagtgtagaaacacttcctgccgtcctctctggcccctgacttgcttcttcataggtggaggagtgaccttagttactcatggtactgtagagagcatttttgccttctttggtttttctttcaggctgtcttgcctttggccacatgtactcttttcccttcaaatggtgagcccctgcttggagtgacctgtaatttgtat

SEQ ID NO: 32326 - DNA, 895 bp, Homo sapiens
tggttgcagcagtggcatctctgggggacatttgtctttttttctgtctgtccagtgcctttggaacaccctttcaatgtttgggaagttttatgcctcactggtcttcattccccaaggtaaattgcttttccagattctacagaggaggatgcagaattcaccatctaatgagcttgtagggaaggcatctggcagagcccaggcctgtcgtcccgagagccagctgtaggcactgggcagtgctgtgtgaactgtgctgccagtgccgtggagttgacactggagctgcccttgcgggtgctgagtgtcaccctggccacacggctggtaaacctgttccccttggagacgctgtgcactgtgaaatcttctttgaataattagtctctgcttaagatgatcagagtggaatctgtcgtttgcaactaagtgccctgactgatggactggtttgtggtctctgtgtctctttttggtgcctctattacctattttccataccacagctagagtgatcttttaaaaactcaaacctggtcttgtcactgaggatgagcccccaagttctcaagtggcccacaacatccttatggtctgtacccagtggaggtgggagcactagtaattaccctgatccttaggctttccacaaggtgaagggattttttattccactcccagagagaaacaagtgtagaaacacktcctgccgtcctctctggcccctgacttgcttcttcataggtggaggagtgaccttagttactcatggtactgtagagagcatttttgccttctttggtttttctttcaggctgtcttgcctttggccacatgtactcttttcccttcaaatggtgagcccctgcttggagtgacctgtaatttgtat

SEQ ID NO: 32327 - DNA, 3016 bp, Homo sapiens
aaacagctgggagagaaggccgttgccaaatgcctcctgtgtgatcagtttcaamccactgagcatcgtctcgcttgcagctggtcgtcccatgatttcggaaacgtaatggtagatcagctatctggaatctgcccagaggtagaagagggtgttggaaaccaagtcttttcattagccaaaaccatatcacaaagaggcaatatgggtgctcctagtcgaacggctgggctgttgactgctttagtaatagacagcttaagttaaatgatagcattcacaaagttccttccatccaactatgaaacaggcccctacctgggcccaatctcctctactctgtacatcagaggccagacgagattgggagcgttcacagtggtatgggtgtaggttgttcacgatgtttctggtagcttttgcccttttaatgcttgttctctttctgtcctctgacaaacgttgtaaaacataaataaggtcaagtgcaccacagaagaccctacctaaggccctgagcagtacaaggttggtgtactttctggagttcaatgatcgcattcatgaagttccttccatccaataccctcttctacctccaggaagattccagatacctgacctagcattacatttccgaaataatgggacgatttatccagagtactcccgaataaatagcgtgaatgttcctagtcctgcttggaagcataagctaccagtgagcttgtctcaggctgtgagaatggataaggacaggtggaagcaatggtgttcttctcagccggaaccccgtgtggtcagtgtgcagcctgacactcgaaactcgttcatcttcctttctaagtcctttcacatggagtccaaccctcgggcagaaccccagattttcttcagtacttcacatgttctctcgttggcctgttccagatccctcttcatgttgcagcacaccaaggctttggattcctccagcaatattcgattacatgagacaagcttcttgatctgagccaccaatttcctgagtgaaggtccaggatccaaacagctgggagagaaggccgttgccaaatgcctcctgagtgatcagtttcaacccactgagcatcgtctcacttgcagctggtcgtcccatgatttcggaaacgtaatggtagatcagctatctggaatctgcccagaggtagaagagggtgttggaaaccaagtcttttcattagcctaaaccatatcacaaagaggcaatacggatgctcctagtcgaatggctgggccattgagtgcttcaacaatacgcagcttaagctgaacaatagcattcaggaagttccttctatccaacaatgaaacaggcccgaacctggacccaatcgcatctactctgtacttcagagaccagacaagattgggagcgttcacggtggtatgactgtagattgttcacgacgtttccagtagcttctgccgttttaatgcttgctctctctctgtcctctgtcaaatgtcgtaaaaaataaataaggccaagtgcaccacggaagaccgtaccaatggcgctgagcagtccaaggttgctgtactttctggagtcagtactcccgaataaatagcgtgaatgttcccagtcctgcttgcaagcataagctaccagtgagcttgtctcaggctgtgagaatggataaggacagatggaagcaatggtgttcttctcagccggaacccgatgtggtcagtgtgcagcctgacactcgaaactcgttcatcttcctttctaagtcctttcacatggagtccaacccttgggcagaaccccagattttcttcagtacttcacatgttctctcgttggcctgttccagatccgtcttcatgttgcagcacaccaaggctttggattcctccagcactattcgattacatgagacaagcttcttgatctgagccaccaatttcctgagtgaaggtccaggatccaaacagctgggagagaaggccgttgccaaatgcctcctgagtgatcagtttcaacccactgagcatcgtctcacttgcagctggtcgtcccatgatttcggaaacgtaatggtagatcagctatctggaatctgcccagaggtagaagagggtgttggaaaccaagtcttttcattagcctaaaccatatcacaaagaggcaatacggatgctcctagtcgaatggctgggcggctgactggtttagtaatagacagcttaagttaaatgatagcattcacaaagttccttccatccaactatgaaacaggcccctacctgggcccaatctcctctactctgtacttcagaggccagacgagattgggagcgttcacggtggtatggctgtagattgttcacgatgtttctggtagcttttgcccttttaatgcttgctctctttctgtcctctgtcaaacgttgtaaaacataaataaggtcaagtgcgccacagaagaccctacctaaggccccgagcagtacaagcttggtgtactttctggagttcaatgatcgcattcacgaagttccttccatccaatacgctcttctacctccaggaagattccagatacctgacctagcattacatttccgaaataatggaacgatttatccagagtactcccgaataaatagcgtgaatgttcccggtcctgcttacaagcataagctaccagtgagcttgtttcaggctgtgagaatggataaggacacccggaaggaatggtgttcttctcagctggaacccgatgtggtcactgtgcagcctgacactcgaaactcgttcatcttcctttctaaatcctttcacatggagtccaacccttgggcagaaccccagattttcttcagtacttcacatgttctctcgttggcctgttccagatccctcttcatgttgcagcacaccaaggctttggattcctccagcactattcgattacatgagacaagcttcttgatctgagccaccaatttcctgagtgaaggtcca

SEQ ID NO: 32328 - DNA, 3016 bp, Homo sapiens
aaacagctgggagagaaggccgttgccaaatgcctcctgtgtgatcagtttcaacccactgagcatcgtctcgcttgcagctggtcgtcccatgatttcggaaacgtaatggtagatcagctatctggaatctgcccagaggtagaagagggtgttggaaaccaagtcttttcattagccaaaaccatatcacaaagaggcaatatgggtgctcctagtcgaacggctgggctgttgactgctttagtaatagacagcttaagttaaatgatagcattcacaaagttccttccatccaactatgaaacaggcccctacctgggcccaatctcctctactctgtacatcagaggccagacgagattgggagcgttcacagtggtatgggtgtaggttgttcacgatgtttctggtagcttttgcccttttaatgcttgttctctttctgtcctctgacaaacgttgtaaaacataaataaggtcaagtgcaccacagaagaccctacctaaggccctgagcagtacaaggttggtgtactttctggagttcaatgatcgcattcatgaagttccttccatccaataccctcttctacctccaggaagattccagatacctgacctagcattacatttccgaaataatgggacgatttatccagagtactcccgaataaatagcgtgaatgttcctagtcctgcttggaagcataagctaccagtgagcttgtctcaggctgtgagaatggataaggacaggtggaagcaatggtgttcttctcagccggaaccccgtgtggtcagtgtgcagcctgacactcgaaactcgttcatcttcctttctaagtcctttcacatggagtccaaccctcgggcagaaccccagattttcttcagtacttcacatgttctctcgttggcctgttccagatccctcttcatgttgcagcacaccaaggctttggattcctccagcaatattcgattacatgagacaagcttcttgatctgagccaccaatttcctgagtgaaggtccaggatccaaacagctgggagagaaggccgttgccaaatgcctcctgagtgatcagtttcaacccactgagcatcgtctcacttgcagctggtcgtcccatgatttcggaaacgtaatggtagatcagctatctggaatctgcccagaggtagaagagggtgttggaaaccaagtcttttcattagcctaaaccatatcacaaagaggcaatacggatgctcctagtcgaatggctgggccattgagtgcttcaacaatacgcagcttaagctgaacaatagcattcaggaagttccttctatccaacaatgaaacaggcccgaacctggacccaatcgcatctactctgtacttcagagaccagacaagattgggagcgttcacggtggtatgactgtagattgttcacgacgtttccagtagcttctgccgttttaatgcttgctctctctctgtcctctgtcaaatgtcgtaaaaaataaataaggccaagtgcaccacggaagaccgtaccaatggcgctgagcagtccaaggttgctgtactttctggagtcagtactcccgaataaatagcgtgaatgttcccagtcctgcttgcaagcataagctaccagtgagcttgtctcaggctgtgagaatggataaggacagatggaagcaatggtgttcttctcagccggaacccgatgtggtcagtgtgcagcctgacactcgaaactcgttcatcttcctttctaagtcctttcacatggagtccaacccttgggcagaaccccagattttcttcagtacttcacatgttctctcgttggcctgttccagatccgtcttcatgttgcagcacaccaaggctttggattcctccagcactattcgattacatgagacaagcttcttgatctgagccaccaatttcctgagtgaaggtccaggatccaaacagctgggagagaaggccgttgccaaatgcctcctgagtgatcagtttcaacccactgagcatcgtctcacttgcagctggtcgtcccatgatttcggaaacgtaatggtagatcagctatctggaatctgcccagaggtagaagagggtgttggaaaccaagtcttttcattagcctaaaccatatcacaaagaggcaatacggatgctcctagtcgaatggctgggcggctgactggtttagtaatagacagcttaagttaaatgatagcattcacaaagttccttccatccaactatgaaacaggcccctacctgggcccaatctcctctactctgtacttcagaggccagacgagattgggagcgttcacggtggtatggctgtagattgttcacgatgtttctggtagcttttgcccttttaatgcttgctctctttctgtcctctgtcaaacgttgtaaaacataaataaggtcaagtgcgccacagaagaccctacctaaggcccygagcagtacaagcttggtgtactttctggagttcaatgatcgcattcacgaagttccttccatccaatacgctcttctacctccaggaagattccagatacctgacctagcattacatttccgaaataatggaacgatttatccagagtactcccgaataaatagcgtgaatgttcccggtcctgcttacaagcataagctaccagtgagcttgtttcaggctgtgagaatggataaggacacccggaaggaatggtgttcttctcagctggaacccgatgtggtcactgtgcagcctgacactcgaaactcgttcatcttcctttctaaatcctttcacatggagtccaacccttgggcagaaccccagattttcttcagtacttcacatgttctctcgttggcctgttccagatccctcttcatgttgcagcacaccaaggctttggattcctccagcactattcgattacatgagacaagcttcttgatctgagccaccaatttcctgagtgaaggtcca

SEQ ID NO: 32329 - DNA, 3016 bp, Homo sapiens
aaacagctgggagagaaggccgttgccaaatgcctcctgtgtgatcagtttcaacccactgagcatcgtctcgcttgcagctggtcgtcccatgatttcggaaacgtaatggtagatcagctatctggaatctgcccagaggtagaagagggtgttggaaaccaagtcttttcattagccaaaaccatatcacaaagaggcaatatgggtgctcctagtcgaacggctgggctgttgactgctttagtaatagacagcttaagttaaatgatagcattcacaaagttccttccatccaactatgaaacaggcccctacctgggcccaatctcctctactctgtacatcagaggccagacgagattgggagcgttcacagtggtatgggtgtaggttgttcacgatgtttctggtagcttttgcccttttaatgcttgttctctttctgtcctctgacaaacgttgtaaaacataaataaggtcaagtgcaccacagaagaccctacctaaggccctgagcagtacaaggttggtgtactttctggagttcaatgatcgcattcatgaagttccttccatccaataccctcttctacctccaggaagattccagatacctgacctagcattacatttccgaaataatgggacgatttatccagagtactcccgaataaatagcgtgaatgttcctagtcctgcttggaagcataagctaccagtgagcttgtctcaggctgtgagaatggataaggacaggtggaagcaatggtgttcttctcagccggaaccccgtgtggtcagtgtgcagcctgacactcgaaactcgttcatcttcctttctaagtcctttcacatggagtccaaccctcgggcagaaccccagattttcttcagtacttcacatgttctctcgttggcctgttccagatccctcttcatgttgcagcacaccaaggctttggattcctccagcaatattcgattacatgagacaagcttcttgatctgagccaccaatttcctgagtgaaggtccaggatccaaacagctgggagagaaggccgttgccaaatgcctcctgagtgatcagtttcaacccactgagcatcgtctcacttgcagctggtcgtcccatgatttcggaaacgtaatggtagatcagctatctggaatctgcccagaggtagaagagggtgttggaaaccaagtcttttcattagcctaaaccatatcacaaagaggcaatacggatgctcctagtcgaatggctgggccattgagtgcttcaacaatacgcagcttaagctgaacaatagcattcaggaagttccttctatccaacaatgaaacaggcccgaacctggacccaatcgcatctactctgtacttcagagaccagacaagattgggagcgttcacggtggtatgactgtagattgttcacgacgtttccagtagcttctgccgttttaatgcttgctctctctctgtcctctgtcaaatgtcgtaaaaaataaataaggccaagtgcaccacggaagaccgtaccaatggcgctgagcagtccaaggttgctgtactttctggagtcagtactcccgaataaatagcgtgaatgttcccagtcctgcttgcaagcataagctaccagtgagcttgtctcaggctgtgagaatggataaggacagatggaagcaatggtgttcttctcagccggaacccgatgtggtcagtgtgcagcctgacactcgaaactcgttcatcttcctttctaagtcctttcacatggagtccaacccttgggcagaaccccagattttcttcagtacttcacatgttctctcgttggcctgttccagatccgtcttcatgttgcagcacaccaaggctttggattcctccagcactattcgattacatgagacaagcttcttgatctgagccaccaatttcctgagtgaaggtccaggatccaaacagctgggagagaaggccgttgccaaatgcctcctgagtgatcagtttcaacccactgagcatcgtctcacttgcagctggtcgtcccatgatttcggaaacgtaatggtagatcagctatctggaatctgcccagaggtagaagagggtgttggaaaccaagtcttttcattagcctaaaccatatcacaaagaggcaatacggatgctcctagtcgaatggctgggcggctgactggtttagtaatagacagcttaagttaaatgatagcattcacaaagttccttccatccaactatgaaacaggcccctacctgggcccaatctcctctactctgtacttcagaggccagacgagattgggagcgttcacggtggtatggctgtagattgttcacgatgtttctggtagcttttgcccttttaatgcttgctctctttctgtcctctgtcaaacgttgtaaaacataaataaggtcaagtgcgccacagaagaccctacctaaggccccgagcagtacaagsttggtgtactttctggagttcaatgatcgcattcacgaagttccttccatccaatacgctcttctacctccaggaagattccagatacctgacctagcattacatttccgaaataatggaacgatttatccagagtactcccgaataaatagcgtgaatgttcccggtcctgcttacaagcataagctaccagtgagcttgtttcaggctgtgagaatggataaggacacccggaaggaatggtgttcttctcagctggaacccgatgtggtcactgtgcagcctgacactcgaaactcgttcatcttcctttctaaatcctttcacatggagtccaacccttgggcagaaccccagattttcttcagtacttcacatgttctctcgttggcctgttccagatccctcttcatgttgcagcacaccaaggctttggattcctccagcactattcgattacatgagacaagcttcttgatctgagccaccaatttcctgagtgaaggtcca

SEQ ID NO: 32330 - DNA, 3016 bp, Homo sapiens
aaacagctgggagagaaggccgttgccaaatgcctcctgtgtgatcagtttcaacccactgagcatcgtctcgcttgcagctggtcgtcccatgatttcggaaacgtaatggtagatcagctatctggaatctgcccagaggtagaagagggtgttggaaaccaagtcttttcattagccaaaaccatatcacaaagaggcaatatgggtgctcctagtcgaacggctgggctgttgactgctttagtaatagacagcttaagttaaatgatagcattcacaaagttccttccatccaactatgaaacaggcccctacctgggcccaatctcctctactctgtacatcagaggccagacgagattgggagcgttcacagtggtatgggtgtaggttgttcacgatgtttctggtagcttttgcccttttaatgcttgttctctttctgtcctctgacaaacgttgtaaaacataaataaggtcaagtgcaccacagaagaccctacctaaggccctgagcagtacaaggttggtgtactttctggagttcaatgatcgcattcatgaagttccttccatccaataccctcttctacctccaggaagattccagatacctgacctagcattacatttccgaaataatgggacgatttatccagagtactcccgaataaatagcgtgaatgttcctagtcctgcttggaagcataagctaccagtgagcttgtctcaggctgtgagaatggataaggacaggtggaagcaatggtgttcttctcagccggaaccccgtgtggtcagtgtgcagcctgacactcgaaactcgttcatcttcctttctaagtcctttcacatggagtccaaccctcgggcagaaccccagattttcttcagtacttcacatgttctctcgttggcctgttccagatccctcttcatgttgcagcacaccaaggctttggattcctccagcaatattcgattacatgagacaagcttcttgatctgagccaccaatttcctgagtgaaggtccaggatccaaacagctgggagagaaggccgttgccaaatgcctcctgagtgatcagtttcaacccactgagcatcgtctcacttgcagctggtcgtcccatgatttcggaaacgtaatggtagatcagctatctggaatctgcccagaggtagaagagggtgttggaaaccaagtcttttcattagcctaaaccatatcacaaagaggcaatacggatgctcctagtcgaatggctgggccattgagtgcttcaacaatacgcagcttaagctgaacaatagcattcaggaagttccttctatccaacaatgaaacaggcccgaacctggacccaatcgcatctactctgtacttcagagaccagacaagattgggagcgttcacggtggtatgactgtagattgttcacgacgtttccagtagcttctgccgttttaatgcttgctctctctctgtcctctgtcaaatgtcgtaaaaaataaataaggccaagtgcaccacggaagaccgtaccaatggcgctgagcagtccaaggttgctgtactttctggagtcagtactcccgaataaatagcgtgaatgttcccagtcctgcttgcaagcataagctaccagtgagcttgtctcaggctgtgagaatggataaggacagatggaagcaatggtgttcttctcagccggaacccgatgtggtcagtgtgcagcctgacactcgaaactcgttcatcttcctttctaagtcctttcacatggagtccaacccttgggcagaaccccagattttcttcagtacttcacatgttctctcgttggcctgttccagatccgtcttcatgttgcagcacaccaaggctttggattcctccagcactattcgattacatgagacaagcttcttgatctgagccaccaatttcctgagtgaaggtccaggatccaaacagctgggagagaaggccgttgccaaatgcctcctgagtgatcagtttcaacccactgagcatcgtctcacttgcagctggtcgtcccatgatttcggaaacgtaatggtagatcagctatctggaatctgcccagaggtagaagagggtgttggaaaccaagtcttttcattagcctaaaccatatcacaaagaggcaatacggatgctcctagtcgaatggctgggcggctgactggtttagtaatagacagcttaagttaaatgatagcattcacaaagttccttccatccaactatgaaacaggcccctacctgggcccaatctcctctactctgtacttcagaggccagacgagattgggagcgttcacggtggtatggctgtagattgttcacgatgtttctggtagcttttgcccttttaatgcttgctctctttctgtcctctgtcaaacgttgtaaaacataaataaggtcaagtgcgccacagaagaccctacctaaggccccgagcagtacaagcttggtgtactttctggagttcaatgatcgcattcacgaagttccttccatccaatacsctcttctacctccaggaagattccagatacctgacctagcattacatttccgaaataatggaacgatttatccagagtactcccgaataaatagcgtgaatgttcccggtcctgcttacaagcataagctaccagtgagcttgtttcaggctgtgagaatggataaggacacccggaaggaatggtgttcttctcagctggaacccgatgtggtcactgtgcagcctgacactcgaaactcgttcatcttcctttctaaatcctttcacatggagtccaacccttgggcagaaccccagattttcttcagtacttcacatgttctctcgttggcctgttccagatccctcttcatgttgcagcacaccaaggctttggattcctccagcactattcgattacatgagacaagcttcttgatctgagccaccaatttcctgagtgaaggtcca

SEQ ID NO: 32331 - DNA, 3016 bp, Homo sapiens
aaacagctgggagagaaggccgttgccaaatgcctcctgtgtgatcagtttcaacccactgagcatcgtctcgcttgcagctggtcgtcccatgatttcggaaacgtaatggtagatcagctatctggaatctgcccagaggtagaagagggtgttggaaaccaagtcttttcattagccaaaaccatatcacaaagaggcaatatgggtgctcctagtcgaacggctgggctgttgactgctttagtaatagacagcttaagttaaatgatagcattcacaaagttccttccatccaactatgaaacaggcccctacctgggcccaatctcctctactctgtacatcagaggccagacgagattgggagcgttcacagtggtatgggtgtaggttgttcacgatgtttctggtagcttttgcccttttaatgcttgttctctttctgtcctctgacaaacgttgtaaaacataaataaggtcaagtgcaccacagaagaccctacctaaggccctgagcrgtacaaggttggtgtactttctggagttcaatgatcgcattcatgaagttccttccatccaataccctcttctacctccaggaagattccagatacctgacctagcattacatttccgaaataatgggacgatttatccagagtactcccgaataaatagcgtgaatgttcctagtcctgcttggaagcataagctaccagtgagcttgtctcaggctgtgagaatggataaggacaggtggaagcaatggtgttcttctcagccggaaccccgtgtggtcagtgtgcagcctgacactcgaaactcgttcatcttcctttctaagtcctttcacatggagtccaaccctcgggcagaaccccagattttcttcagtacttcacatgttctctcgttggcctgttccagatccctcttcatgttgcagcacaccaaggctttggattcctccagcaatattcgattacatgagacaagcttcttgatctgagccaccaatttcctgagtgaaggtccaggatccaaacagctgggagagaaggccgttgccaaatgcctcctgagtgatcagtttcaacccactgagcatcgtctcacttgcagctggtcgtcccatgatttcggaaacgtaatggtagatcagctatctggaatctgcccagaggtagaagagggtgttggaaaccaagtcttttcattagcctaaaccatatcacaaagaggcaatacggatgctcctagtcgaatggctgggccattgagtgcttcaacaatacgcagcttaagctgaacaatagcattcaggaagttccttctatccaacaatgaaacaggcccgaacctggacccaatcgcatctactctgtacttcagagaccagacaagattgggagcgttcacggtggtatgactgtagattgttcacgacgtttccagtagcttctgccgttttaatgcttgctctctctctgtcctctgtcaaatgtcgtaaaaaataaataaggccaagtgcaccacggaagaccgtaccaatggcgctgagcagtccaaggttgctgtactttctggagtcagtactcccgaataaatagcgtgaatgttcccagtcctgcttgcaagcataagctaccagtgagcttgtctcaggctgtgagaatggataaggacagatggaagcaatggtgttcttctcagccggaacccgatgtggtcagtgtgcagcctgacactcgaaactcgttcatcttcctttctaagtcctttcacatggagtccaacccttgggcagaaccccagattttcttcagtacttcacatgttctctcgttggcctgttccagatccgtcttcatgttgcagcacaccaaggctttggattcctccagcactattcgattacatgagacaagcttcttgatctgagccaccaatttcctgagtgaaggtccaggatccaaacagctgggagagaaggccgttgccaaatgcctcctgagtgatcagtttcaacccactgagcatcgtctcacttgcagctggtcgtcccatgatttcggaaacgtaatggtagatcagctatctggaatctgcccagaggtagaagagggtgttggaaaccaagtcttttcattagcctaaaccatatcacaaagaggcaatacggatgctcctagtcgaatggctgggcggctgactggtttagtaatagacagcttaagttaaatgatagcattcacaaagttccttccatccaactatgaaacaggcccctacctgggcccaatctcctctactctgtacttcagaggccagacgagattgggagcgttcacggtggtatggctgtagattgttcacgatgtttctggtagcttttgcccttttaatgcttgctctctttctgtcctctgtcaaacgttgtaaaacataaataaggtcaagtgcgccacagaagaccctacctaaggccccgagcagtacaagcttggtgtactttctggagttcaatgatcgcattcacgaagttccttccatccaatacgctcttctacctccaggaagattccagatacctgacctagcattacatttccgaaataatggaacgatttatccagagtactcccgaataaatagcgtgaatgttcccggtcctgcttacaagcataagctaccagtgagcttgtttcaggctgtgagaatggataaggacacccggaaggaatggtgttcttctcagctggaacccgatgtggtcactgtgcagcctgacactcgaaactcgttcatcttcctttctaaatcctttcacatggagtccaacccttgggcagaaccccagattttcttcagtacttcacatgttctctcgttggcctgttccagatccctcttcatgttgcagcacaccaaggctttggattcctccagcactattcgattacatgagacaagcttcttgatctgagccaccaatttcctgagtgaaggtcca

SEQ ID NO: 32332 - DNA, 3016 bp, Homo sapiens
aaacagctgggagagaaggccgttgccaaatgcctcctgtgtgatcagtttcaacccactgagcatcgtctcgcttgcagctggtcgtcccatgatttcggaaacgtaatggtagatcagctatctggaatctgcccagaggtagaagagggtgttggaaaccaagtcttttcattagccaaaaccatatcacaaagaggcaatatgggtgctcctagtcgaacggctgggctgttgactgctttagtaatagacagcttaagttaaatgatagcattcacaaagttccttccatccaactatgaaacaggcccctacctgggcccaatctcctctactctgtacatcagaggccagacgagattgggagcgttcacagtggtatgggtgtaggttgttcacgatgtttctggtagcttttgcccttttaatgcttgttctctttctgtcctctgacaaacgttgtaaaacataaataaggtcaagtgcaccacagaagaccctacctaaggccctgagcagtacaaggttggtgtactttctggagttcaatgatcgcattcatgaagttccttccatccaataccctcttctacctccaggaagattccagatacctgacctagcattacatttccgaaataatgggacsatttatccagagtactcccgaataaatagcgtgaatgttcctagtcctgcttggaagcataagctaccagtgagcttgtctcaggctgtgagaatggataaggacaggtggaagcaatggtgttcttctcagccggaaccccgtgtggtcagtgtgcagcctgacactcgaaactcgttcatcttcctttctaagtcctttcacatggagtccaaccctcgggcagaaccccagattttcttcagtacttcacatgttctctcgttggcctgttccagatccctcttcatgttgcagcacaccaaggctttggattcctccagcaatattcgattacatgagacaagcttcttgatctgagccaccaatttcctgagtgaaggtccaggatccaaacagctgggagagaaggccgttgccaaatgcctcctgagtgatcagtttcaacccactgagcatcgtctcacttgcagctggtcgtcccatgatttcggaaacgtaatggtagatcagctatctggaatctgcccagaggtagaagagggtgttggaaaccaagtcttttcattagcctaaaccatatcacaaagaggcaatacggatgctcctagtcgaatggctgggccattgagtgcttcaacaatacgcagcttaagctgaacaatagcattcaggaagttccttctatccaacaatgaaacaggcccgaacctggacccaatcgcatctactctgtacttcagagaccagacaagattgggagcgttcacggtggtatgactgtagattgttcacgacgtttccagtagcttctgccgttttaatgcttgctctctctctgtcctctgtcaaatgtcgtaaaaaataaataaggccaagtgcaccacggaagaccgtaccaatggcgctgagcagtccaaggttgctgtactttctggagtcagtactcccgaataaatagcgtgaatgttcccagtcctgcttgcaagcataagctaccagtgagcttgtctcaggctgtgagaatggataaggacagatggaagcaatggtgttcttctcagccggaacccgatgtggtcagtgtgcagcctgacactcgaaactcgttcatcttcctttctaagtcctttcacatggagtccaacccttgggcagaaccccagattttcttcagtacttcacatgttctctcgttggcctgttccagatccgtcttcatgttgcagcacaccaaggctttggattcctccagcactattcgattacatgagacaagcttcttgatctgagccaccaatttcctgagtgaaggtccaggatccaaacagctgggagagaaggccgttgccaaatgcctcctgagtgatcagtttcaacccactgagcatcgtctcacttgcagctggtcgtcccatgatttcggaaacgtaatggtagatcagctatctggaatctgcccagaggtagaagagggtgttggaaaccaagtcttttcattagcctaaaccatatcacaaagaggcaatacggatgctcctagtcgaatggctgggcggctgactggtttagtaatagacagcttaagttaaatgatagcattcacaaagttccttccatccaactatgaaacaggcccctacctgggcccaatctcctctactctgtacttcagaggccagacgagattgggagcgttcacggtggtatggctgtagattgttcacgatgtttctggtagcttttgcccttttaatgcttgctctctttctgtcctctgtcaaacgttgtaaaacataaataaggtcaagtgcgccacagaagaccctacctaaggccccgagcagtacaagcttggtgtactttctggagttcaatgatcgcattcacgaagttccttccatccaatacgctcttctacctccaggaagattccagatacctgacctagcattacatttccgaaataatggaacgatttatccagagtactcccgaataaatagcgtgaatgttcccggtcctgcttacaagcataagctaccagtgagcttgtttcaggctgtgagaatggataaggacacccggaaggaatggtgttcttctcagctggaacccgatgtggtcactgtgcagcctgacactcgaaactcgttcatcttcctttctaaatcctttcacatggagtccaacccttgggcagaaccccagattttcttcagtacttcacatgttctctcgttggcctgttccagatccctcttcatgttgcagcacaccaaggctttggattcctccagcactattcgattacatgagacaagcttcttgatctgagccaccaatttcctgagtgaaggtcca

SEQ ID NO: 32333 - DNA, 3016 bp, Homo sapiens
aaacagctgggagagaaggccgttgccaaatgcctcctgtgtgatcagtttcaacccactgagcatcgtctcgcttgcagctggtcgtcccatgatttcggaaacgtaatggtagatcagctatctggaatctgcccagaggtagaagagggtgttggaaaccaagtcttttcattagccaaaaccatatcacaaagaggcaatatgggtgctcctagtcgaacggctgggctgttgactgctttagtaatagacagcttaagttaaatgatagcattcacaaagttccttccatccaactatgaaacaggcccctacctgggcccaatctcctctactctgtacatcagaggccagacgagattgggagcgttcacagtggtatgggtgtaggttgttcacgatgtttctggtagcttttgcccttttaatgcttgttctctttctgtcctctgacaaacgttgtaaaacataaataaggtcaagtgcaccacagaagaccctacctaaggccctgagcagtacaaggttggtgtactttctggagttcaatgatcgcattcatgaagttccttccatccaataccctcttctacctccaggaagattccagatacctgacctagcattacatttccgaaataatgggacgatttatccagagtactcccgaataaatagcgtgaatgttcctagtcctgcttggaagcataagctaccagtgagcttgtctcaggctgtgagaatggataaggacaggtggaagcaatggtgttcttctcagccggaaccccgtgtggtcagtgtgcagcctgacactcgaaactcgttcatcttcctttctaagtcctttcacatggagtccaaccctcgggcagaaccccagattttcttcagtacttcacatgttctctcgttggcctgttccagatccctcttcatgttgcagcacaccaaggctttggattcctccagcaatattcgattacatgagacaagcttcttgatctgagccaccaatttcctgagtgaaggtccaggatccaaacagctgggagagaaggccgttgccaaatgcctcctgagtgatcagtttcaacccactgagcatcgtctcacttgcagctggtcgtcccatgatttcggaaacgtaatggtagatcagctatctggaatctgcccagaggtagaagagggtgttggaaaccaagtcttttcattagcctaaaccatatcacaaagaggcaatacggatgctcctagtcgaatggctgggccattgagtgcttcaacaatacgcagcttaagctgaacaatagcattcaggaagttccttctatccaacaatgaaacaggcccgaacctggacccaatcgcatctactctgtacttcagagaccagacaagattgggagcgttcacggtggtatgactgtagattgttcacgacgtttccagtagcttctgccgttttaatgcttgctctctctctgtcctctgtcaaatgtcgtaaaaaataaataaggccaagtgcaccacggaagaccgtaccaatggcgctgagcagtccaaggttgctgtactttctggagtcagtactcccgaataaatagcgtgaatgttcccagtcctgcttgcaagcataagctaccagtgagcttgtctcaggctgtgagaatggataaggacagatggaagcaatggtgttcttctcagccggaacccgatgtggtcagtgtgcagcctgacactcgaaactcgttcatcttcctttctaagtcctttcacatggagtccaacccttgggcagaaccccagattttcttcagtacttcacatgttctctcgttggcctgttccagatccgtcttcatgttgcagcacaccaaggctttggattcctccagcactattcgattacatgagacaagcttcttgatctgagccaccaatttcctgagtgaaggtccaggatccaaacagctgggagagaaggccgttgccaaatgcctcctgwgtgatcagtttcaacccactgagcatcgtctcacttgcagctggtcgtcccatgatttcggaaacgtaatggtagatcagctatctggaatctgcccagaggtagaagagggtgttggaaaccaagtcttttcattagcctaaaccatatcacaaagaggcaatacggatgctcctagtcgaatggctgggcggctgactggtttagtaatagacagcttaagttaaatgatagcattcacaaagttccttccatccaactatgaaacaggcccctacctgggcccaatctcctctactctgtacttcagaggccagacgagattgggagcgttcacggtggtatggctgtagattgttcacgatgtttctggtagcttttgcccttttaatgcttgctctctttctgtcctctgtcaaacgttgtaaaacataaataaggtcaagtgcgccacagaagaccctacctaaggccccgagcagtacaagcttggtgtactttctggagttcaatgatcgcattcacgaagttccttccatccaatacgctcttctacctccaggaagattccagatacctgacctagcattacatttccgaaataatggaacgatttatccagagtactcccgaataaatagcgtgaatgttcccggtcctgcttacaagcataagctaccagtgagcttgtttcaggctgtgagaatggataaggacacccggaaggaatggtgttcttctcagctggaacccgatgtggtcactgtgcagcctgacactcgaaactcgttcatcttcctttctaaatcctttcacatggagtccaacccttgggcagaaccccagattttcttcagtacttcacatgttctctcgttggcctgttccagatccctcttcatgttgcagcacaccaaggctttggattcctccagcactattcgattacatgagacaagcttcttgatctgagccaccaatttcctgagtgaaggtcca

SEQ ID NO: 32334 - DNA, 3016 bp, Homo sapiens
aaacagctgggagagaaggccgttgccaaatgcctcctgtgtgatcagtttcaacccactgagcatcgtctcgcttgcagctggtcgtcccatgatttcggaaacgtaatggtagatcagctatctggaatctgcccagaggtagaagagggtgttggaaaccaagtcttttcattagccaaaaccatatcacaaagaggcaatatgggtgctcctagtcgaacggctgggctgttgactgctttagtaatagacagcttaagttaaatgatagcattcacaaagttccttccatccaactatgaaacaggcccctacctgggcccaatctcctctactctgtacatcagaggccagacgagattgggagcgttcacagtggtatgggtgtaggttgttcacgatgtttctggtagcttttgcccttttaatgcttgttctctttctgtcctctgacaaacgttgtaaaacataaataaggtcaagtgcaccacagaagaccctacctaaggccctgagcagtacaaggttggtgtactttctggagttcaatgatcgcattcatgaagttccttccatccaataccctcttctacctccaggaagattccagatacctgacctagcattacatttccgaaataatgggacgatttatccagagtactcccgaataaatagcgtgaatgttcctagtcctgcttggaagcataagctaccagtgagcttgtctcaggctgtgagaatggataaggacaggtggaagcaatggtgttcttctcagccggaaccccgtgtggtcagtgtgcagcctgacactcgaaactcgttcatcttcctttctaagtcctttcacatggagtccaaccctcgggcagaaccccagattttcttcagtacttcacatgttctctcgttggcctgttccagatccctcttcatgttgcagcacaccaaggctttggattcctccagcaatattcgattacatgagacaagcttcttgatctgagccaccaatttcctgagtgaaggtccaggatccaaacagctgggagagaaggccgttgccaaatgcctcctgagtgatcagtttcaacccactgagcatcgtctcacttgcagctggtcgtcccatgatttcggaaacgtaatggtagatcagctatctggaatctgcccagaggtagaagagggtgttggaaaccaagtcttttcattagcctaaaccatatcacaaagaggcaatacggatgctcctagtcgaatggctgggccattgagtgcttcaacaatacgcagcttaagctgaacaatagcattcaggaagttccttctatccaacaatgaaacaggcccgaacctggacccaatcgcatctactctgtacttcagagaccagacaagattgggagcgttcacggtggtatgactgtagattgttcacgacgtttccagtagcttctgccgttttaatgcttgctctctctctgtcctctgtcaaatgtcgtaaaaaataaataaggccaagtgcaccacggaagaccgtaccaatggcgctgagcagtccaaggttgctgtactttctggagtcagtactcccgaataaatagcgtgaatgttcccagtcctgcttgcaagcataagctaccagtgagcttgtctcaggctgtgagaatggataaggacagatggaagcaatggtgttcttctcagccggaacccgatgtggtcagtgtgcagcctgacactcgaaactcgttcatcttcctttctaagtcctttcacatggagtccaacccttgggcagaaccccagattttcttcagtacttcacatgttctctcgttggcctgttccagatccgtcttcatgttgcagcacaccaaggctttggattcctccagcactattcgattacatgagacaagcttcttgatctgagccaccaatttcctgagtgaaggtccaggatccaaacagctgggagagaaggccgttgccaaatgcctcctgagtgatcagtttcaacccactgagcatcgtctcrcttgcagctggtcgtcccatgatttcggaaacgtaatggtagatcagctatctggaatctgcccagaggtagaagagggtgttggaaaccaagtcttttcattagcctaaaccatatcacaaagaggcaatacggatgctcctagtcgaatggctgggcggctgactggtttagtaatagacagcttaagttaaatgatagcattcacaaagttccttccatccaactatgaaacaggcccctacctgggcccaatctcctctactctgtacttcagaggccagacgagattgggagcgttcacggtggtatggctgtagattgttcacgatgtttctggtagcttttgcccttttaatgcttgctctctttctgtcctctgtcaaacgttgtaaaacataaataaggtcaagtgcgccacagaagaccctacctaaggccccgagcagtacaagcttggtgtactttctggagttcaatgatcgcattcacgaagttccttccatccaatacgctcttctacctccaggaagattccagatacctgacctagcattacatttccgaaataatggaacgatttatccagagtactcccgaataaatagcgtgaatgttcccggtcctgcttacaagcataagctaccagtgagcttgtttcaggctgtgagaatggataaggacacccggaaggaatggtgttcttctcagctggaacccgatgtggtcactgtgcagcctgacactcgaaactcgttcatcttcctttctaaatcctttcacatggagtccaacccttgggcagaaccccagattttcttcagtacttcacatgttctctcgttggcctgttccagatccctcttcatgttgcagcacaccaaggctttggattcctccagcactattcgattacatgagacaagcttcttgatctgagccaccaatttcctgagtgaaggtcca

SEQ ID NO: 32335 - DNA, 3016 bp, Homo sapiens
aaacagctgggagagaaggccgttgccaaatgcctcctgtgtgatcagtttcaacccactgagcatcgtctcgcttgcagctggtcgtcccatgatttcggaaacgtaatggtagatcagctatctggaatctgcccagaggtagaagagggtgttggaaaccaagtcttttcattagccaaaaccatatcacaaagaggcaatatgggtgctcctagtcgaacggctgggctgttgactgctttagtaatagacagcttaagttaaatgatagcattcacaaagttccttccatccaactatgaaacaggcccctacctgggcccaatctcctctactctgtacatcagaggccagacgagattgggagcgttcacagtggtatgggtgtaggttgttcacgatgtttctggtagcttttgcccttttaatgcttgttctctttctgtcctctgacaaacgttgtaaaacataaataaggtcaagtgcaccacagaagaccctacctaaggccctgagcagtacaaggttggtgtactttctggagttcaatgatcgcattcatgaagttccttccatccaataccctcttctacctccaggaagattccagatacctgacctagcattacatttccgaaataatgggacgatttatccagagtactcccgaataaatagcgtgaatgttcctagtcctgcttggaagcataagctaccagtgagcttgtctcaggctgtgagaatggataaggacaggtggaagcaatggtgttcttctcagccggaaccccgtgtggtcagtgtgcagcctgacactcgaaactcgttcatcttcctttctaagtcctttcacatggagtccaaccctcgggcagaaccccagattttcttcagtacttcacatgttctctcgttggcctgttccagatccctcttcatgttgcagcacaccaaggctttggattcctccagcaatattcgattacatgagacaagcttcttgatctgagccaccaatttcctgagtgaaggtccaggatccaaacagctgggagagaaggccgttgccaaatgcctcctgagtgatcagtttcaacccactgagcatcgtctcacttgcagctggtcgtcccatgatttcggaaacgtaatggtagatcagctatctggaatctgcccagaggtagaagagggtgttggaaaccaagtcttttcattagcctaaaccatatcacaaagaggcaatacggatgctcctagtcgaatggctgggccattgagtgcttcaacaatacgcagcttaagctgaacaatagcattcaggaagttccttctatccaacaatgaaacaggcccgaacctggacccaatcgcatctactctgtacttcagagaccagacaagattgggagcgttcacggtggtatgactgtagattgttcacgacgtttccagtagcttctgccgttttaatgcttgctctctctctgtcctctgtcaaatgtcgtaaaaaataaataaggccaagtgcaccacggaagaccgtaccaatggcgctgagcagtccaaggttgctgtactttctggagtcagtactcccgaataaatagcgtgaatgttcccagtcctgcttgcaagcataagctaccagtgagcttgtctcaggctgtgagaatggataaggacagatggaagcaatggtgttcttctcagccggaacccgatgtggtcagtgtgcagcctgacactcgaaactcgttcatcttcctttctaagtcctttcacatggagtccaacccttgggcagaaccccagattttcttcagtacttcacatgttctctcgttggcctgttccagatccgtcttcatgttgcagcacaccaaggctttggattcctccagcactattcgattacatgagacaagcttcttgatctgagccaccaatttcctgagtgaaggtccaggatccaaacagctgggagagaaggccgttgccaaatgcctcctgagtgatcagtttcaacccactgagcatcgtctcacttgcagctggtcgtcccatgatttcggaaacgtaatggtagatcagctatctggaatctgcccagaggtagaagagggtgttggaaaccaagtcttttcattagcctaaaccatatcacaaagaggcaatacggatgctcctagtcgaatggctgggcggctgactggtttagtaatagacagcttaagttaaatgatagcattcacaaagttccttccatccaactatgaaacaggcccctacctgggcccaatctcctctactctgtacttcagaggccagacgagattgggagcgttcacggtggtatggctgtagattgttcacgatgtttctggtagcttttgcccttttaatgcttgctctctttctgtcctctgtcaaacgttgtaaaacataaataaggtcaagtgcgccacagaagaccctacctraggccccgagcagtacaagcttggtgtactttctggagttcaatgatcgcattcacgaagttccttccatccaatacgctcttctacctccaggaagattccagatacctgacctagcattacatttccgaaataatggaacgatttatccagagtactcccgaataaatagcgtgaatgttcccggtcctgcttacaagcataagctaccagtgagcttgtttcaggctgtgagaatggataaggacacccggaaggaatggtgttcttctcagctggaacccgatgtggtcactgtgcagcctgacactcgaaactcgttcatcttcctttctaaatcctttcacatggagtccaacccttgggcagaaccccagattttcttcagtacttcacatgttctctcgttggcctgttccagatccctcttcatgttgcagcacaccaaggctttggattcctccagcactattcgattacatgagacaagcttcttgatctgagccaccaatttcctgagtgaaggtcca

SEQ ID NO: 32336 - DNA, 665 bp, Homo sapiens
tccaaacagctgggagagaaggccgttgccaaatgcctcctgtgtgatcagtttcaacccactgagcatcgtctcacttgcagctggtcgtcccatgatttcggaaacgtaatggtagatcagctatctggaatctgcccagaggtagaagagggtgttggaaaccaagtcttttcattagcctaaaccataacacaargaggcaatacggatgctcctggtcgaatggctgggccattgagtgcttcaacaatacgcagcttaagcggaacaaagcattcaggaagttccttctatccaacaatgaaacaggccccaacctgggcccaatcgcatctactctgtacttcagagaccaaacaatattgggagcgttcacggtggtatgactgtagattgttcaggacgtttccagtagcttctgccgtttttatgcttgctctctctctgcactctgtcaaatgtcgtaaaaaataaataaggccaagtgcaccacggaagaccgtaccaatggcgctgagcagtccaaggttgctgtactttctggagtcagtactcccgaataaatagcgtgaatgttcccagtcctgctggcaagcataagctaccagtgagcttgtttcaggctgtgagaatggataaggacagatggaagcaatggtgtt

SEQ ID NO: 32337 - DNA, 1645 bp, Homo sapiens
tggtagatcagctatctggaatctgcccagaggtagaagagggtgttggaaaccaagtcttttcattagcctaaaccatatcacaaagaggcaatacggatgctcctagtcgaatggctgggccattgagtgcttcaacaatacgcagcttaagctgaacaaagcattcaggaagttccttctatccaacaatgaaacaggcccgaacctgggcccaattgcatctactctgtacttcagagaccaggcaagattgggagcgttgacggtggtatgactgtagattgctcacgacgtttccagtagcttctgccgttttaatgtttgctctctctctgccctctgtcaaatgtcgtaaaaaataaataaggccaagtgcaccacggaagaccctaccaatggcgccgagcagtccaagcttcctgtactttccggagtcagtactcccgaataaatagcgtgaatgttcctagtcctgcttggaagcataagctaccagtgagcttgtctcaggctgtgagaatggataaggacaggtggaagcaatggtgttcttctcagccggaaccccatgtggtcagtgtgcagcctgacactcgaaactcgttcatcttcctttctaagtcctttcacatggagtccaaccctcgggcagaaccccagattttcttcagtacttcacatgttctctcgttggcctgttccagatccctcttcatgttgcagcacaccaaggctttggattcctccagcactattcgattacatgagacaagcttcttgatctgagccaccaatttcctgagtgaaggtccaggatccaaacagctgggagagaaggccgttgccaaatgcctcctgtgtgatcagtttcaacccactgagcatcgtctcacttgcagctggtcgtcccatgatttcggaaacgtaatggtagatcagctatctggaatctgcccagaggtagaagagggtgttggaaaccaagtcttttcattagcctaaaccataacacaaggaggcaatacggatgctcctggtcgaatggctgggccattgagtgcttcaacaatacgcagcttaagckgaacaatagcattcaggaagttccttctatccaacaatgaaacaggccccaacctgggcccaatcgcatctactctgtacttcagagaccagacaatattgggagcgttcacggtggtatgactgtagattgttcaggacgtttccagtagcttctgccgtttttatgcttgctctctctctgcactctgtcaaatgtcgtaaaaaataaataaggccaagtgcaccacggaagaccgtaccaatggcgctgagcagtccaaggttgctgtactttctggagtcagtactcccgaataaatagcgtgaatgttcccagtcctgcttgcaagcataagctaccagtgagcttgtttcaggctgtgagaatggataaggacagatggaagcaatggtgttcttctcagccggaacccgacgtggtcagtgtgcagcctgacaatggaaactcattcatcttcctttctaagtcctttcacgtggagtccaacccttgggcacaaccccagattttcttcagtacttcacatgttctctcgttggcctgttccagatgcct

SEQ ID NO: 32338 - DNA, 567 bp, Homo sapiens
aatccaaaatgaatttaactataagtgttttttttcaatagtcaaagaagatcaatagaatcagtcatctgaaatctgaaacaaatgcttaaacaatgtgtaatgatttttcacagggtctgagcatatgacaacagccacttatataatggcttcaatttgtgtccacatttttytctcacacacatacacagagatagaaaaatggaagaaataaatcattattttggctatgaaaatatttggttagaaaagtatgagaaagacactaaacaattattttacaaaatgcaaaagagagattttcagtgaagtccccagacaatttcccatgagatgcagcacctttctaatggtattggagattcaccgattcgaagttaacaccattgaaagagtattggtggataaaatggtggaaaggatgtgtagatggttatatggccaaatgttcaattttagaatagtggagattttagaagaggctacaagagtcatggtctgacaaatgccattacaaagaaaatatagactcaagttcctggaccaatagttagaaatgcgaga

SEQ ID NO: 32339 - DNA, 604 bp, Homo sapiens
tgcgtacttacgtaacaaacctgcacattgtgcacgttttgcaaatgtaccctagaacttatartattaaaaaaatgttatctagttcattctcctaaccaatggggaacaatggaatatttctaattcagtgcatctatctacagtgcctctttctaattattagagagttctacattatttttagttaatttattttctattaatgttttctcacttgtcaaagctttgctgtctgcaacaacatagcttaagtatccttcactctgcagaaccttaaaatattgaataaaacaattatttctccaaaaaaaatacaagttctgttgccagaaaagtgaaggctaggcccagatgacaagaacgagtccaagtatgaaaatggacaagcatgacaatttagttgaattttttttcattttgatctatagtagaaatagaaaaaaactcgattaaaaatctgtattaaaaataataaaagaagctctttaatgcccctgtagttccttgctgaagcatacttgaagttttgtatacagatgctcctaggcttatgatgagattatgtcacaacaaacccacactaagtgaaagatacagtaag

SEQ ID NO: 32340 - DNA, 1305 bp, Homo sapiens
tattaatatttttaaatcaggtgtgtgccaccacgctcagctaatttttgcattttttgtagagacagggttttaccatgtttccgggctggtcataaacttctgtgctcaagggatccacccgccgtagcctcccaaattgctgggattacatagcttctaattcctttttttggtatttgtcattatcttcttttccattctcttttttcttgtcagtttttaattttctataattttctttacattcacagaaagattaaaaaattttagcatttatgtcaatggatctttttatttgctattttggactgctataagattgtttatatttatataatagaatgtaaattgttctttttttcagtgtttgtgatgttttagatagagcatggataaatattttaattttaatatttatgaccttattttaatggatgctaattttttttwaattttattattattatacttgaagttttagggtacatgtgcacaacgtgcacgtttgttacatatgtatacatgtgccatgttggtgtgctgcacccattaactcgtcatttagcattaggtatatctcctaatgctatccctcccccctccccccaccccacaacagtccccagtgtgtgatgttccccttcctgtgtccaagtgttctcattgttcgattcccacctatgagtgagaacatgcagtgtttgattttttgtccttgtgatagtttgctgagaatgatggtttccagtttcatccatgtccctacaaaggacatgagctcatcattttttatggctgcatagtattaatggatactaatttttatctattacttattgcaaatgactctggtttatgtatacaactatgatatacattttattttctatatggattatagttaaacagtcagttggcttaaaatttaaaaactaaataatagtacatgcagtttgctgatatggcaaaattcattaaggtgatttgcaaatgatgataactttagaaacatatgaaagcttagttttataaagagattcctttccctgaaaacaattcctctttcgtgaacatctctctgttccttggacactaatactttgtatacaaacaaccaaagaaataaatatctgcttctcatgctgtatagcatggtcatctcagtggtagaacttatggtggttaacaccgatattagctgttaagcaataaataattgccaaattgctaacactttgatgtaaataaaattaccaatcctttttcagtctgatcggctatgagcaaagacatgttaaaaac

SEQ ID NO: 32341 - DNA, 1305 bp, Homo sapiens
tattaatatttttaaatcaggtgtgtgccaccacgctcagctaatttttgcattttttgtagagacagggttttaccatgtttccgggctggtcataaacttctgtgctcaagggatccacccgccgtagcctcccaaattgctgggattacatagcttctaattcctttttttggtatttgtcattatcttcttttccattctcttttttcttgtcagtttttaattttctataattttctttacattcacagaaagattaaaaaattttagcatttatgtcaatggatctttttatttgctattttggactgctataagattgtttatatttatataatagaatgtaaattgttctttttttcagtgtttgtgatgttttagatagagcatggataaatattttaattttaatatttatgaccttattttaatggatgctaattttttttaaattttattattattatacttgaagttttagggtacatgtgcacaacgtgcasgtttgttacatatgtatacatgtgccatgttggtgtgctgcacccattaactcgtcatttagcattaggtatatctcctaatgctatccctcccccctccccccaccccacaacagtccccagtgtgtgatgttccccttcctgtgtccaagtgttctcattgttcgattcccacctatgagtgagaacatgcagtgtttgattttttgtccttgtgatagtttgctgagaatgatggtttccagtttcatccatgtccctacaaaggacatgagctcatcattttttatggctgcatagtattaatggatactaatttttatctattacttattgcaaatgactctggtttatgtatacaactatgatatacattttattttctatatggattatagttaaacagtcagttggcttaaaatttaaaaactaaataatagtacatgcagtttgctgatatggcaaaattcattaaggtgatttgcaaatgatgataactttagaaacatatgaaagcttagttttataaagagattcctttccctgaaaacaattcctctttcgtgaacatctctctgttccttggacactaatactttgtatacaaacaaccaaagaaataaatatctgcttctcatgctgtatagcatggtcatctcagtggtagaacttatggtggttaacaccgatattagctgttaagcaataaataattgccaaattgctaacactttgatgtaaataaaattaccaatcctttttcagtctgatcggctatgagcaaagacatgttaaaaac

SEQ ID NO: 32342 - DNA, 531 bp, Homo sapiens
agaaacttaactttaagctagtaagtggagaattccaaaacttaacatggttaacaactacatcatactgccacttcaaaagaagagtaaagtattgctagcactatcttacctatattcttttgattcatattgggttaaccagtgtttgctgagatgctattgtgttacatatatcgtaaaataatactctaagaactattatgaataaaagttgagcctccaaaatcagaaaacactgaaatctgaaacgcttgaagaaacaaaacttattgagcaccaacattatgctcaaaggaaatactgactggagcattttagattttggattttcagatttgggatgctcaatcaatatagtgccaatattccaaaatccaaaatctgaaacacttcttatcccaagcattttgtataagggatactcagtctgtgtaatgattaastgaacatagatctagcactcaataaacttagattccaacagaaaagataaaccatatcaaattaaactattagatagatagatat

SEQ ID NO: 32343 - DNA, 495 bp, Homo sapiens
aatgggaatctcagaaaaattgacctttaaatgatttggcttctgtctgaaacatgggtttaaagatgttaataaaagcagaaatgtcttatgacctataagaaataaactcttttgaacttaaggtgacgcttgttttattgttattttatttaaacgaagatgttaggttagaaaagtattttaaaatctatagtccaaaagagtaaaatttagacaaatatcattttgcaatatactaaaattaaagaatatttttaaagtatcaagtaaaagatttaaaatctaatcagtgtaataaaaagtggagttaattaatttatattgctgaacatctgtttctagttataataaagttggagtggttgcagagtgtattttcgcttttagatcatctaaaatcagatgctttgaaaaatttcaagyatagtgaatttgatgatggatacaacagtctcaagaaaaaatagcattttgtattatttgtactgttca

SEQ ID NO: 32344 - DNA, 1975 bp, Homo sapiens
aaggaaaatgaaccttagtaatccactggcattttataatcttaagcaaaagattcttcctgtggggtcagggatatttgccttatttgtaaaagcttttcagatataaagttgattctaggtcttccttctccaaaatctctatggcagagtacattcttcatgccccctttttttatgcctcactacagacagctacaatatctgtgaatttatgatccctggcaaggcaaaaatcacccgtctgtagccatactgttctactaaatatgaygaaagaactatatttttagttttctcagaaacaatcaacactaaacgtgatttttgtccacagtgtaccctcagcaaggcttctatgacagaaggacatttttataagggaatctatgaatatgacagcagcaataaacagctgaaaataatctatgaggcgtttgcaaattacccctcatgagctgtagtggttgtgaaagataatttgtggttctcacagaataccctgcaaattgggtctttcatctgcaatgttttttacagttaaaacatttcatttctcatattaacaaatgataactctgcatttgttaatgtaaacaatttgatttatatttttttctgtgctgagaagctgttgacatttcagggtaagtaattattttcattgccaactgctgtttgtggtgactgtaggcaaaagatagaaatctgaatataagtatgcatcattttaatcattttccttaaagactgcccataaagcaggaagtctgtttgcctgagttatcatctgtacttagaaatctaaaaggatataagtgttgacaagcaaggattctagtcacgttcagggttttctgtggtggatcagaaactccctcatgtaatctctgtgggtagggggactgggttgactccactgtcaccaaacctctggcagggccagtgcacttgctgactgaaatcactgcattaaaacgaagcatgcgttattgactcagtagctctcagctaatgtaatatccgttcaagtggctcatggggtggtgtcagattacacaagaacgccttgcactgtgtctggtacacggtacacggtgtgagctctggaaacatttggtgaaactgtgacaaggtataaaaacgtataattcctttctcacactgccttcttggccaagcatcctcagtccagggccatggaaagaaaggttttttcacttggaaagtagtcactacgtccataaagaaggatattgagccatgtccactgagtggcccatggagaggaggtgccagggcctgggacagagctgatgggtcagcaggctttccttggggtctttctttgatctacaatttaaggtatttcagtttctttcgatattcagaaaaaaattaccatcgaaatttaaactttgtcccctagaaaaatcatctagcaaaattgctgctccagaaaggtggtccatctttagcctctgggtgtgtggggcccacactagctatgaagcaccatggcaggtgtagattgtctctgtgattattagaggtgcatccgtgtgagacctgcacagtaggaagtgataggttcacccgtttccctgcatctatcccatacacatgtgaaccttccattcacatttcagttagagaatggactactgatttaggatccaaaccaatcattacatggcctgaaggagtgaatgtagagccagtaccctgagtagcaaatgtgttttatcctttgaaccaactccagttgattagttctggttgcctacagtgctgtcttaaggcatctgtggtgctgagctaggaagagtgctgagattgattagcaatgtctgtcatggcctctggagggacagctggccctatatttgccattctctgcttttaacatgtccataacttctctgtcctctcttcttgtgtaaaatgattttaatactaacaggtgactgtgagc

SEQ ID NO: 32345 - DNA, 569 bp, Homo sapiens
gtgagccacagagaggtcacgggacagctggcttgtgtcagtggcaaaacttgaacatcgatatcgtggtttacctctttacctggggctgtctccttttcggtctatgtaaacctacaggcagttaagagcagcagttttcaatgtggggagttggaggagaggtcacaaaatccatttagtggttcatgagcaacatagcaacgaaatctactaaaataggagatagagaggggctcatcagagtaagatgtatttcttacatggctcaaagtcaaaacagtttggaaaacattgagcttgggcatctgcctcaagcaaackcaagtccgaatcctgatgctttaagctactgaaaggtgtctgacactaagtgaaaatgagcaagatggtaatgaggatgacgatgatacagatactgttgactgtggtgttgatgatgatggaggatagctagcatgtattgagtgcttgggaggcaccagacactcttctaaatattgactcgtcagtcttcactacaacttaatgggatgggtgctggcattagttccatttttcagaagagg

SEQ ID NO: 32346 - DNA, 550 bp, Homo sapiens
gtacttgccgaggagaatttcttgatggtaggtagcatgttcattcaaagtaaactccagatctccagcttctgtgtcattaggatgacagtgggcatacaaggaaattgcaggtttgttttaggcaaacacaaactgaaatgtgcccttctccagagagactgagattttcatccccctaatccccctggggaattagagttagctgtatctgcaggtgctgtgtttgggaccaggggaaagccaaaatattrtatgactgagagtcttgaattgtcaaagaagtcccgtttctggctttttccatttctctcactttttaggagtgtcagcagctgtctgtggatggctaggggctttcattggtggcatttggcctaaagggctggcaactaccaaaaagccctctttgaagacagatgctgacataaaaacaaggcccgagggtgtgtctggcacatggtttattctgatcactttggagccattggttgatgggtgggtgatatgctccaagcaccatcctggtattggctgggtttactaaaga

SEQ ID NO: 32347 - DNA, 641 bp, Homo sapiens
ggaaaacgaaagtcagggagattacgtgatttatcctaaaagatatgattgaataatggcagagccagagttagaagcaaggtttcctgacttctactctagtgttctctatataataccttcctttttgattataatgcatttgtaaaaaaatcaatgtgtcaaattttaggatacatataaataattatttttcagtatgatatacatcataaagtatggatttacgtaaatgacccacccaatatttattttatatagtcaaacataattttcattttataaaaatatttatatttataaaatatttacgttttttatattatgtataatttatttttgtatatttaaaatatttataattacaaaataacttcaaaagcttttttaaagatggtgcaaattagttttgccaaagaataagctaggttgagtattgggattcactcaggatagtggcagaaatattagggaaaaatattagttatgacagccacaaaatcgttttggaaggctgttttcacatgacttcggtaatggacccattacctttagttaaatagattagagtagtaaacaatgggaggtgaggaagttayatagttaagcttgtttactcatatggtcttaagatgagcctt

SEQ ID NO: 32348 - DNA, 871 bp, Homo sapiens
attcttcacttcttgttgcattatctagccactgctggttaccctattaaagttagtgacttagctcaccccaaaattaactaactatacataccaattagttcaccactttttactgaactgactcctaagtttaacacaagaataaaaattaaataaacaagattcgtgcttagaaaaatcaggttattgtctggtacaaatgtaagtcatgctgcattatcactcaaactgactcaagttgtttttggttttgttttatatactatatatatactgagaacctactatgtgtcaatcatatcatatttcctaatttggcctgatagtagtacaataaagcatgtgttattaacttgatattacaaattaggaaatggagtctccaggaggttaagtaatacwatcaaggtcatattgggattccagtttgggttggctgtctgacaatggctagctagtgttgttcaccatctagtaatctgaatcccctttttctaaaattcacaaaaattggcccatccccgccccaggctgtatggtgttcaggtattaccacagaactcctgtagacaaagccagatgcctgtcctccagaaagacatttcctgaatgatctcttttcacacaacaaatgtggaggcaaaaaaatactgagaaacaaattatagagaaagtaatggtgagaagaataaaattctccaaataagaataactgaggcctgaggatcaagactccataaaacaggataagaagtatatagaagaagaataagcatgagtcctttgaagcgtctttaagaagtaagctctgggccaggcgcggtggctcacacctgtaatcccagcactttgggaggccgagacgggt

SEQ ID NO: 32349 - DNA, 871 bp, Homo sapiens
attcttcacttcttgttgcattatctagccactgctggttaccctattaaagttagtgacttagctcaccccaaaattaactaactatacataccaattagttcaccactttttactgaactgactcctaagtttaacacaagaataaaaattaaataaacaagattcgtgcttagaaaaatcaggttattgtctggtacaaatgtaagtcatgctgcattatcactcaaactgactcaagttgtttttggttttgttttatatactatatatatactgagaacctactatgtgtcaatcatatcatatttcctaatttggcctgatagtagtacaataaagcatgtgttattaacttgatattacaaattaggaaatggagtctccaggaggttaagtaatactatcaaggtcatattgggattccagtttgggttggctgtctgacaatggctagctagtgttgttcaccatctagtaatctgaatcccctttttctaaaattcacaaaaattggcccatccccgccccaggctgtatggtgttcaggtattaccacagaactcctgtagacaaagccagatgcctgtcctccagaaagacatttcctgaatgatctcttttcacacaacaaatgtggaggcaaaaaaatactgagaaayaaattatagagaaagtaatggtgagaagaataaaattctccaaataagaataactgaggcctgaggatcaagactccataaaacaggataagaagtatatagaagaagaataagcatgagtcctttgaagcgtctttaagaagtaagctctgggccaggcgcggtggctcacacctgtaatcccagcactttgggaggccgagacgggt

SEQ ID NO: 32350 - DNA, 871 bp, Homo sapiens
attcttcacttcttgttgcattatctagccactgctggttaccctattaaagttagtgacttagctcaccccaaaattaactaactatacataccaattagttcaccactttttactgaactgactcctaagtttaacacaagaataaaaattaaataaacaagattcgtgcttagaaaaatcaggttattgtctggtacaaatgtaagtcatgctgcattatcactcaaactgactcaagttgtttttggttttgttttatatactatatatatactgagaacctactatgtgtcaatcatatcatatttcctaatttggcctgatagtagtacaataaagcatgtgttattaacttgatattacaaattaggaaatggagtctccaggaggttaagtaatactatcaaggtcatattgggattccagtttgggttggctgtctgacaatggctagctagtgttgttcaccatctagtaatctgaatcccctttttctaaaattcacaaaaattggcccatccccgccccaggctgtatggtgttcaggtattaccacagaactcctgtagacaaagccagatgcctgtcctccagaaagacatttcctgaatgatctcttttcacacaacaaatgtggaggcaaaaaaatactgagaaacaaattatagagaaagtaatrgtgagaagaataaaattctccaaataagaataactgaggcctgaggatcaagactccataaaacaggataagaagtatatagaagaagaataagcatgagtcctttgaagcgtctttaagaagtaagctctgggccaggcgcggtggctcacacctgtaatcccagcactttgggaggccgagacgggt

SEQ ID NO: 32351 - DNA, 672 bp, Homo sapiens
gcccacttgcccacacattctttcctcaataaaatcactacaggcaaacatctgtccccagtacttatgtgcaacccctctttgagtatctatttcctcataacagcaatgacgatttcacagttttagagataatttaaatatgataatatacagcatgtcacatacttcctgacacaaagtaaataaagatgtggcgttacggctcctgtaggaaactggagggatattaccccaccaagttttatctacctaccatcaccttcctttagtctttcctttcaccactgagtttctgaaacaactattttatgcctgccatagtctcttcctttccagacactgttcttagctgctgtaatttgctttttatttcccatcaacamcctgattctttcatttgaaattaggctgataattaaggcctactattatgtgttcccttacatctggggcaaacccaaagtgctccaaatggcctaactgcaagttcccctccttattctcctataagattccttacgggacatcttattcccaggagcaggaataagatctcctagccaaatcaccccccttttcatggggaccaggcacccatccctgcttattgctgagcagcaggcttggttccttgcctgcttgaattactcaagcaagaccatcactttt

SEQ ID NO: 32352 - DNA, 672 bp, Homo sapiens
gcccacttgcccacacattctttcctcaataaaatcactacaggcaaacatctgtccccagtacttatgtgcaacccctctttgagtatctatttcctcataacagcaatgacgatttcacagttttagagataatttaaatatgataatatacagcatgtcacatacttcctgacacaaagtaaataaagatgtggcgttacggctcctgtaggaaactggagggatattaccccaccaagttttatctacctaccatcaccttcctttagtctttcctttcaccactgagtttctgaaacaactattttatgcctgccatagtctcttcctttccagacactgttcttagctgctgtaatttgctttttatttcccatcaacaacctgattctttcatttgaaattaggctgataattaaggcctactattatgtgttcccttacatctggggcaaacccaaagtgctccmaatggcctaactgcaagttcccctccttattctcctataagattccttacgggacatcttattcccaggagcaggaataagatctcctagccaaatcaccccccttttcatggggaccaggcacccatccctgcttattgctgagcagcaggcttggttccttgcctgcttgaattactcaagcaagaccatcactttt

SEQ ID NO: 32353 - DNA, 529 bp, Homo sapiens
  misc_feature (1)...(529): n = A,T,C or G
caaattttcctttgaatttcaggtcaataggccgggcgtgngcgcacgcctgtaatcccagcactttgggaggctgaggtgggtggatcacctgaggtcaggagtttgagaccagcctggccaacatggtgaaaccctgtctctactaaaaatacaaaaattagccaggtgtggtggtacgtgtctgtaatcccagctacttgggaggctgaggcacaagaatcgcttgaacccgggaggcggaggttgcaatgagctgagattgcgatgttgcaatccagcctggaggatagagcgagactgtctcaaaaaaaaacaaaaacaaaaacaaagcatttcaggtcaatatagcaaggaatcctcttccttgaaagcacaccgcctgggtgtaccatcatgcctctgatccagctgggtgctgtygggatcgccttcctgactgtcttcccctccacaattctccctcccctgcaggtctctgatcaggctgtcccctccaatgctgaaccccaccccctagaccctgcac

SEQ ID NO: 32354 - DNA, 590 bp, Homo sapiens
gcagaaaagctctgccaaactgagtgctctgatgtgactttttcatcaagtcagtattcctgggatctcttgtacgtgataatctcactcttgtacatgataatctcactcttgtacatgatactctcactcttataaggtttcatcgtttctgcttaccctagttttctttcccactctgttccctctcccaccagactggactctgaaatgggcatgtacagagacgaagagaccccaacatgcttcaggctttgagtggagaggacacagcctctgctgggacagggaayagagggatgtggagtccctgaagatgcttttggacaatggtctgaggttgggacagtggcaggagataccattcacccaggatctccaggacaagagatcagcctggcagttacatgtgttttttttcaaactggttgccaggttggcatgaacgatgacatcagagattccgaccttcctgattggagggaccggactccgtggtgcctggagatcagttggacaacagtatcttctcagagctgttctctactcctgacttctcctaggcttgagaattgataacatactcttct

SEQ ID NO: 32355 - DNA, 590 bp, Homo sapiens
gcagaaaagctctgccaaactgagtgctctgatgtgactttttcatcaagtcagtattcctgggatctcttgtacgtgataatctcactcttgtacatgataatctcactcttgtacatgatactctcactcttataaggtttcatcgtttctgcttaccctagttttctttcccactctgttccctctcccaccagactggactctgaaatgggcatgtacagagacgaagagaccccaacatgcttcaggctttgagtggagaggacacagcctctgctgggacagggaatagagggatgtggagtccctgaagatgcttttggacaatggtctgaggttgggacagtggcaggagataccattcacccaggatctccaggacaagagatcagcctggcagttacatgtgttttttttcaaactggttgccaggttggcatgaacgatgacatcagagattccgaccttcctgattggagggaccggactccgtggtgcctggagatcagttggacaacagtatcttctcagagctgttctcyactcctgacttctcctaggcttgagaattgataacatactcttct

SEQ ID NO: 32356 - DNA, 1084 bp, Homo sapiens
ctcatgaacggcttgttttccttccctacgtaatgagtgaattcttgcttgctctattagttcatgtgaaagctggttatttaaaaagagtctggcacctctcttttcccctcaatcaccatgtgaaatgagtaaaagcttctgccatgagtgaaagcttcctgaaacctcaccagaagccaagatgatgctggtgccatgcttgtacagcctgtagaaccataagccaaacaaacctcttttctttasaaattacccagcctcaggtactcctttatagcaacacaaaatggactaatacagtcctcctccacctccctaaacataccaaaattattcctgattctacaaactggagacaacacttaggataaccttccaaaattcaacacagaggaagacacttttccttgtcacagccataatgattgaaactttacaaaactaaactagccactgcagtgggaaaatcaaaccaattatctggagccatgcagactaaagaggtttgtctgaacttgttctttttcaatctgttgtgagctgaccgatgtatcaatatattctacactaggtctatgcagattctgcttattttagaattatgctctatactagaaacaaacaggtaaccatcaggcaaatacccatgagtggtcacaacacaacattttcaagcaggctttcctttttgttaaagaatataaaattgtataaaagctgatataaatatttattcatgtgtcaggtcatttcagtccaagttatgaggtgaagcaaacagagacatgtattacatctaaaattatgtttttaatgttttgattcacataatgaacttttcagaattcactagtcatgaacacagcacctgaaaacccatatagtgatcataagtctcatttaataaataagtcaggtttgtcaaaatggtgtatgttaaacagtatccttaagaacagacaaaaaaaggatgaagactatatttcacttttttcattcttgtctctgctacctgagtattttaagcaagttttcccaaaacagccatagaacttccagaaaggacacttgaaattgggcc

SEQ ID NO: 32357 - DNA, 638 bp, Homo sapiens
ttggcctacagaactatacaattaaaatatatagaactatcactttagttcttttcaaaagtacagagatcagggaatatatcacgactacaaatcggggtcatatttatacacttcaacaattaagtttattttttattaattcgtgtcattaagttcagcttgttttgtttttacactgctctatttaaaatgaaatggttttattgtctgtcttcctcccctataatggaagctgcataaakgtagtggccttatcattgttgttcactatggtattcctagctcctaaaataattatattaggagatagtaataataatagtagataatctataaatatctgttgaatgaataaaaagattctctatttctttgaataatggaaagttgatgatactgcttcaaagaaacagattaattggctggaattttggcttacatttggggatgtatttattaataaagtgcttttaagcacactcatttgtctagattagaacgaagttaatcattggaggtaggagtcaatgccagggtcttagacatcagaatcaaaatatgcaaaaatactaagtgcaagcctcaaaaaagaccaattttgactcattagaagaacaacatattttactaatgca

SEQ ID NO: 32358 - DNA, 564 bp, Homo sapiens
tagaaggaacctatgggaaaagtccatgtttctaaaaactattctagaaaagtagagtcctgcaatcacaagtcaaatgcttgcaaatttgaagcccccttgaggtgcctgagctgaagtcaatmgttttcctttccacctctcaggagaaagtatcaagagatccagagggaagagtgaccagcagatttgaccacttttacgacagtatattatagcaattatttagaaccttgacatatactttagattaattttattgattttcacaaaatttacagtttatagatttttttttaagaaagttttccctattcccattgccagtcctcaatatgagcctggaaatcttttcagaaaggagaccatcagttgagacaaacagaaacgaaaactgatttgccttccatccctcacactattttactccagaaacaggaaaagggaatgcctgaataaggaatgattgttggggacaaattcttaaattagaaaagctagttcagttcattaatagatcttcccaaaccaacagaatttaagatcattcaaatatatcaagag

SEQ ID NO: 32359 - DNA, 550 bp, Homo sapiens
agcaccatcttgtaaaatgatacattaccttgtttttctggtaagtattgtgaaaggaaaatatcttgggcctccaaaatcactaagctaaaaggaaaactcaggctggaaactgcttagggcaaacctgcctcccattctattcaaagttacctctctgctcactaagataaatgcagatctgactgtctcctttggaaaggctaatcagaaactcaaaagagtgcaactgtttgtctctcacctatctgtgacctggaagccccctccccgctaccagtcttcctccctttgcttcaaattgtcccgcctttccagagtgaaccaatgtacttcttaaatatattgattgatgtctcatgtctccctaaaatgtataaaaccaagytgtgccccaaccaccttggacacatgtcatcaggacttcctgaggctgtgtcacggatgtgtgtcctcaacctcggcaaaataaactttctaaaattaattgagacttgtctcaaatttggggggttcatagtactaatgagaacattatatttgcatcttg

SEQ ID NO: 32360 - DNA, 626 bp, Homo sapiens
tttctatggtctaatattccctttgtgactcccattttctctctgttcaataggagggtctctggcagtttaggagaatgctgggtgggtgagtggtagacaagttgtccctttagttcttacgtctttgtgttgacaagaaatgcactcaaggggttataccgcagaaaccacaacccagggtgcatccctaccatctgtgataaagatggtagggtcttgcacttcaagcctgagcttgctgccatattaaatgaaacttgtgtgtgtgtggtgggaggttaggatcttgcactttaagcctgagtctgctgccatattaaataaaacctgtgtgtggggtgagaggtaataattagaaattagtgtgtttttcaagtkgtagaaatcttttaaattatagttatagggtcagttgtgcaggttttaaaacatgtctatacattccttaatatgcacagcatagacagagacatcatcgagatggctgactgggaatacccagcactcacctctttcaaaaagaaaaaccaaaacagcaagtaggtaaccacaccttgaggaaaacatcaaagagagtatactggaattcagcaggaaattgatagggatcctctgatgacagg

SEQ ID NO: 32361 - DNA, 626 bp, Homo sapiens
tttctatggtctaatattccctttgtgactcccattttctctctgttcaataggagggtctctggcagtttaggagaatgctgggtgggtgagtggtagacaagttgtccctttagttcttacgtctttgtgttgacaagaaatgcactcaaggggttataccgcagaaaccacaacccagggtgcatccctaccatctgtgataaagatggtagggtcttgcacttcaagcctgagcttgctgccatattaaatgaaacttgtgtgtgtgtggtgggaggttaggatcttgcactttaagcctgagtctgctgccatattaaataaaacctgtgtgtggggtgagaggtaataattagaaattagtgtgtttttcaagtggtagaaatcttttaaattatagttatagggtcagttgtgcaggttttaaaacatgtctatacattccttaatatgcacagcatagacagagacatcatcgagatggctgactgggaatacccagcactcacctctttcaaaaagaaaaaccaaaacagcaagyaggtaaccacaccttgaggaaaacatcaaagagagtatactggaattcagcaggaaattgatagggatcctctgatgacagg

SEQ ID NO: 32362 - DNA, 920 bp, Homo sapiens
agccaaactggactgcacagaattccacagtgctcgtccttctcctccagctctttgcacttgcttctttgctctatctgccaacctttttttctcatccttcaggtatccactaaccatgcctccaccgaaaarcctacagtatcgagacaaaactgggataggtgtccctcttgcattccaatagtgccctgttttatacctgtcagggtatctatgacttggtatggaaattgcctatttgtctgctttttcaggttatagcatgtgattgctgaggggtggactgtatcatcttcatcttgtaactccagggcatagtctagtaccttagcatgcggttgttgaataaatgaatgaagaatgagaaaaccagaagctgtgatacacaaccacaatgatcatttagtgtgcaactatgggcagattcttatctaataataagttagcattgtagtcatacatacttttcattcttgttaacactgaaaaagctctcaactcttttttactgatttgcacttagttaactatgaaatatatagaatataattctttggccaggcatgttggctcacgtttgtagtcccagcactttgggagcctgaggcaggcagatcactggagcccaggagtttgagagcagcctgtgccaacatgacgaaaccctgcccctataaaaaatacaaaagcttgccaggcacagtggctcatgcctgcagttccaagtacttggggctgaggcaggagaattgcttaagcctgggaggacgagactgcagtgacctgtgatcacaccacggcactccagcataggtgaaagagtgagaccctatcttaaaataataacaataataataataataataataataatataattcttgctttttttttcagctgctactaaatatgaacct

SEQ ID NO: 32363 - DNA, 920 bp, Homo sapiens
agccaaactggactgcacagaattccacagtgctcgtccttctcctccagctctttgcacttgcttctttgctctatctgccaacctttttttctcatccttcaggtatccactaaccatgcctccaccgaaaaacctacagtatcgagacaaaactgggataggtgtccctcttgcattccaatagtgccctgttttatacctgtcagggtatctatgacttggtatggaaattgcctatttgtctgctttttcaggttatagcatgtgattgctgaggggtggactgtatcatcttcatcttgtaactccagggcatagtctagtaccttagcatgyggttgttgaataaatgaatgaagaatgagaaaaccagaagctgtgatacacaaccacaatgatcatttagtgtgcaactatgggcagattcttatctaataataagttagcattgtagtcatacatacttttcattcttgttaacactgaaaaagctctcaactcttttttactgatttgcacttagttaactatgaaatatatagaatataattctttggccaggcatgttggctcacgtttgtagtcccagcactttgggagcctgaggcaggcagatcactggagcccaggagtttgagagcagcctgtgccaacatgacgaaaccctgcccctataaaaaatacaaaagcttgccaggcacagtggctcatgcctgcagttccaagtacttggggctgaggcaggagaattgcttaagcctgggaggacgagactgcagtgacctgtgatcacaccacggcactccagcataggtgaaagagtgagaccctatcttaaaataataacaataataataataataataataataatataattcttgctttttttttcagctgctactaaatatgaacct

SEQ ID NO: 32364 - DNA, 596 bp, Homo sapiens
  misc_feature (1)...(596): n = A,T,C or G
acccccaagacacacaatttacccatttaacaaacctgtacctttacccctgaacttaatataaaagttggaaagaaaaaaaaaactaaaaaaaaaaaaaaaaagataatccctcaagggagccaattagaataaaaattcattacacattgatggcataaaagagtgatcaatttttagtatagtgttgagaataccatcttatctgctgttttatattaagtgggtgctagtagagtaagcaacctcaacttgatggcctatagttgtaacgaygtatttggggaacaagcacattttctgaataacaagaatgagtggtatgttctgtgatgagactgaagaatgaagggaacaaatttccctgagaacagatgtgactgagacacttttttgaggggttggagttgatgagagtaaggaagatatctcacatttacaacctaacatcacacctagaggaactagcaaaaatcatagtattatggagtttttgagatactaaaaactgagacattgatcttangacaaacaagggtgattcatactttaagaattacacantattacgtgtacttatctacagncaaataaaa

SEQ ID NO: 32365 - DNA, 498 bp, Homo sapiens
  misc_feature (1)...(498): n = A,T,C or G
cnnnnnnnnnnnnnnnnnnnnnnnnnnnnnnnnnnnnnnnnnnnnnnnnnnnnnnnnnnnnnnnnnnnnnnnnnnnnnnnnnnnnnnnnnnnnnnnnnnnnaatcttccaggcgactctttcacagctgtcttgaggtcctcatgccctcttgttacattggtagcaacaggcagattggaagggaggcaagagctgaatggggcagccttaaaagatcccaggttcaggctgggcgcggtggctcacgcctgtaatcccagcactttgggaggccaaggcaggcggatcatgaggtcaggagatcgagaccatcctggctaacacagtgaaaccccgcctctactaaaaatacaaaaaaattagctgggcgtggtggcgggtgcctgtagtcccagctactcgggaggctgaggcaggaaaatggcrtgaacccgggaggcgggtcttgcagtgagccgagattgcgccactgcactccatccagcctgggcaacag

SEQ ID NO: 32366 - DNA, 520 bp, Homo sapiens
gcatagattcttaagcttttcctgtaaattttgtgttgccaattcaaaaatcagattctttaaattttagttttaaacaattataaattaaaaggaaataatatgaaacccatttcctgtgaatgacggagcagtgtccttggggtcaggtggaatagaaactcagccatgcagtgttccagtgattcaggggatggagaaaccrtgaagcctgggacccatgagagggatgcctggagatgctggagaggatctcgagcaacttgagtgagtgcagagttcccatcaaccaacaccccacctgagctcagggtcccatcacaaccaacccaaccaacaccccacctgagctcagggtcccatcacaaccaacccaaccaacaccccacctgagctcagaatcccatcacaaccaacataatcaacaccccacctgagctcagaatcccatcacaaccaacacagtcaaacaccccacctgagctcagaatcccatcacaaccaacacaaccaacacccc

SEQ ID NO: 32367 - DNA, 1182 bp, Homo sapiens
tgtcgcccaggctggagtgcaatggcatgatctcagctccctgcaacctctgcccsctgggttctagtgactctcctgcctcagtcacccgagcagctgggactacaggcgcccgtgaccaaggctggctaatttttgtatttttagtagagacggggtttcaccatgttgaccaggctggtctcaaactcctgacctcaggtgatccgcctgcctcggcctcccaaagtgctgggattacaggtgtgagccaccgcacccagccccagtccttcctttttgtcttctcttccgacatctcaggctctgctcacctcgtttcctgctgaaaagccgcatccctggctgtctgtgtgaagcagaatctaggggcctccttcatgctccagcttccatccttgaggctcgcctgcccccgggcagctctggcagaggaagcctggccctggcgcgtctcctcaggagcgctcatgacgggcacgggcgtcacaaacacaccaacagaaacaacctgtttccatcgcaagagaacagctccttaacacgtagcatttcattctaaagagtgctaaacagctatgaaaagcggccagtttgtctgcacgttgggcctttcaatgattttacatcatccttgcgagagccctgcggtggtgtcacgccctcgcaccgcgggtggagaagcgtgtctttcagacagaccaagcgatttgctcaaggtcacagggctcagaggacacaatattaagcccaagaggctcacagcgtgaggggaattaggggagacagacacagacagagattcttggaaaacagcagccgagtggtcagtaccgggacataggttcgctcaggtgctgggggagccttaaggaggagtctccagtatagagcgagagcctgatcttccaaacgccagcctactttccaccacggccacaccaaactgtagtattttgttaaaggttctcagaactattaagcatttcttgttttctgattctggcactcagcactgtgccttatgcataggagacacgcaataaatatttgttgggctggcgcagtggctcattcctggaatcccagcactttgggagcctgagccaggaggatcacttgagcccaggaattcaagaccagcctgggcaacatagtgagaccccacctttataaaaaata

SEQ ID NO: 32368 - DNA, 566 bp, Homo sapiens
tcaaacagaagcgtggtctgggcttggtgtctgcatgtgactgtgttaggttactttaataattttcctggaaacatcacccacttacgattgccagagctctacagagtagaagtactttgtcaatttaaagctagcctagttcttattttgctatttatttcatttagtgtgctgattcttttcattttatttttgcattttcttgcagtgatgataaaataacatcatatacaagtcaaaaagtgttcttcagattattcttgcaggtgtagactacttaagattgtttatgttggaaactaattaaaaatctgttttctttaaagaaaatatgagcataaatcaataaaaaaagaaagtttagtgaggataggtctagcccttatatttgttgattttcttaaagaatggcstcattaaatgaggccatttaattatttttataaatctacctgacttccttttttaatgtatattacataagttatagggagcatgagggatgatgaggtttctgaaacaacatcgtatcatttattatcagccaatctaaaagcacggct

SEQ ID NO: 32369 - DNA, 566 bp, Homo sapiens
tcaaacagaagcgtggtctgggcttggtgtctgcatgtgactgtgttaggttactttaataattttcctggaaacatcacccacttacgattgccagagctctacagagtagaagtactttgtcaatttaaagctagcctagttcttattttgctatttatttcatttagtgtgctgattcttttcattttatttttgcattttcttgcagtgatgataaaataacatcatatacaagtcaaaaagtgttcttcagattattcttgcaggtgtagactacttaagattgtttatgttggaaactaattaaaaatctgttttctttaaagaaaatatgagcataaatcaataaaaaaagaaagtttagtgaggataggtctagcccttatatttgttgattttcttaaagaatggcctcattaaatgaggccatttaattatttttataaatctacctgacttccttttttaatgtatattacataagttatagggascatgagggatgatgaggtttctgaaacaacatcgtatcatttattatcagccaatctaaaagcacggct

SEQ ID NO: 32370 - DNA, 561 bp, Homo sapiens
tgcttccattcctaaattattgtgttgccttaggggaatttgatgaacaaggttggcagccaatttaaattttaaaaaacacttttcaagtatatcttgacacatccagcaacacttttaattattagaaacctccatttctgtctctgttggatattcataaaatacttctaaaccatctaattgattttgttttaaatgttgagcccaaaatttagtctttcaattactttcatgaagctttaactgctcctgtaggcatggtaatatagtaagccccacattgctctattgaaaccattctgcttrccaaagtcagaactgtaacaacaaccttaaataggaaaattgtctgtgacattacattgtcacaactcaccatgttttatcttctgctgttactatacagctgatccattaagcaatgacagagcctcacccaggttgtgcttgagaatggcctgcaaatataagaatgtattcacttgcacagttttagacaagtatatgagtgctagcctaaattgtttgaaatattagtgtaacagcccacctgcataa

SEQ ID NO: 32371 - DNA, 629 bp, Homo sapiens
tgtcaatctgtgttgaaaccagcagcaatgaaaaatggcagccttgagctgaaacgttgcttttcctgaagagatggggaaacagttgacgcttgaggtcagggtctgcagaacacaatggcaaatgttgcaactctctgcatcctgtttaaatggaggtctatgtgygtccatcccacctttgatgaattgttgtgaatgaggttttattaaattggaccctggggtgatttaattgttccctccctctgaaagcactgaacgctgaaagaatgcttcctccagaggagtgaacccaacatctgttgagatcaaccagcagaaggaaaagagcttgaatataattgagagctaataagtaaactaaataaatagccctgaccatctcagtatgaagcctgatttttttggtgattgttgccagcaaaatctagagacttggaccactctaacagtcataaacataataataataaataatttttaaaaatctgctcctttcacccctgagtatatactattactttatacatggagtctggattcaacttccagaccatgacatcagcatcaatatatcatcctaatttgccaacaaaataccgatatgtgttgcaaaagagaaaata

SEQ ID NO: 32372 - DNA, 629 bp, Homo sapiens
tgtcaatctgtgttgaaaccagcagcaatgaaaaatggcagccttgagctgaaacgttgcttttcctgaagagatggggaaacagttgacgcttgaggtcagggtctgcagaacacaatggcaaatgttgcaactctctgcatcctgtttaaatggaggtctatgtgtgtccatcccacctttgatgaattgttgtgaatgaggttttattaaattggaccctggggtgatttaattgttccctccctctgaragcactgaacgctgaaagaatgcttcctccagaggagtgaacccaacatctgttgagatcaaccagcagaaggaaaagagcttgaatataattgagagctaataagtaaactaaataaatagccctgaccatctcagtatgaagcctgatttttttggtgattgttgccagcaaaatctagagacttggaccactctaacagtcataaacataataataataaataatttttaaaaatctgctcctttcacccctgagtatatactattactttatacatggagtctggattcaacttccagaccatgacatcagcatcaatatatcatcctaatttgccaacaaaataccgatatgtgttgcaaaagagaaaata

SEQ ID NO: 32373 - DNA, 603 bp, Homo sapiens
agtctcactctgtcacccaagctggagggcartggtgtgatcatggctcgttgcagccttaacctcccaggctcaggtgatcctcccacttcagcctcccgagtagctgggactacaggcacacaccaccgtgcttggctaattttttaatgatgatagtgattattatttgtcgcggtagcatttcactacattgcccaggcagatctcaaactcctgggcacaaacaatcctcccaccctgcttcccatgctgggatcataggattaagccactgcgccaggcccctcttatttttcatttcatagctaaaggaagcgaggctgacagaggttaagccccctgctccagggtaggcatcttgaaatgggtggagctggaacttgaaaccctgggtgtttccttaacttaaagctgtcagtgcattctctttgtaacttccctccttctccaacagagaagacacatcacgtcttttagaagacagctctcccaccagggctcatgactctaacctgtttaacccactttaggactttagggaccaggttgcttttcctgtatcttcaacctctcccctcttctgttctctttccatgagca

SEQ ID NO: 32374 - DNA, 603 bp, Homo sapiens
agtctcactctgtcacccaagctggagggcaatggtgtgatcatggctcgttgcagccttaacctcccaggctcaggtgatcctcccacttcagcctcccgagtagctgggactacaggcacacaccaccgtgcttggctaattttttaatgatgatagtgattattatttgtcrcggtagcatttcactacattgcccaggcagatctcaaactcctgggcacaaacaatcctcccaccctgcttcccatgctgggatcataggattaagccactgcgccaggcccctcttatttttcatttcatagctaaaggaagcgaggctgacagaggttaagccccctgctccagggtaggcatcttgaaatgggtggagctggaacttgaaaccctgggtgtttccttaacttaaagctgtcagtgcattctctttgtaacttccctccttctccaacagagaagacacatcacgtcttttagaagacagctctcccaccagggctcatgactctaacctgtttaacccactttaggactttagggaccaggttgcttttcctgtatcttcaacctctcccctcttctgttctctttccatgagca

SEQ ID NO: 32375 - DNA, 606 bp, Homo sapiens
gtttattaaaatataaaaatactcataaccctacatccaaacagtaccattgttaacatttttataattctttctagacctttctctgtatattttaatgttttaggatatattatgtatatacttcatgattttttttatcatgcttttaaacttaagagtatattgtgataattttgcaatgccattaaaaactcttaggctgggtgcagtggcttatgcctgtaatcccagcactgtgggaggccgaggcgggcagaccacctgaggtaggagttcaagaccagcctggccaacatggggaaacccccatctctactaaaactacaaaaattagctgggtgtggtggcatgcacctgtagtcctggctactcaggagactgagacaggagaatcacttgaacttgggaggtgaatgttgcagtgagctaagattgtgccactgtactccagccygggcaaaagggccagactctggctcaaacaaacaaacaaacaatccccccaccccccaaaaaaaacctcttaataaaattttaagatagaaataacttgattttggcaataaaagtaatacatgcttattataaaaattttgctagcac

SEQ ID NO: 32376 - DNA, 559 bp, Homo sapiens
tgtgcaataaaaagtaccaacttttaaattagaacctacaaagtaccatgtaaaatgtcatggcataaagacaacagtgagaaaactgtcaccaatacacaataaataaagaagggctgtgatgcatacattcttggaatccccataataagacaaacaaaactgagaataattaggaaaggaaaaaggcagaattgatctttaaattcagcaagagtcagctttgcagcctggaaaacatgtcctctccacatgaagaataaatgttatttcttcaccattgctattttccatccctgacttgaagttacaaactaactccagcaggaatatttatggtgtattataaagcatctgtgacacagcaagccctgtcatgtttgwttgctgcatttatgtatagaaacatcctcatgacttatgaagtctccctagtactgacctgaacaaattggcccaatcaatcaataaatttacttatgtcatttataaaaagtgaaaggaacaataactaaagaaatgtaggctcatgtagggttctccaattaataaatgaaaa

SEQ ID NO: 32377 - DNA, 585 bp, Homo sapiens
tgcatgactaatagactcgtttatgttaaagagagaaattacctcatgcttctcagcaatgcccctaagccttataaactgctttaattctttctactctctgctaacaatatgagctttgcaaacataggcatttgatttataggaataaagcttgattaaaaggctgtgtcataaataatcacatgcacattgggccaatatataagaagaagttcattgttaatttggataactctgacttggcttcttcaggataacacagcacatrgcatgtactgaaatagagggaattagtactgggaactagttacaagggttgggagagctgaaaagaaaaaaaacaagttggtgaggaagtgaagacctttgttacaggagaaaacaccaccatacatgggactggggaaccaaaggaagatgtggtgttaccggagcctcagagttaggcctgcttgatcccaagtagctaaatggcagaggatctccagggaaactgggcccagggagcgaaaacctgtcccttgcggatgttgctgctggaagaggctgcctgaggaagagagagaagatgagctatatctt

SEQ ID NO: 32378 - DNA, 471 bp, Homo sapiens
tttatagattcaatgccatccccatcaagctaccaatgactttcctcacagaattggaaaaactactttaaagttcatatggaaccaaaaaagagactgcattgccaagtcaatcctaagccaaaagaacaaagctggaggyatcatgctacctgacttcaaactatactacaaggctacagtaaccaaaacagcatggtaccggtacattttgaaagatattaccaaattactcctaaaaagtaatactgatgtatatgcttaccagtagagtataggagtctaatttctctacatcatggttatcaataaacatcaattgccaattggttaggcaaaaattagtatcctattttaactatttaactgtgaatgagtttgaacacacttaaaagtttattagttattttcctgttactgtaaatttccattatccatttgtattgggttgtaggttcttctttttactga

SEQ ID NO: 32379 - DNA, 709 bp, Homo sapiens
attgtccatgggttgagctgtttccttgatcagtctcaatgcaaggagctgaatgtttcagttgaaggtgctgtatttacttgccccttttgttcctctctrtgatgagagccatgcacactagctgcttctagctggccatcttggccggaaatctcttttcttttttgttttgatgcttttatttagcctcaaaaatgggacatgggtttctttctctgtctatcagttttcctctctctctctttcgttccttctaaacttccttcccctccctcatgtcttcccttccttctcatttttacctgcctcaaaaactggcatgaaatgaattgggctcttctttacttcttcttcctatgtgtaagtacaaaccaggtcacaagattgtcattctctcttctacctcctgttttgctcatgactcactttggtagttaaaccaaggttcaatctgttttgtggacttaacactcccaacaggtgggtcactaagattagactggagcaggtatttgaaggccatcagcttggtctcatataccagcaacattattatatttagctttgtcacagagttgtgcatttgaagggcattgcgctattattaataagctgatattttaggccctatcagcctgtgtacatcctatcagccagaattctgggagagggtggtcggcacgtgcactctaccattcacctcttt

SEQ ID NO: 32380 - DNA, 709 bp, Homo sapiens
attgtccatgggttgagctgtttccttgatcagtctcaatgcaaggagctgaatgtttcagttgaaggtgctgtatttacttgccccttttgttcctctctatgatgagagccatgcacactagctgcttctagctggccatcttggccggaaatctcttttcttttttgttttgatgcttttatttagcctcaaaaatgggacatgggtttctttctctgtctatcagttttcctctctctctctttcgttccttctaaacttccttcccctccctcatgtcttcccttccttctcatttttacctgcctcaaaaactggcatgaaatgaattgggctcttctttacttcttcttcctatgtgtaagtacaaaccaggtcacaagattgtcattctctcttctacctcctgttttgctcatgactcactttggtagttaaaccaaggttcaatctgttttgtggacttaacactcccaacaggtgggtcactaagattagactggagcaggtatttgaaggccatcagcttggtctcatataccagcaacattattatatttagctttgtcacagagttgtgcatttgaagggcattgcgctattattaataagctgatattttagkccctatcagcctgtgtacatcctatcagccagaattctgggagagggtggtcggcacgtgcactctaccattcacctcttt

SEQ ID NO: 32381 - DNA, 889 bp, Homo sapiens
taattcttcccttgctgcaagacacagaggcagggtaagcagtgtaacatcgatcacctctcttccttctccttcctcctatctcctggacacaggacaccttagacacagaaatgtctacttttacctcaaccatttgctgagtgaatgcttacacccctgaacaaagacagtgaggagagacgtcttgatagggtggggaagctcttagctagaaatgtaggcaagcaaatgaattagtggtgagtctttaataattcaatcagcattcagtaaatatttacctactttgtgcaagaatctcttctaggttctgaagatagaaaggcaaaaagctgcccctgacctcacagaggtctcattctagaggggggagacaggctgttacacaggcagttacaaaactgtaataagttctcagatagaataaagcagaggattgtgaaagtgtgcagggagaaaatagctatagccccctcgaggattcagggaaggcttgygggaaagtgacacttgggctgggtatgaaatgattcataggaagaagtaggcaaggtgaataaggggagaaaatattagcataggagaaatcatatacagagctatgaaggcatgaatatatgttccggattctaggagatgaaaactattccaaggtgcttggaacatagggtaggggtgggagcagggtaagaaaatggtttgattttatttagatggccattgggagctatgagatttaaacagggaagtgccatggtcagatctatatttttatttatttatttatttacttatttatttagagacagggtctctctctgtcacttagcctggagtatggtggtatgatcatagctcactgcagtctcaaactcctagactcaag

SEQ ID NO: 32382 - DNA, 604 bp, Homo sapiens
atttcagaaatgtcttattttaatttctgattcctcctctgtgggtagaagcttttaatctgttagtatcctctgcactctgagcatccctgtcaaatggttaatgatgtgaaaaaagtacctaaatgcactagggtctcttggcattcaaataaacactttcacggagagtgaagttgccccacatgaccagagcctggcctgtgtggaatctcatggagattttgcagagagagcatggccatggctgtggatgggtctccagatgcttcctgctgtggctggtaatattttgcctccatgtcctggttatctactgctgtggaaaacyctaccaaaaatttagtggcttaaaacaataactgtttttattatatctcctttggtgggtctgataggcaggcagggcttggctgggtgactctctggctccctgtagcatgagatgaggtcattctgtggttcagctgctggatagttattctgaagagtccaagacccactgacgtgtctgatgtcttggaaggatggatgaaagctgggatcagctgggactacctaaaggagcaattatctgtggcctctttaccatagtggtctcaga

SEQ ID NO: 32383 - DNA, 770 bp, Homo sapiens
agaggtgatccaagcacttctccttgtgctgtctactgacctgaaggttattcaaatattaaaatattggcacctgacttccattttgaattttcacttcaagtttacctcactgtggacctaaatgtccctgctcataaaacctctagcctcaaggttccttctccttgattatcacctctttcactcacactccactcctacaggctgctctgtggcccagycctggattttaagattgctgagcattctcccatttgtgatttcgtgaacccccagcccttaattcagtctcctgctctcacagcctcttttcccctcatgctcctacctcaccatgagggtgcaccccagggcaggggcttatagtcccagctcttgagattcagcacaccctgcttggaatctgggtccttgctcttttccctagtctagttcctcaccctgtgattcctcttacatactggtctcttctaaagcccactaaaattataatctgatgatgacactgctttgttaaaatctattcaatggttctccattctctatagagcaaaatgcaaaccttgcagcaggacaagcgcttccagcaggacataggagattcttcatgacttgatatccacccactcctctggcctcacactttccatgccctccctccctctgtgtcccccaaaacacctatactatatgccagccacacatctatcccatatcaccagtactgccagaaaagcctctcccacccccatctaccatcctttctt

SEQ ID NO: 32384 - DNA, 1139 bp, Homo sapiens
  misc_feature (1)...(1139): n = A,T,C or G
gtcttccaccagagtggaaggcaaaatacagtccagtgattaaaagagtgaactctgggggaaaacacgctcccctttatatgccacttccagcactttttcacttgtgtgactgtgtgcttatttaagttatttatatttatttttttgagacasagtcttgttctgtcacccaggctggagtgcagtggcacgatctcagctcactgcaacctccgcctcctgggttcaagtgattctccttcctcagcctccagagtaactgggtctacaggaatgaaccaccatgtctggctaatttttgtatttttagtagagacgaggttttgtcatgttagccaggctagtctcaaactcttgacctcaggtgatctgcctgccttggcttcccaaagtgctgggattacaggtgtgagcccccaggctttcctaaggttatttntccaggggtaaacaggggaaattatttcttctacctgtgttctgagaggaataatgaaatatccaaatcaagacttaggtgtttctcatataataacccttaataaaatgtcagctattatacaatatttgggaattgttcacattttcagttattttaattgttttacatagctataatgacttgaacatacctctgaatcaaacaatagctaaaagttattgaaagtcaactaggccaacatcatttgatagaattccttctatagtagatactgcaatgatctccatgttacagtaaggaaattaaagtgtagacagactaaatagtttgtacaagaccacagagctagtaaagtgatagaatctgaattcaaacccaagaagcttattgcagaactcttttttaagaaatagcttgagcctcctaattttagaggaggcaaataacattcagaaagggatggttgcttccaaaagtcagaaagctagatagtggtctagtcatctttttactcagttacagtttactccattagctgtgctaaaaattagaacattaaagttgatgcaaccatcatagaagttagaagcctgactgagaaagagctactttcagagcttgagcatcaagataaaaaaaaataggttagtgatttgatactcagatctttggtttttataagaataataaagtg

SEQ ID NO: 32385 - DNA, 800 bp, Homo sapiens
gttcgagaccagcctggccaacatggcgaaacctgtctctactaaaaataaaaaaaattagctgggcgtggtggtgcacccctgtaattgcagctactcgggaggctgaggcaagagaattgcttgaacctgggaagtggaggttacagtaagccgagatcacaccactgcactccagcatgggcgacagagtgagattctgaacccacacctggtggttgtgggaaacccggtcactcagggtgagtccccatgggctccctttcccccatcctgtccccaccacaatccaggcacacttcatcctgttttcttctaccaagaaagctgcaaagtccaatcaattacaagctttccctcctcactcagctccctcaccaggtcagctggtcatttccctaccacctcctaaagggagccacatctyatgagtttccatcactttattttgcaaaaatagaaaactcagcaatatgcgatacagcggggtagaggggagatgtaaacagaggggaggggacagcaccctgaccccccaagagaacacagggagccaatgggaatcttatttggcagctaaatacaaactggggattggaggaagaaaggaggggtcacaggggccctgggctcccccacccaagacccctggaggaaggggtcaattccacggtgtaaacaaaagctaataaataaatagaggcttcctctgggtcagggcgggatcagctaagcagcatcccccctccctgggccaagctgctctggggagtaaagggtggaaggcactagggagagag

SEQ ID NO: 32386 - DNA, 1568 bp, Homo sapiens
ttgggaaaataaaaactcaccatgatgaggagatgtaggttttcctggtaatatctttaatgttctggtgtcttccccccgatttttgccaaatctctgcctcccattgatctcattcttctccattttgtttccctggtagaaccactgcctttctctttgcataaatgtcattaaatgtgctcctgatttgctgctaccatggtaataggtgcttgtcataggctattgactcattactgtatttatatgagatttggtcacttgtggtttagcaagcttaagaaacaaactgactctcagccaggaaatggattcgaacctgtctgtgatgaacgatagattagggtttgggtgctattattatttaatagttagtaaagcctctgagtggactagggacagtgcgttgcctggggaaatggtcctggctgtcacatagcatctattctactgtagacagccttagtggagcacacagccagagagaaggagagagagagggaaagagagaaagtcttatcactatctttgaatatccctggagaacagggtgggaggacaggtctggaagaatccaggaaatgtcaggaatgtctgcatagatgttatggaaacagagaacctagttgacctcttgatctaactgtgactgtttcagatgagaaacagagggcttacattacgatttgaggaacactagaaaagtatgcctacaacaattcttaaatagatgtgcccacttgctgccacagaacctgatgttttgccccaagggccatgcctttggatcccttctttaacttcctcactgtacacaccatttaacaaactcttttccttgccttacaataacaattcccacctcagatcacccaaccatgcatcttctctcatcttactgaatgttgctggtaaaatgtttcttctcagaatatctgtctactttcacatgtaagcaggagatagtaattatttttgacaggggaggaagggggacaatataggaatgttgagaatcaatgttgtttcaacctggtaattaccaatggaagaggtcatattcttatgtgttgagacagaaaaagactgagatccattaagcttaggcactgtcttccctggaattcagttcccctgggagtatagaaaaacatcctatagataacagctgtactgaaagacagttatgtagagaggaatggcccccagattttgtagacaaatgtcctgggtccaaaccttgactctgcccatactgtccgcataacccttggaaagttattagctcctgtatctttcatatttcttatctataaaataaaattaaccattgtattaactcrtggggttactgtgattaaatgagcatatgccttgaaaacacttagaacaatggcttcaacttaacaagtactacagaagtcttcataatttttaatactacttttcagggtacatttgtttttctcaaattgacttttcttttcttttctttctttttttttttttgctctgtctcccagggtggagtgcagtgacgcgatcttggctcattgcaacctccg

SEQ ID NO: 32387 - DNA, 620 bp, Homo sapiens
tgcctttgtactggtgattatttcatctgggggcaaaaaactaaacccagcctatcctattggaaattcctctgcctccctggygaagtatgatctaagcattttctttgaagtttctagcataacattactgtatataattttggaatctatgtagtttgtatcagggacttttaacccaatgcaagagtgatattgaggataataaagcatggcgcttgacactaatcctgaggtgggatgttgctctgccacacattagcaaggtgactgggaacaagttgcaacttagtttctgagcctcagatttaggagagtaatagccatgtagccttgctgtggggattaaattacgtactgtgaagccatcttttagaagctatggcacttaataggtgatcagtaactattagtttctgtgctttgcaataagttgcacatctagatttggtgatatgcttaaaaattagtttatcaaaatttattgtaatttatgttcaattaaaaaatatatgacagtgtgcaaagaagggtccaacttagtggaaagaaatgtcaggtgtcattgcattatgaaggtaaggaactggtattctgtgctacttgcacataagcttttg

SEQ ID NO: 32388 - DNA, 620 bp, Homo sapiens
tgcctttgtactggtgattatttcatctgggggcaaaaaactaaacccagcctatcctattggaaattcctctgcctccctggtgaagtatgatctaagcattttctttgaagtttctagcataacattactgtatataattttggaatctatgtagtttgtatcagggacttttaacccaatgcaagagtgatattgaggataataaagcatggcgcttgacactaatcctgaggtgggatgttgctctgccacacattagcaaggtgactgggaacaagttgcaacttagtttctgagcctcagatttaggagagtaatagccatgtagccttgctgtggggattaaattacrtactgtgaagccatcttttagaagctatggcacttaataggtgatcagtaactattagtttctgtgctttgcaataagttgcacatctagatttggtgatatgcttaaaaattagtttatcaaaatttattgtaatttatgttcaattaaaaaatatatgacagtgtgcaaagaagggtccaacttagtggaaagaaatgtcaggtgtcattgcattatgaaggtaaggaactggtattctgtgctacttgcacataagcttttg

SEQ ID NO: 32389 - DNA, 579 bp, Homo sapiens
aagatgtcactgtccataaatatttctatatgttttctcttagtgtctgtatttattttgttgtatactggcaacaaacagttcagagaccagcactgctccatgaaccatgctttatgtgaagcactggcttcagttgaatatgtactttgaaaaatgaacttgtttaaacaaataaaattgtatcagatatagtgatatgaagcaacaaaaacaaaatggtcaagaaasaagaaatgagaacatatgaatgaggtctaaaactctagctaacacagcaagggcatataattgatgccaaagaaatgtcattacaatcattgatttattccacgtacttactgagaatctactaggagtcagaaaactgttttgggccctgaaaatatagcagtgaacggtacctacaaactcctgattcttctttgtggtgggggagaccctaaaagcaggaaaatattaggcaagttctatgatgaaaacacagtgggctgttatgatagagacccattgtggggtagaggagacctcctagagagttgacgtatgaactgaggattaaatgactagaaacaggca

SEQ ID NO: 32390 - DNA, 573 bp, Homo sapiens
gtcctttatgagatctttgctatcatacataggagtcagggcccattaaaaaaattgcaagaaatctgtccctaaccatggcatgtattgtttcctcctctgctactgccttagcaacccagcaggcatctctcaactccattaggaaggttgttataggcaacagaatagctctagttattcttttagcctaactgaaaggaacatgtgcaactgccaacacttcctgctgtaccaagaaaaacacctctggcattacagagatayaaatgaaggacattcagaagcaggtccactggttgcaaaagatccttctgtgacctcttcagtaactaaactccagggcacacacctctttagcaacttctcacctgaatttctgggattcttggcttaggccactgctcctggaaggcctgacctttctgcttgtagtagtaaccttcctgggtctagtaaaatgtattctcactatggctcaataatgttgcactaagattgtgtcaatcaaagtatcatattgatttagcaagacaaacctctgtctccatatctgggaagatctgcaggaaa

SEQ ID NO: 32391 - DNA, 502 bp, Homo sapiens
ttaccagtaggaaatatctgagtttctcagccccaaacgttaccggtggcaggtatctgagytacaagtggtgaattcgtacatcattgaaagatgattttcgggcagtggatttggtttattatgtaaataattttggcatatgtgcaattgaaaatacagtaaatgaaagctcttggcactgtttaatttgtgtgtttgtatatatatatatatatatatatatatatatatatatatatatatgccaaaatagttgtagttcagatatgattagaaattgttcttcattctttattacaaagtatataggtttacattcaaaagacattttttttaacctcttttcttctctaccctcttcttaccatctttaattgaggaagtttatcactggtggcagctgtcatgctcttactgaaatctaatgactgaggatggaaactcatatcttgaattgaccattagtagaatctttatttttgccacatgccaggatttg

SEQ ID NO: 32392 - DNA, 502 bp, Homo sapiens
ttaccagtaggaaatatctgagtttctcagccccaaacgttaccggtggcaggtatctgagctacaagtggtgaattcgtacatcattgaaagatgattttcgggcagtggatttggtttattatgtaaataattttggcatatgtgcaattgaaaatacagtaaatgaaagctcttggcactgtttaatttgtgtgtttgtatatatatatatatatatatatatatatatatatatatatatatgccaaaatagttgtagttcagatakgattagaaattgttcttcattctttattacaaagtatataggtttacattcaaaagacattttttttaacctcttttcttctctaccctcttcttaccatctttaattgaggaagtttatcactggtggcagctgtcatgctcttactgaaatctaatgactgaggatggaaactcatatcttgaattgaccattagtagaatctttatttttgccacatgccaggatttg

SEQ ID NO: 32393 - DNA, 502 bp, Homo sapiens
ttaccagtaggaaatatctgagtttctcagccccaaacgttaccggtggcaggtatctgagctacaagtggtgaattcgtacatcattgaaagatgattttcgggcagtggatttggtttattatgtaaataattttggcatatgtgcaattgaaaatacagtaaatgaaagctcttggcactgtttaatttgtgtgtttgtatatatatatatatatatatatatatatatatatatatatatatgccaaaatagttgtagttcagatatgattagaaattgttcttcattctttattacaaagtatataggtttacattcaaaagacattttttttaacctcttttcttctctaccctcttcttaccatctttaattgaggaagtttatcactggtggcagctgtcatgctcttactgaaatctaatgactgaggatggaaactcatatcttgaattgaccattagtagaatctwtatttttgccacatgccaggatttg

SEQ ID NO: 32394 - DNA, 604 bp, Homo sapiens
tatataaataaatatatattatatatattttatataataaatatatactatataaaataaaatatgtatttatattatatatyatatattatatattatatatttataatatataatatatttatataatatattatatattatataaatatattatataaatatattatataaatatattatatattatatattatatatttatatataatatataatacatataatgtattatatataatatttttttataatatattatatatatagcctgagaagtccctttacatgtacttcaaaacaagagaaaaaatttaaacatgatacaattctgatttattcaaccacgaacagtggctcatgcctgtagtccttgtgctttgagaggccaaggttaggggattgcttgaggccagaagttcaaggttgcagtgagctattatcatgccactgcactgcagcctaggagacagagcaacaccccatctctacaaaaaattaaaaaataattagctggacatagtgcctcttgcctgaagttccagctactagggaaactgaggtgggagggccgcttgaacctgggaggttgaggctgcagtga

SEQ ID NO: 32395 - DNA, 604 bp, Homo sapiens
tatataaataaatatatattatatatattttatataataaatatatactatataaaataaaatatgtatttatattatatatcatatattatatattatatatttataatatataatatatttatataatatattatatattatataaatatattatataaatatattatataaatatattatatattatatattatatatttatatataatatataatayatataatgtattatatataatatttttttataatatattatatatatagcctgagaagtccctttacatgtacttcaaaacaagagaaaaaatttaaacatgatacaattctgatttattcaaccacgaacagtggctcatgcctgtagtccttgtgctttgagaggccaaggttaggggattgcttgaggccagaagttcaaggttgcagtgagctattatcatgccactgcactgcagcctaggagacagagcaacaccccatctctacaaaaaattaaaaaataattagctggacatagtgcctcttgcctgaagttccagctactagggaaactgaggtgggagggccgcttgaacctgggaggttgaggctgcagtga

SEQ ID NO: 32396 - DNA, 604 bp, Homo sapiens
tatataaataaatatatattatatatattttatataataaatatatactatataaaataaaatatgtatttatattatatatcatatattatatattatatatttataatatataatatatttatataatatattatatattatataaatatattatataaatatattatataaatatattatatattatatattatatatttatatataatatataatacatataatgtattatatataatatttttttataatatattatatatatagcctgagaagtccctttacatgtacttcaaaacaagagaaaaaatttaaacatgatamaattctgatttattcaaccacgaacagtggctcatgcctgtagtccttgtgctttgagaggccaaggttaggggattgcttgaggccagaagttcaaggttgcagtgagctattatcatgccactgcactgcagcctaggagacagagcaacaccccatctctacaaaaaattaaaaaataattagctggacatagtgcctcttgcctgaagttccagctactagggaaactgaggtgggagggccgcttgaacctgggaggttgaggctgcagtga

SEQ ID NO: 32397 - DNA, 604 bp, Homo sapiens
tatataaataaatatatattatatatattttatataataaatatatactatataaaataaaatatgtatttatattatatatcatatattatatattatatatttataatatataatatatttatataatatattatatattatataaatatattatataaatatattatataaatatattatatattatatattatatatttatatataatatataatacatataatgtattatatataatatttttttataatatattatatatatagcctgagaagtccctttacatgtacttcaaaacaagagaaaaaatttaaacatgatacaattctgatttattcaaccacgaacagtggctcatgcctgtagtccttgtgctttgagaggccaaggttaggggattgcttgaggccagaagttcaaggttgcagtgagctattatcrtgccactgcactgcagcctaggagacagagcaacaccccatctctacaaaaaattaaaaaataattagctggacatagtgcctcttgcctgaagttccagctactagggaaactgaggtgggagggccgcttgaacctgggaggttgaggctgcagtga

SEQ ID NO: 32398 - DNA, 866 bp, Homo sapiens
gaaaaacatttgtcattggtaaacaaacactagaatgtcatgaaagacaacagtggaataatttctcaacaagtcaagtgaccacaaggaaaccaatggaccagcagatggaaaatgcttccaaaaaataaatgttggggccgggtgctgtggctcatgcctgtaatcccagcactttgggaggccagggcgggcagatcacctgaggtcaggagttagaaaccagcctggccaacagggtgaaaccctatctctactaaaaacacaaaaatcagccaggcacggtggtgcacacctgtaatcccagctacttgggaggctgagacaggataatcacttggatctgagaggcagaggctgcagtgagccaagatcacgccactgcactccagcctgggtgacagaacgagactccgtctcaataataataatatgttgggtaaggatggcttctgtgctgtatgagtcatcttgggctgccctaacaaaatactacagaaattttctccaaaaggaggctaaaaagtccaacatcaagatttagacagggttcagtttctggcgaaggctgtctccctggcctgcwggtggccctgtcctctcctggcccttcctctgagcatggatggactgggtgagctctggcatctctttttcctataagggatcagacttatcggattacagccccacccttacaacctaatttaacctttatcatctcctcatgggccctgtctccaaatacagtcactgatatggtttgcatctgtgtcctcacccaaatctcatgttcaattgtaatcctcaatgttggaggtttacaccagatggggcctggtgggcagtgattggatcatgggtgt

SEQ ID NO: 32399 - DNA, 866 bp, Homo sapiens
gaaaaacatttgtcattggtaaacaaacactagaatgtcatgaaagacaacagtggaataatttctcaacaagtcaagtgaccacaaggaaaccaatggaccagcagatggaaaatgcttccaaaaaataaatgttggggccgggtgctgtggctcatgcctgtaatcccagcactttgggaggccagggcgggcagatcacctgaggtcaggagttagaaaccagcctggccaacagggtgaaaccctatctctactaaaaacacaaaaatcagccaggcacggtggtgcacacctgtaatcccagctacttgggaggctgagacaggataatcacttggatctgagaggcagaggctgcagtgagccaagatcacgccactgcactccagcctgggtgacagaacgagactccgtctcaataataataatatgttgggtaaggatggcttctgtgctgtatgagtcatcttgggctgccctaacaaaatactacagaaattttctccaaaaggaggctaaaaagtccaacatcaagatttagacagggttcagtttctggcgaaggctgtctccctggcctgctggtggccctgtcctctcctggcccttcctctgagcatggatggactgggtgagctctggcatctctttttcctataagggatcagacttatcggattacagccccacccttacaacctaatttarcctttatcatctcctcatgggccctgtctccaaatacagtcactgatatggtttgcatctgtgtcctcacccaaatctcatgttcaattgtaatcctcaatgttggaggtttacaccagatggggcctggtgggcagtgattggatcatgggtgt

SEQ ID NO: 32400 - DNA, 866 bp, Homo sapiens
gaaaaacatttgtcattggtaaacaaacactagaatgtcatgaaagacaacagtggaataatttctcaacaagtcaagtgaccacaaggaaaccaatggaccagcagatggaaaatgcttccaaaaaataaatgttggggccgggtgctgtggctcatgcctgtaatcccagcactttgggaggccagggcgggcagatcacctgaggtcaggagttagaaaccagcctggccaacagggtgaaaccctatctctactaaaaacacaaaaatcagccaggcacggtggtgcacacctgtaatcccagctacttgggaggctgagacaggataatcacttggatctgagaggcagaggctgcagtgagccaagatcacgccactgcactccagcctgggtgacagaacgagactccgtctcaataataataatatgttgggtaaggatggcttctgtgctgtatgagtcatcttgggctgccctaacaaaatactacagaaattttctccaaaaggaggctaaaaagtccaacatcaagatttagacagggttcagtttctggcgaaggctgtctccctggcctgctggtggccctgtcctctcctggcccttcctctgagcatggatggactgggtgagctctggcatctctttttcctataagggatcagacttatcggattacagccccacccttacaacctaatttaacctttatcatctcctcatgggccctgtctccaaatacagtcactgatatggtttgcatctgtgtcctcacccaaatctcatgttcaattgtaatcctcaatgttggaggwttacaccagatggggcctggtgggcagtgattggatcatgggtgt

SEQ ID NO: 32401 - DNA, 1262 bp, Homo sapiens
acatttcagatgtgggttgccacaacagaagagtgggggctgagycgccaggcagattctcagtaagctacacagcaccacctgggggcacaggtgggagccttctccaaactcggaggtactatctggagacaggttttccaacagttgggcttggaatagttggggttaagaagttgtggccataaggtaacttctttccccagagaggagttctccaggatcttttttggttgtgcataaaagagagtgaggtgaagggacctggtgggctcacagcgcagggtgcagggatcttttatctacgtcctccactgtgcctgatcaccggagatctgaagtctctctggctctgtgtataaacctgttttctgccccaggtggcattctgaatgcacagcttggggtggagggcccaatggctccactacttcacatccgggatttcaacctgctctgtggtgttttagctcttcgttttatcctgccttttgtttttttttgaaacacaaattcaacttactacctgtttttaaatgaaaagagtcaaaaaatatgatcttataacctgtgaaaatgagatgaagttccactttctgtgtctgtagagacagtttgactggagtgcagcaccagcacccactcacgcactgtttacagctacttgcttcttaacacagcaaagctaaaggcttcacacatataccatggggtctgtaaagctgaaaacacagagaaagcttattggcccctgatagcaaacaaatcatgtgcaggcccaagaggtgaaagaaaagagggggtaacatcaggaagacagaaaagtaagaggtaaattttgtaatgcaggaaatcagccaggcattgacacctaacccctttgcccccttgcctgtgacactaataggaagaattattgtcagttcttcaagaaattcatgcacagaccagataggaaatttacctcatgagagaactgccctcctagaaacggaatccaaaaatccccaacgagtttcttccattaaccacttaactaaatattctctacaagtgctcaaattattagagcgttattagagcaaattatcaaaacaatgttgagaatttaaagtatatatagtatctaaatattatatatactatataataactcattgaaaaacatatagcataagggtttattaatgtttattaaagtctgatgttcagttcctgtacttatgcagctaaatccaaatacagatatattttagcttacc

SEQ ID NO: 32402 - DNA, 1262 bp, Homo sapiens
acatttcagatgtgggttgccacaacagaagagtgggggctgagccgccaggcagattctcagtaagctacacagcaccacctgggggcacaggtgggagccttctccaaactcggaggtactatctggagacaggttttccaacagttgggcttggaatagttggggttaagaagttgtggccataaggtaacttctttccccagagaggagttctccaggatcttttttggttgtgcataaaagagagtgaggtgaagggacctggtgggctcacagcgcagggtgcagggatcttttatctacgtcctccactgtgcctgatcaccggagatctgaagtctctctggctctgtgtataaacctgttttctgccccaggtggcattctgaatgcacagcttggggtggagggcccaatggctccactacttcacatccgggatttcaacctgctctgtggtgttttagctcttygttttatcctgccttttgtttttttttgaaacacaaattcaacttactacctgtttttaaatgaaaagagtcaaaaaatatgatcttataacctgtgaaaatgagatgaagttccactttctgtgtctgtagagacagtttgactggagtgcagcaccagcacccactcacgcactgtttacagctacttgcttcttaacacagcaaagctaaaggcttcacacatataccatggggtctgtaaagctgaaaacacagagaaagcttattggcccctgatagcaaacaaatcatgtgcaggcccaagaggtgaaagaaaagagggggtaacatcaggaagacagaaaagtaagaggtaaattttgtaatgcaggaaatcagccaggcattgacacctaacccctttgcccccttgcctgtgacactaataggaagaattattgtcagttcttcaagaaattcatgcacagaccagataggaaatttacctcatgagagaactgccctcctagaaacggaatccaaaaatccccaacgagtttcttccattaaccacttaactaaatattctctacaagtgctcaaattattagagcgttattagagcaaattatcaaaacaatgttgagaatttaaagtatatatagtatctaaatattatatatactatataataactcattgaaaaacatatagcataagggtttattaatgtttattaaagtctgatgttcagttcctgtacttatgcagctaaatccaaatacagatatattttagcttacc

SEQ ID NO: 32403 - DNA, 1116 bp, Homo sapiens
ttcatacaaaatggcttaatgattagaaaacaccaacataaatacttgggaaggagaagatactaaatcaaagaagtaagtctttcattgaaagcctctattcaccactgcaggagcaggacggctcacttaaaatatataaatatccgtttacagttggagtactaattgggatttttaaaaaatttaattagtcacatatatattttacatttcttggaagactgtttttttctttttaaggtaaaatcatgactctcatacaaatatcaacatgtgtcaaaagattttattaaactaattcaatttgttagggaaatggtaagatgttacaactggttaagaggagcattaaaagtgcagacatatattcaggccatcaagaatgaggaaatgaatttgctaaattgatgcaacatcaatcaatagccagggcctgtcattcacagacaatcactccaccacacgcacacatacattcctacggtttgtccacaacttccagagctgaagagtagctcaaggacatcaaagggcagaggcccctaggaagggctgagccacaatgaagcagtgctccttcactcccgatttccatggctaccaccgtttttctctggcaaatcagagacgaattttaaagactgagtaaatctataaaagcrattaatcacagaagttcaatgtctgataaattattccaaaagtgttcctgggcactgagactcaccaagcatacattctgaaatcaaattctatttctatccaaaaagtgcagcccatcagtgttcttaaaggaggcaaatggttgttgtgaggtagcaaacattttccaatgcaggtaaggatgtagataccaggtaaatgttacagttgtgttcatactaacaataaactatggatgacgtggcacagagtcagtcaatgaggaaagatccagagacattctgaggtcacaaaaagaatttaaatgttagctaacaaggagtgctcatcaaaaacaggactttcccactcagactgcaaaccaggcagaactaccatctcgctttatcagttgtcattgcatgttgacatcaacactgaggagagtgatgcagacgatagatataaaca

SEQ ID NO: 32404 - DNA, 628 bp, Homo sapiens
gggtattcccacggggacgcacgggcacccagtggtttagattcattttgtccctaatcccagccaaatcccgtcagcctattcctgcagctcctgttttagtgcataaaaacattgcgatgtgtgatggagcaggtgatttttttttgcagtctttcccccatagttaaactttaatgaaagattaaatcacagtggaatttgagtgacaagcagatgagatctgtggcaggcaccgtgagtctggctgggtgggctatggcagggaytggggaagatgaccccacctgcccaccaccagagtgcctcggacctcagcagatggcagctctctggattggggtcatgattaattcatctcttaatccctggcacctagtaagtgcctggtacacagcaggtgccccagtgaataattgaatgaatgaatgaatgaatgagctggctgagttgcctgctttaaattgttgtttgccaaacagttgctcctggatatcctggtgtcatgatattttctgtctgtgctggacatctttagtgtgtcactccaggcccaatcttcactctgttcatctaggcctgttggcttccagcccttgggtgtccagctagaggttggaagcaggta

SEQ ID NO: 32405 - DNA, 628 bp, Homo sapiens
gggtattcccacggggacgcacgggcacccagtggtttagattcattttgtccctaatcccagccaaatcccgtcagcctattcctgcagctcctgttttagtgcataaaaacattgcgatgtgtgatggagcaggtgatttttttttgcagtctttcccccatagttaaactttaatgaaagattaaatcacagtggaatttgagtgacaagcagatgagatctgtggcaggcaccgtgagtctggctgggtgggctatggcagggactggggaagatgaccccacctrcccaccaccagagtgcctcggacctcagcagatggcagctctctggattggggtcatgattaattcatctcttaatccctggcacctagtaagtgcctggtacacagcaggtgccccagtgaataattgaatgaatgaatgaatgaatgagctggctgagttgcctgctttaaattgttgtttgccaaacagttgctcctggatatcctggtgtcatgatattttctgtctgtgctggacatctttagtgtgtcactccaggcccaatcttcactctgttcatctaggcctgttggcttccagcccttgggtgtccagctagaggttggaagcaggta

SEQ ID NO: 32406 - DNA, 619 bp, Homo sapiens
aatcattatgaaataaattattttgatgccctttgaatgtttatttttagcaaaagaaagggtgttgtgttgacrgatagcaagtagctacaaaagcagaagaaacccagaattctcaagattatcaacatattccctttcccctctttgagcccgaatcagtctctccaggggtctgaataaacaaacatgcttgtcactgtagaacaacttttacatccttcagataaggactcagctcagtttagggtcaaattatactggtagcaaagctgatcagagcaaacaaggtttcagaggattcactcactcttgtaaaagctgattataattgatgaatgaccagcttgctagaccctgacagactggttgcctggcctttgctctctgccagttcaagccttacaagtgtgaaatagccaattactgaaatacctattgaaagtaataggccaatgagcaaattgctactgtgggacatcgtggcagtggagatggaaggaggccaagataaatttctgctctgagcagctgctcccaccacagattgctaatactattggatgaccaagagatgagagcaaggtattttcccattcaaactgcaagtgtcctgcct

SEQ ID NO: 32407 - DNA, 1993 bp, Homo sapiens
tccctgtcagcaacttgaaagccaagtggaattagaaagagaggaaaattttgctttggcccaggattgtagaatgtttaattgttcaaattctcagtatgtttgcgcacacaaaaataactgcgtatgaaaagttacttggttgatccaacagagattcttcaggaactctgaaactcagataaaagcaaagttaaatatgataaaccccacaaatcatgatgtgttacctttgcatagctcttcacaaaaatgcactctttgatagtatttggaaacagttaatgctcaatagtctatgagaactgaggaaattttctggtggaatgctttaggcataacaagatattccagaatgtgtttttgttttgtcaaattgcatgtcattctggggatttgctatggagaatggagtgaaggcagaatgaaggagggtccaagacctggattagctgaagattggacaggaggtagaacttgagactggaactcagaatctaacacaaaggcaataagcaatgaccctggtctgaagcacatggcagaacctgctgtcagaccactgaggagccaagctctccccattcatggagcaagcagtctgttccatcattttgaatttcaccaagcaaaacagataggactttacccaggttcaagttgggggtgrcggtcgtgagggtagtgagaagctgctgtgctggagcacacagctgctgagaaagaaggtttacagggagagctgaactgcctctccatgtctgcagcataaatgccagagacccacgatgacctgtctcagaaccttagctcattgctaccaaaatagtcccagagcaatctgaaactcagtgaacatattcacctacagagttattgattttctcaatttccaattaaggtttaaggtgctgcacagtggtgtacaggtgcaggctttgaggtcaggctgccaggtttgaatcctagctccatcactcactagcatgtgtgactttggcaaagattcttaaattttgttgccttagtttactaaactgtcgatagtgtcagtagttcttacttttcagtaggttactgtaatgatggaatgggtggatccatgcaaggcatttgaaatagtaacttggctcccactgaacttgcaatagctattttgttgttattgtcattgcagttccacatacttcagatcaaggagagggagaaactgtttttgttatgccccctccttctacttattgtcacttccagatctttttttttttttttttttttaatcctcctcttgtaaaacttgctattctgacctccaaactacccctttggagtagtttgtactcagttcttggtcattcctcttgattcacaaatgagttctgctttggacccactcttccttaccacacaaacttcagccagtaggctgatccatgcaatcacaagacccctaggttcttaaccttcttgtatcagaggatctttcccatcacaatatctcccatatcctttctcctgatgacctgatcactcttcatcatcattagaataggcaccatcacgaaacctggaaagaaaacattctgccttgggaccacatttcctctcctctcttcttgattccattaaattccctccttacaatattatggtcctaaagacatttaaaccattgagtttttaccctctttcaccttcctcctaactttacttctccaacttacaggcaaacgttcattattagaatcatatcagatacacagtttctttcttgctcctttgtactctccttgaaaaacacacattccaggtgaacgtaaccatctgccgtcttaatgctccctcccaggtacttgagtgtaactggagaaaatgtacaacctggcatactgttttcacttcatgaccttatatgtcaaatggggtctcaatactaaccagaaattctctttctcaattaagctcacttcctgatatctgagatgactacttc

SEQ ID NO: 32408 - DNA, 1993 bp, Homo sapiens
tccctgtcagcaacttgaaagccaagtggaattagaaagagaggaaaattttgctttggcccaggattgtagaatgtttaattgttcaaattctcagtatgtttgcgcacacaaaaataactgcgtatgaaaagttacttggttgatccaacagagattcttcaggaactctgaaactcagataaaagcaaagttaaatatgataaaccccacaaatcatgatgtgttacctttgcatagctcttcacaaaaatgcactctttgatagtatttggaaacagttaatgctcaatagtctatgagaactgaggaaattttctggtggaatgctttaggcataacaagatattccagaatgtgtttttgttttgtcaaattgcatgtcattctggggatttgctatggagaatggagtgaaggcagaatgaaggagggtccaagacctggattagctgaagattggacaggaggtagaacttgagactggaactcagaatctaacacaaaggcaataagcaatgaccctggtctgaagcacatggcagaacctgctgtcagaccactgaggagccaagctctccccattcatggagcaagcagtctgttccatcattttgaatttcaccaagcaaaacagataggactttacccaggttcaagttgggggtggcggtcgtgagggtagtgagaagctgctgtgctggagcacacagctgctgagaaagaaggtttacagggagagctgaactgcctctccatgtctgcagcataaatgccagagacccacgatgacctgtctcagaaccttagctcattgctaccaaaatagtcccagagcaatctgaaactcagtgaacatattyacctacagagttattgattttctcaatttccaattaaggtttaaggtgctgcacagtggtgtacaggtgcaggctttgaggtcaggctgccaggtttgaatcctagctccatcactcactagcatgtgtgactttggcaaagattcttaaattttgttgccttagtttactaaactgtcgatagtgtcagtagttcttacttttcagtaggttactgtaatgatggaatgggtggatccatgcaaggcatttgaaatagtaacttggctcccactgaacttgcaatagctattttgttgttattgtcattgcagttccacatacttcagatcaaggagagggagaaactgtttttgttatgccccctccttctacttattgtcacttccagatctttttttttttttttttttttaatcctcctcttgtaaaacttgctattctgacctccaaactacccctttggagtagtttgtactcagttcttggtcattcctcttgattcacaaatgagttctgctttggacccactcttccttaccacacaaacttcagccagtaggctgatccatgcaatcacaagacccctaggttcttaaccttcttgtatcagaggatctttcccatcacaatatctcccatatcctttctcctgatgacctgatcactcttcatcatcattagaataggcaccatcacgaaacctggaaagaaaacattctgccttgggaccacatttcctctcctctcttcttgattccattaaattccctccttacaatattatggtcctaaagacatttaaaccattgagtttttaccctctttcaccttcctcctaactttacttctccaacttacaggcaaacgttcattattagaatcatatcagatacacagtttctttcttgctcctttgtactctccttgaaaaacacacattccaggtgaacgtaaccatctgccgtcttaatgctccctcccaggtacttgagtgtaactggagaaaatgtacaacctggcatactgttttcacttcatgaccttatatgtcaaatggggtctcaatactaaccagaaattctctttctcaattaagctcacttcctgatatctgagatgactacttc

SEQ ID NO: 32409 - DNA, 1993 bp, Homo sapiens
tccctgtcagcaacttgaaagccaagtggaattagaaagagaggaaaattttgctttggcccaggattgtagaatgtttaattgttcaaattctcagtatgtttgcgcacacaaaaataactgcgtatgaaaagttacttggttgatccaacagagattcttcaggaactctgaaactcagataaaagcaaagttaaatatgataaaccccacaaatcatgatgtgttacctttgcatagctcttcacaaaaatgcactctttgatagtatttggaaacagttaatgctcaatagtctatgagaactgaggaaattttctggtggaatgctttaggcataacaagatattccagaatgtgtttttgttttgtcaaattgcatgtcattctggggatttgctatggagaatggagtgaaggcagaatgaaggagggtccaagacctggattagctgaagattggacaggaggtagaacttgagactggaactcagaatctaacacaaaggcaataagcaatgaccctggtctgaagcacatggcagaacctgctgtcagaccactgaggagccaagctctccccattcatggagcaagcagtctgttccatcattttgaatttcaccaagcaaaacagataggactttacccaggttcaagttgggggtggcggtcgtgagggtagtgagaagctgctgtgctggagcacacagctgctgagaaagaaggtttacagggagagctgaactgcctctccatgtctgcagcataaatgccagagacccacgatgacctgtctcagaaccttagctcattgctaccaaaatagtcccagagcaatctgaaactcagtgaacatattcacctacagagttattgattttctcaatttccaattaaggtttaaggtgctgcacagtggtgtacaggtgcaggctttgaggtcaggctgccaggtttgaatcctagctccatcactcactagcatgtgtgactttggcaaagattcttaaattttgttgccttagtttactaaactgtsgatagtgtcagtagttcttacttttcagtaggttactgtaatgatggaatgggtggatccatgcaaggcatttgaaatagtaacttggctcccactgaacttgcaatagctattttgttgttattgtcattgcagttccacatacttcagatcaaggagagggagaaactgtttttgttatgccccctccttctacttattgtcacttccagatctttttttttttttttttttttaatcctcctcttgtaaaacttgctattctgacctccaaactacccctttggagtagtttgtactcagttcttggtcattcctcttgattcacaaatgagttctgctttggacccactcttccttaccacacaaacttcagccagtaggctgatccatgcaatcacaagacccctaggttcttaaccttcttgtatcagaggatctttcccatcacaatatctcccatatcctttctcctgatgacctgatcactcttcatcatcattagaataggcaccatcacgaaacctggaaagaaaacattctgccttgggaccacatttcctctcctctcttcttgattccattaaattccctccttacaatattatggtcctaaagacatttaaaccattgagtttttaccctctttcaccttcctcctaactttacttctccaacttacaggcaaacgttcattattagaatcatatcagatacacagtttctttcttgctcctttgtactctccttgaaaaacacacattccaggtgaacgtaaccatctgccgtcttaatgctccctcccaggtacttgagtgtaactggagaaaatgtacaacctggcatactgttttcacttcatgaccttatatgtcaaatggggtctcaatactaaccagaaattctctttctcaattaagctcacttcctgatatctgagatgactacttc

SEQ ID NO: 32410 - DNA, 1014 bp, Homo sapiens
atggggtttcaccatgtttttcaggctggtctcgaactcctgacctcaagtgattcacccacctcggcctcccaaagtactgggattacaggtgcgagccaccccacctggcccaaaatactgtaatatttttggaccatgtttgactgtaggtaacttaaaccacagaaactaaaattgtggataaactataattgtgggggactactgtacaagaacgaacacatttcgaatatagaaaagtgttctggtgagataattctctgtgttatttactatttaaatctaatttccttgtatgcccatgacaacaactagcatagaactcatatagaacagggccactgtgctttgcctacataattttatcatttatgcagaaaggaagaacatgtcactgtcattttgtggccagtaaactagttgtcaaattttaaatggaaaatatgttagttaatataaaacaatttttttggcaaatttcctgcgaagctgtccacaaaacaataaaaacacaacaaggatacaatgtgtttccttcaaacagccctcagctagcctgctaacaggggctgaaacctttgatttagctgtgatctcctaaatcagctgagcccartagggaggttatataactcacccattatttaaatgtccaaaagtaatatctctaatttattttctacaatgtttatattggatttttatggtaattaaagacagtattgtggcaaagctttttttttgcacaattttacaaaagaagaaatcaacattttaagaatgtaataactgctcttataaaagaatagtcacatgttgcaaatagaggtttaagtcccttgaaaatgttggaatgaaatgtagtaatctatgacttttctgcctataaatatcaccaataaaagaatttttaggattactttatattcagtaagagtagactatttttaaactttaaaaaatagaaaaaaagattaaaagaaaaagctacttccgttttgaacctgtgaa

SEQ ID NO: 32411 - DNA, 1085 bp, Homo sapiens
tttctgagatcacagagccctttcctggggatctaatgaaagctatgtacccagtacctaggaaaaagccttataatgaatttatacatattacattcaatttcagggagttcaaagagccctgaagcccattccacggcaaagaaattggacagtatgccagtgttgaatgatctcccacccttatccctgaccccacagtccagtaaacaaagcgacagtgcatataggggaggggtggcttacagcaattgcacaccatcccttccttgaaacctctactggcctgggacctgggttttgccctagctgatctgagaggcctccccagcctgctctggcatgaggtggtgatcggggtggcagctgggagggggtaggctgggaaagccataacagactttgtggggaagccggaattatgctatactggaggacaacacttcttcctcaccccctcagggtatcctttttcgggttgagatttggaactgcccagcctggaaaatgaaggcctcctcccttaattaaatgcccaggggttgctatggtaaccagagcttccaaatcctggccagacaatagggagaggagctgtctccagcctagatgagtgaagcttcaggggccttgctggggacaggaatggggccagagggtgagaaaaaaggrggtgccaaatgagaagatcagcctcctctctccctggagctgtgggaatgggcctgtcagagccaaggggtctgagacaggggcaaccctcctggaaaggggaggcgatgggggcgggtagctggagccaggcactgcccagaaccaaacacctcctttgttcccagaggagaaagccagccaagttggtaaacaaagggaagaggccagagggcagacagctaagtgataaggcctgggaccgcagagagctgagtaatggagccccagagacgaggggaatctccatggtcccactaacaagcaggacacgcggcaggcctgcataccttgccacactgacacacacagtcacagtgatcacacaggacacacaggtgttcctacagaaacactgatctttgaggacactt

SEQ ID NO: 32412 - DNA, 1124 bp, Homo sapiens
atccatttcttacaggaaagccaagggtacaggatggtaaaccagtcatcctcctttttcgcactcgaaacagccctgtgtttgagctccttccctggtaagtgccatgtgggcccttaggtctggacttctcaccagccttcctgcacaaacaaacccacatcccactacattcagctcccttcttgcctccggttgcctgctcaccttttcttctagtggcattatccagggggagccaggagcccagccccagctcatcactttccatccttccttcaacaaaggggccctgctcagtgtggtgagtgcgccaggctgctggggcttccaggagttggatggagaagctgagggccttggctgctgtatggctctgccaggtggcccttctttgggcccagactctgatccttttctttcccttctctgcagggctggtccacaggccgaattgcccacatcccgctgtactttgtcaatgcccagtttccacgttttagcccagtgcttgggcgggcccaggaaccccctgctgggggtggaggctctattcatgacctgcccctctttactgagacatccccaacctctgccccttgggaccctctcccagggccaccacctgttctgccccactccccacattcccacctctaagaataaataagttttccttttgttttccactcagttaccagtctgtcttttccagggagttgcagtggggtacagtaggggaaaaaagcatggactttgggttaaggccctgttctgtcactttttagccacttgtgaatttggtcacgttatttaatcctagaaactatggtttcaaatgatttgggaagcaaggctgagaagttactgtgaagaaaatatatctagcacagggtcttacacataaatagttgtttcacttttcacaagtttctggaatggtgtagggcaagaataagtcaaggactgggtcagtatgagatggaaggttttattagactaggagatttgtgggaggtatgagcgctgggccaaggtggcacgggccatgctcaaggcaccctctcgggtgyggtgaccgccagtgaagccgcttgcatggacgaagatgcagccagggatcc

SEQ ID NO: 32413 - DNA, 1124 bp, Homo sapiens
atccatttcttacaggaaagccaagggtacaggatggtaaaccagtcatcctcctttttcgcactcgaaacagccctgtgtttgagctccttccctggtaagtgccatgtgggcccttaggtctggacttctcaccagccttcctgcacaaacaaacccacatcccactacattcagctcccttcttgcctccggttgcctgctcaccttttcttctagtggcattatccagggggagccaggagcccagccccagctcatcactttccatccttccttcaacaaaggggccctgctcagtgtggtgagtgcgccaggctgctggggcttccaggagttggatggagaagctgagggccttggctgctgtatggctctgccaggtggcccttctttgggcccagactctgatccttttctttcccttctctgcagggctggtccacaggccgaattgcccacatcccgctgtactttgtcaatgcccagtttccacgttttagcccagtgcttgggcgggcccaggaaccccctgctgggggtggaggctctattcatgacctgcccctctttactgagacatccccaacctctgccccttgggaccctctcccagggccaccacctgttctgccccactccccacattcccacctctaagaataaataagttttccttttgttttccactcagttaccagtctgtcttttccagggagttgcagtggggtacagtaggggaaaaaagcatggactttgggttaaggccctgttctgtcactttttagccacttgtgaatttggtcacgttatttaatcctagaaactatggtttcaaatgatttgggaagcaaggctgagaagttactgtgaagaaaatatatctagcacagggtcttacacataaatagttgtttcacttttcacaagtttctggaatggtgtagggcaagaataagtcaaggactgggtcagtatgagatggaaggttttattagactaggagatttgtgggaggtatgagcgctgggccaaggtggcacgggccatgctcaaggcaccctctcgggtgtggtgaccgccartgaagccgcttgcatggacgaagatgcagccagggatcc

SEQ ID NO: 32414 - DNA, 750 bp, Homo sapiens
tgcatgcacgcagtcccagggtcacttttcgcggaccgtacccggtactccggcaggaggcgaagcagtgcgcatgccagtgcctcgtcgcagtggaaggtgccattgtgcgtcccgattcggggcggtgccatgagtttgctgcgggatcgttttgggggcgggacggactctggaccgagcatgcggtgccgggtatacaggggtggcggcggcagcagcagcgttaagaggccgcgcaggaaktggtgtcccataagcagctccctgcagggaggcaggagcgccgacccggaagaggaagcgccagcgcagccccacttccgcttgccaaccgttcccttggcaaccagctctgcagagtgagcagcagcagactcccagcctaggatttcttccagctggtcaaagggccctgcgatggagcctccaagaggcgcatcgcatcacccctgcgcatcaggctctgagacggggcccacactctcgaccacaccccccatctcatcaccagtcccttgcttaatccaagaaaagaccaacattctgcccagctggcacatttattggcattaaaacacaagacccttcccatcaccaggaagccacgcccaaagggtgtccctctgccccatttctgcaaaaactctcaggccttagcagtagcctgagctgcccccagggctgtgagctgctgaatcttctgactcatcatttccatgacggctgtggaaaaaaataagagtcaaa

SEQ ID NO: 32415 - DNA, 750 bp, Homo sapiens
tgcatgcacgcagtcccagggtcacttttcgcggaccgtacccggtactccggcaggaggcgaagcagtgcgcatgccagtgcctcgtcgcagtggaaggtgccattgtgcgtcccgattcggggcggtgccatgagtttgctgcgggatcgttttgggggcgggacggactctggaccgagcatgcggtgccgggtatacaggggtggcggcggcagcagcagcgttaagaggccgcgcaggaatyggtgtcccataagcagctccctgcagggaggcaggagcgccgacccggaagaggaagcgccagcgcagccccacttccgcttgccaaccgttcccttggcaaccagctctgcagagtgagcagcagcagactcccagcctaggatttcttccagctggtcaaagggccctgcgatggagcctccaagaggcgcatcgcatcacccctgcgcatcaggctctgagacggggcccacactctcgaccacaccccccatctcatcaccagtcccttgcttaatccaagaaaagaccaacattctgcccagctggcacatttattggcattaaaacacaagacccttcccatcaccaggaagccacgcccaaagggtgtccctctgccccatttctgcaaaaactctcaggccttagcagtagcctgagctgcccccagggctgtgagctgctgaatcttctgactcatcatttccatgacggctgtggaaaaaaataagagtcaaa

SEQ ID NO: 32416 - DNA, 872 bp, Homo sapiens
tgtattttattttccactctatgggatacattcaggtcactaaatcaacttattttttcacttggtctctttttcattcacctacaagaaaaatgatacctggtttgactatcttctttgtataaaatgtgttacacatttttaaagaacagcataattcactcagttttactcaatgcaaaaattttcctggaaacatctcaaatggatgtccttttctacctctaccaccctcaatttaaataatggtcaattttatgccactattgctaacaatgaattatagtgtagggcggtttcacatttttctgcacaagaacatttactagaaaaaaaaatccattttactcgagagggaaacatattttactataaacagaatagtcaagaatgccaacaaaatcaaagagccataaggtcaatggaaagtgtccattaaattttttttcaattttggaaggcatctttgttcttagtgggaaagcagatgagtagaagtcttgatggataaacaggacgtcaattcaccagaatattcacaaagcaacaaaagaatgacaggatagctttgcatataaagtcaagaggcatgatcacttttcagtttgctaaataacccctcagtcattcaggaagaaatatacacttttcccaaaggatatcaaaagctcctactgtacaattgtgcatgcaaatcaaaagcactggttattttcttcttcccttctrcttgcaatgtttggtcttggcttagtcttgtgggctcaggcatcccctaggtggcttcctctgacctcatccctcccacatgtctaaccactcctttagtgctgccaatgcaatgcccttaaactgccctcagtccacaccca

SEQ ID NO: 32417 - DNA, 661 bp, Homo sapiens
tttatctttttttaactgattttaaaaacaaactcttgctgaataaaattaactgatgttaaggatcattttcctctttcacagtattataaaattaacatggcaaatagcctttcagaataaagaaaacatgtttcttgcagttgatcacagrtatgtaactaatttctgatcagcaaggtctagtaaaaacactatgtggtagactcttggagccttctgttggtgactccgttctgtcatgtgattttcagatccattctcaaaaccgcaacttattagtcaacttttgctcaaaaatttcagttgtgtagcttactttgttcctcatgggtttgcaagttggttgtggcagctctttttcaggcagcatatcaggttcaattatgcttcacagagctatcattctgagatccaggctgaagcagcagcaacaccctagggcatgttctcctcctgaaggatggcaggaacacaagagaatgagtaaaaatgcaagattcgtcttgaagcaactattcaaaactggcatagtgtcaccttcatttggtcaaagtaaaagagttggagacatattatgtgcctgttctactgggagacacttcaatatcacagacatagagcttagatatacaatcctataacttggagggagcaaaga

SEQ ID NO: 32418 - DNA, 661 bp, Homo sapiens
ctggaacccatgcctaaatttgacccctgattccaccatttaatggtcccatgaacatgagataattgcatcaccactgaataataattaatgcacatttctgaatttatatgcaccagtcactacttactaatccattgtagagcaaaaataaaattctgagcccctcggtcatctgaacagacccctcctctcagcaagggcattccaaaattaacctgaagaactagttcaggtcattatggggagtgggatcaaacatggctcattatatcctccttccttttggaattctggaaaagccaaccagcattcacttaaacacggatggtaagtctgataagaaacatttacaatgtattctctctgaagcctgctacccggaggcttcatctgcatggtaaaaccttgctccacaaccccttatcataacccagatattcctttctattgatttcaggtctttagataataactgttgcaaccaattgacaatcasaaaatctttaaatctacctatgacctgaaagcctctgcttcaagcactcccacctttccagattgagccaacatgcgcgtccgtgtgaagagaccaccaaacaggctttgtgtgagcaacatggctgtttatttcacctgggtgcaggcgggctgagtccga

SEQ ID NO: 32419 - DNA, 1200 bp, Homo sapiens
tggatgtttggtagatcaatggtatgggaaactgtctagatttgaatgctcaacttgacgcactgacaaattggaaattataaatcagaaacagaaagatcatcttcaaaaaaagtaatatgcaaacaagtagaatgaatctccaattgcataggattaacgccttttttgagaaaccagggtcaacaagtattaatagcgtttaaaagttaattatctagaacagatatttttcctgaataaaatattattttaaaactaggacatcaaagtgtattaaagcatgtctcttttttaaatcccatgactgtgattattttagagcatgagccaaatttacctctatgatacaggggactgacaaaaacacaaaacccatttaaaggctaagaatacaatttcatttggaagatcattaggagatgcacagaattcagattgcctccttacatagaaagagcttttaacacacttgcctctggctctctgcgggggatatccagaaaagattaacctaactagcaatgcaaagttgtattcatatttgctccataggaatattaccagaaacccattacatttaatcatgcaaattactgacactgtatgaaaacagccttgaaagaataaactttatcagggactcagcaactctttccttacagtcgaatgcaaccaatgtaataagttttttttttaattgcatgcagaatttgcctcttcaatatgttcagttttcacaacgatttaaacatctttaacaatgaaggatgttggcagggcatacatgctagctcatcgtcagagagctggagtttttttttttttttaatttgagagaaggtctcattttgtcacctaggctggaaggcagtggtgtgatctcagctcactgcagcctgcacctcccaggctcaagcaatcctcccgcctcagcctcccgagtagctgagactacaggcatgtgttaccacatccggcttttttktgtgtgtgtgtttttggtagacaggttcttgccatgttgcccaggctggtctccaactcttgacctccaatgatcctcctgccttggcctccgaaagtgctgagtttacaggcatgagccactgcacccaactgggagctggagttttcaaggtgttagagtgtcatatttggtgtgttcctttctgaaatagaaagtatatttaaagagca

SEQ ID NO: 32420 - DNA, 1192 bp, Homo sapiens
ccaagatcgtgccactgcactccagcctgtgttacagagcaagaccctatctctctctctctctctcacacacacacacacacacacayacacacacacacacacacacacacacataaaggagtacagactctgcattctggctttgcagcagctgtgtaaccttaggcaagtcacctaaccccgctgagtttccgtttcttcacctgtcaaatagggatgcaaataacagctgcctctctggttgttgtgggcattacatgggacaagcctgacaagctcctagcatggcccctagcacatggtaagagctaagcactcaataaaacaccttcttcatcaggcttagcaccatcataagggattagttacatcccaggggctctccctgttatctctccctgctttccattcagttgtgcatgttggagttcagataggaagaggatcctttgtgaagctcaagcttcagacctctcccaagcctcgtaccgaatcctgtatttgtaaatctgtattcattttcttcaagagtccccctcaagtagtaaatgctccccgccccttaacccttggatctgctcctgggttcatgttcttgctagagaacagagcagagagaagctgtcgggacccctactgagagaatagagaccttgtgttttatctcttcttgccggagagctctgcctatggcctcgcagacagcaatcagtcaaggctcagccacccacacttccaccaaagatgtttcacaaagccttactcaacctctcacatcaatcccagaagctagcggtgtaatcgctccacttacagggaagcaaaacccaaagaggaaaggagattggtccaagatcttaagatccacaggtcagaaagtggcctggggtgggctgagttttgcaaaggtgacctcatccttcttccatcatttattgtgtttttctcttccacgtcgagaaagtctaatagcttagataattccacactaatgaacttgctgtgtgttagccctgggtctccttggaaccactggtgtcaccttcttactccatgtgcccaaggagggctccttcttccaggagaagctccctggtctcagctgatcggtgctgggtaatgcaccactaaattatacctcctctttacttttatttttgtgaacatttaatacctcactgagagatgg

SEQ ID NO: 32421 - DNA, 1192 bp, Homo sapiens
ccaagatcgtgccactgcactccagcctgtgttacagagcaagaccctatctctctctctctctctcacacacacacacacacacacatayacacacacacacacacacacacacataaaggagtacagactctgcattctggctttgcagcagctgtgtaaccttaggcaagtcacctaaccccgctgagtttccgtttcttcacctgtcaaatagggatgcaaataacagctgcctctctggttgttgtgggcattacatgggacaagcctgacaagctcctagcatggcccctagcacatggtaagagctaagcactcaataaaacaccttcttcatcaggcttagcaccatcataagggattagttacatcccaggggctctccctgttatctctccctgctttccattcagttgtgcatgttggagttcagataggaagaggatcctttgtgaagctcaagcttcagacctctcccaagcctcgtaccgaatcctgtatttgtaaatctgtattcattttcttcaagagtccccctcaagtagtaaatgctccccgccccttaacccttggatctgctcctgggttcatgttcttgctagagaacagagcagagagaagctgtcgggacccctactgagagaatagagaccttgtgttttatctcttcttgccggagagctctgcctatggcctcgcagacagcaatcagtcaaggctcagccacccacacttccaccaaagatgtttcacaaagccttactcaacctctcacatcaatcccagaagctagcggtgtaatcgctccacttacagggaagcaaaacccaaagaggaaaggagattggtccaagatcttaagatccacaggtcagaaagtggcctggggtgggctgagttttgcaaaggtgacctcatccttcttccatcatttattgtgtttttctcttccacgtcgagaaagtctaatagcttagataattccacactaatgaacttgctgtgtgttagccctgggtctccttggaaccactggtgtcaccttcttactccatgtgcccaaggagggctccttcttccaggagaagctccctggtctcagctgatcggtgctgggtaatgcaccactaaattatacctcctctttacttttatttttgtgaacatttaatacctcactgagagatgg

SEQ ID NO: 32422 - DNA, 633 bp, Homo sapiens
agagcaggtcacctgggattcagccctgagcagtcagggtcaaactgtcagtgtggccccctccaaaactatgggactggaatccctgggggtggggcctgggggtcagcagctcatgttcccaggtgattcttctgcacctttgagaacagctgcccatgatgggcctagtgctgtgtctagcatgcagcaggtgcttgctaaatagtwgagaaataaataaataaataaataaataaataaataaataaataaatggtgggaaccgatgagtttcttggcctggacgagtaaatcaagaagagcaggtataggctccagaggtgtggtccctctgcctctccgctgtagggctggaaccattacctgttcttacctggccggctggactccaacaagcatcaggatcttgagggcgattcgccggtgcaggttccactcctcaatggcgctggccatgatcagcccactgaggaagaggaagttggtgtcgaggaagtactgggggcagaccttgttggagggcaagatgcccatgaaggggaagaggacgatgggcagcagcgccgtcactgagagcggcagggcctccgtgcaccagtacaccgccatgagcaggatgacaaacaagca

SEQ ID NO: 32423 - DNA, 603 bp, Homo sapiens
caacgtggtgaaatcccgtctctactaaaaataccaaaaaattagctgggtgtggtggcgcgcacctgtaatcccagctactcrggaggctgaggcaggagaatcgcttgaaccccggaggtggaggttgcagtgagccaagatcatgccactgcactccagtgtgggtgacagagcgagactccagaaaaaaaaaaaaaacaaaaaaaaaaacctctccaggtagaagactttttctttcttaaaaaatataggtggtttctttacaactttcttatctagagacagtttaattacagttgtatacaggtttacgcctaggatgtgttcagacaggtggaacctgtgtgctgcttttgtcatcccacacttatagcactcatagttgcctctgtttattgctcccactgctagctcattgttgagactgccatctctttctcttactcaactctcccagtgccttttggccactgcagctaccttggaatggcattttatacataccttgtcacctacttctgctttttcctacccagtagaaggtaaaagatttctttcaattggtcctcctgttgcaatgactgttatttctcttttttg

SEQ ID NO: 32424 - DNA, 690 bp, Homo sapiens
tgccaataagggcctcttgaggatagcagaagaactatacgggatgtgtggtcatggaataggaactgagtaccggatgaaagattagccagagagccagtgtccaggaaatgctatgtcggaagtccctgcttactggggggtgagggggagggagggcgcgacttkgaacctagctagcttctggatgtctgacactacaggaaatattcaataactaagaggaagccacaaatatcacccaccaagtaaaaagactcttctgttgcgattcttctccttcctaatccctgccacaacatggcctctcagtgtctcaacctcctaacctccaatggttttgtcctccacttgacctcattccccaacattatgaccttacctgagacctatctttatcagtaaccctgcattactctaaatctcaatttcaaacatcattcctttcttctggctctttctcagaatagtctgactccaaccattcctcattctagtgggttttccaagccacattctcactacatattgtccccttcatttgctcacttccctcctttctggactaggctccatacttcattgaaaaccactcctttatattaccatcagtgctcctgctcctttcaatatgggttttactggacaaataagacttctaaccttggtcaatactaaatctctgccaaa

SEQ ID NO: 32425 - DNA, 558 bp, Homo sapiens
tgcctggctaattttgtattcttagtaaagacagggtttcaccatgttggccaggatggtctygaactcctgacctcaggtgatccactcgcctcggcctcccaaagtgctgggattacaggtgtgagccactgcacccagccagtcccacatatcttgcagctactataggatcaaatgaaatagtgactagtagagaataggccagtggttcacaaccagggaagatttctcttccaggggacatttggcaatatctggacacatttttggtcatcagtatggagagctgctacaggcatctggtatgggtacaggccaggggtactgccaaacatcctacaaagcacaggacagcatcccatgacaaagtattatctttacccaaatgttaatagtgcgaagtatgagaaaccctgggacaggcaatcagtcaatggcagctgttaataattgtactgctctgggatgactaaagaaaataatatctgtcagagattcccaaagaagctggagaagggtaagggaagaaaagaaaagagagattattagaaattg

SEQ ID NO: 32426 - DNA, 554 bp, Homo sapiens
gagtggactatctggtctccacgctatggattttttccattacatcacacagatactagaaatctcctttttatttcagtttggttaagaaaaaactgtttagcagatagaggatatttggtgtcatttgagagtaaatgataccttagagagaatttggaaaagtgtatcattgaaattaatcattaattcatggcacaccatatgtatcagggattatactagaaactgaggatgcaaaattgaaacagccatgacccttgcccttaggagctcatagcttggtgggcgatgggtaaggggtgtcatgtgctttcactaaactatttgtgttagtcaggataggctaactgctattacaaataactcctcaacctcaacaacttaatgaaataaaagtttcycactcaaatcacagtctaacatgagtgctggatagggaatagaggctttagtcattcagaggcccagacttcttttatcttatgaatccaccctacacagatcctcatgattgttctccagttacatattgtcacatgagcattctaacc

SEQ ID NO: 32427 - DNA, 772 bp, Homo sapiens
aaaacttcaggtcagaggtaagtgtgagctgtgcatccaagcagctgcctgtcattagctgagctgggactcagtcccaggctctcattcttaatagaactaaacattgatgctattcaagaaaggtacagagtcctgtgcaaatcttccctttaaattattcacagctcatgaagctctatctcacaggtacaagtccattaagaaaagtccagaaaacaaatctaacataaatggaatcaaagataagaactaaatatataatgagttccttttaaatgaaggcagcagagcaaaggcaggactaccatctgtgtacaaactgaactgttaggggtatggtatgggtatgtagtggttatrtttggaaagacgcaaaacccacatccttctacctaaatctgtataagaggcacatcatctcaggactctgccatctatgatacaaaatgcacaaaatgaaatttctgctttatcttacattccatggaaatatctttattggaataaagtggcctacatttatattcacttctaaacaacgtcctctccttctcatctgtttctgtctgatggaggcctatttttgcttcagaggacagatcaaataccgcctcttccaggaagccttttcagatccaagtgagaacaagcctgtctttcctaggcgcccccagcctgtctgagaacaacttgctgatgattcttgtctcctgccttgtgtagctcctggatgacataacatgattgggatttatctttgtgcctctta

SEQ ID NO: 32428 - DNA, 772 bp, Homo sapiens
aaaacttcaggtcagaggtaagtgtgagctgtgcatccaagcagctgcctgtcattagctgagctgggactcagtcccaggctctcattcttaatagaactaaacattgatgctattcaagaaaggtacagagtcctgtgcaaatcttccctttaaattattcacagctcatgaagctctatctcacaggtacaagtccattaagaaaagtccagaaaacaaatctaacataaatggaatcaaagataagaactaaatatataatgagttccttttaaatgaaggcagcagagcaaaggcaggactaccatctgtgtacaaactgaactgttaggggtatggtatgggtatgtagtggttatatttggaaagacgcaaaacccacrtccttctacctaaatctgtataagaggcacatcatctcaggactctgccatctatgatacaaaatgcacaaaatgaaatttctgctttatcttacattccatggaaatatctttattggaataaagtggcctacatttatattcacttctaaacaacgtcctctccttctcatctgtttctgtctgatggaggcctatttttgcttcagaggacagatcaaataccgcctcttccaggaagccttttcagatccaagtgagaacaagcctgtctttcctaggcgcccccagcctgtctgagaacaacttgctgatgattcttgtctcctgccttgtgtagctcctggatgacataacatgattgggatttatctttgtgcctctta

SEQ ID NO: 32429 - DNA, 594 bp, Homo sapiens
taaaaccgtctaatattctgccagtctgtgcctttgaggaaattatagcacaccaccagcacaacagccatgaaaggaatgttggaatagtaatgacgttttcttcatactatctatcatttcaattcttctcatgattttttttctttagatgtgtttataataaggtgtatgccttttaaaatttttattccattttcatgcttattaaaactcatgtgctaccagccaatgaccatatctacttttctctatattaagctaagtaaaaaccaaataaatgttaactcaagattatttaagattattttatcttagatgattatttcagtttttctataatgtcatgcattaaaactaatatttcaagcctggataattcaatataagaagatgcttattatcaatgtataaacacatatacattctctttcacacattatatayataccgtaatttcacagatatgtgatttcacagaagaaatggatcctatctttctccaatctctaacattgaagatattaatttaatagcaaaagtgaaattaaccatacaatatctcagaaaaaaagagacccattaaagctcatg

SEQ ID NO: 32430 - DNA, 597 bp, Homo sapiens
aaggcaataaactgcgtaatgccatggtgatttctgcaatgaaatcaagcccagagaccagcatgttgttggaccaagttcatcctcctattaatgaagattctcttagagcatcaacacagtaagttacaggatagacagaaccttaacagttcatttcttaatagttgttaacctgtgttttttgtcaagttatggactaggtaatcttggaaatgcttatcaaataattcctgatgtggtgggaaagaagcctacactaggagttaagatactaaaaatcttatcctagcactggtactggcagcatgtgtaaatgggtaaattctttactgtctccgaactggtatccttggatgtaaaatggggatattctctccctacctcacagaaatgagatgggattctactgtaggaaagagctttgcaaagtgtaaagttttatttaaggcagttaagtctaaagtatgttaaattttctgagtcagaccagctgcatrtacgaagtgattatgatttagattttttccatctgttagccactcagtgagaaagtatttttccacaccttaggatcagagccttttctaggaatcg

SEQ ID NO: 32431 - DNA, 546 bp, Homo sapiens
gctggagtgcagtggcgcaatctcggctcactgcaagctccgcctccagggttcacgccattctcctgcctcagcctcccgagtagctgggactacaggcgcctgccaccatgccctgctaattttttttttgtatttttagtagagacagggtttcaccgtgttagccaggacggtctcgatctcctcacctcgtgatctgcctgccttgcsctcccaaagtgctgggattacaggcgtgcagccgtgcccggctctttcctcctgcttttttcctacactctctcctccctcctctcctccctctttctcctgtttgatttccacctcttttctctcctctctcctctgaatctgcctcttcctcttctcacctccctcttccttccctgtctctcccccttgggtctctcttccttccctctctctggtttctctgtctctgccctgtcctttcctttccctcctctctggacctgtctcctctcctggctctctctccttcaagctctcactcccactggcctccctcccggagccccgtct

SEQ ID NO: 32432 - DNA, 1107 bp, Homo sapiens
tctgtgtggcagccgccctttggggtgtgggcagcaccctgaacaaaactggactcagcagtgagtatagctgtgggcactgggagggcagggcagggggctttatggctatctgtgggtggttggctagacatagacatcccagggacagatatggggtcccatggtcacatagcatcctgtrgacatgacagagtccagtgggtcttcctgtggacactccaggggtggaagggaagtctcatggacacactgggggcagatgggtagggcgtggacaccctggagacaggtgtgggggttcacgccatggacattccattaataccccatggtgggcacagggccccatcaacactggagcatcagtgtgaaatctcgtggctacagggggcaggtgtggggctctgtggacaccccttagggacggtatgaaaaacacatcagggattcttccttttcataccaggggacagggcttaccctggcatatttttcatgacacttggagcagatgttttggtctctgcctcacagagcatgtggtaggagcaagtggcctgttgtacatccacggcatagatacagacatgggcctttgtatagagaggagcaggcctgcagccccaacccagtctgctcagtaccagagtccaggccccaggtctgggctgctggggaacagggccctgtttgcagaaggcagcgggtgggcccatgttcagctccaggatgctccctgcccacagatgggcacatgcagtgacacacagctagcacacatgggcacagtcctgcagggcatccatgtcagtgtctgttctgatgggccgaaactaagaacagttttgaacgtcatccttgggggtgtggagtggcagaggtcatgcctgctcctggcagggcagagggtggctcggtgtctctgtctgtagcaggggctggagcctcatactgcaccacagtctcttggccgttttgcccaaggatagtcaattctgggcagagtccatcctgggtatcttggacccatgttgtgccctgtctggtcatggcatcccctctgcccagctccatatcccatctcctccggtgaaccctggggga

SEQ ID NO: 32433 - DNA, 1067 bp, Homo sapiens
tcttcagaaccccccgatcctccacctgtacgccattccttcaggcacctgggacagttggcaccttgtcagatttagcttcttgcttatgctattgcaaaaagtgattaaaggcttaactgttactctttttggcttcttgtcttaatctgccatttccacacctgccatcttagcttagtccttttcagctcagctgagttctagacaggaatcccaagagcaagaatggaaatacataaggctgttgaggaccaggtttgtaaatcatacattgttgctgtcccaatgccatcctcaatttaaggaagaggaaaagagacccccttaatgaaggaactgcaaggaattgtggacatttttttttwaattttattattattatactttaagtttcagggtacattgtgcacaatgtgcacgttagttacatatgtatacatgtgccatgctggtgtgctgcacccattaactcgtcatttagcattaggtatatctcctaaagctatccctccctcctccccccaccctacaacagtccccagagtgtgatgttccccttcctgtgtccatgtgttctcattgttcaattcccacctataagtgagaatatgcggtgtttggttttttgttcttgcgatagtttactgagaactgtggacatttttatacattctacactgttgctgtggggattgtagtttaatagcacaattcagggatctgccctctgccccaccgtctttgatatctcttgccagttggttttgccatatttgaggtattattcacctgctatggtttatgagtaaccaagagtgtgaccatagtgtagaattaaaattctgggatcaacagagtaaagtcatagaatccctggacagtaaggagaagtaaaggtgagggctgaaattaatgactgaaaagctgggagtgtttaattcaacaggaatatctcagtttcaagatgatggttaatagaagagggaatgaccttaatctatattatcccagagggaagaattacatcaaagcctggaagttacaggaatcaagatttaaatgca

SEQ ID NO: 32434 - DNA, 1067 bp, Homo sapiens
tcttcagaaccccccgatcctccacctgtacgccattccttcaggcacctgggacagttggcaccttgtcagatttagcttcttgcttatgctattgcaaaaagtgattaaaggcttaactgttactctttttggcttcttgtcttaatctgccatttccacacctgccatcttagcttagtccttttcagctcagctgagttctagacaggaatcccaagagcaagaatggaaatacataaggctgttgaggaccaggtttgtaaatcatacattgttgctgtcccaatgccatcctcaatttaaggaagaggaaaagagacccccttaatgaaggaactgcaaggaattgtggacatttttttttaaattttattattattatactttaagtttcagggtacattgtgcacaatgtgcacgttagttacatatgtatacatgtgccatgctggtgtgctgcacccattaactcgtcatttagcattaggtatatctcctaaagctatccctccctcctccccccaccctacaacagtccccagagtgtgatgttccccttcctgtgtccatgtgttctcattgttcaattcccacctataagtgagaatatgcggtgtttggttttttgttcttgcgatagtttactgagaactgtggacatttttatacattctacactgttgctgtggggattgtagtttaatagcacaattcagggatctgccctctgccccaccgtctttgatatctcttgccagttggttttgccatayttgaggtattattcacctgctatggtttatgagtaaccaagagtgtgaccatagtgtagaattaaaattctgggatcaacagagtaaagtcatagaatccctggacagtaaggagaagtaaaggtgagggctgaaattaatgactgaaaagctgggagtgtttaattcaacaggaatatctcagtttcaagatgatggttaatagaagagggaatgaccttaatctatattatcccagagggaagaattacatcaaagcctggaagttacaggaatcaagatttaaatgca

SEQ ID NO: 32435 - DNA, 1281 bp, Homo sapiens
gtgtttcattaaaagaaaggtgaaataaatatctcagtagttcttctcttatctaatgattatttaggaggaaataagaccaatggagctaataatgaatattctcctgcaatgactttattgccatagataaagctatagactcaacaccatgtttaacacagaaaaatggatttgaacatagttatcataaaaatttctatttccgtgtcattttcagaggtggaatggaatttttaaacagtttcatagacctttcagatcctataaaatgagagtagatacaaaattcaaagaagcatgcactttttattaaaartttgtaaacttgaaaaattgcaaaagatagtggtacctagatatcaaaataatttcataaacttaaattaaattaacttcttctgagatcaatgtgcctttctacagttaatctatttccataatgtgcctaggaggcaagtggcttatttttatctctgcgagttattaaaaaataaacaatgataaacttttgcgtactgttttcataaaatattagatgtttgtgtccagattgctttagatacatgtctatttcagagtccatggaattatctgagagttggcagataatatcaaacgctgtgacattcccattatatctgagaatgaaacagcacaatcagttggcagctctgaagacagtaatctctataaagcccaattagtgagctatctgccaaatcatacaccttgatgaagagaagccttggtggcagtttgcagctctcctattgcaaaagaggccctactctatgccagctttctggcatggtggtttgacacagaatactattgtatgtgggaaaatgttcaaactttatccaaaagtttttgacataccagatgtctaggaaaatttagacacggacaacagggattgctttacaaatgtaggaaggagatcattcttccctttggaattatttatattgcataaactatttcatcctatattttatatttttacaagtcaaattcattttaattttgaataggttataaagatgcacacacatgaaaaaataatctaaagctctacgttccagtgccacttttacttgatttaaatatctctaagttcagtcttcacagaagtaggatgtgaaaatattctatctgtgatgtgagagaaatttatcagtgactcttccatatcctcacaaattaattggctgttaaacagaaattatctttagatcattcactcgacttcttcattagatggatgttaatgtgttt

SEQ ID NO: 32436 - DNA, 682 bp, Homo sapiens
atgccagacaacttgctatagcctccgtcatccagtttttatgatcttctggagaaaacaaataataggcacatatgtgctgtgatggagtatgagtattgtgctgccaaacccatcactaaggatctaatatagtttaaggtagtaacggaaggtttctggaagggttgttccaatcattaaagatttagaaaatgagtacaagttaaagaatggtgatataggatatgtgattgtgtgtgtgtgtgtgtgtgtgtgtgtgtgtgtgtgtgwgagaaaggtcaatttgggggatcaatttaaaacaggaaacaaaatgagtcttttccaaaaaaaaggcattaaaatttgttggctgttattaacaatattgctatatcaacagcagaagcagcaagagttaggagcaggaccaagatttgtatgtttctgttcctggaaggccacattattccttcccttgaatactgatggttagcagcccaacattacaggtctcccacatatctgttctttgtttaatccacactcagttttcaggtattctaaattgtctttatttgccacccattttttttttttctaaatgagtactttgagttgttcaaactggattgggttactctttgaaaaacaaaacaaaatatttaacttgcaaaaagtgtcccaaattactaatgca

SEQ ID NO: 32437 - DNA, 637 bp, Homo sapiens
ccaccatgcctggctaattttgtatttttagtagagagggggttttgccatcttgtccaggctagtcttgaactcctgagacctcaggtgttctgcccacctcggcctcccaaagtgctgggattacaggcatgagccaccgtgcctggcagagagcagtgttttctagggttccttatagatgccaaagacttgtgccagggtatggcagaactacagggaagatgtctcaccttcagccagagctctgcttcgagctactttacaaatgaggcttcagcctaaggtttgtcctgctgataaaaataaataacatggcgtaaaattattgggacctacagagcttctgctcttcaaatcccgggccagtgggtctcagcagaggcctctgtgcctgttttctaccaggtatctcagacccagaagcaagggaggcgttttactgcccttcacagctttcatggccctatttggaccgtgccttgtgagtgaaatggcttttctcttggaccctaacagagagctgttcaaggtcaaggaacttgaatttccactttgacagtcagcagyggcccttacctgttacccttcaataggcgggatgttcccgcggagcttacctactgcagcttccaat

SEQ ID NO: 32438 - DNA, 1205 bp, Homo sapiens
ttgagctatgtgtccgcctaatttaaacaaagaatcagtgccctttttgcagagagcttttatccactggttcttttatgaaaggccaaggtatggaaatctagcctctacaccagggttttgccatcccatggtctggtgaagatgcttggtcccattccaagctggcctaaatgtgctggtttatgacttctgtgtttcctaaactgattgccaagcagccctgctctgctgattctcaaaaacagcccgtcgtctgcagcactttttctcatgtgggctcccagggagtgggaatcggctctcagcggctcatgaatcatggtctccaggattcttctcagaggcagaaagatttctgggtagatgagaaaattttacaaaatctcttctccctcctaatccttagcgccaccaccgctatcatttccataatcatctttataattatttgaagtggaaagggggcagggtacctgcttaatgaaaagtagatgggaaaaaatagaaactgtggagataggtgattgaatagcctctctcagaaatgcacatcatgtgtgattatggagagtttgaaagatcagacctcaacacccttttccaacgtaaactctgtctctcctcttcttacacccttcaccgcagtccaagtgaatctctgactttctgtcctaaagacctcctgatttcctccctctgtgcctctgcttatgttttgcctagaacacccactcacatcgcagaatcttccagctagccctgcttctgaactcctgaaaagtcttatctgagcctctttgggagctcttgtcattttctgctttatattttattgcttatataatattttttccctacctgattatgaactttagaccgtctctctgactctctgcctctccccccatcaacmaacaagcatgcactttgaatgcaggtgctcaacaaatgtctatggaaagaacaagaaactagaagtttactatcattcttttaatagacaagaatgtgttgacaagaaaagtgtttatcaaagcctgctatgattctccaaacacttttacacctttcctctttttcctggacatacagacaaatgacatttacttgcctgtttttcagctggaggagaccctgtaactgggtgagtggaaagtgaacagaaatgatgtgtgccacttttaaacctgcattaaatctcc

SEQ ID NO: 32439 - DNA, 526 bp, Homo sapiens
tttttcatgctgctcaaattacatatgttaattgtcataaattttttaaatcaagaaaaaaaggaaaaggaaaaaattttctgtatttgaccttctagagagaacctatactagagaaaaattaatatgttgatgttaattcccaacatttgtattatatatggcagatacatacaatattttaataaaaatagaattatggtatccatayaattttataattttcttcttccatgaacattataaagaattctgcaggtcaacttatgtatgtacattaatttattactcaatcttgttttaatttataatttttgttgttataagcaatgcttttatgaacaatcttgtaataaaacattgttccgagattctttccttttttttttttttgtgagatggagtcttgctctttcgcccaggctggagtgcagtagcacaatcttggctcactgcaacctctgccagccgggttcaaacaattctcctgcctcagcctcctaagtagctgtgatttcagttgcac

SEQ ID NO: 32440 - DNA, 526 bp, Homo sapiens
tttttcatgctgctcaaattacatatgttaattgtcataaattttttaaatcaagaaaaaaaggaaaaggaaaaaattttctgtatttgaccttctagagagaacctatactagagaaaaattaatatgttgatgttaattcccaacatttgtattatatatggcagatacatacaatattttaataaaaatagaattatggtatccatacaattttataattttcttcttccatgaacattataaagaattctgcaggtcawcttatgtatgtacattaatttattactcaatcttgttttaatttataatttttgttgttataagcaatgcttttatgaacaatcttgtaataaaacattgttccgagattctttccttttttttttttttgtgagatggagtcttgctctttcgcccaggctggagtgcagtagcacaatcttggctcactgcaacctctgccagccgggttcaaacaattctcctgcctcagcctcctaagtagctgtgatttcagttgcac

SEQ ID NO: 32441 - DNA, 526 bp, Homo sapiens
tttttcatgctgctcaaattacatatgttaattgtcataaattttttaaatcaagaaaaaaaggaaaaggaaaaaattttctgtatttgaccttctagagagaacctatactagagaaaaattaatatgttgatgttaattcccaacatttgtattatatatggcagatacatacaatattttaataaaaatagaattatggtatccatacaattttataattttcttcttccatgaacattataaagaattctgcaggtcaacttatgtatgtacattaatttattactcaatcttgttttaatttataatttttgttgttataagcaatgcttttatgaacaatcttgtaataaaacattgttccgagattctttccttttttttttttttgtgagatggagtcttgctctttcgcccaggctggagtgcagtagcrcaatcttggctcactgcaacctctgccagccgggttcaaacaattctcctgcctcagcctcctaagtagctgtgatttcagttgcac

SEQ ID NO: 32442 - DNA, 1135 bp, Homo sapiens
tcaaaattaaataaccagtttccccaacctaattttttgaaaaatcttttttttgccctctgatcttgtattacaccccaacataacacatttcatacatagctcttttacattaattccagaggtgttgaactgtatatagggtaggttatgatttccaaaatacatgctgaaagagcacgccaatatttgagagtattttttatttcctctggatagatttataatattcatagtttaaataatgttaatattcatcaaatatatcatatatattgccaaawtagctctagagtatagtaacaatacacacgtctattagaaatatgtaagtttctgtttatccataacttcaccaacacaggctggtcaatcattaggcagcaattgtctagtgttttaactggcactggtttcattaactggctttattattgatgaagccatatactttatcagcttgagataaatatttgattattttgttttgagtattttgaccattttttatatttctgttatttctatatgtctgttatccttctcattgatttatagaacatttatgtattaagaaatattaatatatgaacatttatatacaagaatattaaacttttattgttatatataaggtaattatgttgccatgtaatttattagtggcttaatttagtttactgtatcattattctgcacaccttaattttgcatatagtagaaataatcatgcttttgcatgcttgtacagtaatcttctctttctctttcctagagtttgccctcgctatcagctcaccctgaacggatccacagagtaattacgtggtatagaactagatgccctcggcacaaattcaatgtcatatagagcccagaatgagtacactgtccattcagattttcaggaaaggtaaatttacaacagaatggagcccatgaggaaacagcaaaccatgttctttaattgccaaggtattttttccttttaaatgaagacagagaaagccatggtctagagaccacctaggccttgagaaagacagagacagatagagatagttattttctcacatttaaatttctcttaaggtgtttctcttattcctgtatctcatttttatgcgatttctca

SEQ ID NO: 32443 - DNA, 1135 bp, Homo sapiens
tcaaaattaaataaccagtttccccaacctaattttttgaaaaatcttttttttgccctctgatcttgtattacaccccaacataacacatttcatacatagctcttttacattaattccagaggtgttgaactgtatatagggtaggttatgatttccaaaatacatgctgaaagagcacgccaatatttgagagtattttttatttcctctggatagatttataatattcatagtttaaataatgttaatattcatcaaatatatcatatatattgccaaattagctctagagtatagtaacaatacacacgtctattagaaatatgtaagtttctgtttatccataacttcaccaacacaggctggtcaatcattaggcagcaattgtctagtgttttaactggcactggtttcattaactggctttattattgatgaagccatatactttatcagcttgagataaatatttgattattttgttttgagtattttgaccattttttatatttctgttatttctatatgtctgttatccttctcattgatttatagaacatttatgtattaagaaatattaatatatgaacatttatatacaagaatattaaacttttattgttatatataaggtaattatgttgccatgtaatttattagtggcttaatttagtttactgtatcattattctgcacaccttaattttgcatatagtagaaataatcatgcttttgcatgcttgtacagtaatcttctctttctctttcctrgagtttgccctcgctatcagctcaccctgaacggatccacagagtaattacgtggtatagaactagatgccctcggcacaaattcaatgtcatatagagcccagaatgagtacactgtccattcagattttcaggaaaggtaaatttacaacagaatggagcccatgaggaaacagcaaaccatgttctttaattgccaaggtattttttccttttaaatgaagacagagaaagccatggtctagagaccacctaggccttgagaaagacagagacagatagagatagttattttctcacatttaaatttctcttaaggtgtttctcttattcctgtatctcatttttatgcgatttctca

SEQ ID NO: 32444 - DNA, 731 bp, Homo sapiens
ttgtctagttttgattttttttttttttgagacagagtttcactcttgtggccccaggctggagtgcaatggtgcaatcttggctcacagcagcctccgcctcccagattcaagcaattctcctgcttcagcctcctgagtagccaggattacaggcgcccatcaccacgcccggctaatttttcatacttttttttagtagagacggkgttttgccatgttggccaggctggtctcgaactccttgctcaggtgatctgcctgcttcggcctcccaaaatgtaggacactgtgcctggctcattgtctatttttgatgtccttctttcctgtatttattgaaattaaatttatttttcaaaaagcccatgattttctgaactttttaggcatagaaatggaaatgctgaaaccttcctctggtgtttaaagatatatgtgttgctctatggagaagcaaccaggaactactcacactcaagttaaaaagtgatgtgcagaaatgaaacatcctctgttttacttttcagaacatttggcatgctatatcactcaaatgagaattctttcattacattctccatattctgtgaagtaaaatttaaaaaaatttttaaatattcttgtattcacctaaattcaattcaaatgcaatctgtatcatatattagattcaataatctctccaacagtattctcaccctctctcttactgctattgtttgaatatt

SEQ ID NO: 32445 - DNA, 528 bp, Homo sapiens
aatcagtggacactctgtctttgaggtttataagcatcactttagtacaagatcttaccagcaacaatgaatatctcatccttccggcaattcctaagcatctacatagaaacattacatttggaagttaagagatactttcccagttaaacatgagcactttaaatccaagaattcaataaagaggctagamcaggctgggcaagatagcaagaccctgtctcaaaaacaaaaaaattagactggcatggtggtggtacatgactgcagtcccagctattcaggaggctgaggttgaaggattgcttgagcccaggaattcgagactgcaatgagctctcatagcactactctactccagcctgggcaacatagtgagcctctatctctaacaaaaaaaaaaaatcaattaaaaaattcaataaaaagaggaaatttaatattctttatcacagtctcaatacacaacgtatactaattcagtataaggtgtaaacactagtaaagccagtggtagacactcaagca

SEQ ID NO: 32446 - DNA, 528 bp, Homo sapiens
aatcagtggacactctgtctttgaggtttataagcatcactttagtacaagatcttaccagcaacaatgaatatctcatccttccggcaattcctaagcatctacatagaaacattacatttggaagttaagagatactttcccagttaaacatgagcactttaaatccaagaattcaataaagaggctagaccaggctgggcaagatagcaagaccctgtctcaaaaacaaaaaaattagactggcatggtggtggtacatgactgcagtcccmgctattcaggaggctgaggttgaaggattgcttgagcccaggaattcgagactgcaatgagctctcatagcactactctactccagcctgggcaacatagtgagcctctatctctaacaaaaaaaaaaaatcaattaaaaaattcaataaaaagaggaaatttaatattctttatcacagtctcaatacacaacgtatactaattcagtataaggtgtaaacactagtaaagccagtggtagacactcaagca

SEQ ID NO: 32447 - DNA, 1109 bp, Homo sapiens
gaggacacatcaatctctggggccaaaggaataaaagaattcagagccctaaaaattaaagacctggggagggagtacacagttttaatgtgggaaaacaaaatctgggacaggaagatacttgtctggaaccaaagggagagagatagcttggtgataaaggtgtgctgagtatatagggcatggggcatgtgtgtgtgtgtgctagcacattgccctatgaaaacaagacatgcacagtgcaagaagggccctacaaatccagttaactggcagaaccgtgtctaaaaaaaaaaaaaaagggccgattagaaaacgaaataacacatcacagaagaaacttctataaactgaacatttttaattaaaaggcagtgaaagctatgcatagaggcatttgctcaggtgagagcttttgaattcttatgttttaccagtacacttttcaaaataaaattatttatttgtactatatcccaccctctgtagagagctttcaarataattttagaatattggtcatttatggagaagtctgaagaatccatgtcaaccctaatatatttgccattccctgagacctactataatcatttgttatcatgttcactgttatattgacttcatcatcactaacagcagagaatatattgcttttttcatgcaacataaaaactagttattaggccggacgtggtgctcatgcctgtaatcccagcacttctggaggctgaggcaggcagatcacctgaagtcaggagttcgagaccagcctgccaacttggcgaaaccccatctctactaaaaatacaaaaatgagccgggcgtggtggaggtgccgtaatttcagctactcaggatgctgaggcaggagaatcgcttgaacccgggaggcagaggttgcattgagccgagattgcaccactgcactccagcctgggcaacagagcaaagtccgtctcaagaaactagttaatgaaaacatctctttattctctttctgtggttacattatcccaacagttttacatatttcctggagccctttaatgtgaggccatccatgagagtgggtagcacatggtctctgaacccaagttccttattac

SEQ ID NO: 32448 - DNA, 946 bp, Homo sapiens
tttagggtcccaaattaggttttgttctgttgctttaatgaatcctttttgtgttttggtggtttttttttttttcagccaaggcatttttctttatatttaaatctttccctagtatgtctaggtttctgtcccactggaaggaaattgtttcacactattactggagatgaaactggtttttgtctttctgcaatttctaagagtcagcaggaaaaatagattttaaaataattttactgcagaataaattgggcagattctgtttaattacctagtgttaagtggaaaaagttatgataaattttgatacacagaaaaagcaactggattctggyagcattaatattagataatattgttattacactaacacaaaatgttaaagatgatttctaacccaatgtatttgcaaatatacaatacctggaaatgcatagacatctcagattttagaaacaaaatgcatgtgcaattttaacttctcttaactttataaattcacttctaaattaatgactaccatttatgggatatgtgtgatatcagataatctaaaattgttttttatgaaataaaaggacatataaggtgggtgtggtggttcatatctctaaccctaacactttgggaggccaaggcaggaggattgcttgagcccaggagttcgagaccagtgtggtcagcatagtgaggcctcgtctttacaaacaatacaaaatttagctgggtgtggtggtgcacacctgtggtcccagctactcatgaggctgaggcaggaaagatcacttaagttggagaggtcaaggctgcagtggctgtgattgtgccactgccctccagcctgggtgacagagcaagaccctgtctcaaaaaaaggacatatctttttttaaattgtattgatgactacatctttcatcataattagagacaggctcaagat

SEQ ID NO: 32449 - DNA, 570 bp, Homo sapiens
tattgactactccctaaccacagtcatgcttggagaaggcttttcacaaggtgtgctgaaatcatagtggtttaatgatatgttcaccttttgtcccccttgtgatgaatgggatgcacctgcaaggtgtttacacgggaccagggatataaccctgtccacagaacaaaaaatagctaactracccaaagcataaagtgggaaatcacctttccataggctaataatctcacaacttctgtgttctttcttttatttctttataaggaaaataaaaactaccttataggccttagtgcaacaagaaagggaaactttaatttgtcagaattctggggagcctgggaaaaaactggctggctggcagtccagatctgtataaaagcagtgagctagggctggggagaaaactggattactctccatggggtaaaagactgtgccctttgagatgaaaaggagtatgtaagagtaagtcagtgggtaagtcacttcccctatgacaacctctaaagttcggtacagttagtaggcatccaaaatgttgagggtgatgggatttcctgtgaa

SEQ ID NO: 32450 - DNA, 610 bp, Homo sapiens
cctattactgtgagggggagtgctccttcccgctggactcctgcatgaacgccaccaaccacgccatcctgcagtccctggtcagtaccgtgcccatcctgcccagccccctggggtgggaggccctgcagagaggggtctggtccagccagccgggagggcagtgaggccacctgctccatgtctcgggggctttgtctgcacagagtcagtaacgtcgctaacttcccacagctctgcaggaactggtcctcatacagccacactactacacatagacccacacccaaacacggacacacgtgaacagtcgcgtatgcatgcctgttctatgcactgaacaaactcctgtgggacacttacacacctgcgtgcggcgctcagaggcacagcacatgaaacagatgtgtacactgtgtgggggctgtgtgatcttaacacacgggcccccgagtacgctggcaagtctgaccgccygtgatatgtgcgcacagtgtgtggggtgtgcgtgtgcactcacccacctgtgccgcaccacaggcaggaagcttctagatggtgtggctctcaaccttttggctttttcccgcagtttctctcttggctgtct

SEQ ID NO: 32451 - DNA, 532 bp, Homo sapiens
gataaacacatgccagtcttccgactatatgatccccaaactcccctagctagcagctcctcaaacaagtatgcatcattctcctctgtttggccaggtgccttttgctcactgggagcccctgcctatcctcagaaaatgcaggaagtccaaggactggagaagggaaggacggttggggtctctctctgtcctatttacccaactcccgatcactgaaggcctcgttgggacctccttccttcaagtgaaaaaatgtagcacccctcccccaactttggcatttgagacaaaatagaatctttatctttcttgtcgttctccacttttatctgggctatccccaagaaaagggtacttggggrcaatcaacttattgcagagacgcagcccagtccatggccttctgtgcgcctctagctcaggtgactgcatagctcagaactacaaggccatagaaatacgcactgggtacccccacacttccctaccttcggcccaagagcagatggcatttggagaaaggggctct

SEQ ID NO: 32452 - DNA, 1192 bp, Homo sapiens
catgatgctctactttgcccggtggctgtacccctacctttccctttggcgggaaacccctttccacaattactccatctccttgaaaaactcctaccatctgttatgggccaaactgtgtcccctgaaaaaatcatgttgaagtcctaagccctggtacttcaaaatatgactgtatttagagatacggtcttgacagaggtaattaaattaaaataggatcattagggtgggccctaatccaataggaccagtgtccttgaggaaatctgggcacaatttatacatgtgcactcatacaaagggatggcatatgggcactgggagaaaacagccatctagaagccacggagggagacctgcaatgatccttccctcccagccctcagaacgagccaaccctatcaaaacttccatcttgaatttcccagcctccagaaccgtgaagcaaaaaaattctgttgtagaagccgcctagtccgtggtactttgttacactggccctagcaaacaaatacatcagttttcaagacccaatcctaggtacagcctcctctgggacactgcccggacccaccccagcaggcccgcctctttggtcatccttggagcctccaggttccctgacctgcttatctgacaaccaacagcttgtgagctcaaggtagagccctgtctcacctgtctctgtgcctagcaccttatacggtacacacagaaggcgttgataaacatgaaccggacygaactgaaagcggacctcaccttgcaagcagtaacttctcagcaagttcccctgcctgtgccagggcccactgagcctcccctactcttgtttcccactaggcagccaagaataatcattgttttgagctgggttttgtttttctggtgtgtgtgagttttctttaagccaccatattgaaatgcaaactgccaggtgttagaaatgctgcccccagccctcagaggcagctggtttctacagactagcatttatcatatttgcagtaaatacacaaaaggtcttcaattcaaaaccaggaagggaaagtaattcttttgtcaaaaggcagcggtgactaaatgctgggcagggagtgaaagcagatttggactgttgctttaccatcttccgagtgtggacgtgttttatgctagaaaaggagaccaaacagagtcagaccaacac

SEQ ID NO: 32453 - DNA, 1300 bp, Homo sapiens
cctcctctgtgacaartaaggaacttgtgatccaacagctaatcaatggtggggccaggactccaactcaggtctgtctgaccacaaagggtcaaaaatccactgcctctcagtgagtacagatgccttcattcattcttcatgcattgactgagcatcgtctgtctgtcaggctctatggaaggcacttggaatggagcagagaacaagacactgttccagttctcatacaggttatggtccaagagagagaaaaagagaaacaagcaactgctatgatagggaatgtattagtcaggactctccagagacatcgaatcaacaggagagagagagaaagagggagagaaatttatcttaaggaattggcttttgattgtggagggttggcaagcctgaaaatcctagggcaggccaggcacggtggctcatgcctataatcccaaggaggccaaggccagtggatgggaggccaaggcaagtagatcacctgaggtcaggagttcgagaccaacctggccaatgtggtgcaaccctgtctctactaaaaagtacaaaattagctgggtgtggtggcaggtgcctgtaatcccagctactcaggaaactgaggcaagagaatcgcttgaacccaggaggtggaggttgcggagggctgagattgcaccactgcactccactctgggcaacagagagagactccatctcaaagagaaaaaaaaaaaatcctagggcaggccaacagtctggaaattcagggagggtttccatgttgcagtccagaagcagaattgcttcttcctgggaaaaccttggcctttgttcttaaggccttcaacagactgggtgactcctgcccatggagagtaacctgctttacttaaagtcaactgattagaaatgttaatcacatccacaaatactttcacagcaatacatagactaaggtttcaccaaacaattgggcaccataggcctaaccaagtggacatatgaaattaatcacagggggttgcacagagtgttaggaaatagaggaaaaactcctaaggatttaggaaatgttggacagcccaaggaataagcaggcatccgaagctcaaaatgttcctcaaaaactgcacaaatgtatcaaagaccaagtcctcatgtaaacaaactggggaccccctagttaaaggagctccagtgaatctttctgaacaccaaataattacttagcccatcactttgcttttgaatatgatatgggtatcctcacaccacattttcatgagggcagacacattgtgtatactaa

SEQ ID NO: 32454 - DNA, 391 bp, Homo sapiens
cagccttccgagtatctgggattacaggcgtgcactgccatacccgactaatttttggattttagtagagatggggttttgccatgttggccaggctggtcttgaactcctgacctcaagtgatctgcccaccttggcctcccaacrtgttgggattacaggtgtgagccaccgtgcccagccacatggtgtcttccatgacagctccctctctgctgaaatagcatttcccacccccacccatggcatcactcttctgctgccattttcatcaaagactgatgtcacttggcatgtttttaggtttttttctggtggcttttatttttttaattttagagatgaggtctcactatgttgcccagcctagtctcaaattcctaagctcaag

SEQ ID NO: 32455 - DNA, 623 bp, Homo sapiens
ataaaagtaataataaaataataaagcttctagaaggtagcacagaagaaaattatcatgaccttaggttaggtaggcaaagatttcctgaatactacacaaagtatgctaaccacaaggaagtagaatggcaagagcaggacacttttttgttgcaacacatacatgacagacagcttgtatctagaatatataaagagcgtattcaaatctctaagaaaaagacaacaacttggggccaggtgtggtggctcatgcctgtaatcccagcacttcgggaggccaaggcggacggatcacctgaggtcacgagttcgagaccatcctagccaacatggtgaaaacccatctctactaaaaatacaaaaattagccgggcatggtggtgggtgcctgtaatcccagctacttgggaggctgagactggggaattgcttgaacccaggaggtggaggttgcagtgagccaagatcacagcaytgcactccagcctgggcgacagtgcgagactctgtctcaaaagaaagaaaaaaaaaaagactgtacagtaaaaagtaaatttcctttttatctcagtaacgattgccagtttttaatatatcctgtaagaattattttatgca

SEQ ID NO: 32456 - DNA, 600 bp, Homo sapiens
aggatcttgtttgtgactgttttctccccttagtgagctgtattttcaaggccctagcagcaacaagcctcgtgtgatccgggaagtgcgggctgactctgtggggaagttggtaactgtgcgtggaatcgtcactcgtgtctctgaagtcaaacccaagatggtggtggccacttacacttgtgaccagtgtggggcagagacctaccagccggtacgtgtggagcaagaagcaggaaagcacttacccattagttgttttgtagagattaatttgatcctgtgatgcctattgttttatttggttgtaaaagttgcctgtgtgttcgcctttcattcttgggtatgtagtggtctttctacctattttctgggtgtttgttgttgacccagagtaagttcagagggttcttgacacttacaagatgtctgccatgaagagaaaatgtgattcaaaggaccgacccaatggggctcttttccttctgasttcctttggtgtttctgttctcacatcctagatccagtctcccactttcatgcctctgatcatgtgcccaagccaggagtgccaaaccaaccgctcaggagggcggctgt

SEQ ID NO: 32457 - DNA, 800 bp, Homo sapiens
tgcgacacaggctggccctgggcgcccctcccgcccggcccctccgccccttcccagccccaagggtctaggatacagtctttgtagatgagcgggtcccccttggaggacagaatgaagaattgggaaatcatggccgttctggagagtagacaagaagacggcgaaagtcgggcctgcccgccctgcggccccggaacaaaagaacgcgtgtgcgctggccctttaagagcgattctcctccgcccgcgccagctcggaccgcgggaaacccggcgcctgcactaccccgcccggagatwcccttccgacgcccgcaccgcctccccgtcactcattctaggcccgcacggtgattggcttgcggctagcgggaggtgaagaaggccgccttgtccgattggcccgcacgcagtggcgccggtcacgtggggggcgacgtttcgcgccaatttcggttggccggccacagtccaccgcgcggagattctcagcttccccaggagcaagacctctgagcccgccaagcgcgccgcacggccctcggcagcgatggcactgaaggactacgcgctagagaagggtacgggtctacgagcccgggagggcgtcctgcgcggggagcctcccggggaacacctgttggtgtgagctggggtcttgggggaccggggtcggcgggttctggggtgcgcgaggccagaggcagggtcgagctgcggcctggctaacgcacggggcctgggaagcgtgcggggggccatcgatgttgaagaaaagctagtaatcccacctggtaa

SEQ ID NO: 32458 - DNA, 663 bp, Homo sapiens
tctagagatgtattagggaagcattagcacagagactcacatgatacatggcatgaaaaggtaatttccaaagatgactttgaagcaacccgtagcaaatcacattgggtgtcataactttctcatgtgttctaaatgttccttgctaaaaaatggcttttgtcagtcaaggataggcaggaacaccctaaaattactaagggttgtttcycctgaatttctgcatgatctgaccccaaattcaacagatctttaaaactccattggatattagaatagaggaagaacacatttcatgtgttaactggatgcagtgtcttcaacttcatgcaatgaatgactgacagatgaagcatgttgttttacaaactgttttttattgttttgttgttgctgttttttagacggagtctcgtgtgtcaccaggctggagtgcagtggcatgatctcggctcactgcaacctccgactccctggttcaagcgattctcctgcctcagcccctgagtagctgggattacaggcacacaccaccatatccaactaatttttgtatttttagtagagacagggtttcaccatgttggccaggatggccttgatctcctgacctcatgatccgccccccctcagcctcccaaagtgctgggattacaggcgtga

SEQ ID NO: 32459 - DNA, 663 bp, Homo sapiens
tctagagatgtattagggaagcattagcacagagactcacatgatacatggcatgaaaaggtaatttccaaagatgactttgaagcaacccgtagcaaatcacattgggtgtcataactttctcatgtgttctaaatgttccttgctaaaaaatggcttttgtcagtcaaggataggcaggaacaccctaaaattactaagggttgtttctcctgaatttctgcatgatctgaccccaaattcaacagatctttaaaactccattggatattagaatagaggaagaacacatttcatgtgttaactggatgcagtgtcttcaacttcatgcaatgaatgactgacagatgaagcatgttgttttacaaactgttttttattgttttgttgttgctgttttttagacggagtctcgygtgtcaccaggctggagtgcagtggcatgatctcggctcactgcaacctccgactccctggttcaagcgattctcctgcctcagcccctgagtagctgggattacaggcacacaccaccatatccaactaatttttgtatttttagtagagacagggtttcaccatgttggccaggatggccttgatctcctgacctcatgatccgccccccctcagcctcccaaagtgctgggattacaggcgtga

SEQ ID NO: 32460 - DNA, 600 bp, Homo sapiens
ttaaatgttcttaaagttctcttctgtttcctgggtcactggttctgattttttcctctacctctaggttctttatgttttatcrctgcttttcctcgaatatctggatagtcttaatattttcattaatctgatctccattttctttcaattattcagaaattcttctaagtttctattcattatatcactctttctcaattttcagcattgttatggatgtactgacttcaaagtttcttttctctgattatattgaggatttaagaagacgattcagttcgccatcctgtaataatttattaattttttaaagacaaaattcatgtctcttctttaaataatggtggcagaacatgtggggatttcatacgtcatacaagagtgtactttcaaccaaatgccgtctgatttcaaatggtcacctttatcacatactaaacttctgtacaaatgtaggtttatttctgagctttgtgccgcctcactaagctatcaatctatttatatatcagtaacatttttttaaattaattattggttcgcttactcccatttgcccagcagatatccacttgcaaattggaaaggattgtgaaa

SEQ ID NO: 32461 - DNA, 519 bp, Homo sapiens
ttatttaaattttttcctatatgtgtaaaataaattgagacaaaacayatgtaggttttttcactttagcattattaaatagtgagaattccctcaggcaatcagtcttaaaagattttctaatgatcaataattaaaaactaaaaagttactgggtcaaagaagaatcatagccattctaatgagaaaaatatgctactcctagttattttccatttccatcaaagtataaatcttttcatatatgttattggctaattttctccctttcatgaatttcctttgcccatttttctatgggaaaaagttttcttcattttattatctgcctttaattctagttttgatgtacagatgttttgatttttcacagaggtatacctaattctttcccatcacgttttttttttttttaattatactttaagctctagggtacatgtgctcaacgtgcaggtttgttacatatgtatacatgtgccatgttgctgtgctgcacccattaactcatcatttaca

SEQ ID NO: 32462 - DNA, 799 bp, Homo sapiens
cttgagcccaggaatttgaggttatagtgagcaagctmtgattgtaccactgcactccagcctgagtgacaaagtgagaccctgtctttaaaaagaaaattaggataaactaaagtaaaaatgattcgtggattaaagtaatgggtattcatagaaacataaattgtctcaattacctggtttaaattttatctacttactggcttagaatgacattgggtggatttcctggaagactgaatcttcaatgtggattttcagtggatttttagtaaaagggtattccatgagaaagaaagaaggaacagagctgggagtctgatctgacgagatatggcttcaaagctttaaaagctggcaagcatgatggtgaactcaaccagaatgactaactgtgatcccacatagccaaccacaggcagcctgagcaccaggggaaatttccagagaagacacaaaacagcctcatttagactgaggcttatgctaatgtcaggaattatacaagcagcacaatacagggaagtgtggcctacgtttggcactgtaaggtccaaaagttcatggattattctttcctgaggaaataaacagttggaaatcaaatgaggtaaaaggaaagttactcagtgagagcaaagcttaacttctttagggttcctcattaagtaaatccatatatataacctctggagatggtaagactgttataaatatccactccatcccaccctctctactgatataagatactgacatcagttcttatcctaaatcaagatcttgacctaccttcata

SEQ ID NO: 32463 - DNA, 516 bp, Homo sapiens
aagataacaatcacaaatacagaaaagattcatccatagagaagtataccttggtttagtataaattagaattgacctaaatgttaaaaataaagggtgagttaagtgtcctctggtacatttaatagatgaaatattagttgtctttaaatttgtcattatgaataatttatagttagtaaaatttttaataatataataaaatttaaaaagtcacaacattttacagtatgattatatacatgtatttaaaatacccccaaattcacatagaagcatctacctaacggagcacataccgtatctctttttgagtcctagatttcattaaaacaatagaggacataagagtaatacattcacattacaacacagaaaagggagacatcaaatgctcagaagatgccaggtccagagatttttttggttcaaatatatcaaaccttcaagaaatagatattgtccatggtatttgaattgttctagtcacagaaaaaaagaggtrttactgaatca

SEQ ID NO: 32464 - DNA, 617 bp, Homo sapiens
gccagtagaatgtgttgtggtttcaattttgcagaggggcctgcattcctgtgcaaaaggtgcttggctaaaaggatactaggataaactcttaagaaaaaaaaattccacagtaatctgcagctttgtcatcacgcatggaattcaataaaattctcaatgtctctggttaaataaacattttttcttacttagtctgcttattttttttgtctagactaaagctttttaacaggctgcaaaacaagctgaatgtttcttttgactttagctagcagaatatgtgtaggaaacttaccattttcttaaaaaatttttcacttagttaagacataaatcagcagyacattaaaattataagaaacacatcaaatattttaagactcaggttaaggtgaaatataagcaagggagatactgagaaataatgaagcaattagggagtagtgcagaattgttaagttggaagacctgttaagacaacttttaatttttgtggtttcttttttcttcactgacattattaaacattgaaagcccagaggtagcagaaagctgtaataggtctgccattcaaatgtgttaactggattttgaattaatttatggtttctttc

SEQ ID NO: 32465 - DNA, 617 bp, Homo sapiens
gccagtagaatgtgttgtggtttcaattttgcagaggggcctgcattcctgtgcaaaaggtgcttggctaaaaggatactaggataaactcttaagaaaaaaaaattccacagtaatctgcagctttgtcatcacgcatggaattcaataaaattctcaatgtctctggttaaataaacattttttcttacttagtctgcttattttttttgtctagactaaagctttttaacaggctgcaaaacaagctgaatgtttcttttgactttagctagcagaatatgtgtaggaaacttaccattttcttaaaaaatttttcacttagttaagacataaatcagcagtacattaaaattataagaaacacatcaaatattttaagactcaggttaaggtgaaatataagcaagggagatactgagaaataatgaagcaattagggagtagtgcagaattgttaagttggaagacctgttaagacaacttttaatttttgtggtttcttttttcttcactgacattattaaacattgaaagcccagaggtagcagaaagctgtaataggtctgccattcaaatgtgttaactggattttgaattaatytatggtttctttc

SEQ ID NO: 32466 - DNA, 580 bp, Homo sapiens
tgaacttttaagcaaaataccctcccactatattgggaacccagtagaaacagagactaagctttttgcaaagcctgcattagactgagatataagaagcctcttcagtaaacagtttagaayattagagcaagtccccagagcatctataattaatcccttgtgtttataaagctgtgttcccttggaaactccacccagaaaaggcatggccctgaagtaacatctgctgggatgtaaactatgaaatttgaaaagttttagatttccagggtacttgtaccatagacacttgccagacctaaatgacattttcttactgatcagtagattgctaaaatttcttttttttctatctataagccttcctcccactttttcttaggatagaaaaccagaccacactcttgttttccattctcttgatacagagagttttccttacctaaaaaatacagcatctgtccataaaatctagtttttggaggacttggggaattcattcaacggtttgcatgagtatagaagttagtttttaaaattacttttttcacattatcataactatgtatgtttataa

SEQ ID NO: 32467 - DNA, 580 bp, Homo sapiens
tgaacttttaagcaaaataccctcccactatattgggaacccagtagaaacagagactaagctttttgcaaagcctgcattagactgagatataagaagcctcttcagtaaacagtttagaacattagagcaagtccccagagcatctataattaatcccttgtgtttataaagctgtgttcccttggaaactccacccagaaaaggcatggccctgaagtaacatctgctgggatgtaaactatgaaatttgaaaagttttagatttccagggtacttgtaccatagacacttgccagacctaaatgacattttcttactgatcagtagattgctaaaatttcttttttttctatcyataagccttcctcccactttttcttaggatagaaaaccagaccacactcttgttttccattctcttgatacagagagttttccttacctaaaaaatacagcatctgtccataaaatctagtttttggaggacttggggaattcattcaacggtttgcatgagtatagaagttagtttttaaaattacttttttcacattatcataactatgtatgtttataa

SEQ ID NO: 32468 - DNA, 714 bp, Homo sapiens
agtcaagtccccttgttccagttttagctttggcactagcatgccatattactcggtggacaagtttctttctctctttttctgtccttcagtttcctatatgtaaaattagagctatgaatgagatgacctccaagaccaccattgctctaattcattatgccgtgtacagatctcggaaggatttaaatgtcaataagttacatagaatgaattaatcctttatatagtattttgtaatctttgcaaaatatttttgcgttcactacattgtgagtttatatctccacctataattctaaggcattggtattattatccttattaaacaaatgagaaaacacactcaaataagttaataaattatcccaagacctacaaatagtaggagattagaccaagaggtagacatcttcattcccagcctggtcctttttcatgtccccacaaattcatcctggtatgtgcagttaataatggcacagacagctcctgggagccactcagggtccctttcccactcatgtcaggtgacattacactggtctttctcaaagtcccagtggctggcctgattaagtgggcttgtccagagggtctcrtgaacctcaaataaccttctaagtttctctcagtaactgtgaccatttggagagaaaacaaatctatacacagaggaattttaaaataaggtgttattttaactttgtataa

SEQ ID NO: 32469 - DNA, 574 bp, Homo sapiens
cctttccttgggtactctggtgatgactctgggtatatggtttcctctgggcctcattttcccattcccctcttcttatatttcctaacgtccttccattagtcaatccatccatccaccaattaaccaattactaagcacacaattatagagcatctattgagtgttgtatacactggtgctctgtttgcctcaagagagtagcttgtccaatctaccttctatcatgacaaactctctcctttgtcccagtccctccagaatctgctggttctacattcattccctcattcagcaacatttactgagcacttactgtaggtcasatattgttctaagcaataaatatggccataaatactgttatctagtgtctggattgttgaaatagacatatgatcagctccctgtttccaccatcggccccctatagtttattatcagtaaagtcagaggtctttttaaacctaaggcataacatgttattcctctgctcctagttctcccaatagctttccatctcgcttagtcaggagtagtggaggagatgatgagaagttatattttctatgcc

SEQ ID NO: 32470 - DNA, 3107 bp, Homo sapiens
agcgctgcattctgacgccacctacattaagtgtaattgcttttctatgcgatagctctttaagtactggtagacatttaaccatggccccctacaatcttttgttttcccagctaaataaaggcaccttgctttaatccaacccctcctacaaaactaagttaactgccagcatccatgaacaaatctgcggttcatcacagtcactacagggcagccaagagctggataaagaaagacattgctttcactgacaggcaaccccatgttttggaaagtagaattcctggaagtctggcacctcaggaaatttaagtcccacacaaaccccatgggctataataagatattgctgatgttttggctgatatgcaccagaaagccttgggaggaaagtggcctagagactgtaatgaatgagagcataatgtcctgcccttgaagccacacaatcagaaagtgagaggactacagaaaaaccagcagggcactggcattttccagttgagcattctgagctgacagtgaaaataacgaatgaaacacggcagagcagaagtggactttatttggaaaaccttgttttcccggaactgaagctaacctctgggacgagaggtttcagaacaatgaagaatcaacaaataagatgaagagacgcctactgacaaagacaaattccataccctggaactggacatcttcctggcagagggaaacatcctgctctaaaatgggcacaatcagcagcagttatgaacgtcggcttttccacttgcaaaagaaagattttaactttgcctgacaggaaggaacactgaccaagaaaacagtaagttatggattactttgctacggatgctggctatacctctttaggatactttttttatagaaaaccaagcattacttttctgtgaatggaattaagtgtcaggaatatgcatatctttcttatataaggctttgttttattataacagcaagaatcatgactgatgcctgaaggcggccacagataatgccaagaaaaaatggggtagtaagtggaagaatctcacaaaaaattctgtgtaacaaaaagacagaggaaccaacctctgtcttattcctttcttcaaatgtttccaaaatttattgttagtatctccatacaaataaattaattttcagttttatagtagaattcaattttaaaaattccttttacaaccaacttttctaaaaatccagcataggatacccaaataaaggtgcatctccattcattcatattttcattcattcattcattcaaacttcaacagatactgattggttggatgcctattatgtgtctgcatcatgctaggcattcaagaggccgtgtcagcagcacaggcaacggaagtggacattcgttatttccacatacaatcacctactttaaaaccatggtaagtccaagaaaggacaagcccacggtgtgaagagaaagccataataaacccggtaattcagaacagaggtcaaaaacacatgccctgcacagcatctacaaaacacaggaagccaacacttggttttgtgaataccacagtgttgcaattatcttaagctgtttttaagttatttccaaaatattatttttaattaaagtagagcacatactaactttaaatgatagagggaaaaggagggatttgcaattaaatgaataaataatggaaccgacacattttgtttcttttagtaaatgggttcctgaaaagcaacatcaacttattcagtgattgtctgccccaaggacagtagacacccagtgcaaaatggctcccagctctggttggtggcacatgagcctgtggtggtttgagaacgacaagagtccagaacagcacgagctttggaaaccagtcaaacttgggtttgaatcccaactctaccactagagatgcaaactctggaaggctattcatcttctgtaagcctcaatcttcttctataattactaccagagtaggaaaagcagtattaaagattattaaggacttactacagggttggctgaaataaataataagtaaataacaacttgcatagtctatcaacccttatccacactaagttttgccagaaagtctcctgccaagagtgagactggactgaggccgaaaacaaggggcaaggcatgcatgcagagtgctgggatcggatatgagtaccagcgaactacagcataagatctgctcaggtgaggcaagttcagcagtgtgagagtgttctcataggtgccaagttgcaaggtagctcaaggggtcagatcaaggggtctggacggtgttgtcagtgagtagctatggtctgagcaggaaggtaatcttgggggcatttcaagaagattaacaaggcagcagtatgaaggacagactggagaacagaaagtctgaaggccattaccacagcccagacatgaacaggacaccaggaatagaatggaggtgatacttcaagaaactgtgtcattttctatgggccaaaggcaggagagcaggcctgaggaaggtagaaaatgtttcaaatagccaatatcaggtgcatgagacacagcaacaagaaataaagttctagagcacttaagcttccctgaagctaagcaccttttctaccagctagctcacctagctctgytctttcctcagctcgctctctttagtccaggaaaaggagcacagaaaccaggtgggatggcttaggtttgcacagtctgtaacgtgatcatgagcattgcgggtaagctggaaaaacactagatgacccattgtgagcagtgcacccggtatggggaatgttaaagcaagatccagaaagtggccaccctagtgcttagctccagggtgtaaagccctggacatccaggaaataggagcccaagaagaggaataatagaaaatggaaccagtaaagacagacacagagcttgtgaaggacaaaaaagtgtgccagatgctgaagactcccacaaacaatgacaggggagattttaccccactattcactgcatgacaggaatttcatctgccgtctatgataatatcatggactctttctggaaaccaacgcttttt

SEQ ID NO: 32471 - DNA, 610 bp, Homo sapiens
gccactgaatactgctggagaaaattatgccacgttctttattgctacttaaatttacaattttcctttagcaagaccgtctctatacctttgtttctcccactcagaaaaaagtgattttttttcacttattgttcttagttttagtggktcattttatcatcatcatacttttctttttaaaatttttacactcaagttcctcattgtgctcgtttattacatgctacataaaatggtggcttttttttttttttgagacagggtctcactctgtcacccaggcaggagggcagtggcaagatcacagctcactgctgcagccttgacctcctgggatcagtcaatcctcccacctcagctgagtacctgggactacagacacgagccacccctgctggctatttttgttgttgttgttggtagaaacagtgttttgccatgttacccaggctagcatcaaactcctgggctcaagcaatccagctgcctccaccttccaaagtgctgggattacaggggtgataattttccttatcatctatatatttctgctggaacaggggagtgacttttgaataaatcatattttatgaaatgtgcagtcttg

SEQ ID NO: 32472 - DNA, 531 bp, Homo sapiens
agaactcatgaacacaaagaagggaacaacagacactggggcctacttgagggtggaggtggggaggagggagaggarcagaaaaaataatcactgggtactagacttagtgcctgggtgacaaaaaataatctgtacaacatactcccatgacatgagtttacctatatcacacacctgcacatgtactcccaaacctaaaagtaaaaaataaaaataaaataaattcataaaagaatttagacaaataatcctaattgttttaagtaatttttattaaagaaaaaagatgaaagtattaaagacaatgataactaaagtatgttaatgcatatgtaatataaatacatgtaaattttacatcaatagcatataatatgcgggaggagaggtaaattgaagagtacttggatgcaagggaagttacattgttatcagcctaaaatagactattataaaatattttatgtaagccccttggtaaccacaaggaaaatacttataaaagttacacaacagataaagtaatcc

SEQ ID NO: 32473 - DNA, 531 bp, Homo sapiens
agaactcatgaacacaaagaagggaacaacagacactggggcctacttgagggtggaggtggggaggagggagaggagcagaaaaaataatcactgggtactagacttagtgcctgggtgacaaaaaataatctgtacaacatactcccatgacatgagtttacctatatcacacacctgcacatgtactcccaaacctaaaagtaaaaaataaaaataaaataaattcataaaagaatttagacaaataatcctaattgttttaagtaatttttattaaagaaaaaagatgaaagtattaaagacaatgataactaaagtatgttaatgcrtatgtaatataaatacatgtaaattttacatcaatagcatataatatgcgggaggagaggtaaattgaagagtacttggatgcaagggaagttacattgttatcagcctaaaatagactattataaaatattttatgtaagccccttggtaaccacaaggaaaatacttataaaagttacacaacagataaagtaatcc

SEQ ID NO: 32474 - DNA, 464 bp, Homo sapiens
gtgtctcatttgaagacaatggaatttagtcttaagcgccaagggattcattaaggggcttacataacttatggaatcattgggaaggctgcaaaaacaaactattttgagcttctaggaatgagtctcaaaacccatttcagtactgggcccccaaggtagcctaagcgtgagcccttaccaagaagtggttgtccccgctgccatctccacaaccacctagcctgagttggaatcacacaagtaacacttttgccttctttcccgcataactcagttttgaatcagagtctccctatagtgcttctgatcaataaaacatagaggtagaaggaggtcagtaagcatttgtaggatgactggcgtgtctacaacagtgtaggcactggcgagacaaccagaaacagaacagagacccctgtcctcaaggagtktccattctggaaagggaaataaattaaata

SEQ ID NO: 32475 - DNA, 722 bp, Homo sapiens
aggaactgcaaatacttgtcccacttttctatcaacaaatctttgtagcgtactttgttcactcagctcatggtcattggcatttatttaccatccaacagacatcatcaattccagggtaagtgagctgcaaaaagctaaacttaattttactgaaatattttgccaaggtgagaatctgagtgagtaacgttgttcctgatatccaactgagtctgaaatataatggaaagtttttatctcctagatttaccagtgtaatcaaggaaatattaaaatagttttaggagaatataaatcayatattataatttcatatatatatatatatatacacacacacacacatatacacagagagagagagacagagcgagagagagaggtttctttaaaataataccagagggctggggcgcagtggcccacacctgtaatctcttttttttgggaggccgaggcaggtgaatcacttgaggttaagagtttgagacatgctggtcaacatggtgaaactccgtctctaataaaaaatacaaaaattaaccaggcatggtggtgtgcgtctgtaatcccagctacttgggaggctaagacacaagaattgcttgaacccggggaggcggaggttgcagtgagctgagatcgcaccgctgcactccagtctgggcaacagagtgagaccctgtctcaataataataataataataacaccaggaaa

SEQ ID NO: 32476 - DNA, 622 bp, Homo sapiens
gcacgtaaagaataaggttacacagtaagttcatgccaaactttagggcttacttctaattcaaaaataactttattattaatatatttattccttaaattctagaatatagcttaattaaaacaacagagaaaaagtatcaaatgtgactactgccttgtaatttttctctgcaaaactaatctttttttctgacctaatgtagagaataatagagttccactagtagattaatcctcttaactcagtataataagcctaagaataaagacacgaagaatgcacttgttacaccagaagggaaytgcataattgctgaatgggcagtgtgttttgccagctacctaaagaactacatcatgcagacaagaaaaagtaagatatttttatgccataacaaagaatgtggatgtgtagttttcagtactccacttagcaaaagtgggattgcaacctttatgggattttccctcagtgaataaaaaataaggaatcaaaaaaaaaagaaaaagaaaaagaaacacatacaaccttgtgggttatttacagaccatctattataattttttcttaaatacagtactatttcttatgcttttaaaacattttttctcaaattgta

SEQ ID NO: 32477 - DNA, 495 bp, Homo sapiens
tgaggtcaggagtttgagatcagcctggccaccatggtgaaatcctgtctgtactttaaaaaaaaaaaaaaaaggctaaggcccagataagatattaaagggccaagycaggatttaaatccaggtcttctgattctaggtttagtgctcaaccagaatgccaagaaggtaacttacagcgggagagacaaatgggtaagagagtatatctttccctgagaaagatatcatagcaatgacaatagctagcatttattgagtatttactaagtgctgggcactgtgctaaatacctttttcacacgtggcaaacactgctagttgcctacatatcttcctcttcttcctaagagaaacccaagctacccaaggtttcgatgatagcagctgaaaattacatttcccagcgtttattgcaaccagggctgatcaagcgtcatagttttaggcaatataatttctgtggaagttgcagtgaatttccaatgtggcaga

SEQ ID NO: 32478 - DNA, 495 bp, Homo sapiens
tgaggtcaggagtttgagatcagcctggccaccatggtgaaatcctgtctgtactttaaaaaaaaaaaaaaaaggctaaggcccagataagatattaaagggccaagtcaggatttaaatccaggtcttctgattctaggtttagtgctcaaccagaatgccaagaaggtaacttacagcgggagagacaaatgggtaagagagtatatctttccctgagaaagatatcatagcaatgacaatagctagcatttattgagtatttactaagtgctgggcactgtgctaaatacctttttcacacgtggcaaacactgctagttgcctacatatcttcctcttcttcctaagagaaacccaagctacccaaggtttcgatgatagcagctgaaaattacatttcccagcrtttattgcaaccagggctgatcaagcgtcatagttttaggcaatataatttctgtggaagttgcagtgaatttccaatgtggcaga

SEQ ID NO: 32479 - DNA, 704 bp, Homo sapiens
tcttgctctgttgcccaggctggagtgcagtggcgcaatctcggctcactgcagcctctgcctcccgggttcaagcgagtctcttgcctcagcctcccaagtagctgagactacaggcgtgcaccaccatgcctggctaatttttgtatttttagtagagacagggtttcactgtgttggccaggctggtctcgagctccggacctcaagtgatccttctgcctcgacctcccaaattgctgggattacaggcatgagcaactgtgcctggctgctcttttttttatttatagagatggggtttcactgtgtttcccaggctggactcgagcagtcctcctgtctcagcyttctgagcagctgggactacaggtgcaaccaccacacccagctggtcaaatgtttttataccatgatagtaatatagctcctaccatgtatctgacacttttgtgaatattttgcttatattaacatttcatcctcacaacaaccttacaaaataagtccccatttgatggatgacactaagcgcagagaggcttactcaaaaataagtggtagaacttggatttgaacccaagcagatgggtcagagtctgtgcactcactattatattaacgttctcaagaaaggacagttctttaactacaaacactaattccagacaagaatttttctatatgaattgaacttttctcta

SEQ ID NO: 32480 - DNA, 563 bp, Homo sapiens
ggtggtgtgagagagaaagagagaaggagagaaagagagagagagagaaagagactgttggggttaattcctccctctctgcagcacactgcaagctgtggatgctctgtgcatggtaagcagctaagggtccggagaaaggcgagaaaaataattaaaaggtagagaaaaacgctgttgaggagaggctacagaagacatgcttttgtggcctgcaaaagtggcatttgagagttcagcagggaaagctgggacagaagggcaccctggatctaccagggatcgtaggcagggatcagggagctggggatcccatcccaggcagctgaagggccttgggggaggtcacagctgtggttgggggtttccaggcagacatcagcatgacaaatgaaacgccacccacraagactctagaagcttcagaaatcctattattcttcagagtcagagaaatggctacagtgagcaggtttctttcctccttctaagaacaggacatgagagaactgaagcttaaggaggagctgaaagatcagggttagatcttagaaggaacttcc

SEQ ID NO: 32481 - DNA, 1757 bp, Homo sapiens
ggattccttggaaactgttcaatttataatgccatatttaaaaaccatggatcttaatgatcaagagcttgtttgattaaggttttagggatgttatgaccaaacttcatttatagactaaaatgtttgccttgaatgaaacagactaattgacttaagattttccaaggtatctgtcctggaaggaagggaaacctccccctccctttatttaggcattatctgatctccaatagcataaagaatcagaggaacgagtttcttctggggagaatgtcagcatccctgaaagcctctccacatatgtactctccttgcactaggtgattatgattctttgaggcaatgcaaagcagctcctcaaagaaaggctgtattgccaattcaagtcataactrgccccataagtctttcttaactttgtgtaattatcatgctggatctctttcattccccttctgaatcactctctacattttgctctctttcccaagaggctgacgtctgtggattaccttagttgggtttgaccagtgggatttcctggagattagattcctggagggagaacagataagggaggggagatgggcaggagtcatgcaggaccttgtgggccatgagaatgactttgggttttagtgtaatataacgtcaagctgtggtataatttcaagttagagagctaatgatctcacttgcatatgacaaagatcaccctagtgctgaacctggttgagtgagggagccagtaacaatggtggctggcagatggcaagcctctacgcattctcctccttcataattcaaaatgtctccctccctggtgcagtgcttgtgtctcttacaaggagaaggtgaaagctctgggcagtggtaattcaacggtaatggtcgcctgagaaacttgggaaagatgctagtaagggtgagtcaaactcagattgcaacacatattcttctcctcttcatcttgagatgctcctccctcctgacccatttcttaactcagatagagttgctcaaattaatatttaggcttactatcttcctcctgagtcatattatcagccatgttaattcataaggcaaaataacccaatgtcaaagaaatataagcactcctaaagaaaaacacgctgaatgaactatactaaaggaggccaaattgaaggccctgtggaataaaatttaaagtatgtttaatgcatatcctcagagtgataagaaagagtttttgaaacaagaagctcaaataagctgttacagaaaagaatcaattagaaaaaataaggatgaattttaaaaattgtctcaaatctggtctaagacaaaactactttgtataatatagttaaaaatttccttctggggagaaattagcattctccaaaaaatgctctaacaatttgcgtataaacttgaatgtgattaaggcatcttctgggaaaatagtgattcatcctcactcgatatgggtttgccaccttgtgtccaaagtcttcatcagcaccactatctgtctaagacttatggaaggcttgatctggcttagtatctcacactacattacctgtgatcaagacatccatttgactgaaagagagaccatgagcatgtgataagagagttcactgctcttaccaccatccagagaagcagattgcatttaaaataaaaaaaggtttaactaaggtgccactttaaagtacaacttaggaggttagagccatgtcttctgggatatgttatatgca

SEQ ID NO: 32482 - DNA, 1757 bp, Homo sapiens
ggattccttggaaactgttcaatttataatgccatatttaaaaaccatggatcttaatgatcaagagcttgtttgattaaggttttagggatgttatgaccaaacttcatttatagactaaaatgtttgccttgaatgaaacagactaattgacttaagattttccaaggtatctgtcctggaaggaagggaaacctccccctccctttatttaggcattatctgatctccaatagcataaagaatcagaggaacgagtttcttctggggagaatgtcagcatccctgaaagcctctccacatatgtactctccttgcactaggtgattatgattctttgaggcaatgcaaagcagctcctcaaagaaaggctgtattgccaattcaagtcataactagccccataagtctttcttaactttgtgtaattatcatgctggatctctttcattccccttmtgaatcactctctacattttgctctctttcccaagaggctgacgtctgtggattaccttagttgggtttgaccagtgggatttcctggagattagattcctggagggagaacagataagggaggggagatgggcaggagtcatgcaggaccttgtgggccatgagaatgactttgggttttagtgtaatataacgtcaagctgtggtataatttcaagttagagagctaatgatctcacttgcatatgacaaagatcaccctagtgctgaacctggttgagtgagggagccagtaacaatggtggctggcagatggcaagcctctacgcattctcctccttcataattcaaaatgtctccctccctggtgcagtgcttgtgtctcttacaaggagaaggtgaaagctctgggcagtggtaattcaacggtaatggtcgcctgagaaacttgggaaagatgctagtaagggtgagtcaaactcagattgcaacacatattcttctcctcttcatcttgagatgctcctccctcctgacccatttcttaactcagatagagttgctcaaattaatatttaggcttactatcttcctcctgagtcatattatcagccatgttaattcataaggcaaaataacccaatgtcaaagaaatataagcactcctaaagaaaaacacgctgaatgaactatactaaaggaggccaaattgaaggccctgtggaataaaatttaaagtatgtttaatgcatatcctcagagtgataagaaagagtttttgaaacaagaagctcaaataagctgttacagaaaagaatcaattagaaaaaataaggatgaattttaaaaattgtctcaaatctggtctaagacaaaactactttgtataatatagttaaaaatttccttctggggagaaattagcattctccaaaaaatgctctaacaatttgcgtataaacttgaatgtgattaaggcatcttctgggaaaatagtgattcatcctcactcgatatgggtttgccaccttgtgtccaaagtcttcatcagcaccactatctgtctaagacttatggaaggcttgatctggcttagtatctcacactacattacctgtgatcaagacatccatttgactgaaagagagaccatgagcatgtgataagagagttcactgctcttaccaccatccagagaagcagattgcatttaaaataaaaaaaggtttaactaaggtgccactttaaagtacaacttaggaggttagagccatgtcttctgggatatgttatatgca

SEQ ID NO: 32483 - DNA, 1757 bp, Homo sapiens
ggattccttggaaactgttcaatttataatgccatatttaaaaaccatggatcttaatgatcaagagcttgtttgattaaggttttagggatgttatgaccaaacttcatttatagactaaaatgtttgccttgaatgaaacagactaattgacttaagattttccaaggtatctgtcctggaaggaagggaaacctccccctccctttatttaggcattatctgatctccaatagcataaagaatcagaggaacgagtttcttctggggagaatgtcagcatccctgaaagcctctccacatatgtactctccttgcactaggtgattatgattctttgaggcaatgcaaagcagctcctcaaagaaaggctgtattgccaattcaagtcataactagccccataagtctttcttaactttgtgtaattatcatgctggatctctttcattccccttctgaatcactctctacattttgctctctttcccaagaggctgacgtctgtggattaccttagttgggtttgaccagtgggatttcctggagattagattcctggagggagaacagataagggaggggagatgggcaggagtcatgcaggaccttgtgggccatgagaatgactttgggttttagtgtaatataacgtcaagctgtggtataatttcaagttagagagctaatgatctcacttgcatatgacaaagatcaccctagtgctgaacctggttgagtgagggagccagtaacaatggtggctggcagatggcaagcctctacgcattctcctccttcataattcaaaatgtctccctccctggtgcagtgcttgtgtctcttacaaggagaaggtgaaagctctgggcagtggtaattcaacggtaatggtcgcctgagaaacttgggaaagatgctagtaagggtgagtcaaactcagattgcaacacatattcttctcctcttcatcttgagatgctcctccctcctgacccatttcttaactcagwtagagttgctcaaattaatatttaggcttactatcttcctcctgagtcatattatcagccatgttaattcataaggcaaaataacccaatgtcaaagaaatataagcactcctaaagaaaaacacgctgaatgaactatactaaaggaggccaaattgaaggccctgtggaataaaatttaaagtatgtttaatgcatatcctcagagtgataagaaagagtttttgaaacaagaagctcaaataagctgttacagaaaagaatcaattagaaaaaataaggatgaattttaaaaattgtctcaaatctggtctaagacaaaactactttgtataatatagttaaaaatttccttctggggagaaattagcattctccaaaaaatgctctaacaatttgcgtataaacttgaatgtgattaaggcatcttctgggaaaatagtgattcatcctcactcgatatgggtttgccaccttgtgtccaaagtcttcatcagcaccactatctgtctaagacttatggaaggcttgatctggcttagtatctcacactacattacctgtgatcaagacatccatttgactgaaagagagaccatgagcatgtgataagagagttcactgctcttaccaccatccagagaagcagattgcatttaaaataaaaaaaggtttaactaaggtgccactttaaagtacaacttaggaggttagagccatgtcttctgggatatgttatatgca

SEQ ID NO: 32484 - DNA, 1757 bp, Homo sapiens
ggattccttggaaactgttcaatttataatgccatatttaaaaaccatggatcttaatgatcaagagcttgtttgattaaggttttagggatgttatgaccaaacttcatttatagactaaaatgtttgccttgaatgaaacagactaattgacttaagattttccaaggtatctgtcctggaaggaagggaaacctccccctccctttatttaggcattatctgatctccaatagcataaagaatcagaggaacgagtttcttctggggagaatgtcagcatccctgaaagcctctccacatatgtactctccttgcactaggtgattatgattctttgaggcaatgcaaagcagctcctcaaagaaaggctgtattgccaattcaagtcataactagccccataagtctttcttaactttgtgtaattatcatgctggatctctttcattccccttctgaatcactctctacattttgctctctttcccaagaggctgacgtctgtggattaccttagttgggtttgaccagtgggatttcctggagattagattcctggagggagaacagataagggaggggagatgggcaggagtcatgcaggaccttgtgggccatgagaatgactttgggttttagtgtaatataacgtcaagctgtggtataatttcaagttagagagctaatgatctcacttgcatatgacaaagatcaccctagtgctgaacctggttgagtgagggagccagtaacaatggtggctggcagatggcaagcctctacgcattctcctccttcataattcaaaatgtctccctccctggtgcagtgcttgtgtctcttacaaggagaaggtgaaagctctgggcagtggtaattcaacggtaatggtcgcctgagaaacttgggaaagatgctagtaagggtgagtcaaactcagattgcaacacatattcttctcctcttcatcttgagatgctcctccctcctgacccatttcttaactcagatagagttgctcaaattaatatttaggcttactatcttcctcctgrgtcatattatcagccatgttaattcataaggcaaaataacccaatgtcaaagaaatataagcactcctaaagaaaaacacgctgaatgaactatactaaaggaggccaaattgaaggccctgtggaataaaatttaaagtatgtttaatgcatatcctcagagtgataagaaagagtttttgaaacaagaagctcaaataagctgttacagaaaagaatcaattagaaaaaataaggatgaattttaaaaattgtctcaaatctggtctaagacaaaactactttgtataatatagttaaaaatttccttctggggagaaattagcattctccaaaaaatgctctaacaatttgcgtataaacttgaatgtgattaaggcatcttctgggaaaatagtgattcatcctcactcgatatgggtttgccaccttgtgtccaaagtcttcatcagcaccactatctgtctaagacttatggaaggcttgatctggcttagtatctcacactacattacctgtgatcaagacatccatttgactgaaagagagaccatgagcatgtgataagagagttcactgctcttaccaccatccagagaagcagattgcatttaaaataaaaaaaggtttaactaaggtgccactttaaagtacaacttaggaggttagagccatgtcttctgggatatgttatatgca

SEQ ID NO: 32485 - DNA, 1757 bp, Homo sapiens
ggattccttggaaactgttcaatttataatgccatatttaaaaaccatggatcttaatgatcaagagcttgtttgattaaggttttagggatgttatgaccaaacttcatttatagactaaaatgtttgccttgaatgaaacagactaattgacttaagattttccaaggtatctgtcctggaaggaagggaaacctccccctccctttatttaggcattatctgatctccaatagcataaagaatcagaggaacgagtttcttctggggagaatgtcagcatccctgaaagcctctccacatatgtactctccttgcactaggtgattatgattctttgaggcaatgcaaagcagctcctcaaagaaaggctgtattgccaattcaagtcataactagccccataagtctttcttaactttgtgtaattatcatgctggatctctttcattccccttctgaatcactctctacattttgctctctttcccaagaggctgacgtctgtggattaccttagttgggtttgaccagtgggatttcctggagattagattcctggagggagaacagataagggaggggagatgggcaggagtcatgcaggaccttgtgggccatgagaatgactttgggttttagtgtaatataacgtcaagctgtggtataatttcaagttagagagctaatgatctcacttgcatatgacaaagatcaccctagtgctgaacctggttgagtgagggagccagtaacaatggtggctggcagatggcaagcctctacgcattctcctccttcataattcaaaatgtctccctccctggtgcagtgcttgtgtctcttacaaggagaaggtgaaagctctgggcagtggtaattcaacggtaatggtcgcctgagaaacttgggaaagatgctagtaagggtgagtcaaactcagattgcaacacatattcttctcctcttcatcttgagatgctcctccctcctgacccatttcttaactcagatagagttgctcaaattaatatttaggcttactatcttcctcctgagtcatattatcagccatgttaattcataaggcaaaataacccaatgtcaaagaaatataagcactcctaaagaaaaacacgctgaatgaactatactaaaggaggccaaattgaaggccctgtggaataaaatttaaagtatgtttaatgcatatcctcagagtgataagaaagagtttttgaaacaagaagctcaaataagctgttacagaaaagaatcaattagaaaaaataaggatgaattttaaaaattgtctcaaatctggtctaagrcaaaactactttgtataatatagttaaaaatttccttctggggagaaattagcattctccaaaaaatgctctaacaatttgcgtataaacttgaatgtgattaaggcatcttctgggaaaatagtgattcatcctcactcgatatgggtttgccaccttgtgtccaaagtcttcatcagcaccactatctgtctaagacttatggaaggcttgatctggcttagtatctcacactacattacctgtgatcaagacatccatttgactgaaagagagaccatgagcatgtgataagagagttcactgctcttaccaccatccagagaagcagattgcatttaaaataaaaaaaggtttaactaaggtgccactttaaagtacaacttaggaggttagagccatgtcttctgggatatgttatatgca

SEQ ID NO: 32486 - DNA, 595 bp, Homo sapiens
tttttttttttttgagatggagtttcgctcttatggcccaggctggagtgcaatggtgcgatctgggctcactgcaacctctgcctcccaggttcaagcgattcttctgcctcagcctcctgagtaactgggattataggcatgtaccgccacgcccggctaattttgtatttttagtaraaacggggtttcactatgttggtcgggctggtctcgaactcctgacctcaggtgatccacctgcctcggcctcccaaaatgctgagattacaggtgtaagccacctcgcctggccaggagtggtttcttaaagcatctttttgagtaatttgacatttaaggagccttgatagaaagttccaggataaaggctaagtgttctcaaggagaatgacacatagcccattcagaccccatccctcggtgggtggggatttaactggataggccgctggcttggcaaggcagcttttgtcaaccaagggcaatctggagagctcacatgtgtgaacctcatatgtgtgcaatctttcagaaacagggaatggctgtcccagatggtaaagagaatttgggggggcattaacaaggtctg

SEQ ID NO: 32487 - DNA, 1944 bp, Homo sapiens
tgctttcctgtgcctgcagccctgtcaagtcctcagggtcactgtgatccagctgcagcccacctgccgacctcagtaccatctgtcccagcacccactcctgctccatccaccaagaccagtcaccctgcaggacccctgccctttgcccacgtggcacaacaccccaactccccaacctgtccccttcctcctgatgctccagggctcctcctgcccgggatgcggtggagcaagggttgagagcagcaattctgcagccagactgccctgactcagcccctggcctgtgcatcactgcccatgtgatgaccaagcctttctgtgcctctggagagtctcatctgcaaaacaggaccatccacgcccacctcacaggatggagaggacaccttagcacagtgcctgcacatggcgagggctggggggagtcagccctggagaccacaggtctcactgctgttggacactcccttttcgaagctgccactgctctgagtctgggcatgttcactttgcctgggacctgcagccactctgtgcctcatctccaatcaactcttcacaacagcggcttttccttgacttttcctataggctcctcaacccatcagcagccagaaggtgccgtttatagagagaggagcataattaatgcatggccatcttcaattaactggctgatgttagctgcgggcaccccccatgcccgccctgacctagtgcccacatccctagagggtccaggcacagacctctcttcctgtcgtcatcttgcctgcgagccctgggaagcccaggatctctagtcagtgcattgtgttccttttgctccttgggaccatcctctcctctggaaccagggctccagcctcaccgtgagtgagagagtgggagaggtgagtttggaggcctggggatgaggtctgggcccagaggggaaaggggcaccagtgaggccgagtggggctggcggatcccaggagctgttgcaggagagggagcctgtggggtatagagagtgtggtgatccagggccagcgcgatgcagatcgtgggtttgccgtcctgcagggaccaggcccccaaggatgcacagcactggaattgaggagcccgggacctccggggaatgaaccggtgcttggggactccagagtggagaatcattaggacatggagttggggccagtgtggggtctttactcagcctgacacctttcacatctatgtcacctttgaacctcagaaagccatcccctgagaaaggtggaggtgagatgaccccacagatgacagagggccgggggctctaatggaggattctgagaacatgggtggaagggtgggatcaggagctggagggcagccaggggcaggctgaggagcggcgatggcaggagtgaggtgctgggaaattctgctcaccttttcatcttatggcccttcagaccccgatttccatctgcaccctgaaattagaggatgacagagtggccaggggatggaggtgggttggaaggagcgagcccctgagaccccatctcgctcccttcaacacagtcctttatccccagcctggaggtcagttaccttgacacctggaggtcctgggtatcctagagggccctgaggtccaaatggaccctggaagaaaaaggcatttgttaasggtcccagggtgtcactgaggggggcttggggtgggagaaataaacatcacagtgctagagtctgggtagggctccagggcacaggagtttcacaccacgtggaccgtcacttactcctccagcatttactgagcgcctcctgtgtgctggtgggtcctcagcgctgaggctgacccatggtctgcagtgaccgtgctgtgccagcagggatggctcctccctggcctcccactgcctgggtgctggggctccccaagcgtgcaccgtcctg

SEQ ID NO: 32488 - DNA, 1944 bp, Homo sapiens
tgctttcctgtgcctgcagccctgtcaagtcctcagggtcactgtgatccagctgcagcccacctgccgacctcagtaccatctgtcccagcacccactcctgctccatccaccaagaccagtcaccctgcaggacccctgccctttgcccacgtggcacaacaccccaactccccaacctgtccccttcctcctgatgctccagggctcctcctgcccgggatgcggtggagcaagggttgagagcagcaattctgcagccagactgccctgactcagcccctggcctgtgcatcactgcccatgtgatgaccaagcctttctgtgcctctggagagtctcatctgcaaaacaggaccatccacgcccacctcacaggatggagaggacaccttagcacagtgcctgcacatggcgagggctggggggagtcagccctggagaccacaggtctcactgctgttggacactcccttttcgaagctgccactgctctgagtctgggcatgttcactttgcctgggacctgcagccactctgtgcctcatctccaatcaactcttcacaacagcggcttttccttgacttttcctataggctcctcaacccatcagcagccagaaggtgccgtttatagagagaggagcataattaatgcatggccatcttcaattaactggctgatgttagctgcgggcaccccccatgcccgccctgacctagtgcccacatccctagagggtccaggcacagacctctcttcctgtcgtcatcttgcctgcgagccctgggaagcccaggatctctagtcagtgcattgtgttccttttgctccttgggaccatcctctcctctggaaccagggctccagcctcaccgtgagtgagagagtgggagaggtgagtttggaggcctggggatgaggtctgggcccagaggggaaaggggcaccagtgaggccgagtggggctggcggatcccaggagctgttgcaggagagggagcctgtggggtatagagagtgtggtgatccagggccagcgcgatgcagatcgtgggtttgccgtcctgcagggaccaggcccccaaggatgcacagcactggaattgaggagcccgggacctccggggaatgaaccggtgcttggggactccagagtggagaatcattaggacatggagttggggccagtgtggggtctttactcagcctgacacctttcacatctatgtcacctttgaacctcagaaagccatcccctgagaaaggtggaggtgagatgaccccacagatgacagagggccgggggctctaatggaggattctgagaacatgggtggaagggtgggatcaggagctggagggcagccaggggcaggctgaggagcggcgatggcaggagtgaggtgctgggaaattctgctcaccttttcatcttatggcccttcagaccccgatttccatctgcaccctgaaattagaggatgacagagtggccaggggatggaggtgggttggaaggagcgagcccctgagaccccatctcgctcccttcaacacagtcctttatccccagcctggaggtcagttaccttgacacctggaggtcctgggtatcctagagggccctgaggtccaaatggaccctggaagaaaaaggcatttgttaagggtcccagggtgtcmctgaggggggcttggggtgggagaaataaacatcacagtgctagagtctgggtagggctccagggcacaggagtttcacaccacgtggaccgtcacttactcctccagcatttactgagcgcctcctgtgtgctggtgggtcctcagcgctgaggctgacccatggtctgcagtgaccgtgctgtgccagcagggatggctcctccctggcctcccactgcctgggtgctggggctccccaagcgtgcaccgtcctg

SEQ ID NO: 32489 - DNA, 1944 bp, Homo sapiens
tgctttcctgtgcctgcagccctgtcaagtcctcagggtcactgtgatccagctgcagcccacctgccgacctcagtaccatctgtcccagcacccactcctgctccatccaccaagaccagtcaccctgcaggacccctgccctttgcccacgtggcacaacaccccaactccccaacctgtccccttcctcctgatgctccagggctcctcctgcccgggatgcggtggagcaagggttgagagcagcaattctgcagccagactgccctgactcagcccctggcctgtgcatcactgcccatgtgatgaccaagcctttctgtgcctctggagagtctcatctgcaaaacaggaccatccacgcccacctcacaggatggagaggacaccttagcacagtgcctgcacatggcgagggctggggggagtcagccctggagaccacaggtctcactgctgttggacactcccttttcgaagctgccactgctctgagtctgggcatgttcactttgcctgggacctgcagccactctgtgcctcatctccaatcaactcttcacaacagcggcttttccttgacttttcctataggctcctcaacccatcagcagccagaaggtgccgtttatagagagaggagcataattaatgcatggccatcttcaattaactggctgatgttagctgcgggcaccccccatgcccgccctgacctagtgcccacatccctagagggtccaggcacagacctctcttcctgtcgtcatcttgcctgcgagccctgggaagcccaggatctctagtcagtgcattgtgttccttttgctccttgggaccatcctctcctctggaaccagggctccagcctcaccgtgagtgagagagtgggagaggtgagtttggaggcctggggatgaggtctgggcccagaggggaaaggggcaccagtgaggccgagtggggctggcggatcccaggagctgttgcaggagagggagcctgtggggtatagagagtgtggtgatccagggccagcgcgatgcagatcgtgggtttgccgtcctgcagggaccaggcccccaaggatgcacagcactggaattgaggagcccgggacctccggggaatgaaccggtgcttggggactccagagtggagaatcattaggacatggagttggggccagtgtggggtctttactcagcctgacacctttcacatctatgtcacctttgaacctcagaaagccatcccctgagaaaggtggaggtgagatgaccccacagatgacagagggccgggggctctaatggaggattctgagaacatgggtggaagggtgggatcaggagctggagggcagccaggggcaggctgaggagcggcgatggcaggagtgaggtgctgggaaattctgctcaccttttcatcttatggcccttcagaccccgatttccatctgcaccctgaaattagaggatgacagagtggccaggggatggaggtgggttggaaggagcgagcccctgagaccccatctcgctcccttcaacacagtcctttatccccagcctggaggtcagttaccttgacacctggaggtcctgggtatcctagagggccctgaggtccaaatggaccctggaagaaaaaggcatttgttaagggtcccagggtgtcactgaggggkgcttggggtgggagaaataaacatcacagtgctagagtctgggtagggctccagggcacaggagtttcacaccacgtggaccgtcacttactcctccagcatttactgagcgcctcctgtgtgctggtgggtcctcagcgctgaggctgacccatggtctgcagtgaccgtgctgtgccagcagggatggctcctccctggcctcccactgcctgggtgctggggctccccaagcgtgcaccgtcctg

SEQ ID NO: 32490 - DNA, 1944 bp, Homo sapiens
tgctttcctgtgcctgcagccctgtcaagtcctcagggtcactgtgatccagctgcagcccacctgccgacctcagtaccatctgtcccagcacccactcctgctccatccaccaagaccagtcaccctgcaggacccctgccctttgcccacgtggcacaacaccccaactccccaacctgtccccttcctcctgatgctccagggctcctcctgcccgggatgcggtggagcaagggttgagagcagcaattctgcagccagactgccctgactcagcccctggcctgtgcatcactgcccatgtgatgaccaagcctttctgtgcctctggagagtctcatctgcaaaacaggaccatccacgcccacctcacaggatggagaggacaccttagcacagtgcctgcacatggcgagggctggggggagtcagccctggagaccacaggtctcactgctgttggacactcccttttcgaagctgccactgctctgagtctgggcatgttcactttgcctgggacctgcagccactctgtgcctcatctccaatcaactcttcacaacagcggcttttccttgacttttcctataggctcctcaacccatcagcagccagaaggtgccgtttatagagagaggagcataattaatgcatggccatcttcaattaactggctgatgttagctgcgggcaccccccatgcccgccctgacctagtgcccacatccctagagggtccaggcacagacctctcttcctgtcgtcatcttgcctgcgagccctgggaagcccaggatctctagtcagtgcattgtgttccttttgctccttgggaccatcctctcctctggaaccagggctccagcctcaccgtgagtgagagagtgggagaggtgagtttggaggcctggggatgaggtctgggcccagaggggaaaggggcaccagtgaggccgagtggggctggcggatcccaggagctgttgcaggagagggagcctgtggggtatagagagtgtggtgatccagggccagcgcgatgcagatcgtgggtttgccgtcctgcagggaccaggcccccaaggatgcacagcactggaattgaggagcccgggacctccggggaatgaaccggtgcttggggactccagagtggagaatcattaggacatggagttggggccagtgtggggtctttactcagcctgacacctttcacatctatgtcacctttgaacctcagaaagccatcccctgagaaaggtggaggtgagatgaccccacagatgacagagggccgggggctctaatggaggattctgagaacatgggtggaagggtgggatcaggagctggagggcagccaggggcaggctgaggagcggcgatggcaggagtgaggtgctgggaaattctgctcaccttttcatcttatggcccttcagaccccgatttccatctgcaccctgaaattagaggatgacagagtggccaggggatggaggtgggttggaaggagcgagcccctgagaccccatctcgctcccttcaacacagtcctttatccccagcctggaggtcagttaccttgacacctggaggtcctgggtatcctagagggccctgaggtccaaatggaccctggaagaaaaaggcatttgttaagggtcccagggtgtcactgaggggggcttggggtgggagaaataaacatcacrgtgctagagtctgggtagggctccagggcacaggagtttcacaccacgtggaccgtcacttactcctccagcatttactgagcgcctcctgtgtgctggtgggtcctcagcgctgaggctgacccatggtctgcagtgaccgtgctgtgccagcagggatggctcctccctggcctcccactgcctgggtgctggggctccccaagcgtgcaccgtcctg

SEQ ID NO: 32491 - DNA, 1944 bp, Homo sapiens
tgctttcctgtgcctgcagccctgtcaagtcctcagggtcactgtgatccagctgcagcccacctgccgacctcagtaccatctgtcccagcacccactcctgctccatccaccaagaccagtcaccctgcaggacccctgccctttgcccacgtggcacaacaccccaactccccaacctgtccccttcctcctgatgctccagggctcctcctgcccgggatgcggtggagcaagggttgagagcagcaattctgcagccagactgccctgactcagcccctggcctgtgcatcactgcccatgtgatgaccaagcctttctgtgcctctggagagtctcatctgcaaaacaggaccatccacgcccacctcacaggatggagaggacaccttagcacagtgcctgcacatggcgagggctggggggagtcagccctggagaccacaggtctcactgctgttggacactcccttttcgaagctgccactgctctgagtctgggcatgttcactttgcctgggacctgcagccactctgtgcctcatctccaatcaactcttcacaacagcggcttttccttgacttttcctataggctcctcaacccatcagcagccagaaggtgccgtttatagagagaggagcataattaatgcatggccatcttcaattaactggctgatgttagctgcgggcaccccccatgcccgccctgacctagtgcccacatccctagagggtccaggcacagacctctcttcctgtcgtcatcttgcctgcgagccctgggaagcccaggatctctagtcagtgcattgtgttccttttgctccttgggaccatcctctcctctggaaccagggctccagcctcaccgtgagtgagagagtgggagaggtgagtttggaggcctggggatgaggtctgggcccagaggggaaaggggcaccagtgaggccgagtggggctggcggatcccaggagctgttgcaggagagggagcctgtggggtatagagagtgtggtgatccagggccagcgcgatgcagatcgtgggtttgccgtcctgcagggaccaggcccccaaggatgcacagcactggaattgaggagcccgggacctccggggaatgaaccggtgcttggggactccagagtggagaatcattaggacatggagttggggccagtgtggggtctttactcagcctgacacctttcacatctatgtcacctttgaacctcagaaagccatcccctgagaaaggtggaggtgagatgaccccacagatgacagagggccgggggctctaatggaggattctgagaacatgggtggaagggtgggatcaggagctggagggcagccaggggcaggctgaggagcggcgatggcaggagtgaggtgctgggaaattctgctcaccttttcatcttatggcccttcagaccccgatttccatctgcaccctgaaattagaggatgacagagtggccaggggatggaggtgggttggaaggagcgagcccctgagaccccatctcgctcccttcaacacagtcctttatccccagcctggaggtcagttaccttgacacctggaggtcctgggtatcctagagggccctgaggtccaaatggaccctggaagaaaaaggcatttgttaagggtcccagggtgtcactgaggggggcttggggtgggagaaataaacatcacagtgctagagtctgggtagggctccagggcacaggagtttcacaccacgtggaccgtcacttactcctccagcatttactgagcgcctcctgtgtgctggtgggtcctcagcgctgaggctgacccatggtctgcagtgaccrtgctgtgccagcagggatggctcctccctggcctcccactgcctgggtgctggggctccccaagcgtgcaccgtcctg

SEQ ID NO: 32492 - DNA, 545 bp, Homo sapiens
cagtgattgaactagtttacacacctaccaacagtgtaaaacgttcctatttctccacatcctctccagcacctgttgtttcctgactttttaatgatcgccattctaactggtgtgagatagaattaaaccatcttctttaaagcaagtctgtgaagctttgggggcagataaattccaactccaccacttactggcaatgcaaaatttttgagttgtcccttccataaaacaggagggatactattttggagagctggtttaatgagacaatgtatgaggagtgctcagtctctagcaaaaggcaggtccttactacaaggctcatggatattaatcccttcatcttctcctcccgcctctctcctttcccattatacacagacattttgacttttacactataaggtaaagagamataataaggtcagctgaatggcttagggtttaggaaacaaactcaaaaagacatttccctctaactgttcttaaacataatcttccctgtaacatctttaagcaagtcaacacacacacagacacac

SEQ ID NO: 32493 - DNA, 702 bp, Homo sapiens
aaagggtaggcgcagatgtgtgggccaggccgaggggactaggcaaaactggggcacctagcagagtccccaaaggttggagggtggcacaaagagaaaataaccatttattcctgaaattccagtattcttaaatagaattctaggtcccacatctcccctcaagaaaaacatttcaggtggactaaaaacgagggaaccactcccttaaaacaaagagaaagtttcctcccaggaagtgaggaagtgatgtggaagctccgtccaccgagttgtgggtgcagctggacagtgaatggtgactggcccgttagtcccggggtcactgcaggaggaacggaggctcctccctcttctccttctgctctgtcgggccacgatgtcactgagagtgactgtccttatgttcctacataatcagatcatgcaggtaataggagctctggtccttttaaaaataatttgagggaaatgtttttaggagaggattggaacaaacgcttcttgggtttcttctagtttactgcacagaaaccatttactactagcagcttaatgaatcccgattgatcrcgaaccgtaatgtcagggtaaccgtcctcattttctctgttttcagatttattttggttactcagatatttacctctgctcctcagaggtagtgagctgatagtgtatttttcatcaatttagaacaat

SEQ ID NO: 32494 - DNA, 539 bp, Homo sapiens
gtaagacatgcaaycatcttagaccagtgcccgacacaaagttggcactccataaacgccacatgctaatgctgccattactactgttcatgctcacattagtgcttgccattctcactgcactgtataggctcacccagcctcatcgggacctttggcaccagcaggaggttccacgcagacaatgccaggcacagctgcaggcagcacccacactggagcggcccatggggctttttctatgaagattctgctgcccagacctggagaggccggagaagccgaaccccaccaagaacgctgttttcacaaaagccgtttgccttcacactgggtggcagcacatgacactaactcattcaaggtcagagcgaccagactctcaacccttattttcgtttgcttgttcggcttttttttttttttttttgcattccattttgttgacatttctgttggacatgaccttaggttgactatcatttcagtcactcacgacactgagcgtctaaagtccacagtccttttttaaaccgttt

SEQ ID NO: 32495 - DNA, 1376 bp, Homo sapiens
tacattaataatgtccactgataaatttcctagtgttgtcacaaagaaaaggatgtttctacaaatttatcttattagatttccatcgtaaatgcaagctttaccccttttttctccttccccatctcatttgtgctttgaattattygaaatgtgttccattatactaacttttttttaatctgatgccttcgcgggcctctttgctttccatattgagtagaagtatttttagcctcctaatgctattgatttcattacttttaatttaatgatctgtacttgacattttttgaccttatgttcaaaaccaaaatcttcatttcttcaccttaaaaaaaaaaaaaatcatagcagagttttctttgattattggccaaatcatgtgactgacgaaaaaccagatgtcagacacaaagctactaaatatcaaataggttatcaaacaggaggaaaatgcaaagatatgaaggttaatgcaatcctatctttagacaaactcatttttcccaccctagagacaaaaatgtcaatctaatagtagaaatacatcaagagtgtttattatctgcctgatcctagggctatatataaaagtaattctgtgaccttgtaaagtatcttgacaacagtaaatcattatgttaggaagtagaactgcattctgtgttgttaattattgtatccattcaagacagcttatcaagaaatagagacagaaactcaaataaagcctatgggtccctcatgggatgtctatttaccacgcacctaaagttgttaagttcgtgccttcttgatgtaatatcaaacatgccttatcctttcggcagcactaactttcaaagaaaccaacaaccataaagattttttaaagtatttttttatctctagaaataaagatgaggagagtccacaaacaaattcattactttagaaaagactttcaaataaaaatctttccaggagtagtaattgctataaaggtcaagaaactacattgtgggaaattagtaaatatgcaaaatattgattgaagaaaattgcatcaaatctcccaagaatgtattaaatcctggtagagtttgagtaacaatgactgcttttctacaattatatttgcagaaagttagaatttctaagacgtgaaaatgacaccttgccatcagtttgctttttattttcaaagtgcttcctcatgaaacaggtggtaattgtattaataaaatttaaacgattaatattgtagcgtgcttggaacaatatatggcatatggtaagtgctcgataaatgttagttatttacatgtatctttaaaatttcaaatcccttcaaacatattatctcatttgaccgtcaggcgacctctctgggt

SEQ ID NO: 32496 - DNA, 1376 bp, Homo sapiens
tacattaataatgtccactgataaatttcctagtgttgtcacaaagaaaaggatgtttctacaaatttatcttattagatttccatcgtaaatgcaagctttaccccttttttctccttccccatctcatttgtgctttgaattattcgaaatgtgttccattatactaacttttttttaatctgatgccttcgcgggcctctttgctttccatattgagtagaagtatttttagcctcctaatgctattgatttcattacttttaatttaatgatctgtacttgacattttttgaccttatgttcaaaaccaaaatcttcatttsttcaccttaaaaaaaaaaaaaatcatagcagagttttctttgattattggccaaatcatgtgactgacgaaaaaccagatgtcagacacaaagctactaaatatcaaataggttatcaaacaggaggaaaatgcaaagatatgaaggttaatgcaatcctatctttagacaaactcatttttcccaccctagagacaaaaatgtcaatctaatagtagaaatacatcaagagtgtttattatctgcctgatcctagggctatatataaaagtaattctgtgaccttgtaaagtatcttgacaacagtaaatcattatgttaggaagtagaactgcattctgtgttgttaattattgtatccattcaagacagcttatcaagaaatagagacagaaactcaaataaagcctatgggtccctcatgggatgtctatttaccacgcacctaaagttgttaagttcgtgccttcttgatgtaatatcaaacatgccttatcctttcggcagcactaactttcaaagaaaccaacaaccataaagattttttaaagtatttttttatctctagaaataaagatgaggagagtccacaaacaaattcattactttagaaaagactttcaaataaaaatctttccaggagtagtaattgctataaaggtcaagaaactacattgtgggaaattagtaaatatgcaaaatattgattgaagaaaattgcatcaaatctcccaagaatgtattaaatcctggtagagtttgagtaacaatgactgcttttctacaattatatttgcagaaagttagaatttctaagacgtgaaaatgacaccttgccatcagtttgctttttattttcaaagtgcttcctcatgaaacaggtggtaattgtattaataaaatttaaacgattaatattgtagcgtgcttggaacaatatatggcatatggtaagtgctcgataaatgttagttatttacatgtatctttaaaatttcaaatcccttcaaacatattatctcatttgaccgtcaggcgacctctctgggt

SEQ ID NO: 32497 - DNA, 1376 bp, Homo sapiens
tacattaataatgtccactgataaatttcctagtgttgtcacaaagaaaaggatgtttctacaaatttatcttattagatttccatcgtaaatgcaagctttaccccttttttctccttccccatctcatttgtgctttgaattattcgaaatgtgttccattatactaacttttttttaatctgatgccttcgcgggcctctttgctttccatattgagtagaagtatttttagcctcctaatgctattgatttcattacttttaatttaatgatctgtacttgacattttttgaccttatgttcaaaaccaaaatcttcatttcttcaccttaaaaaaaaaaaaaatcatagcagagttttctttgattattggccaaatcatktgactgacgaaaaaccagatgtcagacacaaagctactaaatatcaaataggttatcaaacaggaggaaaatgcaaagatatgaaggttaatgcaatcctatctttagacaaactcatttttcccaccctagagacaaaaatgtcaatctaatagtagaaatacatcaagagtgtttattatctgcctgatcctagggctatatataaaagtaattctgtgaccttgtaaagtatcttgacaacagtaaatcattatgttaggaagtagaactgcattctgtgttgttaattattgtatccattcaagacagcttatcaagaaatagagacagaaactcaaataaagcctatgggtccctcatgggatgtctatttaccacgcacctaaagttgttaagttcgtgccttcttgatgtaatatcaaacatgccttatcctttcggcagcactaactttcaaagaaaccaacaaccataaagattttttaaagtatttttttatctctagaaataaagatgaggagagtccacaaacaaattcattactttagaaaagactttcaaataaaaatctttccaggagtagtaattgctataaaggtcaagaaactacattgtgggaaattagtaaatatgcaaaatattgattgaagaaaattgcatcaaatctcccaagaatgtattaaatcctggtagagtttgagtaacaatgactgcttttctacaattatatttgcagaaagttagaatttctaagacgtgaaaatgacaccttgccatcagtttgctttttattttcaaagtgcttcctcatgaaacaggtggtaattgtattaataaaatttaaacgattaatattgtagcgtgcttggaacaatatatggcatatggtaagtgctcgataaatgttagttatttacatgtatctttaaaatttcaaatcccttcaaacatattatctcatttgaccgtcaggcgacctctctgggt

SEQ ID NO: 32498 - DNA, 1376 bp, Homo sapiens
tacattaataatgtccactgataaatttcctagtgttgtcacaaagaaaaggatgtttctacaaatttatcttattagatttccatcgtaaatgcaagctttaccccttttttctccttccccatctcatttgtgctttgaattattcgaaatgtgttccattatactaacttttttttaatctgatgccttcgcgggcctctttgctttccatattgagtagaagtatttttagcctcctaatgctattgatttcattacttttaatttaatgatctgtacttgacattttttgaccttatgttcaaaaccaaaatcttcatttcttcaccttaaaaaaaaaaaaaatcatagcagagttttctttgattattggccaaatcatgtgactgacgaaaaaccagatgtcagacacaaagctactaaatatcaaataggttatcaaacaggaggaaaatgcaaagatatgaaggttaatgcaatcctatctttagacaaactcatttttcccaccctagagacaaaaatgtcaatctaatagtagaaatacatcaagagtgtttattatctgcctgatcctagggctatatataaaagtaattctgtgaccttgtaaagtatcttgacaacagtaaatcattatgttaggaagtagaactgcattctgtgttgttaattattgtatccattcaagacagcttatcaagaaatagagacagaaactcaaataaagcctatgggtccctcatgggatgtctatttaccacgcacctaaagttgttaagttcgtgccttcttgatgtaatatcaaacatgccttatcctttcggcagcactaactttcaaagaaaccaacaaccataaagattttttaaagtatttttttatctctagaaataaagatgaggagagtccacaaacaaattcattactttagaaaagactttcaaataaaaatctttccaggagtagtaattgctataaaggtcaagaaactacattgtgggaaattagtaaatatgcaaaatattgattgaagaaaattgcatcaaatctcccaagaatgtattaaatcctggtagagtttgagtaacaatgactgcttttctacaattatatttgcagaaagttagaatttctaagacgtgaaaatgacaccttgccatcagtttgctttttattttcaaagtgcttcctcatgaaacaggtggtaattgtattaataaaatttaaacgattaatattgtagcgtgcttggaacaatatatggcatatggtaagtgctcrataaatgttagttatttacatgtatctttaaaatttcaaatcccttcaaacatattatctcatttgaccgtcaggcgacctctctgggt

SEQ ID NO: 32499 - DNA, 972 bp, Homo sapiens
ttttttggacacttaaaactaggcttataagaccctcgtgtttgtacacatcgagtacttatataaggtgcgttttgctttttgggataggaaaagatagaaaaatagatggatatatgcttttctatatgttgctagatttagtgaagaaaatggtaayaagccatacttctcacacttccagcggtgaatgagcaaaccttcttctcccagtgctgaggtaacactccctttcccccagtccttgctatccgagtattctgcagctccttgattttagcaatttggacaatgtctttccacttcctcctatgattgatgaggatttaatgattttgtatcaccaggccttccctttcaatatagttatatgactatttgcattttcatcaataaacagtgttttctttttggcatgcagacgtttcacattttcatgtcaaccaatatgtatggtttctgctttgatgtcagtctcagggagctgtatttcctccgcctgttctagactgttccaatgtgtggttttattatctgctggcaccactttccctaattgctcttctttttgtatgtatataagattcctgaagaattttcaaatctttttttttttcaaattcctaaaataacttcattaagatttggataaaaatgatgtttttaatttaaggagaactgatattttagacagctgaattttggaacaacaggtgtaaatgctcttaagtcttctttcacgtccttgggtggcatacagtgtgtaatggaatgcctcagcgtggggcgggtgtgtgtttgtgtgtgtgtgtgtgtgtgtgtgtgtgtagagaaaagatgtgctagttgcttttctttatggatagatgcaggagattgccatagaggaaatctacgttgccttataaattgatgtctcttaattaacccccaccttggcaaaattaacattcaggacctcagtcggacaca

SEQ ID NO: 32500 - DNA, 1156 bp, Homo sapiens
tcttcaatttggaaaaattaggtttcacaaagtaacagatggatatttaaaatatgggatttagggccaggcacagtaactcactcctgtaatcccagcactttgggagggtgaggcaggaggatcacttgaggccaggagttggagaccagcttggacaacacagcaagatcccatctccacaaagataaataaaaatttagctagccttggtggtgcaagccagtagtcccagctacttggaaggctgaggtgggagagtcactcaagatcaggagtatgaagttccataaaacaatcttccaaatatgcaatttatttcaagtgccttcaactgttctacaactctgcattcactgtcctttcaatatgtcccaatttgaatacaaccttttagaagtatgatatgcagaactaaaaggaattatatgatataaatttaagttagactggggctacctcttctcatcttttttcttttttggaaactaaatttcaattacacacaattaaattacattagtttttaaaattttctttgaaaactcactgttaaaaaatattaaatacatgttgtatggctgagtttggctcctccaaatcctctcctgatgcagaagtttttactgtaagatcatagtatttattccttttgaatttcactttgaattcagccccactattccagcgttttaaaatactttaaatatgaccttatgtcatatacaaatgtgaaaatatgcttcaatattttcatagcaataaatgttgagcagaataaagatacagatagtaccccttgacattctaccatagtcctatcctccaagtggatatcaatccatacattgatatatgtggtgtggccaattatttctctaatgcctttgtcccccgtatatttcatacttttgttcactaggactgcataagaaacttactaatatttagatattaaagtccttccccattttcctgactgactagcctagcaaatctcctcaaaagttaagtttagcctgacaatcaacagtttgcaaaatataaatattctttttgaaagttaagaattkttctctatttgtagtctagggtacttagagcattatttttaaatgcctcagaagatcacaggaaatgtttcatttttttattt

SEQ ID NO: 32501 - DNA, 609 bp, Homo sapiens
cttgtttaagattatcacttatcactctcctatgtattttctaaacaagaatgttttcttttyttaagtttaaatccactgaatttattttacaaatagtctacattgaattaaagagttaactaaagagttagcaaaaagggcataagatcaattagggaaataccaacagggctacattattaaaatattctagaaatcccaatctattctcttgaggccattttacaagatccaagggagaatacatggatatgtgaaacagggagaaggtcacatttcacaaaaccaataataggaggtacctcaacaaaatgaaagctttagctaatggggaaaaaagtcctcttctccagtcatttttagcctttcaaaaatttttccctgccgaagtcccccataagaaataagaaaacagcaatcttagaaaccactggttttgagatctggagtactggtggtacagttgggggaaaaaaaacacaaatgatttctttttttcttgggggtggggaagaaaggagtttgggtagagtatttgacctatctacagactgtaaattagaccctccattttcaccactttctttttttaaaaaagttgagggg

SEQ ID NO: 32502 - DNA, 501 bp, Homo sapiens
aagaagttgcaggctgagtgtggtggctcatgcctgtaatttcagcacttcaagaggccgaggtgggtgggccacttgaggtctggagttcgagagcagcctggccaacatggtgaaaccctgtcttgaccaaaaatacaaaaagtagctaggtgtggtgatgtatgcctgtaatcccagctattcgggaggctgaggcaaaataatcgcttgaacctgggaggtggaggttgcagatagccatgattacataatcactgcactccagcctgggtgacaaagtgagactatatctaaaaaaaaaaaaaaaaaawggaagttgcaaggatagggtcagaggtacggttgaaaaaaaaataacagaggtcatctgcaccctgaaacagtggttctcattcttccaagccctgtcacctggaagacttgttaaacgcacatcactgggccctacctccagagtttctgattgagtagatctgagttggggcctgaaaatgagca

SEQ ID NO: 32503 - DNA, 581 bp, Homo sapiens
tggtgtgttatagacctttgctactcaaagtgtggtccatcacctaggagcttgttagaaatgcagaacctcatgctcctcccttgatttagcatcagaatcttcattttaacaagaatctgggtgattcttcttgcactgaagcctgggaagcatggatagagctggccctaggatctggatacctgtaggagcttctgagttgaccaagcagtgcatggggagtgaggtatcatctgggacctgagctggtaacccatccactgcttaaaatgttctataacatgcttkgtttgcatttttctccaacctaaaccctcagttagttaaacctccccagagcttccatattaaatggttctcttcttgagaaaggttcaatatttgctcattcaaattaactcagctctagccttctgtcaaagcattgtgccaaatgtaacagcatcattactttccttaatctagtttaaaaatagactataaacatattcctttttttttctgcacaaccatgtaggagaatttatctttctttacctgaaaacttttaattacttgcatttgggattccaaggctg

SEQ ID NO: 32504 - DNA, 619 bp, Homo sapiens
tccacactggagccatcgtgatttcttcctcactctcaccaacctgctgcttcctggtctgcatagacccctcctcaccttcatccccactgcacataaacttatctttcaagactcagcatacacatcacctcctccgcaaattgaaactgcctttgcaaaattatgactgagacagtgaaagagatctaacttaactgactctatcttgcctctaacctccaagctgtccttgttcattcctgggygtaggctaaactaactttgggagaaacttagtttatagtttaaacaaaggtaataacagccctttcccaaagcagacctcctttttgcctggggactagattacctttgtaggactaacattagccacaacattagaaattatggtttaggagtcatgcagctggaggttacaagattctgaccctccctaaaccacttcctaagatcagtgcttgagatattttgcagaccctgcacttgatggatcagctggtgccacccagattgatgaactggctcatccaatcttgttgcccccacgcaggaactgactcagcgcaagagtcagcttcgactccctatgatttcatccctgatcaatcagcacccc

SEQ ID NO: 32505 - DNA, 1602 bp, Homo sapiens
tgcatttccgaagcatcaacttggttgtctgagagcatttcccttccaggattataattgtgagtggtaagcagcactagtgtattggtgacttactccagctgtatccaaggacaggtaaaacttcccactgtctctttctagaggctactttgtagcatttcagatgtgaaaggtgactccagcagagagctcatctatttattatttatttttgagacggagtctcactctgtcgcccaggctagaatgcaatggcgcaatctcagctcactgcggcctccacctcccrggtacaagtgattttgctgcctcagcctcctcagtagctgggattacaggagcccaccaccacacctggctatgttttgttttgtttttgtttttgtttttgtttttgttttgtagtagagatggggtttcgctgtattggccagctggtcttgaactcttgacctcaggtgatccgcccgcctcagcctccccaagtgctgggattacaggcgtgagccactgcgcccagcccagcgagctcatttctttattttattttattttattttatttatttttgtttttgagacagagtctcgctctgtcgcccaggctggagtgcagtggcgcgatctcggctcactgcaagctccgccttctgggttcacgccattgtcctgcctcagcgtccccagtagctgggactataggcacctgccaccacgcccagccaatttttttttttttttttttttagtagagatggggtttcaccatgttagcaaggatggtctcaatctcctgacctcgtgatccgcccgtctcagcctcccaaagtgctaggattacaggcatgagccaccgcgcctggcccagagagctcatttctaacaagctattatcaccatcctcactgctttctaaaccttataggtatgtagcttcaaagtttatatttgaacgtttttcctttattgatgacaaattaaggataatgaaatgaagtaatggcaagcgatgaaataatggcaaaagattttattttcctacaaagtatttattacatggatgttttatagaaaatcaatgtaaaggttgatagacttgtcctttaaaaaagatacatttcttcaaatatagggaacagcagaatgctccctgtcaccccctttgtaaaaacctctttcagctttgcagccatcatggctggggataagtagatttatttcttctgttcctaaagattattatagatgaaaatcatttggtgtggagattcttcatttacagctacgtaggatgtagcacttatcaaaatttctgcaaatcaaggagaatagtgttcatgaacctaccagtgagatattttaaaagaccgcgttctggaaaagtgaaggaggataaagaagcagtgttcttctgagggtgctaccaacatttgggactctcagaggccctgtagcccagtccccattccactccatgggtaacacctcatggttctttcatgggtgttcagcattctcttgaatgcttcccctaaaggcagtttgttctcctgtgaggcagcctagtccatttcacttgaaaattttcttctgcaatatg

SEQ ID NO: 32506 - DNA, 517 bp, Homo sapiens
gagtgcagtggagccgtctcagatcactgcaagctccgcctcccgggttcacgccattctcctgcctcagcctcccgagtagctgggactacaggtgcccgccaccacgcccggctaatgttttgtatttttagtagagacggggtttcaccgtgttagccaggatggtctccgtctcctgaccttgtgatccgcctgcctsggcctcccaaagtgctgggattacaggcatgagccactgcacccagcctgaattattttgttagctggtccttactttaaatcagcagagtatagactaagggcagaatggtggcatccatgggccagacccaaagaggaaacccataggtctactgggctttgggtgtccccgtgaaatatgtttttgtattctggtactgagcagaacagcggggaccatgttgggagggagggggaggaggcatcactcaaatacacttttctaacttctttttgaagaggtctttcatcttacgttatttctaaatgcccc

SEQ ID NO: 32507 - DNA, 622 bp, Homo sapiens
tgcattaaagatcccccagcagtatgggccttggcagctcacagtggagctcacagcctctgcttctgcagagggactgacactggttctcttcatgcccrccacgtacctcacagctagcaatgatataaaagcaactctcaaaagagcaactccattcaccagctcctcaggcacaacacacaactttatacacatttgtcatatgtccaaaaagtaaaaaaaaaaaaaacaaaaaacttgttccaactttttgctccaagagaaaaaaaaaagctagttaatctaagtgcttcaggaagccttaatagccttttcatctgctccagcagcaacgcccatttctctggccaattggagagaatcaactcaggagttacaggttctagcaccaggagaaaaccgcagtgagaacgggtcatttgtttggagagactgccactcccagcatttttgcatgtttacaacttgactgacttggaagacttcatttcctaatactaaggaaagtttgcagaagggcccatgaagtatcaaagcctcctaactgcactgtgagacgcaggaaaacccggccatacctcctcatgtcagttttcagctttatggactttatctgaca

SEQ ID NO: 32508 - DNA, 901 bp, Homo sapiens
tggatatggttctggaggttgggaagccaagactgaggggctgcactggtgagggatttcttgctacatcataacatggaggaaagcatccacagtgaaagagaatgcacgtgcaagatggaaggctacactggcttttataacaaatcccctcttgtgataacaagcccactcccatgataacaacattaacccatttatgaaggctctgcctcttaacagtcycacctcttgatactgttgtgttggggattaagttcctaacatacgaactttggaggacaggttcaaaccatagcagccagagagccagtaaggggagtggtgacattcaaattagaggacagggtgtctgtcctccttcccatgcctcccctgacagcaggcagcaagagcaatggagcagagagaatggtgggggacaagacacatagttgctagatccggagctggagatgggaagcacagttcaggcttttgcatagaatatgaaattgcaatcctaaaatgaacaagaccaagtcttataaactgaaatgaagctctttcagtaacccaaataacttataggatcaagctgtcactaagggactgtggcatataaagggagtcacctgagcacagttattaggaaatgaaacctacctaacctgcccccatccaacctcaattcccctaactataaaagagtggagacttcttactgcacttcccccactcacattgaccacattacctggggtcttgtttctgttgaaccacccaaggtggggactcagctcctctgaagcagatgcacgtgcaggttgaaagattccctagtcctgctcactgcattgttaatcctttaatattcttccgtcactggacaatcctgggctgtcctgaccatggaattcca

SEQ ID NO: 32509 - DNA, 901 bp, Homo sapiens
tggatatggttctggaggttgggaagccaagactgaggggctgcactggtgagggatttcttgctacatcataacatggaggaaagcatccacagtgaaagagaatgcacgtgcaagatggaaggctacactggcttttataacaaatcccctcttgtgataacaagcccactcccatgataacaacattaacccatttatgaaggctctgcctcttaacagtctcacctcttgatactgttgtgttggggattaagttcctaacatacgaactttggaggacaggttcaaaccatagcagccagagagccagtaaggggagtggtgacattcaaattagaggacagggtgtctgtcctccttcccatgcctcccctgacagcaggcagcaagagcaatggagcagagagaatggtgggggacaagacacatagttgctagatccggagctggagatgggaagcacagttcaggcttttgcatagaatatgaaattgcaatcctaaaatgaacaagaccaagtcttataaactgaaatgaagctctttcagtaacccaaataacttataggatcaagctgtcactaagggactgtggcatataaagggagtcacctgagcacagttattaggaaatgaaacctacctaacctgcccccatccaacctcaattcccctaactataaaagagtggagacttcttactgcacttcccccactcacattgaccacattayctggggtcttgtttctgttgaaccacccaaggtggggactcagctcctctgaagcagatgcacgtgcaggttgaaagattccctagtcctgctcactgcattgttaatcctttaatattcttccgtcactggacaatcctgggctgtcctgaccatggaattcca

SEQ ID NO: 32510 - DNA, 842 bp, Homo sapiens
atacaggaagcagcagaaaggccctgggagctcgctgggtcccctaccaggacattcctgcctagcaccacagggatccaatgggagaggagcagggggtaaaactacaagggagttggaaatctgtagcagaactttgtaacaatttgaatgctgttagaagcctactggacagaacttgcgggagggcacaaatccagtgtgcagactccacagatgagagaagaaccaagcccttttctttcgcagctgggaggtggagagcctgggacagggtttcaagtccatatcgctctctacstggaaacagtctgggggccattaagggtggggggcatggtggaagtgagaccggtccttcagtttgcgtgggagctgggtgaggcctgtgactgccagctttcccctacttccctgagaacctgcatgactcagcagaggcagccattatcctaggtacaatctctagtgtatctgggaatcttacccccacccccgacagcagctgcatcaagacctgctcaaggagagtctgagctcagacatgcctagacccatccgcacctgaatggaccgtcactactcactctggtagcagaagacaaaatgcatataatcttgggtgttttagggccacacagcaccaccgggttcctccccatactaccatcggctgatgctctctggaaagcaccacctcctcggcacgaggccaaccagcacaaaaatagagcattaaaccaccaaagctatgaacccccacggagtccattgcacacagccccgcccctgccggccgcaccacctccaccaaaacagatagctagtatcaacggctaaga

SEQ ID NO: 32511 - DNA, 529 bp, Homo sapiens
ctctttttctgtctgtgatctctcttcaaaggccatatccagtaccttgattttacctatctatctgctttaggcagatccttctcacaatacgcagcatctatctgtattatatacacagcaataatcacatattttcaaacttttatagccaaattattattcacacgtaattaaaattttatatgattgtaatgcctaaatagtgacttccaccattaatttactaccaatattcaggtgagagaaacatgtcattaccttttggaaataaatacaacagagatctctacattaattttggctgtaataaagtgtaatttattactaagttggatttacaaaggaacaaaattatttttgttattcctatgagaaagctgtttatatgatatattggaaatgtgttcaattgttcctgctcttatacattcccaaaataggtaaatacggaccctaggacttaagtgtgaataaarttcgatgttgggacatgcttgcatgtatttatcattttggattttggtgt

SEQ ID NO: 32512 - DNA, 1263 bp, Homo sapiens
ccagcctccccaatagtaatggctggcattactatagtacactatcaaaacattggtacaattacattgataaaaattaacattagtgcaatccacagagcttattcagacctcatcagttttataagcactcatttgggtgtatgttttatgcaattttgttaaacaatcgcacagttttatttttgtcacatgtatagcttcttgtaagtatcaccatattcaaaataaaaaagtgttctttcaacacagggctcccttgtgtatgcctatacgtatcttgtattttttaataaagcatgtatatgtacatatgaattttatatagaatattgtgttttgcaaatgctcataaataatttaaaatgttttagctgctatcccatctaacactgtgtaggcctagaaaaacatatctattgcctgatttcagcctacagctgcctgtttgccatctggtttacgttactacttagctaaataacgctatgtatctaatgatttattctatgttttcacctagtgtatagtatttgtttatctggagatgtaggcatttacattctattctccttactatttagacattttaaagaaaaggctgagattatttctaaggctgctaatcatttattatgtagaatatttggagacgaacacagcaagtcagaggtcattatttttcttcttgtaatcagcacatgccatccatgaatctctttcctcaggcgccagactcttgtcagtgtgtcaatatatacaaatttcaattgtgatttccccactaaggaggtctaatacatatcagttccactatggtgagctaattgcaggcctgaacgtttaccctaggtctgcatagcaagtgcaaaggcctgcgtgaatttactggcttatgaaccctatgttaaacatggttcctggaaaaaaaaatcaatgatatacttcattttctggctctaaatctctgaaaaaccatcttaatcctttgtgtgggaatctcatgtcacatttctaaggtaataataacaaaagggacagaaaacctgttctgggcccttactgtatgtgtagaactgcaacrcacttaacgagtcgttccctttaatcctcacaacaagcctgtgggacagtactatcattattcctgtttcactgatgataaaattgaggcttctgaaggtctgcatgtctggtaaaggtcatgcaggacataaaacgctgaatcttaagggagatgtgaatgcaaataatctcaacctt

SEQ ID NO: 32513 - DNA, 1263 bp, Homo sapiens
ccagcctccccaatagtaatggctggcattactatagtacactatcaaaacattggtacaattacattgataaaaattaacattagtgcaatccacagagcttattcagacctcatcagttttataagcactcatttgggtgtatgttttatgcaattttgttaaacaatcgcacagttttatttttgtcacatgtatagcttcttgtaagtatcaccatattcaaaataaaaaagtgttctttcaacacagggctcccttgtgtatgcctatacgtatcttgtattttttaataaagcatgtatatgtacatatgaattttatatagaatattgtgttttgcaaatgctcataaataatttaaaatgttttagctgctatcccatctaacactgtgtaggcctagaaaaacatatctattgcctgatttcagcctacagctgcctgtttgccatctggtttacgttactacttagctaaataacgctatgtatctaatgatttattctatgttttcacctagtgtatagtatttgtttatctggagatgtaggcatttacattctattctccttactatttagacattttaaagaaaaggctgagattatttctaaggctgctaatcatttattatgtagaatatttggagacgaacacagcaagtcagaggtcattatttttcttcttgtaatcagcacatgccatccatgaatctctttcctcaggcgccagactcttgtcagtgtgtcaatatatacaaatttcaattgtgatttccccactaaggaggtctaatacatatcagttccactatggtgagctaattgcaggcctgaacgtttaccctaggtctgcatagcaagtgcaaaggcctgcgtgaatttactggcttatgaaccctatgttaaacatggttcctggaaaaaaaaatcaatgatatacttcattttctggctctaaatctctgaaaaaccatcttaatcctttgtgtgggaatctcatgtcacatttctaaggtaataataacaaaagggacagaaaacctgttctgggcccttactgtatgtgtagaactgcaacgcacttaacgagtcgttccctttaatcstcacaacaagcctgtgggacagtactatcattattcctgtttcactgatgataaaattgaggcttctgaaggtctgcatgtctggtaaaggtcatgcaggacataaaacgctgaatcttaagggagatgtgaatgcaaataatctcaacctt

SEQ ID NO: 32514 - DNA, 401 bp, Homo sapiens
ataaagcatgtgcagttgaaatcatgataaatgttaaaggaaatatattgattatttaaataacaaaattgtgctagtttgataaaacctgcgttaaacctgataacttctagaacaatatttctgattttaactccattctgctttcyttaattttgtacagacacacacatgcacataagtttattaaattttcacaaactgaacacccctgtgcaaccaatacctggatctaaaaagagaacattttcaacccaccaaaagccctcattatgcctttttatctgtacctgccctccaaagtaattactaattattatgcacttaaatgataagggctgtagagatatggatggggcacaagagcttctgctacagtttactccttgccctaaccagat

SEQ ID NO: 32515 - DNA, 541 bp, Homo sapiens
accaatatggtaacacagttttgggaaatggcctaactgtcttacttttacggcaaagtagtacactgcactatccaatagattgccaggggtgcttatgtcactacatcccaagcttcagatgtctcagaacagaaaaagagactccagttgtttgaaagaaagtacagaagagaacaagagtctctgctggtaatccagagaattctcctggatcttcaccaagattatcaacgcagtacctctatgaatctgcaggaaccacagtgctactgggattgggctgccaccctaatgcagttacagcttagatcacaacacacaagtcctttagaatatctgaaaagccttcccagaaagacaggtacaaataagcccagactgcaaagactaaaataaatccctaactcttcaatgcccagacacagataaacatctacaagtayagagaaaatccaggaaaacatgacctcaccaaataaactaaataaggcaccagtgacccattctggggaaaaacagatatgtgacctttcagaca

SEQ ID NO: 32516 - DNA, 541 bp, Homo sapiens
accaatatggtaacacagttttgggaaatggcctaactgtcttacttttacggcaaagtagtacactgcactatccaatagattgccaggggtgcttatgtcactacatcccaagcttcagatgtctcagaacagaaaaagagactccagttgtttgaaagaaagtacagaagagaacaagagtctctgctggtaatccagagaattctcctggatcttcaccaagattatcaacgcagtacctctatgaatctgcaggaaccacagtgctactgggattgggctgccaccctaatgcagttacagcttagatcacaacacacaagtcctttagaatatctgaaaagccttcccagaaagacaggtacaaataagcccagactgcaaagactaaaataaatccctaactcttcaatgcccagacacagataaacatctacaagtacaragaaaatccaggaaaacatgacctcaccaaataaactaaataaggcaccagtgacccattctggggaaaaacagatatgtgacctttcagaca

SEQ ID NO: 32517 - DNA, 541 bp, Homo sapiens
accaatatggtaacacagttttgggaaatggcctaactgtcttacttttacggcaaagtagtacactgcactatccaatagattgccaggggtgcttatgtcactacatcccaagcttcagatgtctcagaacagaaaaagagactccagttgtttgaaagaaagtacagaagagaacaagagtctctgctggtaatccagagaattctcctggatcttcaccaagattatcaacgcagtacctctatgaatctgcaggaaccacagtgctactgggattgggctgccaccctaatgcagttacagcttagatcacaacacacaagtcctttagaatatctgaaaagccttcccagaaagacaggtacaaataagcccagactgcaaagactaaaataaatccctaactcttcaatgcccagacacagataaacatctacaagtacagagaaaatccaggaaaacrtgacctcaccaaataaactaaataaggcaccagtgacccattctggggaaaaacagatatgtgacctttcagaca

SEQ ID NO: 32518 - DNA, 560 bp, Homo sapiens
aagaatcctatatcaggaccatctttattatatgtttaaatgtttaaaattatgttgaaatcctaaaacatatttaaatatgtttaaatagttcagatatttaaatcctaatccccaagatgatggtattaggaggtatggtgttttggaggtgattaggtgattaggttcttggcagagccctcatgaatgaaattagtgtccttatataagaggctacaatagacttctagtccctttagccatgtgagaacacagcaagaaggcaccatttatgaacaagcaagtaggmccttagcagacaaagaatcagccaccaccttcatcttggacttctcatcctctagaagcataagaaaaaaatttctattgtttataagctaccttgtttatggcattttattatagcagcctagatggactattttgttggtggggaaagggaatagggtgccaaaaatgctgtagaagagaagggcagaagggagagatgtggaaaggaaaccactgaattttagaattaaaagaaaaccctttatgttctttcattttgttcatat

SEQ ID NO: 32519 - DNA, 574 bp, Homo sapiens
attatttcttaggtagttctgttgtatttaaaactctaatgtccatacaatagcgtcagaatgcttttttttaaaactcagttaaaatgcatgccaggcttgacaggttatgattcaaaacattaaatgtatccttcaaattaatttctgtgatattactttgaaatgctttaaaactggctttcgactttttaatttcattacataaatcaaaacagtcaatatttcttggatacttacattctcattatatcmcctttcttcttccttcttctttggactattttttttaattcagaaaaaaaaaaatcttatctttataccttaacatcagatggtaaaccattttatttaatattcagcctggttagagatttgaatggctataatagttggggagaggtggtaatagtagagactggaagatgccttttttcagtttaatatcaaggtcatgttgttattatcaaacttggttgcataaggcaattttttatgttcataaactctattttgataaatcgatccactcattcaacatttatagaaacaaaactattacaaccaaataggt

SEQ ID NO: 32520 - DNA, 574 bp, Homo sapiens
attatttcttaggtagttctgttgtatttaaaactctaatgtccatacaatagcgtcagaatgcttttttttaaaactcagttaaaatgcatgccaggcttgacaggttatgattcaaaacattaaatgtatccttcaaattaatttctgtgatattactttgaaatgctttaaaactggctttcgactttttaatttcattacataaatcaaaacagtcaatatttcttggatacttacattctcattatatcccctttcttcttccttcttctttggactattttktttaattcagaaaaaaaaaaatcttatctttataccttaacatcagatggtaaaccattttatttaatattcagcctggttagagatttgaatggctataatagttggggagaggtggtaatagtagagactggaagatgccttttttcagtttaatatcaaggtcatgttgttattatcaaacttggttgcataaggcaattttttatgttcataaactctattttgataaatcgatccactcattcaacatttatagaaacaaaactattacaaccaaataggt

SEQ ID NO: 32521 - DNA, 534 bp, Homo sapiens
aaggttatattattttatttatatttccacattaagaaagtcactcttgctttgacggttaatgacaacacccacaccctgggcctgtgaagcgtgggttgctgacaggccagtaggccccatgagtcccaacctcccattcatgggcagtttcagtgttgggacttatggtgatctttctaaatgagttgggtatgttatcatttttaatgttatagttattattaataattagctaatgtgtatttttcagataccctataattttgttacagttttggcatttattgtcttttattaatccaagatcgtcaaaaaatagaaaaggcctgggttctctgagagccccttcccccttcataagtttaaggggaaaattcacataatatgcccagcmcagtggccagcacctgccagtgctctgtaaagaggaaagtcactccacctccccactttccctcacgcttgtggcccaaggcccaagctccagtcccacacaccagcataaaagccaacacccataggctttagaat

SEQ ID NO: 32522 - DNA, 1319 bp, Homo sapiens
tgagaccagcctggccaacatggtgaaaccccgtctctackaaaaaaagaaaaattaagccaggcatggtggtgcgtgcctgtaattccagctactcaggaggctgaggtgggagaatcgcttgaactcgggagacggaagttgcagtaagctgagatcacaccacagcactccagcctgggcaacagagcaagactccgtctcaaaaaaatgctaataatgcagtcagagttagactccatctcaaaactaaataaataaagaattgtattaggtaataagagtcaaaacccagtaactcaaactaaaactcttctgattgccacatctgcaaatgggacaatctcctgagggagctccagttcactaatgctactactcacagaactcgttatacagagaaggagccagcaagataaaaattccacaagtgtcatagtctctatggaaaaacataagcctcgtctcaaacttgattgggtacatgattaactaaaaaaagatatcactgcctcaaatcattcacaaatttacataaatatgcaaaatcacaaccagtgaaattatttttttcttgaactccaattttctttttccagtgtaaccattttatagaaaagagtcaaaattttacatggtttgtctgttaatgttgcctctttttctttaaatagttcttataattatatacaatcatctatatatcactactagaaacccagtatacaataaaatattaacagaatttatcaaccatattgtagtaaggtttaagaatacttaacaaaaagtgataatccaaacaccagattatattgtaaggcaatttaattaggacttcaccagaacttataaaatcccagaactgcttaaaactgtaagatcagagtaatctgctcatctcattaaacaaaaagcaataatttaaacttccaatttcagaaaactctgccacccaacaaaaatatgtttgtcatcatttatatactacaacattatctaccaaagcttttcaaaggtggaaaattacccaatagatgagaggaactgaccctttgactctaactaaaaatataacatactaccatatagtctaaccatacatcaaatgaatctcttttcaactaatatgttttttaagaggaacaacaggaaaccacatattggctggtgttttaggacaggaaacatattcaaatggattctgtggaggcctagaactcaaaatcctatttttaactgggtgtgtacatgagttttttcaaaggattatatataagcaagataatgaacttgacatctccactgtctcaccttca

SEQ ID NO: 32523 - DNA, 512 bp, Homo sapiens
tatttctaggaggagtaaccataggatcaccattagaacaatcctgtctgcagtcaggaaaacaatagctccagagcatgcactcctagtaacagccacttataatcttcctaatgaaacagaaaacagtatgtcaaatcgagaagggctgaggttctccagttcttcattcttgctstcccatctgctcttgtgactgagcatcagtgagtttgctgtcagatgtgcatagaggccaataccatggcactggcttttgagaaaagaaaacttttatttcaagtcaactggcaaggatacaggaggaaatgctcaaatctgtctccccaagctggaggctggggtaggtttcataagcatagggtaatgatgtgtgatctgattggatcttaacaatgaggtgatgtcgggaagcatgatctgactggatcctgccatgggtgatgacagtgctctatctgattggatcctggatcctgcaatgtggtgtatgctgcttaattcagtccctg

SEQ ID NO: 32524 - DNA, 1291 bp, Homo sapiens
tgcattctactagaatttaagcttcatgagaacatgaatattgtttttgtttactggggtgacttcagtgcttagaagtatataaagcacataaggacacaataaacatcgaatgaatgaatgaatgaatgggggtcttattttattgttagaactcttagtgtataatctaagtgtcgctttactgttcccataaaagtcactttttttcaaaggagaagagagaaaagacaggtgtgttacattcacaacctagttatccatttaaatttgacccttggtgttctgcagtctttgctgagctcccagctcctccacgtgctaccacccacagcactgaaaatgagatgctgcttttttcagatcatctccagcagagggatgaaagtgaggctactcatgcttcctgccattatatcacctctttactttccactgcactatcacacaagatagtgtaaatgtgtcagttcttatggaatttttagggtaagcaaattacagcataggtagggaaatattaaaattgtacataaaatgtttattttcctatagtcctagagaaaagtacttaaattgagcacttcacagaaggttcctttttcctaaccttatatgcctttacatggcaatgtgtttgtctcttttgcaaaatagtcacagagcagctgccctccttttagtctcatccctcctctgagaagctgattttactccaagatatatcaccacccttcctccctaggtcatttctcagtctgagtatagagtaacatgaggggctttagcaggactgtccatggttgtccttgggacttgagttcctcaaaactgttcattgcgggcacaggcacactatgttccttaagacctgcccaaatattcttttaaattttctactgaatgaatggttgattgtcatttcaacatcagtctctttctctcttttacacamttcccaaagaccatcaccttttttttttttttttttttgagatggagtcttgctctgtcaccaggttggagcgcagtggcgcgatctcggctcactgcaccccctgcttcccaggttcaagcaattctcctgcctcagcctcctgagtagctgggattacaggtgcgtgccaccacgcccagctaatttttctatttttagtagagacggggtttcaccatgttggtcaggctggtctcaatctcatgacctagtaatccacccacctcggcctcccaaagtgctgggattataggcatgagccaccgtgcccggccgacaatcaccttttttcct

SEQ ID NO: 32525 - DNA, 528 bp, Homo sapiens
tgctctacatatatggttgcacaaagtgtgtcgcatcagtaggtgcccactgaaagcagaatttgtggcattaatgtcactgctatagatctttctgcaccttttgtcatgcagaagataaagtaccaggcagctcagagcagtggaaagaacatttaattttgacccaaacctctccatcctgattctggctaatccatttactagctctgtttctactcagtctcccagccgcagttcttatcctacaaaacaaggatacctgctacctcaccctactgcttacatccagtcacttcatgaattctgtagctgataaagtgtcatacagttataagacacaataatgattaaaaacatttctggatcaacttccagaccccttctatttatgttttcctgtaaattgaagtcattattcactgcagctctcaacactgtcagacccaggaaacttctagttgtcatttttctggaatcctatttttrtgtttctccagtagctggaactgctgccactctgcttgt

SEQ ID NO: 32526 - DNA, 528 bp, Homo sapiens
tgctctacatatatggttgcacaaagtgtgtcgcatcagtaggtgcccactgaaagcagaatttgtggcattaatgtcactgctatagatctttctgcaccttttgtcatgcagaagataaagtaccaggcagctcagagcagtggaaagaacatttaattttgacccaaacctctccatcctgattctggctaatccatttactagctctgtttctactcagtctcccagccgcagttcttatcctacaaaacaaggatacctgctacctcaccctactgcttacatccagtcacttcatgaattctgtagctgataaagtgtcatacagttataagacacaataatgattaaaaacatttctggatcaacttccagaccccttctatttatgttttcctgtaaattgaagtcattattcactgcagctctcaacactgtcagacccaggaaacttctagttgtcatttttctggaatcctatttttgtgtttctccagtagctggaacygctgccactctgcttgt

SEQ ID NO: 32527 - DNA, 1275 bp, Homo sapiens
aggatggtttagtgcatttttagtttttactttaaaaatctgttttctctaagtgttttcatactttctacagtgccgtcaataatatataatcagagaaaggaaacttaaacaggaataagcagcattcactttttctagcttcttagtcacattatcaagattcttcagtgattttactctgaaaatatccactgaattccatcaacattccattatcccacagggccaatcttcagaattatggaattggacatgtaggaaagtggtaagagcagtagatgctacagatttcaatatatttccaacaaaatagacatcagtaggcaataactaccatttctaatgcttgatagtatagttggataaaagagtctattcaaccttccacaaattctctgaggcaattagttgctatgaaatattgctttcactagaatattttagctcactgcctgcttcccttctcaacatttatccattactcccaccaactctctctctctctctctctcacacacacacacacacaccacaagtgttcccaggactttctgaaatatggggcatacattcttatcataagattatataaataaaattaaatataaaaattgtggaagtaacagagcacaaacattataaacataatagatgctgaaataactgctactgttaatatttgagagtgactgaagtgttgggttaccccttagtggtgggcatcacatctacaccttccagaacccatctgagacatgttctcagccctttaaaaatgttattatccatgttttctttaatgctggaaactgcagatcccttggctttggtggcctttgttctttcatacagagacactttcttccatctctgggttttcttttgctgagcaaggagccttttccaatcccttgaggtctgaaactttctcaccaaactgactcccctttcctctggagacaggcagcattgcatttttgtaggctcctttgcagtaaggtgtggccctgtgactgagttctgacsaataatgtggacaaaagtgatgcacaactaacttccaggactggccggcccgtaataaaagcttccatgcactgctctgttttcttcctccacataccagcaggaattatggattcagtgatggttctcaggctacaggggatggtggagaaacaaatagaaaaagtctggatccctaaatgactgtatggagaagggtcacctcctcccagcacaacccacattaaaatgtaaaaataggaaata

SEQ ID NO: 32528 - DNA, 1275 bp, Homo sapiens
aggatggtttagtgcatttttagtttttactttaaaaatctgttttctctaagtgttttcatactttctacagtgccgtcaataatatataatcagagaaaggaaacttaaacaggaataagcagcattcactttttctagcttcttagtcacattatcaagattcttcagtgattttactctgaaaatatccactgaattccatcaacattccattatcccacagggccaatcttcagaattatggaattggacatgtaggaaagtggtaagagcagtagatgctacagatttcaatatatttccaacaaaatagacatcagtaggcaataactaccatttctaatgcttgatagtatagttggataaaagagtctattcaaccttccacaaattctctgaggcaattagttgctatgaaatattgctttcactagaatattttagctcactgcctgcttcccttctcaacatttatccattactcccaccaactctctctctctctctctctcacacacacacacacacaccacaagtgttcccaggactttctgaaatatggggcatacattcttatcataagattatataaataaaattaaatataaaaattgtggaagtaacagagcacaaacattataaacataatagatgctgaaataactgctactgttaatatttgagagtgactgaagtgttgggttaccccttagtggtgggcatcacatctacaccttccagaacccatctgagacatgttctcagccctttaaaaatgttattatccatgttttctttaatgctggaaactgcagatcccttggctttggtggcctttgttctttcatacagagacactttcttccatctctgggttttcttttgctgagcaaggagccttttccaatcccttgaggtctgaaactttctcaccaaactgactcccctttcctctggagacaggcagcattgcatttttgtaggctcctttgcagtaaggtgtggccctgtgactgagttctgaccaataatgtggacaaaagtgatgcrcaactaacttccaggactggccggcccgtaataaaagcttccatgcactgctctgttttcttcctccacataccagcaggaattatggattcagtgatggttctcaggctacaggggatggtggagaaacaaatagaaaaagtctggatccctaaatgactgtatggagaagggtcacctcctcccagcacaacccacattaaaatgtaaaaataggaaata

SEQ ID NO: 32529 - DNA, 648 bp, Homo sapiens
ttaccaaaaaatattgccttcattattttggcctagtgggatggaaacatcaagattcagggggtcttcattctcgttctgattctgctgtgctagctgtgagacaktgagcaactgagcttcagttttctactctgtaaaatggggattataataactgccctggtgatctcataaggcttgtggagggtcagatggcataaaagcttaggtgacaaaagatgaaaggcattactattcccagcatcacccactagtgcattcccattatctactaccccttcttcaccagtgttacttagtccacctacatgttccatctttggcttcaaattttaaaacagagtccatgagaatgtctgttaaatgaacactggaaaagagaaagaagacccattttgggtgattcatgacatcaccatttgaccctgaaagctgtgagggcagggatcatggttgttcaatttgctttgttttgtttatcaagagcatggtagaccctccatgattgttttttgaatgaataaacataactcctgacttccagtattagatcatagagtcgagtagccattctgtgctccatgagggtggaagcagcagtcaccatcagatgctggagagtacagcatttcaactgctctgctt

SEQ ID NO: 32530 - DNA, 633 bp, Homo sapiens
gaaggcaaattatcttaagagtcctttcttaggctgattcttggaatcacctaaacaatccasaaatactaggacttcctggaataaaattaggaatccagatggtctaatactaatgcttagacccactccttcaccaaggcactagataccccaaatgaaacacctggacctccccaggaaccaaggtcctctggatcctctggcctgacagtcacaggaggatggtctgagataagtctgtctggtcctaaagtaatgcatacttgacaagaagttggttatcttgacatagcattactccttgtgaaaaatgcccttgagagctttgtttattctcttcacctcctcatcagtagtactgtgctaacatttctgttattcatcatgttttaaaattagcttcttaatcctcttaatattttcaacttctctgccttgagataggcacccagcctgaacttggttttctgcagcctttgtacagcatataaataacaagaatggattgttcccatagccttggcttcttcactaaattaactacatttactcattactcttatttttgttcttggtggaatagacctaaattttctcaactaaatttggctttgaaattctatggtatgt

SEQ ID NO: 32531 - DNA, 633 bp, Homo sapiens
gaaggcaaattatcttaagagtcctttcttaggctgattcttggaatcacctaaacaatccacaaatactaggacttcctggaataaaattaggaatccagatggtctaatactaatgcttagacccactccttcaccaaggcwctagataccccaaatgaaacacctggacctccccaggaaccaaggtcctctggatcctctggcctgacagtcacaggaggatggtctgagataagtctgtctggtcctaaagtaatgcatacttgacaagaagttggttatcttgacatagcattactccttgtgaaaaatgcccttgagagctttgtttattctcttcacctcctcatcagtagtactgtgctaacatttctgttattcatcatgttttaaaattagcttcttaatcctcttaatattttcaacttctctgccttgagataggcacccagcctgaacttggttttctgcagcctttgtacagcatataaataacaagaatggattgttcccatagccttggcttcttcactaaattaactacatttactcattactcttatttttgttcttggtggaatagacctaaattttctcaactaaatttggctttgaaattctatggtatgt

SEQ ID NO: 32532 - DNA, 633 bp, Homo sapiens
gaaggcaaattatcttaagagtcctttcttaggctgattcttggaatcacctaaacaatccacaaatactaggacttcctggaataaaattaggaatccagatggtctaatactaatgcttagacccactccttcaccaaggcactagataccccaaatgaaacacctggacctccccaggaaccaaggtcctctggatcctctggcctgacagtcacaggaggatggtctgagataagtctgtctggtcctaaagtaatgcatacttgacaagaagttggttatcttgacatagcattactccttgtgaaaaatgcccttgagagctttgtttattctcttcacctcctcatcagtagtrctgtgctaacatttctgttattcatcatgttttaaaattagcttcttaatcctcttaatattttcaacttctctgccttgagataggcacccagcctgaacttggttttctgcagcctttgtacagcatataaataacaagaatggattgttcccatagccttggcttcttcactaaattaactacatttactcattactcttatttttgttcttggtggaatagacctaaattttctcaactaaatttggctttgaaattctatggtatgt

SEQ ID NO: 32533 - DNA, 1284 bp, Homo sapiens
cattttaagttggacattataacccacttgctggtctgttatttccaaaaagtgactcttttttatataattcattaattcagccaaacattattttgagggctttctatattttcctgtagatacatggatgaagacaacccagcctctgctttcaagaaataccaatctggattgagatacagactagtaaagtagtaatcacaatagtagctgcattggaggacaattttatgagaaaaggctgtgcaggtgctcagggagctctgagaaagaacaccacattcatcccagcctgggtgaggttgggaagccctcccggaaaatggcctcctagctgaaggaagctcttctcctttggatggccaacctcagatttagaaataaggacaacacatgtcaatcttggtagacaatggttgcctcaaaggtttcttacaatgactaacagtttgatattaattaaaaaagacaaaccaggctgggcacagtgtctgacatctgtaatcccagcactttgtgaaaccaaaatgggaggactatttgaggctaggagttggagaccagtttgggcaacatagcaagatctcatctctacaaaaaataaaaaagaaattagccagrtatggtggtgcatgcctgtagtcccagccactcacgaggctgaggtggaaggatcactttgaacccaggagttggaggttgcagtgagttatgattgtgctactgcactccagcttgggcaacagagcaagaccctctctgaaaaagtggaaaaaaaaaacaacaacagaggaaacaaagacaaaccagttaacttgagctgtgggacctttatacttctttattgggaagttctcttaatcttcagaatttccttctgtttatttgggcaatactgaagcataattgccttgctctgaaattatcacgatgtgtttttactgcatagttcatgcagtaaaaattgcaatactgtatattacagtattgcaaaactgcatattacatattcttttatgtagtggttaatactgattttgatcacgtcttccgctcctgtttcattcccctgcctccccttactctgcagaaggaggcagttcaatgttgttttgttgttgttttacaaggataaactgagttccagaatgatcacttggcttctccaaattatggggtgagttagtaatgaaactagaaagagaaattagaatttctttgttcaaagctctgacttctaaagtatttctccatgtaagtaaagtaggttgtttgccaaaa

SEQ ID NO: 32534 - DNA, 1284 bp, Homo sapiens
cattttaagttggacattataacccacttgctggtctgttatttccaaaaagtgactcttttttatataattcattaattcagccaaacattattttgagggctttctatattttcctgtagatacatggatgaagacaacccagcctctgctttcaagaaataccaatctggattgagatacagactagtaaagtagtaatcacaatagtagctgcattggaggacaattttatgagaaaaggctgtgcaggtgctcagggagctctgagaaagaacaccacattcatcccagcctgggtgaggttgggaagccctcccggaaaatggcctcctagctgaaggaagctcttctcctttggatggccaacctcagatttagaaataaggacaacacatgtcaatcttggtagacaatggttgcctcaaaggtttcttacaatgactaacagtttgatattaattaaaaaagacaaaccaggctgggcacagtgtctgacatctgtaatcccagcactttgtgaaaccaaaatgggaggactatttgaggctaggagttggagaccagtttgggcaacatagcaagatctcatctctacaaaaaataaaaaagaaattagccagayatggtggtgcatgcctgtagtcccagccactcacgaggctgaggtggaaggatcactttgaacccaggagttggaggttgcagtgagttatgattgtgctactgcactccagcttgggcaacagagcaagaccctctctgaaaaagtggaaaaaaaaaacaacaacagaggaaacaaagacaaaccagttaacttgagctgtgggacctttatacttctttattgggaagttctcttaatcttcagaatttccttctgtttatttgggcaatactgaagcataattgccttgctctgaaattatcacgatgtgtttttactgcatagttcatgcagtaaaaattgcaatactgtatattacagtattgcaaaactgcatattacatattcttttatgtagtggttaatactgattttgatcacgtcttccgctcctgtttcattcccctgcctccccttactctgcagaaggaggcagttcaatgttgttttgttgttgttttacaaggataaactgagttccagaatgatcacttggcttctccaaattatggggtgagttagtaatgaaactagaaagagaaattagaatttctttgttcaaagctctgacttctaaagtatttctccatgtaagtaaagtaggttgtttgccaaaa

SEQ ID NO: 32535 - DNA, 590 bp, Homo sapiens
tgatttgcttttgctgcaagcttattctgagattgtagaatcattttctgcaggtttgatttttgcgtcctcactgtgctaggatttttggtcttaggttcaggggagtacagtgacatcaagtggtggaaggggacatggccaggctttctagtctgtgtgccttggtgtctttggcatgaaagcacagggattgggctagatcacaaaattccttccagcttctaatgttccatgaatatgaaataagacatcaagtctaacaagcagagggggcaaagaaagaagatagtcacatttttaaggcactccaagtaaaacatttagatcacagaccacacattttctgcaggtattttgaggcgctgatcacattcatccccaaaagttgatataaaattttgctctttttttttttttacgacacagggtcttgctctgccacccaggctggagtgcagtggtgcaagcatagctcactatatccttgagctcctgggctcaagccaacctcctgccttgcctcagcctcctgagtagctggggcaacargcacacagaaccacatcctgctaattaaaaaaaaaaaa

SEQ ID NO: 32536 - DNA, 201 bp, Homo sapiens
ggtctcaaactcctggactcgagtgatcatgatccttccaccttggcctcccaaagtgttgggattatgggcaygagccaccgcatttggcttgaagagtactctcatttatacttctgataagctttctgatggaaaagaaaggcatttttaggcacgaagcacgaaatggacagcaccttgggtatactttcagggaca

SEQ ID NO: 32537 - DNA, 1170 bp, Homo sapiens
cactcccattcaccccagattccacactgagagtttggggcagggtccactggcaccagtttgggtcttaccaattctacagattcctccaggctctgccatcacagaaggtccagccccagtgctgctttggccagaaagaatgcttggcactgcatttgctgacaaggagtgtggcctgtgtttatcccrgaggtgggtgaggcagcctctgctggttccagaggtcccctctgccacctgaggcgccagccatgcagtgctggtcctaggtggggttacagaggtattgacaccagcctggtctctgggttaatttttgttaagggcctgcgacccagtgtggaggggttgatattgcgcagccttgaaggacgtggacatgagcttatcagaacaagtgatagcaagataaaagatcaaagtaggctctttgcctcagattctgcatggcagcaatttccaccagcagggtccaaagacccaaaatgaacaaggaaagcaacctcctgaagggacacttggtaatcaccttgatctttggttttcaaagtctgcagtccacttggaaagcaaggtacaggggcagagagagttgacaaatatgtactgcttgatgaatatggaagaaacaaagaaaacagaagtttgaaaaccaccgacctagaatttttaaatgacgacacccagtgctagcgatctctggagaacagttttgcaagatgcatccaaaaacatacacatgtacactctctttgaccccaccgttcctcttacatttatcttaagataatcattatagatatgtgaacatatttacttctgggataatcatgacagcattgtttatagcaggaaataaagtggaaacaacatatattctgtctgcagagaaacagaagcaatctattctctctctctgtgtgtatatatacgtgtgtgtgtgtgtgtgtgtgtgtgtgtgtaaaatacaacaacaaaactgttcaccaatgatcaggtgctgtcctgttacatggtgaacgcattttatctttcccacagtcctagaagttagatacaactatcatcatctccatttatcatatggagaagttgagacacagaatcactggcccaaagtcacatggatgataagaggcagaaccaggatttgaacctttgcaggct

SEQ ID NO: 32538 - DNA, 673 bp, Homo sapiens
tgccatgttatgtctgcttcttaattctgtccctgctccttggtccaaatgcttaggttcccctgtggttgcgtacttggttcacctgggcrtgctcagtttatgtgacctgagggtccatggcaacctaaaaacaacttacaactttgttacataaaagttgaaccagattgtactgctacataatcacactgtaactcctggagcaggatctggttcaacctgcatttattaaacacatgatgggtggtggatctaatgctgcaggagttagggatgaaggcggggttccaagtgttaagaatttcctggccgggcgcagtggctcacgcctgtaattccagcactttgggaggtggaggcaggcagatcatgaggtcaggagatcaagaccatcctggctaacacggtgaaaccctgtctctactaaaaatacaaaaaattcgccgggtgtggtggcacggcacgcgcctgtagtcccagctactcaggaggctgaggcaggagaattacttgaacccaggaggtggaggttgcagtgagctgagattgtgccactgcactccagcctgggcaacagagcaagactccgtctcaaaagaaaaaaagaatttccggctgggcgtggtggctcatgcctgtaatcccagcactttgggaggccgaggtgggc

SEQ ID NO: 32539 - DNA, 628 bp, Homo sapiens
ccatgttggccaggctggtctcaaattcctgacctcaggttatccacctgccttggcctcccaaagtgctgggattacaggcgtgagccaccgggsccggcctgaaggctaattcttctaaaggcctggctccacaccttcgcctatgccattctcagtccgaagggccctttctaaagagagaggttgcaggaactcacgctcggtggtgcaggctgtgtggccagaactccctggatcaaatccctctggcatctgttatgcccctgagtccctgcaaaaaagtaactttctgttttgcacttcagtttccccatctgtgcaatgaggtcatagtggaacctacctcatagggtgactgtgaggagtaagtgagttaatcagtgctaaatgcctacaacaatgcctgacaaagagcaagtaaatgttagccctggccaggtgctatggctcacacctgtaatcccagcagtttgggaggccgaggtgagaggattgcttgagctcagaagttcgagaccagcctgggcaacatgatgagacgcccatctcaacaaagaatttaaaaattagccaagcctggtgatgtgcgcccatagtcccagctactcaggaggctgagatggaa

SEQ ID NO: 32540 - DNA, 1467 bp, Homo sapiens
taaaaactaagcagtcctcttgccttggcctcccaaagctctgggattacaggtgtgagccagtgtgctcgaccataccagtaatttaatagtatcaatttgattcagactataagcaagtttaatatacaggtagagaattagagagtacagtgaaggcatagctggccttataatatttaattgttctatcactgacaaactggtactacagcttctctgccttttcaaaaactctagtgggaaacagtatagcatgaacgttagtttttttctactaggagactttaagactgtgtttctgtagttcactgctgtattaatttcctgtgtctgctgtaataaattaccacagcctgacttaaaacaatggtagtgtattctggagaggcctaattaaagagtgagaggctctagggaagaaatccacatctttcagcttctggtggatccaggattcccttgaattatggccatatcgctccaaacttattttttcttcatatcacattctcctctgtatgcctaatttatctcatcccctctaagaatacttgtgaccgtattttcaggaccatcaggataatctcatctcagaatcctcaatcacacttgcaaaacctataatatacatataaggtaacacagtttcagagattaggacttgacatattttggggacaccattcagcccactgcacctgctctcaccatactcaaaagtgtctctcttcgacagctttctgctacttgaagcagctgcttaacttaccctgaggaagcactgcacattctctttggttcaagagagcaatcatagggaatcttctaactttcgggatagcattattcttagaagccagcataacagtttgaaaccaaaggatgctgttagttaatgtgtagtgtagtatttttctgttctgagtctcttccctccaggtagatatgcttggcggggtgacttagtcataaattcacattttactgctgcttcttcctatatctggaaacctccaaattgtggtcctgaagttatttttattttggccatttttctctcytgccaggaaaggaatgctgttgcaagtacatggagtcaaagactagtcggtaatgggtggtgtacgggcgaaaggttgggtttttttgtttccttttcgtgagtctttctacccaagatgttcattcattgatcatttctcacacatgaaatgtatttctactttccataagaaacattattcccataattattataaattataccctaagtgaaatattctctgaaattatgcacaaagttatgaaaattttcaaaaatgggaaagttatgtattcaccactcagatttaacaaatattaatattttgaaatatttagttcacttttttaaagtaaataaatattaaaaggtacagctaaaattccattcccctttcttactcctcagaggtaatcaggatc

SEQ ID NO: 32541 - DNA, 741 bp, Homo sapiens
cccccacatctactccttgacactcaaaacaaccttcccctccccaccatggataactgatacttgacttttgtggtaataattttcttgcttttctctacacttttcccacctaaatatgagctgctatacactatagctaggctttccagattttcagtgagattattcttaatctcaattatgtaaagaataatttcatttatgtaaagattaaacacctggaaagctaagctacagtgtttagcagttcatacttagatgggaaaagtatagagaaaaacaaaattattacaattttattacaatgttgcttacatggataagttctctatttgtaatttctgagctcatagtgcacccgtcacccaagyggtgaacattttacgtgatatttagtcttttatccctcaccctctcccaaccttcccccgcaagtccccaaagtccattgcattcttatgcctttgcattctcataacttacctcccacttatatgtgacaacataagacatttggtttcccattcctgagttacttcacttagaataattgttgttcatttttattgcttgacagtatttcattgcatgtctattcctcaatttatttctttttataattaacataattctatatgtttatagcataaaatatgatattttgatatatgtatacattgcggaatgtctaaacaccttactaatacttttttaatcttgctagttattacggtaaag

SEQ ID NO: 32542 - DNA, 547 bp, Homo sapiens
aaaaatacaatcattgctaggttacttgtcttaaaatttccttttgggggctaggttaattgagagaacacttttagcaggctaacagttacatttccacgaatatagaatatgaaagcttttacccatgaacctttttttgttgtttaatrtttccatttcttctgatcctataaacatcttagtttccccgtgtttttgtttgtttgtttgagacaaagtctcactctgttgcccaggctggagtgcagtggcacaatctcggctcattgcaacctctgtctcccgggttcaagcgattctcatgccccagcctcctgagtagctaggattacaggtgcctgccaccacgctagctaatttttgtatttttaatagagacggggtttcaccatgttggccaggctggtctcaaactcacctcaggtgatctacccgcctcagcctctcaaagtgctgggattacagatgtgagccactgcacccagcgagtttccccatgtttatgagtaattctttgaaatggaaagatgcatgaccagtgtca

SEQ ID NO: 32543 - DNA, 547 bp, Homo sapiens
aaaaatacaatcattgctaggttacttgtcttaaaatttccttttgggggctaggttaattgagagaacacttttagcaggctaacagttacatttccacgaatatagaatatgaaagcttttacccatgaacctttttttgttgtttaatgtttccatttcttctgatcctataaacatcttagtttccccgtgtttttgtttgtttgtttgagacaaagtctcactctgttgcccaggctggagtgcagtggcacaatctcggctcattgcaacctytgtctcccgggttcaagcgattctcatgccccagcctcctgagtagctaggattacaggtgcctgccaccacgctagctaatttttgtatttttaatagagacggggtttcaccatgttggccaggctggtctcaaactcacctcaggtgatctacccgcctcagcctctcaaagtgctgggattacagatgtgagccactgcacccagcgagtttccccatgtttatgagtaattctttgaaatggaaagatgcatgaccagtgtca

SEQ ID NO: 32544 - DNA, 973 bp, Homo sapiens
aatgggtccagtagcttttctgccttcatagtcctgttactcagagtcctcaactctccaaaatccattgttttcttggttcttgtctttctgtgactcttatcacctttccatattcaaatccaattctcttccaacactgttcattattggaatcttaaattgtggcccatatttgtttattgaaccagtcagtctcaatctcaatttttgtatgtcagttatataaggaattttatgccactttggttctagcctgtggggaatttcaatgatttacattataaataaaaatattaatggtacacaaagtgaattattaaataaaggttcaccagctatgtgctaaagtgacagttctgaaatcccactgttttgatgaggaaattactgtgaaacctatttaaaaatgattttggtatgtcttacttggattttaaaaatgtatattgtaaaaaattattataataagatgtttaagaaatatttctagaaacagaagaaaaactggtaaatcaaggctttatcaaagaactgtaagcggtccccttttggggattggttttgtggaagacagtttttctgcaggttgtaggggatggttttgggatgaaatggctccacctcagatcatcaagctcaaatcatcaagcattatattctcatgaggtgcacataacctagatactttgcataggcagttcacaatagggttcatgctcctgtaagaatctaatgccactgctgacctgacaggaggtagagctcaggtggcaatgcttgcctgcttcctagcaggctgtggactgcaccactacctgggaagctttgttgagaagaaatttcaaaccygtagttgaaagtgagaagttattgaaatagttttagttgaatgtttctaattttaagttacatatgaatatgtatatgcatgtgtatatatgcatttttttaatttagagaaatctcaacc

SEQ ID NO: 32545 - DNA, 1631 bp, Homo sapiens
gattgaatagatgcctgtcatctactaactggaaatttcacaagtgtagatgcctttttcatttggttttcctttgtgcctccagtgcctaatacagaacctgatgcagaaaagggatgataaataattgtgaagttaacaaattaataattctactccaaagtaattttctcctgctatagtgtgaattatttggcaccttttctaactaaagatagagaaggggaaaaaaaacaccaacttaatctctgatgttgtacccttcaagagaaatatcttctgaaaaatagatagtgattaaagactcagatttattaaacttacaagtaagtattttcrgaactaacagaatttaagtttacttttcaaatcaaagaaatccatcagcatttatttgagtatattaaatagtgttttgcaaaacatcagttctcaggattttgctagaaaaaatgtgaaaaaaattatccaaaatcaaataagtttaaaacaaatatggcaaacaggcttctttactgaaatacttttcatagtagttgagggaataatatactctggaatatagtatgctggtatcaaaaacttatttgaccagggaactttatttttatagtaactttcgtaatacttatgttccatgttgaaaatgtcagattagaaaacattttaaaatttcaaagctaaactccagaaaatagtgtgaagcaattcattatgatgatactatggcaatttgtacatcttaaagccttcacatattaagctttattttctatcagattatgagccagaaagtaactacattttattcatccttgttgcaaacatttcagcacttactcattcttggaatatagcaagagctcaataaatatttgtttaataaagcaggcaatgagagttttatcaaactaaagtgtttgctgcattgcatgtaataattatactgaattagaaatgcttttggatggtctgaaaatacaaataatgcatactaatggaaatgtgtgctgttgaaagttatttttaaaattttcagattaggaagaaaaatgcatacatacatttttctacagaagaggaaaacatagatagaataaacttattataccaaaatgtgctggcaagaattaattttaaaaatctgtgtaacaaaaaacaataactaagtttcaataaatagaatatgacctctctgaagattctacatggtcttgattttcgtattattagtatctttcctatggaatgatttaacaggtgtgggtccctaattgttgcctcatactacagagtttaccatgatggaataactccatttggttatctgcaaaatttcacagattagactgttctattgcttagattagttctgagagccattcacagctagataaggaaatacaccaaataatactgcaatggataatggtaaagtctgcaatatcctaatgatggaagttcaaagtggagtcaataaatgattacaacaagagcatactatttttatagggtttgtcaacatttctcaaatatttgggaaagcatctaaatatccctaatttgactttaaacataatcagcagactcctaaacatcgtaattggaagattagtagaaaggccattcat

SEQ ID NO: 32546 - DNA, 1160 bp, Homo sapiens
atcccagctactcaggacctgaggcaggagaattgcctcaacgcagggggcagaggttgcagtgagctgagattgtgccactgcactccagcctgggcaacagagtgaggcttcgtctcaaaaaaaaaaaaaaaaaaaaaaaaaagaagaagaagaagaaggagtggaaacatgaaactctacaggtgacttaaggtgtggcaaatatactcttgggatagaagaacatggagattgggaggtagtccaatcggtcttgtatttaatggaagaaatcagaaattctataattgaaagaakacatagaactaaccaactcccaggttcaaattgatattaagactgctaaaatttacagcactgatagatactatgctttgattacagagctaagatgtttctgaaatgcagattggacaggacaggatgtgtggagaacaaaatgaaaggaaatggtttaattgaatctgaaaaatacttttcaatttataataattaacagataactaaagaacactcacgtaggagtttagttgacaaaaatttacctaaattttaactaaaaacatattgcaaatagaaatacaattttatttcccctctgtaattactataccttatgtttttagatcataaaacatatgatctgaattttgtaccagaattttgtgtcagttgtaggaaaattgaaaatcacctcatagcaatttctcctcttaccaatgccatcgatggagtgcttccgtgactcatcatttcacattctcacttttcatttatgttaaaagaaaattaaccttcattttctagaagagtcttggtggccagaatcatgagctaaacatggaatttattttctaccatcaggaagcgagtttgctgttcctgttattatctggaccttggataactgctctgtaactttgctggtggcggtggaactgcccctagggctgctgtagggtcagcccgctgatggcctgtctttttctcccaggtgttattgatgaagaataatcctcaattcagtgtgattaaagagccagagctgagattgctgcattttcccacttcatttctggaacccccatacactgtgttagaaagaaaaaaaaatctcacaatgatcattttaaaaagggggaaatgttttgaatgca

SEQ ID NO: 32547 - DNA, 974 bp, Homo sapiens
tcattagaatctaagatccatgaagataaaagcaatgtgtgttttattttctactctattccaagcacctagaaaagtactcagctcaataaatatttttgaatgaataaatttatcaagcaatcaataacaagaaaaactttaaaagggaatgtggctgtaagttatcatatgatgaactcccatggattgaattgtgtcccccaaatgtgttcaggagtcttgtcaaaaaaacttatttacaaatatagtcatattcacaggtaccaggggttaggacttgaacacattttgtcaagaccctatttataaatcatggygaggttatattggattagagtgggctttaatccaatgacttgtatccttataagaagacatagacacacacacacacacacacagaatgccatgtgaaaacggagatagagaatggagcaatgtggctgcaagccaaggaatgtcaagaattgtctataaccattagaaggtagaagaagcatggaaggatccaccacaagaagtttaagagtgatcatgaccttggcaacaacttgattttagacttctgtcatccgtaactgtgagacaataattttttgttgttttagaccacccagttgatggcaatttgttatggcagacttaggaaactaacatataaatcttattctctttttcatcaacttctgggatattggaagtttaatagaatatttaaatggaagatttaaaacaaatatactgaatatgttttgtacaggacaatatttactatgcttaactaacagttgtggtcttgggtttggattgcccattaaactcatgagacaaaatgaacttcactcagcccctaagaataggcttcacatatcctccaagaaaggacacgggatggccaatcttgaatgtgcaagaatagcagaacagaggcttatgacccccagctacagccaccaaatgttgaatctttc

SEQ ID NO: 32548 - DNA, 974 bp, Homo sapiens
tcattagaatctaagatccatgaagataaaagcaatgtgtgttttattttctactctattccaagcacctagaaaagtactcagctcaataaatatttttgaatgaataaatttatcaagcaatcaataacaagaaaaactttaaaagggaatgtggctgtaagttatcatatgatgaactcccatggattgaattgtgtcccccaaatgtgttcaggagtcttgtcaaaaaaacttatttacaaatatagtcatattcacaggtaccaggggttaggacttgaacacattttgtcaagaccctatttataaatcatggtgaggttatattggattagagtgggctttaatccaatgacttgtatccttataagaagacatagacacacacacacacacacasagaatgccatgtgaaaacggagatagagaatggagcaatgtggctgcaagccaaggaatgtcaagaattgtctataaccattagaaggtagaagaagcatggaaggatccaccacaagaagtttaagagtgatcatgaccttggcaacaacttgattttagacttctgtcatccgtaactgtgagacaataattttttgttgttttagaccacccagttgatggcaatttgttatggcagacttaggaaactaacatataaatcttattctctttttcatcaacttctgggatattggaagtttaatagaatatttaaatggaagatttaaaacaaatatactgaatatgttttgtacaggacaatatttactatgcttaactaacagttgtggtcttgggtttggattgcccattaaactcatgagacaaaatgaacttcactcagcccctaagaataggcttcacatatcctccaagaaaggacacgggatggccaatcttgaatgtgcaagaatagcagaacagaggcttatgacccccagctacagccaccaaatgttgaatctttc

SEQ ID NO: 32549 - DNA, 974 bp, Homo sapiens
tcattagaatctaagatccatgaagataaaagcaatgtgtgttttattttctactctattccaagcacctagaaaagtactcagctcaataaatatttttgaatgaataaatttatcaagcaatcaataacaagaaaaactttaaaagggaatgtggctgtaagttatcatatgatgaactcccatggattgaattgtgtcccccaaatgtgttcaggagtcttgtcaaaaaaacttatttacaaatatagtcatattcacaggtaccaggggttaggacttgaacacattttgtcaagaccctatttataaatcatggtgaggttatattggattagagtgggctttaatccaatgacttgtatccttataagaagacatagacacacacacacacacacacagaatgccatgtgaaaacggagatagagaatggagcaatgtggctrcaagccaaggaatgtcaagaattgtctataaccattagaaggtagaagaagcatggaaggatccaccacaagaagtttaagagtgatcatgaccttggcaacaacttgattttagacttctgtcatccgtaactgtgagacaataattttttgttgttttagaccacccagttgatggcaatttgttatggcagacttaggaaactaacatataaatcttattctctttttcatcaacttctgggatattggaagtttaatagaatatttaaatggaagatttaaaacaaatatactgaatatgttttgtacaggacaatatttactatgcttaactaacagttgtggtcttgggtttggattgcccattaaactcatgagacaaaatgaacttcactcagcccctaagaataggcttcacatatcctccaagaaaggacacgggatggccaatcttgaatgtgcaagaatagcagaacagaggcttatgacccccagctacagccaccaaatgttgaatctttc

SEQ ID NO: 32550 - DNA, 974 bp, Homo sapiens
tcattagaatctaagatccatgaagataaaagcaatgtgtgttttattttctactctattccaagcacctagaaaagtactcagctcaataaatatttttgaatgaataaatttatcaagcaatcaataacaagaaaaactttaaaagggaatgtggctgtaagttatcatatgatgaactcccatggattgaattgtgtcccccaaatgtgttcaggagtcttgtcaaaaaaacttatttacaaatatagtcatattcacaggtaccaggggttaggacttgaacacattttgtcaagaccctatttataaatcatggtgaggttatattggattagagtgggctttaatccaatgacttgtatccttataagaagacatagacacacacacacacacacacagaatgccatgtgaaaacggagatagagaatggagcaatgtggctgcaagccaaggaatgtcaagaattgtctataaccattagaaggtagaagaagcatggaaggatccaccacaagaagtttaagagkgatcatgaccttggcaacaacttgattttagacttctgtcatccgtaactgtgagacaataattttttgttgttttagaccacccagttgatggcaatttgttatggcagacttaggaaactaacatataaatcttattctctttttcatcaacttctgggatattggaagtttaatagaatatttaaatggaagatttaaaacaaatatactgaatatgttttgtacaggacaatatttactatgcttaactaacagttgtggtcttgggtttggattgcccattaaactcatgagacaaaatgaacttcactcagcccctaagaataggcttcacatatcctccaagaaaggacacgggatggccaatcttgaatgtgcaagaatagcagaacagaggcttatgacccccagctacagccaccaaatgttgaatctttc

SEQ ID NO: 32551 - DNA, 974 bp, Homo sapiens
tcattagaatctaagatccatgaagataaaagcaatgtgtgttttattttctactctattccaagcacctagaaaagtactcagctcaataaatatttttgaatgaataaatttatcaagcaatcaataacaagaaaaactttaaaagggaatgtggctgtaagttatcatatgatgaactcccatggattgaattgtgtcccccaaatgtgttcaggagtcttgtcaaaaaaacttatttacaaatatagtcatattcacaggtaccaggggttaggacttgaacacattttgtcaagaccctatttataaatcatggtgaggttatattggattagagtgggctttaatccaatgacttgtatccttataagaagacatagacacacacacacacacacacagaatgccatgtgaaaacggagatagagaatggagcaatgtggctgcaagccaaggaatgtcaagaattgtctataaccattagaaggtagaagaagcatggaaggatccaccacaagaagtttaagagtgatcatgaccttggcaacaacttgattttagacttctgtcatccgtaactgtgagacaataattttttgttgttttagaccacccagttgatggcaatttgttatggcagacttaggaaactaacatataaatcttattctctttttcatcaacttctgggatattggaagtttaatagaatmtttaaatggaagatttaaaacaaatatactgaatatgttttgtacaggacaatatttactatgcttaactaacagttgtggtcttgggtttggattgcccattaaactcatgagacaaaatgaacttcactcagcccctaagaataggcttcacatatcctccaagaaaggacacgggatggccaatcttgaatgtgcaagaatagcagaacagaggcttatgacccccagctacagccaccaaatgttgaatctttc

SEQ ID NO: 32552 - DNA, 2811 bp, Homo sapiens
  misc_feature (1)...(2811): n = A,T,C or G
ttacattaaagcatctttaagtaacttgtccaggttttcttctttaaatacagtactcattttataagtagattattgtagttaaatgagatcataaatgcctagttgttggtaagtaataaatactcaaagaatagtagttattcttaatagtatgatcataggtcaaaagaaattcttaatgactcacttagacaataactagcttcgaaataaaaacattttagttaacaggcttctaaattcaactccaaagatcagtccaaatggatagtactccaataaagttttaatacatatagttgaaaatttgtatccctttctttcttccatggaatatctacaagactttttcactaatttctacagtaagcagtgttctaagttggccctcaataacctcacctccttgagttcccaaccatgtgcagctacccttccccttgagaacaggctgcaactagtggcttgcttctaaccannnnnnnnnnnnnnnnnnnnnnnnnnnnnnnnnnnnnnnnnnnnnnnnnnnnnnnnnnnnnnnnnnnnnnnnnnnnnnnnnnnnnnnnnnnnnnnnnnnngggaggatggctagtgctgcgatctgagagatgtggcggggaggagcggatgggtatgtgtcgtccgctaggggacggtgaaacgcgcggggggccctaggcctaggagaggcgacgtgcccgtgccgcgtgcgctgttctactcgagagagacattctctggcgagagtcgtctgcttgtatactctctccgagcaggacttgctgattctacgaagacaagtgctgcacctacaacatctcgggtgggcttatctactatgatggccatcggtccgtacatagcgaggtgagtgtgtctctgccagtcataaatactgtgcgtgtgagtgcgggcgcggagacagagagagagagagaaaattatattaccgaattaagaaacatggagggaagagctctcaaacatattacgcaggatagactatttcaaacatttataaaggttccaattcttgctcttcatgtcctaaatgaactttctattacattcactggttttgtttttgtatctgctcatttcaagtcagaggtgagttggcagtggcaataaataattatacatacatttccactgccaaacattccacctagctatccaaggttatattcacctctctttaagttggaagatagtcaacaagccaactaatataaacagcttcctaagcagggtgatatatgcattgagaaagaccacagaagtcagatgggtgctggtcagacctcaaccttcccagttcatctgctataactattaaattttttaactgagccataggctgtgtctgagtatttacttgttttagattattttattcaaccccaaatagaagtttaaatatggtctcatgatccatgtaacaatatttatataaaaactggggagttaaataaaaccactgagtatattttgactgcacaattttaataaaatctcatgtttcaaaatagagagtttttttttgttgtttgatgaacaccagacattagcgcactgttcatatgcccttctttgaaaactagctcattggagaggagattgaccatttacgatctctccttttctttctccaggtctgtctcctgtcaattgactgtcttaaatatgaactcaaactacagagtaccgacaataatggataggtctgcaattcttcactttctgacatcttattgagagaaaaaatagaatcaggatcatattttttttattttttctttttatataatagtgttccagattcattcaacttctggactctaacatcgcattagtaaaggtattttctgtaaatattcacagcattccctccattgcctacttattctgagaatgaattggggtatgtggtttggtctctttagttcaataagtggtcatcatgtcaatatcaatcatatttaaaaataaccgaaatattagggtatatttagcctagggttagtgtattcatgtaggataatctcaatcatattttagtcatatttcttaatagttactctcacttatatattatataaataaaataacattatttctgaacttgtttggtgtcatttggtgaaaggatagcactaagaaatttatgttatacttggtaaagtattaatttctttagaaagcatttgtcttaattatcctatactacctcctttgtctcttgactatgaaatcatctcactttcttggagttcaagtttaatttgctttttagttttaacaaaaatattttaatacactatattaatgaaattgccttataactgttttattcatgaaataatttctaaaggttttatatcagaatgttgtaaatttttttcaatgtctattgagtaaataaggcttgctcaagatatcaatggtataacctgtaatagtctgcttaggctgctgtaataaaatgtcatagcctgagtggcttaaacaacagaaatgtatttcttgccattctagatggtggaagtccaagatcaggtgctagtatgactaggtctggtgagggctatttttctgacttgcagatgtttgccttctggctatgcactcacatgggtctttcctaggtgcatgatcaagccaagagaaatcactatctttctttgtctcttcttgtaaggccaccaattccatcagatgagaactccgccctgtgatctcatttaaccttaattacctcctaaagcctccaaatgcagtyacaatatgggttagggcttcactgtg

SEQ ID NO: 32553 - DNA, 909 bp, Homo sapiens
tgaggacaaaattgtctgttttattcactgctgtgctcatatttaggtaactggcacataaagatcctcaaaaatatttcgtttcatgaattagcattggataaaatcataaccctatttcttatttccctcactcatgctaaagaaataaatatgctttgagtggcatggccttttgttcatgatatagatttagtcaaaagttgttgaataaatgaagaaataaaccatggataattttaacgccaatttggaagtattacactgactgacaaaacttacagaygaaagtattttcctgtttattttccaccaaatgtgactattttgcattatttcaatgatacaaaaatatattgccttacccacaaattatttttattttctgtatctcaagttttatgtctgtttcaggtatctacaatattgtagctgatatttattttccttttgcatttttctattataactgaaagtcctgtgcagatgaaatatatcaggcagttaaactaaaaacaaatgggaaggaattacaaagataaatcaataaagaagaaatatattttggagaaatactatgacattttcagagaagataaatagatacggtctgctgtaaatatttacatagtcttttaaaagcaggtaatctgccacgaaaatgttttgagtttcttttttacagagtttttcataaaagagagtttataataatttaaaattacagttcaggatgaaatgcctcaattgaagaaggcatcgatgggaagtttaattacttgtccaggataatatagctggggataaaacatacttctgctttcccagtttaagagtatagctacctagcttcctttggggttttataaagacttgtttcccaggaagaataaaaagatgaaggctgcc

SEQ ID NO: 32554 - DNA, 909 bp, Homo sapiens
tgaggacaaaattgtctgttttattcactgctgtgctcatatttaggtaactggcacataaagatcctcaaaaatatttcgtttcatgaattagcattggataaaatcataaccctatttcttatttccctcactcatgctaaagaaataaatatgctttgagtggcatggccttttgttcatgatatagatttagtcaaaagttgttgaataaatgaagaaataaaccatggataattttaacgccaatttggaagtattacactgactgacaaaacttacagatgaaagtattttcctgtttattttccaccaaatgtgactattttgcattatttcaatgatacaaaaatatattgccttacccacaaattatttttattttctgtatctcaagttttatgtctrtttcaggtatctacaatattgtagctgatatttattttccttttgcatttttctattataactgaaagtcctgtgcagatgaaatatatcaggcagttaaactaaaaacaaatgggaaggaattacaaagataaatcaataaagaagaaatatattttggagaaatactatgacattttcagagaagataaatagatacggtctgctgtaaatatttacatagtcttttaaaagcaggtaatctgccacgaaaatgttttgagtttcttttttacagagtttttcataaaagagagtttataataatttaaaattacagttcaggatgaaatgcctcaattgaagaaggcatcgatgggaagtttaattacttgtccaggataatatagctggggataaaacatacttctgctttcccagtttaagagtatagctacctagcttcctttggggttttataaagacttgtttcccaggaagaataaaaagatgaaggctgcc

SEQ ID NO: 32555 - DNA, 523 bp, Homo sapiens
tccccctcagtttctattcttggtctcccactatcccaggtactaagctgtcaagaagcattaccatcatcctaatggaactgggaactcattcctgttcctacttccttggtaactttgttttccatccttgagccattgsgaggtgagatccttagtcatgacctgctctttcttgtggtccaggcagggcaattcctgctgtgtgaaaagtactgtgtgatcagttacccagagctctgagctgataggcactctgtttccatggttgcttcagcaagtcggtggtcacgccagcaaacacttgagtctatcctgaatttgcattctcatgctcactaattttgtggaccacaatcaaatacttaacttctcagatgctgtctcctcatctttaaaatgggaatgattgtacatacctttcagaaaagttgtgagaatcacgtaaacaaagcaaagcgacaagcacaatgtttaatactctgtggtcatcctgtaaaaagcataaatgactttaaaatgc

SEQ ID NO: 32556 - DNA, 523 bp, Homo sapiens
tccccctcagtttctattcttggtctcccactatcccaggtactaagctgtcaagaagcattaccatcatcctaatggaactgggaactcattcctgttcctacttccttggtaactttgttttccatccttgagccattgcsaggtgagatccttagtcatgacctgctctttcttgtggtccaggcagggcaattcctgctgtgtgaaaagtactgtgtgatcagttacccagagctctgagctgataggcactctgtttccatggttgcttcagcaagtcggtggtcacgccagcaaacacttgagtctatcctgaatttgcattctcatgctcactaattttgtggaccacaatcaaatacttaacttctcagatgctgtctcctcatctttaaaatgggaatgattgtacatacctttcagaaaagttgtgagaatcacgtaaacaaagcaaagcgacaagcacaatgtttaatactctgtggtcatcctgtaaaaagcataaatgactttaaaatgc

SEQ ID NO: 32557 - DNA, 1539 bp, Homo sapiens
cttcttcattttattttcctagcatttcttactgtcaactatcacttcctcagccttcatgacaacataccatcctgaatcacttctcacccttctctacttatctgggttaattcaaacattacccagagcctattaagacagcgccacaggactaggtcctacaggtaaagaggaaacaaggtatgacctgtctttgaaaagagagatgcagggaactaatatttcaacccaaaatgataagaattataatgcatggccaagttgacatgagagtaccagggagagatatttaagttgtaaatcaaacttaaagctttatggttaaagaaagcttcttaaaggctgtgcagctgaccaatcaggtttgtgtgagaaaacgtttatattctcccaacaaagtgacccttaggcccttggctgcctggaaatccttctaagttttctcctggaagctttctggtccactttcatgacaactatttcttactytccccattctcctcaaaatttccacacagcctttatctgtctcactcacagaagatgacctagcctccatcttcagagaaaacagagatatattcatagtccattagcaaagaagccttactattaaaagataaagtgcagagtcaggagcatggtacaaaacagttcttttattgttccctaaatcaccagctcaactcttcacataatcaccttgagaggccaaaggaagtccttcctctctcccgctccctatggttccttaagtgtcttacctcctcttcctgagcctgaggcttcctctcattctttctctgtggctggccaagcatctccaccatttggttccattagattttacttccatggaaagggtagaggccagaatggcagtgagagggtgaatctttcctcttcagtgaatcagggaaaggaacttccagatctggcctcaaaatgtctccggcattaaggaagtctctagcaaaataaagtccctctcagtataaccctagaacccagaaagtctccaaatctccatcccacccgaggaaaaatgtttccattacctaatctggataaggccccagggggagatgactgtgccccaagccccagaaggggtgggcgagtagggccaaaggggaaaatatcgcatcttttctcacaggcttttgtgttttactataactgctttctaggaatcaaatttaaatgagctagaggctaataaattatttttgctagtcacaagaaaatgtatttcacatgcaattgctcttcttcagaaacaccattttgtttgaattccacccaacagtatgcactacatgtagtaattctactacatctgaagaggttttggaaccaagttaattgaagttgcaggttaacaaataaaggcaaaaacttgtctataacttccctgtaacctgtgggtacttggcactgagactctttcaagttcattcattcattcatcaaatatacatggagcaccagatactgtgctagaccctgggcacacagtagagaataaaacagata

SEQ ID NO: 32558 - DNA, 1539 bp, Homo sapiens
cttcttcattttattttcctagcatttcttactgtcaactatcacttcctcagccttcatgacaacataccatcctgaatcacttctcacccttctctacttatctgggttaattcaaacattacccagagcctattaagacagcgccacaggactaggtcctacaggtaaagaggaaacaaggtatgacctgtctttgaaaagagagatgcagggaactaatatttcaacccaaaatgataagaattataatgcatggccaagttgacatgagagtaccagggagagatatttaagttgtaaatcaaacttaaagctttatggttaaagaaagcttcttaaaggctgtgcagctgaccaatcaggtttgtgtgagaaaacgtttatattctcccaacaaagtgacccttaggcccttggctgcctggaaatccttctaagttttctcctggaagctttctggtccactttcatgacaactatttcttactttccccattctcctcaaaatttccacacagcctttatctgtctcactcacagaagatgacctagcctccatcttcagagaaaacagagatatattcatagtccattagcaaagaagccttactattaaaagataaagtgcagagtcaggagcatggtacaaaacagttcttttattgttccctaaatcaccagctcaactcttcacataatcaccttgagaggccaaaggaagtccttcctctctcccgctccctatggttccttaagtgtcttacctcctcttcctgagcctgaggcttcctctcattctttctctgtggctggccaagcatctccaccatttggttccattagattttacttccatggaaagggtagaggccagaatggcagtgagagggtgaatctttcctyttcagtgaatcagggaaaggaacttccagatctggcctcaaaatgtctccggcattaaggaagtctctagcaaaataaagtccctctcagtataaccctagaacccagaaagtctccaaatctccatcccacccgaggaaaaatgtttccattacctaatctggataaggccccagggggagatgactgtgccccaagccccagaaggggtgggcgagtagggccaaaggggaaaatatcgcatcttttctcacaggcttttgtgttttactataactgctttctaggaatcaaatttaaatgagctagaggctaataaattatttttgctagtcacaagaaaatgtatttcacatgcaattgctcttcttcagaaacaccattttgtttgaattccacccaacagtatgcactacatgtagtaattctactacatctgaagaggttttggaaccaagttaattgaagttgcaggttaacaaataaaggcaaaaacttgtctataacttccctgtaacctgtgggtacttggcactgagactctttcaagttcattcattcattcatcaaatatacatggagcaccagatactgtgctagaccctgggcacacagtagagaataaaacagata

SEQ ID NO: 32559 - DNA, 514 bp, Homo sapiens
gcgcccactgtctggcactccctagtgagatgaacccggtacctcagatggaaatgcagaaatcacccttcttctgcgtcrctcacgctgggagctgtagaccggagctgtttctattcggccatcttggctcctcgaatcccttcattttaatccagccactatgaacaacataaatgggcttgcccaagctcaactcaggtctgaggcaacgttaagggcaaaccacaagaaaaccttcctggagtgtcaaattttaccctacattgaataatttaaaacagtatttttatgttgaaacaaaaaatatacaaaacagaatactatatctgcatgaatttttaaagtaatacattgcagagaaacttcagacttaacagcagcacgctttgaaccatatttcaagccccaggggtttatagccctgtcctagaaggagtccacttgaaatttttaagaaacatatttaagtgacttttatgtcctggttaaaattttataagcagtcatgtaa

SEQ ID NO: 32560 - DNA, 555 bp, Homo sapiens
ttttcccctttctctctcctgttctaatttttagaaacatttttgcagatatagtttataggaaattcctgatgtcaagtaatttcacctaaaatacttcaggaaacatctccaaagaataaagaaaaatgatttttaaaaatctgtatttaaaggcattatataatcacaataccattatcacaccaaaccaaattaaatcaaattaaaaataattcctctatcatcttatccttagytgacactcaaattcctttaattatctcaaatgtgttcttttaaaattagtttgttacacttagttaaaaatatggatcatgttccagccaacatggggtagccccattcttcccaggttctccatcctagaaccgaaaaaccttagagacaatacaacaaacaggcataggaagattcaaaaatgtagaaagaataaggcagatggtctagggaccttgaaaattgaaggatgacatgatggtgagttgcttaggtttcttgattgcctttcacatcatcttgagaagttgttgtctgcaaactggagctgccagt

SEQ ID NO: 32561 - DNA, 641 bp, Homo sapiens
aattgagcagaatcttattctatttcccaaacacaatcatactgagtgcaatgatactgactgcttgattgcttcagcagactctgataggtattatttgtaaacacccaatactcttttccatacctcttctttaaacagcatccctgtcctttgccagtcctttcttttaaggaacaccccccaccctccagttccatgtaatactagtgagtgcccttcatcgtagtaactcaacccctcccctaatgagtaaaaacaagatccaatctgaacctataatagcagcatattcttctggacacagaaattsgtataagggacagacatggtacacaggaagggccaatcagagtctctctctgagctcaatatacaaattttgagtgaagaaactccgctccatttggctactaaattatgattatgacgtatggtactgcttggacctatcttccccagatgtctagagaaagttgtctgctccagaagtagtccaatacacccagaggacagagatgagcagatcaataaatctgatgacatcattggccctgcattcagcagtgcttgaagtcagcaccaacagacttctgagtcaaaaaaaaccaaaaagttgttggccaaggacagtttgattg

SEQ ID NO: 32562 - DNA, 437 bp, Homo sapiens
cacttctctattgtccactaaatttgagaattcatttacatgtagtcttgcttctaattttttgtttaatgatttatatgtcttacctcatcttactttttgaggtcaggggacatttattatagtttttatacccatcctaataagtagcaaacagccaggaacatagtaggagctgaagaaatatctaggkttgacaccaaaagtgttttaacaaatagttgcatggggagatgtaatagttgaattatccagacctgtgcagacaaaaactatagctgcagtgttcaaaatggtagccactaaccacatgactgttgagcatgtgaattgtggctagcataaattgagatgtgctgtaaacataaagtacattaggcatttcaaaggcatagtatacaaaaaaagaatgtaaactatctcagtattttttatgt

SEQ ID NO: 32563 - DNA, 768 bp, Homo sapiens
gtgttttcacctggcggaaggggcgaggcagctctctggatcccctttaataagagcactaatccccttcttgagggcttcaccctcgtggcctcatcacctcgcacaggcccccacctcctaataccatcacctggggcactaggtttcaacatacgaatttgcagggagagcagtaacaaacattcggaccatagcaaagattatcgcgggtgtttaaggccagaagaggcatcacrattgtcccccatctcacgcccatttttaaatgattgttattacagctgaatactgtggaccatggctgccggtcaagggatctgcctcagacgctttttctaagatctattaacgcagcagggagttttggaactttataagcgctgccccataatcttgctaatgatacaaaatggtgttctgtgaaccttaaaacatctattttcaactaggaaaacagaactttcaactcagaagaagactttttcttctttcagcttgcttgataattttgcattccctaataatgttaaatgttacttagatttataatagaaagcaattaccagacaaattcaccatctccagctaatatggtttccttcaaaatgcaatgtttctgaagaaacagataaaagccaggcttaagtgatcacattgtgtgaggcaattccttttatatctttttaagagtgattacagacaaatctgctttgccaaaaaagccaacgcctagtacacttgtactttatttttttggcatcccta

SEQ ID NO: 32564 - DNA, 768 bp, Homo sapiens
gtgttttcacctggcggaaggggcgaggcagctctctggatcccctttaataagagcactaatccccttcttgagggcttcaccctcgtggcctcatcacctcgcacaggcccccacctcctaataccatcacctggggcactaggtttcaacatacgaatttgcagggagagcagtaacaaacattcggaccatagcaaagattatcgcgggtgtttaaggccagaagaggcatcacgattgtcccccatctcacgcccatttttaaatgattgttattacagctgaatactgtggaccatggctgccggtcaagggatctgcctcagacgctttttctaagatctattaacgcagcagggagttttggaactttataagcgctgccccataatcttgctaatgatacaaaatggtgttctgtgaaccttaaaacatctattttcaactaggaaaacagaactttcaactcagaagaagactttttcttctttcagcttgcttgataattttgcattccctaataatgttaaatgttrcttagatttataatagaaagcaattaccagacaaattcaccatctccagctaatatggtttccttcaaaatgcaatgtttctgaagaaacagataaaagccaggcttaagtgatcacattgtgtgaggcaattccttttatatctttttaagagtgattacagacaaatctgctttgccaaaaaagccaacgcctagtacacttgtactttatttttttggcatcccta

SEQ ID NO: 32565 - DNA, 1393 bp, Homo sapiens
agccccggcccggcgcctccgccgaggccctcccgctcctgggcactgcgcgcccagccagcagctggagtcccacgaggcgcgtgtgtcccccactcccggaacaagcaccacactggcgcaccgagggtgccttgtggggtccccaagtcatcccaagacatacgagtaatcatcatcatcctatttcgtggtgctcttggaggttttctccatctcatttgaagtcccaataaaagcagcttgagaaactttattttagagttttctttttctctgtaacttacaatcgatggggaggagggccaccacagccctagtactggcgtctcggttacccgcacacccagggccagctctttgggccttaagggtggaaagcattgggtggaacctgtgggtgggggcggcgggggcgatgagcagcacttccgggaatcccccggcatctggctgttcctgcattttttccaggcaggtcctcgctcatgaacaagggtcctgccggtctttcccttcttttccttcctcccaagagagaagaacacgtgtttcccttccttactgttttcttatcagatgcctggcaaaggatgtctgcatttccagcgcccagccacacagacgccccccaccccactcctgaggatccatccttccattctgcaagcggggcagctgggggtgtccacggactgctttgaaaagcaggaatgtgggagaggctaatagggcgaagagarcagaggtagactccaggaggggtgaaagtgtgcccagacacactcacttccattcagcttacagcagaaagcccaagatcaggggcgggaagccgggtgtcagaatccgctctttggacacccccaaactgagggcagcactttgaagatgttctcaggctcccattccgcacccagccttggccggacctcagaacgggcaggcgtaagacagcaggcccctgccctgtggagggcccagtctgatgagggagcctgtcaatgcaccaggaagctaaggctgtgagtctaagggaaggaacttaatgaggtgctgcaaccaagaatagtcaaagggacaacttaaggctttggagtgttcagggaaggcttcttggaggaggcgattttcaaagataagatctgaatagccaagcagtgagaattagcgcaccatgtggagggaacagcagggcgcaggccctgcagcagcaggagtaaggcgcatgccggacactgacagagggtggggccgcttcctgagagcccacagggtgacaggcatgcacctgtcaccaggtgaatttacagcccatttccatgtcgcccaggatcgatcgctggaagtctgctgcccaaacagacccaactaaccagaggcttgaatattt

SEQ ID NO: 32566 - DNA, 579 bp, Homo sapiens
gcagatgacatgattgtktatctagaaaaccccattgtctcagcccaaaatctccttaagctgataagcaacttcagcaaagtctcaggatacaaaatcaatgtacaaaaatcacaagcattcttatacaccaataacagacaaacagagagccaaatcatgagtgaactcccattcgcaattgcttcgaagagaataaaatacctaggggccagtcttagcccatgaaatggagtccttgtgcaaggaagaccctgcataactgtatatagcaaccctgcttatgcccaccacagtgtctggcaaacagcaactggtcaggccatttttgttaactgattaatttgtcagtcaagcagtcagttgacccagcgcagcaagaaaagttgaaaagcaattgaaatagtcatttatagtaacacctgtaaattaagaagaaaatataaatcacttaccataaagaagactgttgagttgaaatatctttatctgtaatgaaaggaatgtttctgggacaggtctttctataaacataggaaaagttgtaaaagtagaaaacattcacaatcaatcatcatg

SEQ ID NO: 32567 - DNA, 602 bp, Homo sapiens
atatgactatgattctgtcacatcattttctaaagagaataaaaagccaatttggtcctttctttaacatggtagagcaaatgttttttattattgatagtttttaaagtttatttcagcattgtgactcataatgtaaaattttagaattattatgtaagttaggaaactttatcaagttttcttcgtacataaactttaagattttagaacatttcatgttttcttgttccatgactaatcttcgattctttttgttgacattcattaaccacatttcctgggtcatttcaggttcttaaaagggacctgtgcaagtagggggctcctgaaacttgagtttcattagatttagagtaaagttgactcatcagattagctggttacctttttccttccaggctcttatgtcctcatttcctctccctggggccagatcttcatttcctcaccaggcctcatacttacctaggaagtaaatttcacttcwactccaggcacagagcattcattcccctgactctgtaactctgcaaaacagtgctgcgagtccccatcactctcctcagtgactgaattagaccacaagagccttctaatac

SEQ ID NO: 32568 - DNA, 651 bp, Homo sapiens
tttctctcacaaagactcctgactccatctcttcttctttgccttccccaagttagttttttatattaaatttctttaaagttgctctaactctctcaatttcttgctctgacacatggttaatttctacaaactaaaacttttagatttgagtaaactattggaacttttctgggttcactttctataaggaatgagatagagacctagaacaggaggaattttctcaagattttaagatctaggtatactaaatatgagaagttcagcccttctacattcattctaatcttctttcaactatgccatagtactgttcttaagtggyttttcccccaacaccaaagaatttgctttggtcaataataaacatgaatagagctgacaacaagatactagtggaccacgattttggcttaagtgcagaattttttttttataaaattgttttaagggaaagagcaattaatttggaaaatagcaaagtggaaaacaagcatcatgcttattacgtcaagttcttgtcacagaatgtaacacttgcttatctcctaacatccataaaggtcagaatttagaaatggctatcatctaaatccaaattatgaatgtatcacataggaatcttatgcattttcagtaatatgtatc

SEQ ID NO: 32569 - DNA, 1301 bp, Homo sapiens
agtaagatactttgccaatttggaaatgttctatcttgaatttagtcatctccttaattgcttttattttttatacaaatgttgtgggtttttgcagttttgagaggcagaaaatgaatgatatagcaattaataaaaacataaaattaatggttcttcaactaaggggtcgatcatactggtttcctcaacctcaatactccattcttcagttcaaggtacaatggaatttatagcagcctgagtctctgaaataggacttccttgatccaatgctaatgttccattgtgtgtgtgtgtgtgtgtgtgtgtctgtttcctgataaggcaattatatttattttctcccagttataagaaaaatgactaatagatatttgctgacaaactgttagcaaatcttctggtgagaaatgtgacaaaagaggaggatgaggaaaaaattctgcttccataaaggtaaaagtggttttaaaaattcatagtattagcaagaattgtttttcttggaacacagagacaggaattgatttcctaagagtacgaattacagctgggatcctttgacctctcacttattagaaaataggtattattatctaacccgaaattctggttaatttcactgcctgctatttctcccccaaacaagagtaacaacagcaatgacaataaaaacaccatcaataaacagtcctacaactgaagagatattttacaacagcttttggtggaaagaatgcattggtttttcaaacagaatctatcaatacatggattctctgacaatagccacaacagacacaggtgttggaagtgactccatgctgaaatagaagctggggggtacaagtaaatgaataatatactcatggaaaatgtgaagacaagtgaagcattttgaataaggtaagtgttttcagaactacaggataactgatttgctgttggtcatgcaagtgcctgaatgcagcagtttcttgataatctgttagatatttctaattgtttatttagtaattgtgaaaatttcctggttaagagtctcctacaagggcatccatactacaagaaaaagagagagagaggaactaggttcactttttgttaagttctctgactaaatgcagagtttttaagactgcctataaaattaaaatatattgttatttctccctaaaaacaacaaaaaaaccatttaaggatctttcaaaaatgtgtatgatttgaatgcaaatgaatgtctcatattatattctagmataaggaagttattttgcaatctcaaaagcatattaata

SEQ ID NO: 32570 - DNA, 427 bp, Homo sapiens
agctagaactgataatatgttctttttagtggaaaatatcttctgtatataacaaactgctaactgctcatacacagcgagtattttcatttgttagttttcactggaaaatattgtttatcctataggaatacatatatttctatattcctatcccgatatgccactataattaaatcatcttgggtacagtctttgtttcattacgcagtggtattagaaaacttctgaaagtccctggmggagaaatgtccctaagcattttgttaattaagggataatttcactgaagaggaatattggaaggaattgctttctttctcagacatttaaatataaaagccgagttgaagtctttgttaatctagaatctatttttctttctagacgtatgccaacataaaaccatattttctttagttaatgt

SEQ ID NO: 32571 - DNA, 882 bp, Homo sapiens
ttctttcgtatctcatgtcatgagaaagaaatctgcttaattattgagtgtttttattctgatatgatgataacataatcgatttcccttggatgccttctgtcagatggttttattctgctttacatccttgatcttttcacagtcgagagcagttattaacagaacatcaaccacattgacttaaccatattcatcgttatttgtagtaagaatccagaggtaactggttattggcattccttaagaggtcctaggcctgacagtgtgggtgttcccaaagtggctgctgtagctccacccaatatatatatgttctaggcaacaactaagaaaagcagagaaaagcaaaaagagcacatgccaactgtctgttccctcttaaagtagctttctgtcagagtcccacccagcaacttgtacttaggtttatttgtcacctggctacaaagaagtctaagaaatgtagactctagctgggcactttgctacttaaataaggttaggtttctgttcccaaggaagatagggrtcatggttgtggagtgggaagcctgcagcctcacttattcacctgactggattcttttcctccattgagggtaggtcgttaggttgagcagctgagctgaacggactcttgggctttcaatttaagattgtcatatgctatgaaagagccctatatggtatagagattcatgagtttacgtgtgagcacatgatagagtgtgtgtgtgtgtgtgtgtgtgtgtgtgtgtgtgtgtgtggctcagttaataacagaggagagctggagtggagtggcactcacactatatacacaggtggctaaaactatccttttgggcactgatgttttgtcccaggcaattagggatg

SEQ ID NO: 32572 - DNA, 882 bp, Homo sapiens
ttctttcgtatctcatgtcatgagaaagaaatctgcttaattattgagtgtttttattctgatatgatgataacataatcgatttcccttggatgccttctgtcagatggttttattctgctttacatccttgatcttttcacagtcgagagcagttattaacagaacatcaaccacattgacttaaccatattcatcgttatttgtagtaagaatccagaggtaactggttattggcattccttaagaggtcctaggcctgacagtgtgggtgttcccaaagtggctgctgtagctccacccaatatatatatgttctaggcaacaactaagaaaagcagagaaaagcaaaaagagcacatgccaactgtctgttccctcttaaagtagctttctgtcagagtcccacccagcaacttgtacttaggtttatttgtcacctggctacaaagaagtctaagaaatgtagactctagctgggcactttgctacttaaataaggttaggtttctgttcccaaggaagatagggatcatggttgtggagtgggaagcctgcagcctcacttattcacctgactggattcttttcctccattgagggtaggtcgttaggttgagcagctgagctgaacggactcttgggctttcaatttaagattgtcatatgctatgaaagagccctatatggtatagagattcatgagtttaygtgtgagcacatgatagagtgtgtgtgtgtgtgtgtgtgtgtgtgtgtgtgtgtgtgtggctcagttaataacagaggagagctggagtggagtggcactcacactatatacacaggtggctaaaactatccttttgggcactgatgttttgtcccaggcaattagggatg

SEQ ID NO: 32573 - DNA, 621 bp, Homo sapiens
tcaacataagtaagataaacattggtttggtctggaaaggtgggacaactcaaagctaggagggcacttccaggtcataggtagataagagacaaatggttgccttcttttgagtttctgatctcctcttcaaaggaggcaagcarataggcatttatctcagtgagcagggtggtgactttgagtagaatgggaggcaaatttgcccctaagcagttctcagcttcacttttccctttagcttagtgatttgggggccccaagatttattttcctttcacaatatcctctctaaggaatggatattggcaatgatattatgtaaacccagtaattgttttgtaaatttctaccgtgcatatagtattgtgcttcatattgtagagacataaaatatagtagaaagtacatgccatttatccttaaagaatatcaagttcactttaaactgtaattaggaatgctacaaaatgtcattcgttttccttttctttgcaatcaattttccgtcatggtacgtggctgatggacacactatgggtgcttttacgtcaccaaaataagaagaagcaaaatgtagctgccatttagagaacatttgctatgtggcatatgctgcgt

SEQ ID NO: 32574 - DNA, 1102 bp, Homo sapiens
acaagaaacgaggtgaagctcatttgttgcaacttgaacaattttattccagtagtcctcaaactttattatgccccagaatcacctggaaggcactgtaacacacaaatggctgagacccacctccagagttctaatttagattttgtatgagctcctaggcatagttagttcaggacaacattttacaaatcactgctgcagtgccacccttagttgactactttcttaaaagttatagccatggaaaggatatagatgtagatgatcaagatagagatatactagctagatatactagataaactagatatacagatagagatagttcaaccatcttccccaccaaaatgtaatctccacaagtcaataagtaaaacgtaaaatcaaatatgtccttgaaataattcagatataaaaaaggcattcaagaagacaaaatacaatggcattgtacaaagtgcccacgggttggtgtatcaagtatggtgggtaaaggctaacttttttaaagggattacatttaaattcagaacagaaaagaaactaagaaaattctcgttaataatatggagaggaagtgttccaagcaagagaaacagaaagttcaaggccctagaatggtactgagattggagaaataatagggtagaaagaagcttgaatcttacactttgcaatgggaatagaagaacaagaatcttgttttgtctgtctctgaatcccaatgcctcaactaatgcctgatacatagaaagtgttcaatatgtatttgtttaagaaataaatgtgaattattaaagggatgaatgagcaagttgctggggagaaatgtgggtatggatttcagtggatgrgaacatccttcttgcaaacagagatataactatttttatagctttggtttagtattacaaataacaaaataaattgtcaacatttactctcagattgctcttacaagtatcaagcaaaggacaacttgctattataactaaaattgcagtacaagaaataaaatattaacatagttttgtatttgaacattctggagtgactgtgaaccacaagaatatagcagagataaagatatttagaaaat

SEQ ID NO: 32575 - DNA, 655 bp, Homo sapiens
ttttttttttttggctcatgatactacattgaaaatgggatgaaagtaaatgtaaggggtgggccataaaaatggtagaggaacagcagccagacgattgtagtttgcttagattaggactgaaaacatcgtggactgcactgttgtaagaaatgatggaatggagaataggtttgtggcggaagaggcctaagaggcagcaagcaggaaattaaaagagcaaggcaattagatacaaaggagatttcaagattgagacctttgttgttgctctttcaaaacatggaatcaagctatttacactaaaaaacaaagaaaggaataaatggccaaagataggcaagaagatggctgatttatgcttattatgccagaaattcaaccagtagccagcttgaaaaaataaagatgcataacaaaaacaatatgtattttttctagacagttctagttaaaaatcaacaaaattgtttcatttttgttacgtacctgtggtcttttrtgtatatattctctttcaaaaatatcacttaccattgcatacttctattagatccctttttaaaaaaagtatgatttttcatatatcaaatatgtcattgcccattaagctaccccggaaagcactcccagtgtcttattgcaattgatcaca

SEQ ID NO: 32576 - DNA, 821 bp, Homo sapiens
tttgaagttcagtaatgtaatgcttccagctttgttctttttgcttaggattgctttggctagctgggctcttttttggttccatatgaattttaaaatagcttctgctaactctgtgaaaaatgacattggtagtttgataggaawagcattgaatttgtaaattgctttgggcagtatggccattttaacgatattgatccttccaatccatgagcatggcatgctttttcatttggcaaacattttttacatcaaacgatgtgtgatatagatgtttacatatgagcaaataaaacccaccctaaaatgcaaaggtcattttctctgctatctcttgagaaaaaaaaagaaaaagatattgaatagcaactgttggtattaggcaaccagtatcatgtttcagggaaaccaactgacttaaacaagtagataagattttcaaagatgaatcaatcagaaacctgcctacagcacagattagcaattagtgtattcagactcatctactttttttttttttttttttttttttttttttttttgagacagggtctcactctgttgcccaggctggagtgtactggcatgatcatggctcactgcaaccttgacctcccaggctcaagtgatcttcctgccttagccttctgagaccagagtgcccgacggtctaaaatgagcttgcagtataacttagggttcatgtcttaactcaagtaaatttcagaaaggggtcaaacccttgtttaaagataaatgtaagctggatgtggaggcacatgtctgtagtcccagctactcaggaggctgaggcagga

SEQ ID NO: 32577 - DNA, 806 bp, Homo sapiens
cctgcagaaagccacaggcatttagtcatggcctctttaggcccctctggctagsacagttccttgggctttttttttttttttgtctccctctttagactgggagctccttaagagcaaaggtaaagctcgcccccgcgagtccccccatggtgcctgacgtcacgctctgcccatcccaggcctccatgggtgatgagaggcctgagttgaggcaccagccccaaatgtgtgcgatcacgccattgagcagggagagatggggctggggggaatttcacttgcttttgttacatttctgtaacatttatgtctttaaaaataatcagcatacgtttctcttccaattaggaaaactgcagcaaatcaagccgggagctggggcctgggcagttcatgatctggctgggttccccgctcaggcagttcacgcgcacagaccgccccctggaagaactgcggctggaatgagcaattctcctgagaaagcaaagacacggactcacaagggagttctgggcagaaacggagacggagattggagtgaagcgtccacaagccaaggagtgccaaggagtgccaaagattgccagcaacccccagacgctggaggaggccgggaaggagcctccccaggagcctttggagggagcagggccctgctgacacctcgatgtcagacacctggcctccaggacggtgagagcgggttctgttgttgcgagccacccagctcttggcacttggttacgcgggtcacaggacaccagtagagccatatctactcattcatttcagaaacgttg

SEQ ID NO: 32578 - DNA, 806 bp, Homo sapiens
cctgcagaaagccacaggcatttagtcatggcctctttaggcccctctggctaggacagttccttgggctttttttttttttttgtctccctctttagactgggagctccttaagagcaaaggtaaagctcgcccccgcgagtccccccatgrtgcctgacgtcacgctctgcccatcccaggcctccatgggtgatgagaggcctgagttgaggcaccagccccaaatgtgtgcgatcacgccattgagcagggagagatggggctggggggaatttcacttgcttttgttacatttctgtaacatttatgtctttaaaaataatcagcatacgtttctcttccaattaggaaaactgcagcaaatcaagccgggagctggggcctgggcagttcatgatctggctgggttccccgctcaggcagttcacgcgcacagaccgccccctggaagaactgcggctggaatgagcaattctcctgagaaagcaaagacacggactcacaagggagttctgggcagaaacggagacggagattggagtgaagcgtccacaagccaaggagtgccaaggagtgccaaagattgccagcaacccccagacgctggaggaggccgggaaggagcctccccaggagcctttggagggagcagggccctgctgacacctcgatgtcagacacctggcctccaggacggtgagagcgggttctgttgttgcgagccacccagctcttggcacttggttacgcgggtcacaggacaccagtagagccatatctactcattcatttcagaaacgttg

SEQ ID NO: 32579 - DNA, 806 bp, Homo sapiens
cctgcagaaagccacaggcatttagtcatggcctctttaggcccctctggctaggacagttccttgggctttttttttttttttgtctccctctttagactgggagctccttaagagcaaaggtaaagctcgcccccgcgagtccccccatggtgcctgacgtcacrctctgcccatcccaggcctccatgggtgatgagaggcctgagttgaggcaccagccccaaatgtgtgcgatcacgccattgagcagggagagatggggctggggggaatttcacttgcttttgttacatttctgtaacatttatgtctttaaaaataatcagcatacgtttctcttccaattaggaaaactgcagcaaatcaagccgggagctggggcctgggcagttcatgatctggctgggttccccgctcaggcagttcacgcgcacagaccgccccctggaagaactgcggctggaatgagcaattctcctgagaaagcaaagacacggactcacaagggagttctgggcagaaacggagacggagattggagtgaagcgtccacaagccaaggagtgccaaggagtgccaaagattgccagcaacccccagacgctggaggaggccgggaaggagcctccccaggagcctttggagggagcagggccctgctgacacctcgatgtcagacacctggcctccaggacggtgagagcgggttctgttgttgcgagccacccagctcttggcacttggttacgcgggtcacaggacaccagtagagccatatctactcattcatttcagaaacgttg

SEQ ID NO: 32580 - DNA, 806 bp, Homo sapiens
cctgcagaaagccacaggcatttagtcatggcctctttaggcccctctggctaggacagttccttgggctttttttttttttttgtctccctctttagactgggagctccttaagagcaaaggtaaagctcgcccccgcgagtccccccatggtgcctgacgtcacgctctgcccatcccaggcctccatgggtgatgagaggcctgagttgaggcaccagccccaaatgtgtgcgatcacgccattgagcagggagagatggggctggggggaatttcacttgcttttgttacatttctgtaacatttatgtctttaaaaataatcagcatacgtttctcttccaattaggaaaactgcagcaaatcaagccgggagctggggcctgggcagttcatgatcyggctgggttccccgctcaggcagttcacgcgcacagaccgccccctggaagaactgcggctggaatgagcaattctcctgagaaagcaaagacacggactcacaagggagttctgggcagaaacggagacggagattggagtgaagcgtccacaagccaaggagtgccaaggagtgccaaagattgccagcaacccccagacgctggaggaggccgggaaggagcctccccaggagcctttggagggagcagggccctgctgacacctcgatgtcagacacctggcctccaggacggtgagagcgggttctgttgttgcgagccacccagctcttggcacttggttacgcgggtcacaggacaccagtagagccatatctactcattcatttcagaaacgttg

SEQ ID NO: 32581 - DNA, 1238 bp, Homo sapiens
caaacacagagcttccatatcttctccccatggagtcaggatgtatcaccctcctagcacactggtgttcacccaccaggaggctcaattgagccttgaggtccagagtttttattggtgtttcatcacgaggcatgattgatcaaataattggccatgtgattgaactcaatctctaacctccctggaagtcaggctgatataatctggctcaaaaccccaaccctctaatcatttggttggttcctaatggctagtccccatcttgaaactatctaggggcccaccatgagtcaccttgttagtatraactcaggcatggtcccagtggctcactatgaataacaaagacattcctatcacttgggaaattccaagggtttagaagctacctctcagaaacccaagacaactggagaaattattatgcaacaaatgccagcctatcttcaccacagtgtgccccatgaccccttttctatgctcttggcttaggtcaggcagagcagcttgcggctctccatgtggacctggagatttttcacctcgcttcctttgcttgcactgatccctttgtctggaattgcctccatgagggtacccatccttcgtgtagatataactgtcctcattttagatgagaaagttgaggactagaagatgaagtcacttttcaaagacaattggatctatatgataaaaccaggccataaatccaggcctatctgaagccccaacctgtgtgatcccacttccccgtgggcagtaggattggctgatattattgaaatcccttaaagatcattctgtaattattctcccatgaaaaaatggcttaaagggggcaaaacttgccatcactaacaatgccaccttggggaagctaaactcccaaattaacagataccctcaactgcaagtaatagaaaggcccacaaaaagacccttagaccaggagctggcaaactttttctgcaaagggccaagggccagagagtaaatatttgaggctttgcaggccataaggtctctgtcgtgactatgcatccctgccattgtagcactaaacaatatgtagacaatacataaacaaatgggcatggctgtattccaataaaactttatttacaaaatcaagcagtgggccagacttggctcctgggtcatagtttgccaacccttgtcttaaaccaggaggacatttattcaccatataacaagaagtctagaaatagggt

SEQ ID NO: 32582 - DNA, 1238 bp, Homo sapiens
caaacacagagcttccatatcttctccccatggagtcaggatgtatcaccctcctagcacactggtgttcacccaccaggaggctcaattgagccttgaggtccagagtttttattggtgtttcatcacgaggcatgattgatcaaataattggccatgtgattgaactcaatctctaacctccctggaagtcaggctgatataatctggctcaaaaccccaaccctctaatcatttggttggttcctaatggctagtccccatcttgaaactatctaggggcccaccatgagtcaccttgttagtataaactcaggcatggtcccagtggctcactatgaataacaaagacattcctatcacttgggaaattccaagggtttagaagctacctctcagaaacccaagacaactggagaaattattatgcaacaaatgccagcctatcttcaccacagtgtgccccatgaccccttttctatgctcttggcttaggtcaggcagagcagcttgcggctctccatgtggacctggagatttttcacctcgcttcctttgcttgcactgatccctttgtctggaattgcctccatgagggtacccatccttcgtgtagatataactgtcctcattttagatgagaaagttgaggactagaagatgaagtcacttttcaaagacaattggatctatatgataaaaccaggccataaatccaggcctatctgaagccccaacctgtgtgatcccacttccccrtgggcagtaggattggctgatattattgaaatcccttaaagatcattctgtaattattctcccatgaaaaaatggcttaaagggggcaaaacttgccatcactaacaatgccaccttggggaagctaaactcccaaattaacagataccctcaactgcaagtaatagaaaggcccacaaaaagacccttagaccaggagctggcaaactttttctgcaaagggccaagggccagagagtaaatatttgaggctttgcaggccataaggtctctgtcgtgactatgcatccctgccattgtagcactaaacaatatgtagacaatacataaacaaatgggcatggctgtattccaataaaactttatttacaaaatcaagcagtgggccagacttggctcctgggtcatagtttgccaacccttgtcttaaaccaggaggacatttattcaccatataacaagaagtctagaaatagggt

SEQ ID NO: 32583 - DNA, 1238 bp, Homo sapiens
caaacacagagcttccatatcttctccccatggagtcaggatgtatcaccctcctagcacactggtgttcacccaccaggaggctcaattgagccttgaggtccagagtttttattggtgtttcatcacgaggcatgattgatcaaataattggccatgtgattgaactcaatctctaacctccctggaagtcaggctgatataatctggctcaaaaccccaaccctctaatcatttggttggttcctaatggctagtccccatcttgaaactatctaggggcccaccatgagtcaccttgttagtataaactcaggcatggtcccagtggctcactatgaataacaaagacattcctatcacttgggaaattccaagggtttagaagctacctctcagaaacccaagacaactggagaaattattatgcaacaaatgccagcctatcttcaccacagtgtgccccatgaccccttttctatgctcttggcttaggtcaggcagagcagcttgcggctctccatgtggacctggagatttttcacctcgcttcctttgcttgcactgatccctttgtctggaattgcctccatgagggtacccatccttcgtgtagatataactgtcctcattttagatgagaaagttgaggactagaagatgaagtcacttttcaaagacaattggatctatatgataaaaccaggccataaatccaggcctatctgaagccccaacctgtgtgatcccacttccccgtgggcagtaggattggctgatattattgaaatcccttaaagatcattctgtaattattctcccatgaaaaaatggcttaaagggggcaaaacttgccatcactaacaatgccaccttggggaagctaaactcccaaattaacagataccctcaactgcaagtaatagaaaggcccacaaaaagacccttagaccaggagctggcaaactttttctgcaaagggccaagggccagagagtaaatatttgaggctttgcaggccataaggtctctgtcrtgactatgcatccctgccattgtagcactaaacaatatgtagacaatacataaacaaatgggcatggctgtattccaataaaactttatttacaaaatcaagcagtgggccagacttggctcctgggtcatagtttgccaacccttgtcttaaaccaggaggacatttattcaccatataacaagaagtctagaaatagggt

SEQ ID NO: 32584 - DNA, 557 bp, Homo sapiens
aaaaaaatgaagaaataaagcatacattgcaactcaaaggatgatttaaaatattttttctcaaaataaaagatatgattmaaaataaaacattaaatcaattaaatatttgtgtttttcatttataatttctctacattgaaattgttatggactaaacgtttgtgtctcctcaaaattcatatgttgaaactctaatccccacagtgatggtattaagtggtgaggcctttgggaagtgattagtttatgcaagtggatttctcattactggaattagtgcctttaagaaagaaaccccagataactctcttgctctttttccaccaggtgaggatacaaagagaagttgatagtctgccgcctagaaaaaagccctcaccagcacctgaccgtgctgatactgtgatctggaactttcagcctccggaactgtgagaaataaatgttcgttgtataagccacctggtcaatgttgatttgttatagcagcccaagctgattgagactgatcaagataaagggttaactattacatgatataactgtgctgaaat

SEQ ID NO: 32585 - DNA, 657 bp, Homo sapiens
ttgattcagcacgtatatatacatccttttcttctagggttatgggagataggcaaaaaaacactgtaaagttgccccttggtatccaaaggggattggtcccaggacccccacagacaccaaaatcagtgcatactcaggtccyacagtgggcccttcagagcctgcgtatatgaaaagtcagccctttgtatccatgggtttttgcatcccccaaatactgttgtttgtttgagatggggtctcactctgtcacccaagcttgaaagcagtggtggtcatagcttattgtaatattgaactccggagctcaggtgatactcctgcctcagcttctgaagtagctgactgactgtatttttgatacacattcagttgtggatgtggacctgcagttatagaagggtgattgtatttatttaaaaaaaaatctacttatgtgggcccacacagttcaaatacatgttgtgcaagggtcaaatgtatctgcattcaagaagctaagaatctagttattgttttctagttgtacaataataataacttttaaaaagatacctgcttgccctttgagaatgtaaagtttgctttactcgatgttaagcacttattttttcctaatcaaattattaatgtttgtgaaaggtgggtgcttac

SEQ ID NO: 32586 - DNA, 561 bp, Homo sapiens
gtttaagaagtcaatatgaagtccacagccagcacataggccagcctatcgggaaccaaaatagtttgtttgaaatgtagtatgcaaaaggatcactatcaacttgtgctttgtaacccggattttttgtgactcacgttttcagatttacaattggatctgtttttctgtcttctaatttttaactaggaaatcttctaaaatttgcccatcaaaattctgtaagcacctgacctaattagctagcttataacccaaaccatcattcttatcattcttaccatgacttttgcaccagaacacccatggacttactgatcagcctgtgagcaggccacccttgagaaaggtatcactcttgatccaatcaggggcagctcctgagcaaagtttcttttcttgcaggggccatgggtagaatttttctagctagaaacactggacacagagaaggatgattgccatgcytgtgtacactaaagctctattagaggtatcagctaggggaagacagggcatctgatgctgctgtgtcccctgacataacatacatatgcagca

SEQ ID NO: 32587 - DNA, 531 bp, Homo sapiens
tctgttaaatagtcttgatgctctagaatctcaaaatactgtagacaggtgccctacttagaaatcaaaatttattgagtattacttagcctgagcattactctaatttccagcatattaactctgaaccttgtcccatatrcgagtagttcataggaaaaaatatatgaagaaaataccatttaacactggaagtagcaaatatgtgaaacttagtaatttatgactggatattaatgaagaatattaaaagggacttaatccaatttactagagcagcatacttagacacatggcaatagagtgagattgagttcaggaatcattgcttatctttatctcctatttctatgtatcttaaaccaatacacttgccctttgattctaagtttccatggaagtttggcactacaagttaaacagagaacatttgttttttgttattttcaaagaatggtgacaattctacctcttcctaagagctactcagctgcaaaaaaatactatttcagaccaagggaataataatta

SEQ ID NO: 32588 - DNA, 1198 bp, Homo sapiens
taaaaacgttgttgtttttcagagtgatgggccaaactgaagaattcaaatttacatgattgtccttcgtgaaaaaaaagaaaaggaaatgtccttcgtttctttatttctttccttctgtcatctctctgcccctagtttggcttccttctgggtcagtggtgctcactgctgatgatgctctacttggtccaacctcaggtttctcttggcactcttggtagctgttgctttttttgtctgttgtttttgttttcaatttctcacccttatcatcaagactcactgcctcccattatcaatatttactgagcatttacagtgtcctagaaacaatggaacatacggaaagcattgtccctgctcttgaggaggagctgacatcttaaatttttttttttttaaagtctcttttaaaatgtcatttttgtttggtgttttctgcaaaatactgaggaaatattttacagcgtgagctttgggtataacttagccccatcattgtttagaggacagaggaagaaaaagaggaataattttgaaggcagacaatgacagaccgttcaggtaggcattaaagggagataaacacaatctcattaactaaggagagatttactgcagtaaataggatgagggaaatagtttatgggatgccagcaaaagaaacagggtcccttagacattgagtggagccagagagatcctgtggccttggacatgataccaagtaggaatggtagaagagaaggctgaaaaaggaaggtaaacttgtgcacctgacaaatmcaaagaatcaaggatcaaaatcaaaggcaggttataagagtatcaagaaattcttaaaaaccaaaaagtgatttggaagcacaaaacttatacttaacgctactaaaggtcatgatgggccaagaacatcgtggcttcctaagttagaaaagaccatataccaaaattttaaattgaacatacttcttttttttcaatctccccctctcccagaaaaaaataggaactcattttttttcagggtggcagggaggaaaggggaccatgggacatggttggaaacagagttatattagtagtgtttttgttgttatgataaactttgtgtttaaactcgattgagaactcattagctgccaagggggcataaggaattaactatctatgttatattgttcgcttgtgtagt

SEQ ID NO: 32589 - DNA, 1198 bp, Homo sapiens
taaaaacgttgttgtttttcagagtgatgggccaaactgaagaattcaaatttacatgattgtccttcgtgaaaaaaaagaaaaggaaatgtccttcgtttctttatttctttccttctgtcatctctctgcccctagtttggcttccttctgggtcagtggtgctcactgctgatgatgctctacttggtccaacctcaggtttctcttggcactcttggtagctgttgctttttttgtctgttgtttttgttttcaatttctcacccttatcatcaagactcactgcctcccattatcaatatttactgagcatttacagtgtcctagaaacaatggaacatacggaaagcattgtccctgctcttgaggaggagctgacatcttaaatttttttttttttaaagtctcttttaaaatgtcatttttgtttggtgttttctgcaaaatactgaggaaatattttacagcgtgagctttgggtataacttagccccatcattgtttagaggacagaggaagaaaaagaggaataattttgaaggcagacaatgacagaccgttcaggtaggcattaaagggagataaacacaatctcattaactaaggagagatttactgcagtaaataggatgagggaaatagtttatgggatgccagcaaaagaaacagggtcccttagacattgagtggagccagagagatcctgtggccttggacatgataccaagtaggaatggtagaagagaaggctgaaaaaggaaggtaaacttgtgcacctgacaaatacaaagaatcaaggatcaaaatcaaaggcaggttataagagtatcaagaaattcttaaaaaccaaaaagtgatttggaagcacaaaacttatacttaacgctactaaaggtcatgatgggccaagaacatcgtggcttcctaagttagaaaagaccatataccaaaattttaaattgaacatacttcttttttttcaatctccccctctcccagaaaaaaataggaactcattttttttcagggtggcrgggaggaaaggggaccatgggacatggttggaaacagagttatattagtagtgtttttgttgttatgataaactttgtgtttaaactcgattgagaactcattagctgccaagggggcataaggaattaactatctatgttatattgttcgcttgtgtagt

SEQ ID NO: 32590 - DNA, 566 bp, Homo sapiens
tatgataaggtttaaaacaaaatgcctacattgcatttyctaaaatttagagctatcataaactcattaaatcatgtgcaatgaatttgataatactgagatagaaataaaaacattttcaatatttctcttaagactgtgaaatataaattatggacagacccagtttacattcaaatgttttcctcagtattttcctcacttggccatcctcaaggtgatgcgtgaggtgatttgagtaccattctaaagtacggtccaaggctaagcattcatccaattttcagtttaattgaaataataatttttatatcatctacatttttattctaaccaaatttttatttgctgaatctttgaaatgcactttagtgatggagcactgtaagagggtaaatttggatgtaattagacaaaagtaagatattaaatgtaaacattcttcctttgttaacattggaaactttccagcataggtaactctagagtactatcttctggacattatttatagcaaaattcatatggaaaataacataagcatacacacaacataggaacaacta

SEQ ID NO: 32591 - DNA, 765 bp, Homo sapiens
acctgcctcccaaactgctggaaccaccggcgtgagccaccgtgcccgacccttttttgtttctaagacagagtcttgctctgtcacccggcctggagtgcagtggtgcaaacacagctcaccrtagcctcaaactcctgcacgtaagggctgctcctgcctcagcctcccgagcagctgggactacaggtggtgccaccatatccagctaattttttcttttttttaaagggagggcatcttagatgttgcccaggcttgtttgaccaccagtgatcctcctgccttggcctcccaaagtgctaggattacaggcctgagacacggctcccgacctcgtgttccgccattccagggcagcctctctcttacacaagggcagtgggggcagtgctggggttgcaggtccgggccctggggcgtgcttccttcctcacgtggccatgcccagcagcaccaaacatccccatccagcctttggaccccgccctgcccgtgctgacgttcagaaccaggccctagggctaggcttgcctccgtttccctgtcgacacggtggagaaaggggcactcaggaagctccagtgtgcagacgcccagctgccctggggaaaaaaccactcaaggcccacagtacccgagcccacctcctacagagcagacaggaggaggaagccagcccacccggctgggggctccaactcaaagccccagggtttaaatgagatgccaggagaagcaggagttggggactgctggggggca

SEQ ID NO: 32592 - DNA, 765 bp, Homo sapiens
acctgcctcccaaactgctggaaccaccggcgtgagccaccgtgcccgacccttttttgtttctaagacagagtcttgctctgtcacccggcctggagtgcagtggtgcaaacacagctcaccgtagcctcaaactcctgcacgtaagggctgctcctgcctcagcctcccgagcagctgggactacaggtggtgccaccatatccagctaattttttcttttttttaaagggagggcatcttagatgttgcccaggcttgtttgaccaccagygatcctcctgccttggcctcccaaagtgctaggattacaggcctgagacacggctcccgacctcgtgttccgccattccagggcagcctctctcttacacaagggcagtgggggcagtgctggggttgcaggtccgggccctggggcgtgcttccttcctcacgtggccatgcccagcagcaccaaacatccccatccagcctttggaccccgccctgcccgtgctgacgttcagaaccaggccctagggctaggcttgcctccgtttccctgtcgacacggtggagaaaggggcactcaggaagctccagtgtgcagacgcccagctgccctggggaaaaaaccactcaaggcccacagtacccgagcccacctcctacagagcagacaggaggaggaagccagcccacccggctgggggctccaactcaaagccccagggtttaaatgagatgccaggagaagcaggagttggggactgctggggggca

SEQ ID NO: 32593 - DNA, 765 bp, Homo sapiens
acctgcctcccaaactgctggaaccaccggcgtgagccaccgtgcccgacccttttttgtttctaagacagagtcttgctctgtcacccggcctggagtgcagtggtgcaaacacagctcaccgtagcctcaaactcctgcacgtaagggctgctcctgcctcagcctcccgagcagctgggactacaggtggtgccaccatatccagctaattttttcttttttttaaagggagggcatcttagatgttgcccaggcttgtttgaccaccagtgatcctcctgccttggcctcccaaagtgctaggattacaggcctgagacacggctcccgacctcgtgttccgccattccagggcagcctctctcttacacaagggcagtgggggcagtgctggggttgcaggtccgggccctggggcgtgcttccttcctcacgtggccatgcccagcagcaccaaacatccccatccagcctytggaccccgccctgcccgtgctgacgttcagaaccaggccctagggctaggcttgcctccgtttccctgtcgacacggtggagaaaggggcactcaggaagctccagtgtgcagacgcccagctgccctggggaaaaaaccactcaaggcccacagtacccgagcccacctcctacagagcagacaggaggaggaagccagcccacccggctgggggctccaactcaaagccccagggtttaaatgagatgccaggagaagcaggagttggggactgctggggggca

SEQ ID NO: 32594 - DNA, 917 bp, Homo sapiens
ggctggaaccagttgagtcatcatgggtctctgcactggtcagttctctgggaggcttagcttccctctccctgaggaacgtggggctgaggccaggtgcccagggctaccccaagagctctttcttgctccaagaacgcgcttggcccaggggacccaaggtgctggctgtggtgtgaggctgctgcctcctgcgcttgctcctgcttctctgcaggcagggccacaagccaccgcagggtcagtcgctgtagacagagagggcttcagaggccgttagtgcagcgtctcgagcccaggtgtggsgaaggtgtgggctgggcagagcaggtggacacaggcctggaaggtgccagccgcaggaatggactgtaggctccctgtgggaggcagagggcgactggggcctgcagctgtgccacctgcaccttgcctgtctccactggcaggtgcctcggggcgtggctgttctggacctgccctgatgcctggggtgggcggggtttgtccgccttcctccccaggcctgccagcaccttccgctgctctcagtgtggactgttagacaagggggacgttggggacgtgggcaggagaggggggaccatccgctccaccacgtggctgccactccctggtcttcaccctggaggcgccctgactcccctcccatgatcacacaccctccgagcaccccacgggaaggtcctgagtgcctgggagcatgccctgctcctgtcctcagcctcaccctcctctcccctctgggaccttcccgtggccccctcatgctactcgcaaccccccagcggcaagtcctgtgcggaggcactgtgtcctgcgtgtgggaggaggggggactcttacttctcagaaacaaagcagccccttcccacaggagcttcttccaaggcctg

SEQ ID NO: 32595 - DNA, 917 bp, Homo sapiens
ggctggaaccagttgagtcatcatgggtctctgcactggtcagttctctgggaggcttagcttccctctccctgaggaacgtggggctgaggccaggtgcccagggctaccccaagagctctttcttgctccaagaacgcgcttggcccaggggacccaaggtgctggctgtggtgtgaggctgctgcctcctgcgcttgctcctgcttctctgcaggcagggccacaagccaccgcagggtcagtcgctgtagacagagagggcttcagaggccgttagtgcagcgtctcgagcccaggtgtggcsaaggtgtgggctgggcagagcaggtggacacaggcctggaaggtgccagccgcaggaatggactgtaggctccctgtgggaggcagagggcgactggggcctgcagctgtgccacctgcaccttgcctgtctccactggcaggtgcctcggggcgtggctgttctggacctgccctgatgcctggggtgggcggggtttgtccgccttcctccccaggcctgccagcaccttccgctgctctcagtgtggactgttagacaagggggacgttggggacgtgggcaggagaggggggaccatccgctccaccacgtggctgccactccctggtcttcaccctggaggcgccctgactcccctcccatgatcacacaccctccgagcaccccacgggaaggtcctgagtgcctgggagcatgccctgctcctgtcctcagcctcaccctcctctcccctctgggaccttcccgtggccccctcatgctactcgcaaccccccagcggcaagtcctgtgcggaggcactgtgtcctgcgtgtgggaggaggggggactcttacttctcagaaacaaagcagccccttcccacaggagcttcttccaaggcctg

SEQ ID NO: 32596 - DNA, 600 bp, Homo sapiens
gagtggggctccgcttcctcagccatggtcctgggtggcgtggccacacacaggacatctggggcccccgccctgtgagaacaacccggccatttccacccacagccaaggtgcaggctgtgggcactgggcgtggcacagcctctaggagttcttggttccggctcattccagggcagacctgcagccactcctctgtgcagagcgggagcacctggcccaggcctcacctggccaacgtggggttgtgggtgtggcaggcccttcccaagccccgagcttccccttcctcccgggccctgccgcaggacttctatatttccctgtggtcgtgaggtgtcgccactgccgtgataaagggctctggtggcaaagccagggagcagggcaggaacgccgccgggaatccccagtgcactctgggaggggttgggaggcccgggaactgccaactggcgctggagccctgtggaggaggctctgccacggggccgccccagacaggaggacasgtcctctcctgctgctgcacccacccagacatgggctcagggtgggggccatggggaggctcggggggtccctgaggtctaaccctga

SEQ ID NO: 32597 - DNA, 571 bp, Homo sapiens
tgacaggtgtgcggtgcctcactgctattttcatgggcgctccctcacgtcaaaggatgtcgcgcgtctggccccatgcttatttgccatctgtaaatcttctttggttcgaggtttattgttttcctgtggacatcccgttgttccagcagcatttgttgaaaagatttctgtccccatggaattgcctttacaaactttgtcagaaatcagattgctccattactgggtttacgctcagaggaatataaatctttccaccataaagatgcatgcatgcaaatgtgcactgcagccctgttcacagtcacaaagacatgacaccagcccagcactgttcacaatagcaaagacatgacaccagcccagcactgttcacagtcacaaagacgtgacaccagcccagcwctgttcacaatagcaaagacatgacaccagcctagcactgttcacagtcacaaagacatgacaccagcccatcactgttcacaatagcaaagacatgacaccagcccagcactgttcacagtcgcaaagacatgacaccagctgaaatgccaccaatggcaga

SEQ ID NO: 32598 - DNA, 635 bp, Homo sapiens
  misc_feature (1)...(635): n = A,T,C or G
agagccctgggctgtgctggacacacccccgggggaaaccagcagtgcccacagccctccccatggcgtggaagtgtgggcacgtgctcagtgtgtgcgtgtccccgaatgtgcacgtgtccacgtgtgtgctgaggacactgacgactgtcacattttaaaaaccacagaacaactttctaatggggggaaagaattttttgaaccaggggaggtggcgcagcaacagaaggtggtcgctcactcgctgtccacaactccccgcgtggacacagctgtggggaagggcatcacctygctggcagcaggcacagagacggaccgtgactccgccgcgaagtcctgaggcagcagagggcagacgcgcggcgcagctcagcacgggccacgaggggccgctgcgggcntccggccggctgttcctgccgtctcacggtaagcccgagtgacgccgcacacaaaatccttggtcactccggatcgaactcgctgctcaaagcaagtgccacacgggagggacgggtgtcctgtcagcacctaggacagggtcagggctctgcgccactgtctcccctgcacgccaagggcctgctctttgaggctgtgacacccagacctggtggatttgattttta

SEQ ID NO: 32599 - DNA, 589 bp, Homo sapiens
gccaatacacatattttgaatatgactaatttaaccaaatgagaacccatttctaacctccattaatgctggtcaataaggtactaattctacccaaattaatataaatgatactaagcagcaaaatgcagggtgaaggagtggtggtcagtgaactgtgtttgtagtggccacgcctggaatgtggcttttgtgattgaacgctagtattggagcatgaatatcaattaaggcaactgatcaaaccyggggcggagctcacgggtcagcaaactttttctgtaaagaggtaaatggtaaatatttcaggctttgcaggccataaagcaaaatccaggctgccccagaggaacagatatgaccttgagagaggcagctactttcaggcaggagcaattcctgagaaaggactcctctgctgtgagccattgaggggcaacatgcctggctactgggaaatgagtgccttggttctaaaggcgccattgcactccagcctggcgacagagcaagactccttctcaaaaaataaaaaataaagggaggatctgggcagtaccccacagcatcccctacagcatctatttga

SEQ ID NO: 32600 - DNA, 589 bp, Homo sapiens
gccaatacacatattttgaatatgactaatttaaccaaatgagaacccatttctaacctccattaatgctggtcaataaggtactaattctacccaaattaatataaatgatactaagcagcaaaatgcagggtgaaggagtggtggtcagtgaactgtgtttgtagtggccacgcctggaatgtggcttttgtgattgaacgctagtattggagcatgaatatcaattaaggcaactgatcaaacctggggcggagctcacgggtcagcaaactttttctgtaaagaggtaaatggtaaatatttcaggctttgcaggccataaagcaaaatccaggctgccccagaggaacagatatgaccttgagagaggcagctactttcaggcaggagcaattcctgagaaaggactcctctgctrtgagccattgaggggcaacatgcctggctactgggaaatgagtgccttggttctaaaggcgccattgcactccagcctggcgacagagcaagactccttctcaaaaaataaaaaataaagggaggatctgggcagtaccccacagcatcccctacagcatctatttga

SEQ ID NO: 32601 - DNA, 566 bp, Homo sapiens
attgaggctcagtaagaattttcttgcaacagcagctagcacatcacttgctgagtgtctggtgtcccagtatctcctctaaccctgggtagacagcacccaccaggtgcacaaaagccccccgaagtacagtgtgaggcctttgacgcacaggaagacattaaagtccactgcatacagacttagatgaaacaaactgttaccagccagaaatcgctctaggctaggtagtcataaaaaaaaccctatctgacttctaaccccattcccacccccaacwcacaccatgaccaccaccacctttacttgattactatacacttttctaaatagggattcagtccattagtactacactattttatacatttttgtttcatggcttctcaacaaacgtcaaaccagtattacttaagcccaatgctaagttccctgtcctcatgtgactctcaccatgcgtcaggcggtgcagaaatgcatgtagttcatcccattatatatggtaagtgctgtcaggttcaaagggctgatggaatagggttgggctaggtggcctctcaaggccc

SEQ ID NO: 32602 - DNA, 504 bp, Homo sapiens
ttgttgagaacaactaagtcttctttccgaaatragagtttaatacttacatattttctcatatacagttaaatgtagtaaagggtgttttgtatttaatatattatttattgtgtattccgcagtctttgtcctttccttactaaggaactagagaaagcccctaattagtatggcctaagaactgttcttgttcttgtaggttttagaaatcctcttgtcccagctctctgtgctagtattccacttctctttttgaggccttcacttctttttattttttctcttttataaaaagagacagggtcttgctgtattgcccaggctggtctcgaactcttggcctgaagggatcctcctgcctcagcctcccaaagtgtggggattacagggatgagccactgtgcccagcccaggactttagttccaatggcaggtttataggttttgtttatgggttcttcaaagtgcagtctttaagtttttgctggttgctttctacag

SEQ ID NO: 32603 - DNA, 504 bp, Homo sapiens
ttgttgagaacaactaagtcttctttccgaaatgagagtttaatacttamatattttctcatatacagttaaatgtagtaaagggtgttttgtatttaatatattatttattgtgtattccgcagtctttgtcctttccttactaaggaactagagaaagcccctaattagtatggcctaagaactgttcttgttcttgtaggttttagaaatcctcttgtcccagctctctgtgctagtattccacttctctttttgaggccttcacttctttttattttttctcttttataaaaagagacagggtcttgctgtattgcccaggctggtctcgaactcttggcctgaagggatcctcctgcctcagcctcccaaagtgtggggattacagggatgagccactgtgcccagcccaggactttagttccaatggcaggtttataggttttgtttatgggttcttcaaagtgcagtctttaagtttttgctggttgctttctacag

SEQ ID NO: 32604 - DNA, 504 bp, Homo sapiens
ttgttgagaacaactaagtcttctttccgaaatgagagtttaatacttacatattttctcatatacagttaaatgtagtaaagggtgttttgtatttaatatattatttattgtgtattccgcagtctttgtcctttccttactaaggaactagagaaagcccctarttagtatggcctaagaactgttcttgttcttgtaggttttagaaatcctcttgtcccagctctctgtgctagtattccacttctctttttgaggccttcacttctttttattttttctcttttataaaaagagacagggtcttgctgtattgcccaggctggtctcgaactcttggcctgaagggatcctcctgcctcagcctcccaaagtgtggggattacagggatgagccactgtgcccagcccaggactttagttccaatggcaggtttataggttttgtttatgggttcttcaaagtgcagtctttaagtttttgctggttgctttctacag

SEQ ID NO: 32605 - DNA, 946 bp, Homo sapiens
tccatttggacaggacacttttttttttccatgcaaacaggtgtttatcctcatgacatatgacaggaaacagctgtgcattttataacaatttgctcttaagaaaattgcgttttgcaactataccagatgatagtttgactcctactgtgttgttggccctgtgtgaggttcctaccctgaggggcccctggtctgacggaggagaagaggcatgaacaaaaataattaaaacacaagcccaaagatcagcgtcctcatgcttaacacagggtgtggctcagagagtgagtttttttaaatatagatcaatttgtgcagaattgacctttaaaaatgtgttttccagtccaagatcatattacacctctacatttatttcagtacttttcagtgatttcctgcctatttctagtgatttttttgtaatttttctcataacagtatagaacatcttctagatgtgttactttatccttgagtcattcatatttttagtgtaaatagattttttcatgtttacaaatgaataaaaaatttatttcacaacaggtatgttgctagtatatagaaacagttaattctgtatattgattttaattccagcaatatcactaagcactattattagttgtcactcttcatttaagactgcttcgtrtcttctacatacacactcctatcatgtatgaatactaaaagttttttaaaatttatttccagtccttataacatttatttgcttgcttgtttattcatttgtttgtctacttatttttggctttgctgttctatactggctggggaccttggagccaagagcagcacctcggtcctttagatgaattgacatgtgggctgggaggaggtgtagacggggagatagaagaaggatggtgtgcagctaggagctctggggtccacctgaggccccatacaggcccag

SEQ ID NO: 32606 - DNA, 946 bp, Homo sapiens
tccatttggacaggacacttttttttttccatgcaaacaggtgtttatcctcatgacatatgacaggaaacagctgtgcattttataacaatttgctcttaagaaaattgcgttttgcaactataccagatgatagtttgactcctactgtgttgttggccctgtgtgaggttcctaccctgaggggcccctggtctgacggaggagaagaggcatgaacaaaaataattaaaacacaagcccaaagatcagcgtcctcatgcttaacacagggtgtggctcagagagtgagtttttttaaatatagatcaatttgtgcagaattgacctttaaaaatgtgttttccagtccaagatcatattacacctctacatttatttcagtacttttcagtgatttcctgcctatttctagtgatttttttgtaatttttctcataacagtatagaacatcttctagatgtgttactttatccttgagtcattcatatttttagtgtaaatagattttttcatgtttacaaatgaataaaaaatttatttcacaacaggtatgttgctagtatatagaaacagttaattctgtatattgattttaattccagcaatatcactaagcactattattagttgtcactcttcatttaagactgcttcgtatcttctacatacacactcctatcatgtatgaatactaaaagttttttaaaatttatttccagtccttataacatttatttgcttgcttgtttattcatttgtttgtctacttatttttggctttgctgttctatactggctggggaccttggagccaagagcagcacctcggtcctttagatgaattgacatgtgggctgggasgaggtgtagacggggagatagaagaaggatggtgtgcagctaggagctctggggtccacctgaggccccatacaggcccag

SEQ ID NO: 32607 - DNA, 607 bp, Homo sapiens
tgtcctcattagtgtttccaagttggagtcatctccaatgcttattctgagatagaagaagcaaaaataaaacgcagaactcaccgctgtgtcattccttrggtcccaagattcctagctaatatagttttttctttccaccttttaggatcttcctaggatgtatacatctccagggcttttagctgtatgtagtggcagaatagggaaaagtattctatcttcctgggaacagaagtccttagagataaattatttagatcattttcttttctccagattaggaatctgatactgagaggtaaaatgtcctctctgaggtcacactgctagttatgggaagagcagggattcagcactacatctccatgctctgaagctgtggcacccccgccccaatatcaggggattcttacagaagctccccactaggaagcaaatgacaaataaaaacagcagctaccactattgtcagcctacagcatgttatgcatacattgcttatggtctttactacatccttgcagagagaacaaaaaatggggaatcacttgattttacagatgatgtttagactcatgtgaaaaaatatgaatgttgaccttac

SEQ ID NO: 32608 - DNA, 607 bp, Homo sapiens
tgtcctcattagtgtttccaagttggagtcatctccaatgcttattctgagatagaagaagcaaaaataaaacgcagaactcaccgctgtgtcattccttgggtcccaagattcctagctaatatagttttttctttccaccttttaggatcttcctaggatgtatacatctccagggcttttagctgtatgtagtggcagaatagggaaaagtattctatcttcctgggaacagaagtccttagagataaattatttagatmattttcttttctccagattaggaatctgatactgagaggtaaaatgtcctctctgaggtcacactgctagttatgggaagagcagggattcagcactacatctccatgctctgaagctgtggcacccccgccccaatatcaggggattcttacagaagctccccactaggaagcaaatgacaaataaaaacagcagctaccactattgtcagcctacagcatgttatgcatacattgcttatggtctttactacatccttgcagagagaacaaaaaatggggaatcacttgattttacagatgatgtttagactcatgtgaaaaaatatgaatgttgaccttac

SEQ ID NO: 32609 - DNA, 530 bp, Homo sapiens
cttggtgtacacatgcatgtattattagtctcggatatgaagggaaatataaaaacatggttataaatctggatcacaaccaacatgatacttaggtctgcagctgggttggggcgggggagttctctcaatccttggagtcattacctagatcttcaaaccaatgaaatctctttagcctgagtaaaggaaataacttcaagaagtggcaatttttataagtgaatatttttaaaatgcaccacagccactaataaacaaaataaatggggaggggtagtcctatttatcaaaaacaaagattcaacgaaaagcgatcaaaatactgtggttgatagctccgcctcctctgtcctgtgggattcagaagaacatgatggggacaatggtgcagggcccgatgaaggcttctgtccaacagaggaaacacatggagttcaggaatgccttgctctctgcctccagagtagtgtgtgtgtgtgtgtgtgtgtgtgcacactcaytgccaattatacatatcacagcacttg

SEQ ID NO: 32610 - DNA, 698 bp, Homo sapiens
ggatccaaccccctcacagccaacttaccaacttctcatggtaagacagccagagagctgggctccatgtgtcccaggaaagccttgggcggaagggattgggaaacccamacaagggacacgcgtaccccatttccaggctgtttggcacacagagacatcaaaaaacagacagccaatacatctagaacaagcctctctccgagggcggcccatggatggactgtcctcccagacctcccaggtggctcatcagtggtgggattgcggcgcagcgaccccatcaccgcacccctcagcagtgcctgggctcacctctccacccacctccccacacagccagaggcagggccctcagccgcaatcagtaacattcagtgaggacatgtgtttatcatgtgttgtgggtgggtgcagtgagttctctattcaggtaggagtggaagctggctcagggctcatccagtccaatgtcccacaggtatagaagtgccctgataaaatctcagagctggctgtccagtcaagatttgcatacctccagaaatggggctcttactacccctcacagtagcccattctactgttgggcacctccaatggtcagcattttctttccggcagcctctttcttgggctggggggtgggcggaaactgtcactccagcctaaccctcaggacaagagaggcagctggg

SEQ ID NO: 32611 - DNA, 698 bp, Homo sapiens
ggatccaaccccctcacagccaacttaccaacttctcatggtaagacagccagagagctgggctccatgtgtcccaggaaagccttgggcggaagggattgggaaacccacacaagggacacgcgtaccccatttccaggctgtttggcacacagagacatcaaaaaacagacagccaatacatctagaacaagcctctctccgagggcggcccatggatggactgkcctcccagacctcccaggtggctcatcagtggtgggattgcggcgcagcgaccccatcaccgcacccctcagcagtgcctgggctcacctctccacccacctccccacacagccagaggcagggccctcagccgcaatcagtaacattcagtgaggacatgtgtttatcatgtgttgtgggtgggtgcagtgagttctctattcaggtaggagtggaagctggctcagggctcatccagtccaatgtcccacaggtatagaagtgccctgataaaatctcagagctggctgtccagtcaagatttgcatacctccagaaatggggctcttactacccctcacagtagcccattctactgttgggcacctccaatggtcagcattttctttccggcagcctctttcttgggctggggggtgggcggaaactgtcactccagcctaaccctcaggacaagagaggcagctggg

SEQ ID NO: 32612 - DNA, 790 bp, Homo sapiens
gatgaaataattgatataaaaatggcttctttactgtgaaaaaatgcatatatatgtatatgtcctcatttgctgctcaacgtcagagagcatgggtcagctttataccacacagcaaacttgcctcatctgtttctggtatagactcaaaactccattaatgccaagtaacatctgacrgtgtatgggtggaaaggagacagtctcaggtgctgaaagaagaggcgatcaaacttaatgacaaattttgctgtgttctttatgaatatgcagaaagcttgggaaatgtccttgaatttataaaattaggtgaaaggaatgagataagtctcgacatgtctgacttttcatgcctataggcacccatttttctgcagacacatgggggctgtgcatcttcttgttctgctgggtcttagaattgtggaaatgcagcctcccacaactcacggggcattgaagagaccctgactctcttccaatgtttagggaggaaactgagctcctgagaaaggactgaagaatccaagctagagagagttagaggaacaaagagtctacaagtttgagcttcagctctcaacagggcctttcacctccctgctacctgggggctctgtcttagctgtcacagtgcagccagcactgtcaatgatctatcaattggcagctctcttatgttttggtctggagccactttagatgtgatgaacaagattaattttgaaaaataatgctgtgttccaataaaaatggctcatgtactgtcaagaccaattggagtcctttt

SEQ ID NO: 32613 - DNA, 790 bp, Homo sapiens
gatgaaataattgatataaaaatggcttctttactgtgaaaaaatgcatatatatgtatatgtcctcatttgctgctcaacgtcagagagcatgggtcagctttataccacacagcaaacttgcctcatctgtttctggtatagactcaaaactccattaatgccaagtaacatctgacggtgtatgggtggaaaggagacagtctcaggtgctgaaagaagaggcgatcaaacttaatgacaaattttgctgtgttctttatgaatatgcagaaarcttgggaaatgtccttgaatttataaaattaggtgaaaggaatgagataagtctcgacatgtctgacttttcatgcctataggcacccatttttctgcagacacatgggggctgtgcatcttcttgttctgctgggtcttagaattgtggaaatgcagcctcccacaactcacggggcattgaagagaccctgactctcttccaatgtttagggaggaaactgagctcctgagaaaggactgaagaatccaagctagagagagttagaggaacaaagagtctacaagtttgagcttcagctctcaacagggcctttcacctccctgctacctgggggctctgtcttagctgtcacagtgcagccagcactgtcaatgatctatcaattggcagctctcttatgttttggtctggagccactttagatgtgatgaacaagattaattttgaaaaataatgctgtgttccaataaaaatggctcatgtactgtcaagaccaattggagtcctttt

SEQ ID NO: 32614 - DNA, 790 bp, Homo sapiens
gatgaaataattgatataaaaatggcttctttactgtgaaaaaatgcatatatatgtatatgtcctcatttgctgctcaacgtcagagagcatgggtcagctttataccacacagcaaacttgcctcatctgtttctggtatagactcaaaactccattaatgccaagtaacatctgacggtgtatgggtggaaaggagacagtctcaggtgctgaaagaagaggcgatcaaacttaatgacaaattttgctgtgttctttatgaatatgcagaaagcttgggaaatgtccttgaatttataaaattaggtgaaaggaatgagataagtctcgacmtgtctgacttttcatgcctataggcacccatttttctgcagacacatgggggctgtgcatcttcttgttctgctgggtcttagaattgtggaaatgcagcctcccacaactcacggggcattgaagagaccctgactctcttccaatgtttagggaggaaactgagctcctgagaaaggactgaagaatccaagctagagagagttagaggaacaaagagtctacaagtttgagcttcagctctcaacagggcctttcacctccctgctacctgggggctctgtcttagctgtcacagtgcagccagcactgtcaatgatctatcaattggcagctctcttatgttttggtctggagccactttagatgtgatgaacaagattaattttgaaaaataatgctgtgttccaataaaaatggctcatgtactgtcaagaccaattggagtcctttt

SEQ ID NO: 32615 - DNA, 790 bp, Homo sapiens
gatgaaataattgatataaaaatggcttctttactgtgaaaaaatgcatatatatgtatatgtcctcatttgctgctcaacgtcagagagcatgggtcagctttataccacacagcaaacttgcctcatctgtttctggtatagactcaaaactccattaatgccaagtaacatctgacggtgtatgggtggaaaggagacagtctcaggtgctgaaagaagaggcgatcaaacttaatgacaaattttgctgtgttctttatgaatatgcagaaagcttgggaaatgtccttgaatttataaaattaggtgaaaggaatgagataagtctcgacatgtctgacttttcatgcctataggcacccatttttctgcasacacatgggggctgtgcatcttcttgttctgctgggtcttagaattgtggaaatgcagcctcccacaactcacggggcattgaagagaccctgactctcttccaatgtttagggaggaaactgagctcctgagaaaggactgaagaatccaagctagagagagttagaggaacaaagagtctacaagtttgagcttcagctctcaacagggcctttcacctccctgctacctgggggctctgtcttagctgtcacagtgcagccagcactgtcaatgatctatcaattggcagctctcttatgttttggtctggagccactttagatgtgatgaacaagattaattttgaaaaataatgctgtgttccaataaaaatggctcatgtactgtcaagaccaattggagtcctttt

SEQ ID NO: 32616 - DNA, 790 bp, Homo sapiens
gatgaaataattgatataaaaatggcttctttactgtgaaaaaatgcatatatatgtatatgtcctcatttgctgctcaacgtcagagagcatgggtcagctttataccacacagcaaacttgcctcatctgtttctggtatagactcaaaactccattaatgccaagtaacatctgacggtgtatgggtggaaaggagacagtctcaggtgctgaaagaagaggcgatcaaacttaatgacaaattttgctgtgttctttatgaatatgcagaaagcttgggaaatgtccttgaatttataaaattaggtgaaaggaatgagataagtctcgacatgtctgacttttcatgcctataggcacccatttttctgcagacacatgggggctgtgcatcttcttgttctgctgggtcttagaattgtggaaatgcagcctcccacaactcacggggcattgaagagaccctgactctcttccaatgtttagggaggaaactgagctcctgagaaaggactgaagaatccaagctagagagagttagaggaacaaagagtctacaagtttgagcttcagctctcaacagggcctttcacctccctgctacctgggggctctgtcttagctgtcacagtgcagccagcactgtcaatgatctatcaattggcagctctcttatgttttggtctggagccmctttagatgtgatgaacaagattaattttgaaaaataatgctgtgttccaataaaaatggctcatgtactgtcaagaccaattggagtcctttt

SEQ ID NO: 32617 - DNA, 590 bp, Homo sapiens
acatagggcctgaggtagaggaagtaacttgccccttgaaagccacacaacagcaagacagaaccagggctggccctggaagtcaggttcccagattcgtggtgtggcccccacgatactgctctgcacgtcatatctgagcatgagacgactcagaaatctttgctgattcaacctttctgcctctgcatgtaaatgccaccatgccttcccacattgcctctctcccacgtgaaacatctggtttgaggttcaccaataatagcttaaaaccacaagtctaagtcagtgggacccagaattgtcaaaagaatcacccaaaaatccagggaaaaggaaacagaygacttgggtttaacatactttaatcgtgctctctagatgacggttttaaataagtatgccatagaaatagataacatggcagccatgattctctttttatcgaacaattaccctttaaattctcaggcccctcagtaggagcctacctttcaaacttaagggctcttctctccgttattagtgacgtgcttttcccattcctgtatgttaattattttataaaaattgaagggatttaacattga

SEQ ID NO: 32618 - DNA, 590 bp, Homo sapiens
acatagggcctgaggtagaggaagtaacttgccccttgaaagccacacaacagcaagacagaaccagggctggccctggaagtcaggttcccagattcgtggtgtggcccccacgatactgctctgcacgtcatatctgagcatgagacgactcagaaatctttgctgattcaacctttctgcctctgcatgtaaatgccaccatgccttcccacattgcctctctcccacgtgaaacatctggtttgaggttcaccaataatagcttaaaaccacaagtctaagtcagtgggacccagaattgtcaaaagaatcacccaaaaatccagggaaaaggaaacagatgacttgggtttaacatactttaatcgtgctctctagatgacggttttaaataagtatgccatagaaatagataacatggcagccatgattctctttttatcgaacaattaccctttaaattctcaggcccctcagtaggagcctacctttcaaacttaagggctcttctctccgttattagtgaygtgcttttcccattcctgtatgttaattattttataaaaattgaagggatttaacattga

SEQ ID NO: 32619 - DNA, 1011 bp, Homo sapiens
acattccatgagcttagtaatgacttaactctcccatgtaagaaaactgagtctatgttggtatatatttttccctctgagatgaggtcttgctatcttgcccaggttggagtgctgtggctattcacagccaaatcataatgcactacagccttgaattcctgggctcaaatggtcctcctgcctcagcctctggcgtagcttggactatagatgtgtgccaccacaccgagctgtgttggtgtatttgaaatgtatttttctgaatratacatttggtggctttcaactgtaaagctaaatatatggttataatctagtaatgataatggaggtttcataaccaagttagaaaagagatgctattcaccctaccttggaattctaggaagattcagggaagttgtaatatctcctagcagtattactagagtgcagacgtttaccaccctggtgtgccagataccattctagtgctttcccatgctactccctttaagtgctcatcaaaacttgggagtagttgatatttcttccaattacagagaagggaagtgaagttcagaaagtcagagtaatgtttccatcttacgcagctgtgagttttagagtcaagtttcaaacccaggtttgggtggctccagtgccctattattttccataacactaccctgcctcccacgagtttcctgaaatagaattagaaaactatgtgactcatagtcctcctggccacaaagtcatttcaaaaatctcaggcttgaagatgactttgaatgacaacaggtcaggcaatcttcctcctcctcatctcctccccgatggtggagtcacctctgtggtgtctaccaagcaatttgtactccacttgagcacgtccaggcacagagagctgactacatctggtaatggccaatagatgggagaggaagagaggtcctttgattccacctcttactatgtgataattggtgttgaggcccaaagaaaggctaagagttgtccaggacc

SEQ ID NO: 32620 - DNA, 1011 bp, Homo sapiens
acattccatgagcttagtaatgacttaactctcccatgtaagaaaactgagtctatgttggtatatatttttccctctgagatgaggtcttgctatcttgcccaggttggagtgctgtggctattcacagccaaatcataatgcactacagccttgaattcctgggctcaaatggtcctcctgcctcagcctctggcgtagcttggactatagatgtgtgccaccacaccgagctgtgttggtgtatttgaaatgtatttttctgaatgatacatttggtggctttcaactgtaaagctaaatatatggttataatctagtaatgataatggaggtttcataaccaagttagaaaagagatgctattcaccctaccttggaattctaggaagattcagggaagttgtaatatctcctagcagtattactagagtgcagacgtttaccaccctggtgtgccagataccattctagtgctttcccatgctactccctttaagtgctcatcaaaacttgggagtagttgatatttcttccaattacagagaagggaagtgaagttcagaaagtcagagtaatgtttccatcttacgcagctgtgagttttagagtcaagtttcaaacccaggtttgggtggctccagtgccctattattttccataacactaccctgcctcccaygagtttcctgaaatagaattagaaaactatgtgactcatagtcctcctggccacaaagtcatttcaaaaatctcaggcttgaagatgactttgaatgacaacaggtcaggcaatcttcctcctcctcatctcctccccgatggtggagtcacctctgtggtgtctaccaagcaatttgtactccacttgagcacgtccaggcacagagagctgactacatctggtaatggccaatagatgggagaggaagagaggtcctttgattccacctcttactatgtgataattggtgttgaggcccaaagaaaggctaagagttgtccaggacc

SEQ ID NO: 32621 - DNA, 1930 bp, Homo sapiens
ccagtccttatccattcccaattctaccctgtgtatgtgtgtttttaatcatcactcacttatttaacaaatatttattgagtgccttctctgtcaggtacttttctatgtagtgggaatacactattgaatgaggcaggaatagtcactgtgcacgcgggagttacatactctatattgtatataataatacagacaaataggctagggagagagggagctagataattatatatacagaaacctaatgatggctatcatttaccaagaccaaaagcaggcattatgccagaggtttttaattcaatcttcaaaataatgttacaagataagacttattgttcacatttttatcattaacaaaatggtacacagcaaaaatgagtaatttactaggctcaaacaacaaggctaaatttataattttttgttactcatctgccatgcacattgcctgtcatacatgaaaaatcctgttcctctttggattaactataattcccataccaaatgatgttagaataaactatcctttattaattttattaatttagctaaatcccttagaatgctttggctaaatacaaagtgcttagaacctcatttattaatcaatttttcaaaaataaaacattttctgtatctgtagatactacatgtatatcattggtgttactattacccagacaattttaacttttcccatatattattgtagttatccttaccttctttaatttatttttaaaaattaatgcattgttattatagaaattttgaaaagaatccaaaattagtaaagtgtagaaaaaaattatccacagtctaacaacttgtaagcaacaactagaggcttagttttccttgttttttcctccatactgtattttcacaaaaataagattatatgctacataccatcttgtattgtactctttaagattattattataccacccaattttatatgttattataactttgctaaccttattttctatgtcataattctagtgtataaaatatgccataattttattagtcatyctttccctgttggacacttagattggatgactaatagatctattttaacttcttcctatgaggacacaaagtatttttatttatttattcaatcttaatttatttttgcaatggcaaattaaagaagaaaagacaaattgtgttgagacatgcctaggtttttcactgtccacatgtctaaatctaaactcatcagcttattccagaaaaaaaaaaaaaaaaaaaaaaaaaaaaaccacattgtttctcttacacctcctcccttggttaaggttccctatttttcagactgccctggctcagaaaagcccagtcagcctgactttttgccccttgaacattaaaatctaatcagtctccaaggccattcagcccttctttcagagtacagtaacgttacatcccctgctcctccgattttccgagtgagtatctaaagtcgggctcctttatctcatgttttctttacttatgagccagggtcatgactgaaataactctatttgcatgtggtcaatgctggatgagtactggacacatgcttgctgaataagcatcacctttaccttttattgattttaaacatgaatactaccccatgcctcctctaaaggcttgttgagcacaaaaatcatgaactaataaaaaaaaacagctaataatttttaaaagcctactatgtaccaggaactattctgagtgttgcacatagtttttctttagtgctttaactgccctacctataaagatcaccatttgtttcataagtgaggatacagaaaaacagtatgatttacacaaagttccataataactgtgggagctggacttttaactgcaggttatctggctaagcatagctctgtcaccatgcctggcccca

SEQ ID NO: 32622 - DNA, 1287 bp, Homo sapiens
tgcatatttccaatttctaaaagtcatgattatgacctaattttgcataacaggaatttgaggagcagaggaaaggggaaaacattaacacagtttctaatacaaatgccaagaggctccaactagagaattattttcaccagagtttctaacccttgacttctaggcctttctactctaggagaagtgacaagattatccccagtctgaaaactaaggaagaaaatcctgtttagctgagaggagaggagaggctggcaggggggctgatgcaggaggtgatagggctcccggtgataagaggtgagaagaacagtctctgtgtgcctagagaagagattaccagaagtctgctatctgtttgttcgcggatgtcggacaggcaggatcggtgatggcaggtcttgggggaaggattatcaggagctaaaagctgtcttcaccttggctgctaagaactcatctcggatcttcttagaattccaaatcggacttttctcctagcagtggctacatccttaacctcaaaaatacccgtattagcagatctacctccatgaaatagacaattcttgacaaactagtcccagcctrtcatgtcctgcttctccctgcttccctctcccatcagtgcacttgactctgttctgtgtttcctggttggagcagtcatggcgcttcatgtttctaggcctgtgcttaatgctattccctctgcctggagggcctttcttccatttggcttgctggaatctctgccttactcctaaactcctgaatcattttccttcctagctccatagaaataattgctctcatcttgttcttcatcagaagaattgatgctggggatatgcttccactacagcaatatttcactgcagcataggttgtgacgttgtctttcccatgagtctggactccttgagggcaagatctgtaccttaaaatgatccttataattttaggttctcgattaagtctctgacaacatggatagcaataaatatgtttttactgaggcaaagaaaggagaacacatgaaaaaaaagggggagaaggaaaaaagagagagaggaaaagataaatgccaataaaatgtttactagattgaatttaagcggcagtttatgttaaaagtgtaagtacaagtatgtttggatttggtgtctaagacctggagctgtatgaacgtgtgaaaaatctctcaaactgaagattaatttaactctctggaacatggccaagaagagtttgaaggaagtaaaaaaaggcctatgaagaaca

SEQ ID NO: 32623 - DNA, 535 bp, Homo sapiens
tttttttttttttttttttttgagacagagtcttgctctgtcgcccaggctggagtgcaatggtgcactccattgcaacctctgccccccaggttcaagcaattctcctgcgtcaccctcccgagtagctgggattacaggtgcctgccaccaagcccagctaatttttgtatttttagtagaggcggggtttcaccatgttggccagcctggtctcgaactcctgacctcgggtgatccacccacctcggcttcccaaagtgctgggattataggtgtgagccactgcaccyggcctctttttttttgttttgttttgaaatgctttaaaagggaaaaatcaaactatacatgcaatatatgaaatgaaatgaaagttactttattttcttgtttttcctcatctgtttctccttgttttcttaacattcatgagcaggttttcatcttatgttgaatacatcctcacgctgctgtaggaataactttttgtattacaccacttctggaacactgtgccactgttcaaaaaatt

SEQ ID NO: 32624 - DNA, 535 bp, Homo sapiens
tttttttttttttttttttttgagacagagtcttgctctgtcgcccaggctggagtgcaatggtgcactccattgcaacctctgccccccaggttcaagcaattctcctgcgtcaccctcccgagtagctgggattacaggtgcctgccaccaagcccagctaatttttgtatttttagtagaggcggggtttcaccatgttggccagcctggtctcgaactcctgacctcgggtgatccacccacctcggcttcccaaagtgctgggattataggtgtgagccactgcacccggcctytttttttttgttttgttttgaaatgctttaaaagggaaaaatcaaactatacatgcaatatatgaaatgaaatgaaagttactttattttcttgtttttcctcatctgtttctccttgttttcttaacattcatgagcaggttttcatcttatgttgaatacatcctcacgctgctgtaggaataactttttgtattacaccacttctggaacactgtgccactgttcaaaaaatt

SEQ ID NO: 32625 - DNA, 630 bp, Homo sapiens
tttccactcctacagaagccttgcccaatcatcttaaatatgaccttgtacaaactaattgagtatccagaagaaccggagaatctgactccttgagactctatatatttcgttcatcaagggttaatggaaatatcttggaagaagaactgagtagaattcccaccatggtagaacttcattattagatattaatgctctacagacccagtgtgaattgactgattttatgatttagcaattataatgagaacactcaaaattatatcccaagagttactctacttcgctgagtacagttagatgatgtagttgagttttaattgcagtgaatttggaatagggcagtatatttgttagacatgaaatttcacttgtgggcaaattgcctctgtaataggatcctgccttcctcattcggaatatccctcctttctcttccagccttcgctgaccctctgttgcaggggatcccaattagactgggaaagctactaaaatgagcaaaagggtcagagaaaatgagggagaggtgagacaaaaagggaatgagaataaaagagaggggagacgagagagcacttcccatacttcacccagaggggatcttttgccagacaytgaatttca

SEQ ID NO: 32626 - DNA, 616 bp, Homo sapiens
gaaatttcctggatactaaatragagaatccatggaaagtgcatgccacacacaggcattagaaacattagctcttatcagccggacgtggtggctcacacctgcaggctcttttttggttccatatgaacttgaaagtagttttttccaattctgtgaagaaagtcattggtagcttgatggggatggcattgaatctataaattactttgggcagtatggcattttcacgatattgattcttcctatccatgagcatggaatgttcttccatttgtttgtgtcctcttttatttccttgagcagtggtttgtaattctccttgaagaggtcctacacatcccttgtaagttggattcctaggtattttattctctttgaagcaattgtgaatgggagttcactcatgatttggctctctgtttgtctgttattggtgtataggaacgcttgtgatttttgcacattgattttgtatcctgagactttgctgaagttgcttatcagcttaaggagattttgggctgagatgatggggttttctaaatacaaaatcatgtcatctgcaaacagggacaatttgacttcctcttttcctaattgaataccctttatt

SEQ ID NO: 32627 - DNA, 616 bp, Homo sapiens
gaaatttcctggatactaaatgagagaatccatggaaagtgcatgccacacacaggcattagaaacattagctcttatcagccggacgtggtggctcacacctgcaggctcttttttggttccatatgaacttgaaagtagttttttccaattctgtgaagaaagtcattggtagcttgatggggatggcattgaatctataaattactttgggcagtatggcaytttcacgatattgattcttcctatccatgagcatggaatgttcttccatttgtttgtgtcctcttttatttccttgagcagtggtttgtaattctccttgaagaggtcctacacatcccttgtaagttggattcctaggtattttattctctttgaagcaattgtgaatgggagttcactcatgatttggctctctgtttgtctgttattggtgtataggaacgcttgtgatttttgcacattgattttgtatcctgagactttgctgaagttgcttatcagcttaaggagattttgggctgagatgatggggttttctaaatacaaaatcatgtcatctgcaaacagggacaatttgacttcctcttttcctaattgaataccctttatt

SEQ ID NO: 32628 - DNA, 1297 bp, Homo sapiens
atccgctggagtcttggtctcagaattctcagccttcagaactgtgagcaataagtttctactgtttataaatgactagtctaaggtawttttgttagaggagccctaatggaagaagatagagctatttggttgaagtctcttgacctagaatgtagccataaaagagccacaaaaatctctttaggtcaaattcatgtattctgccccatgtggtttgccatcccaagcacctagctctaccctgtaagtcattatttatgtgcccatcttctctattaacatgggttctcattttgtttgccctgtctttccaggaaaggataagcttcttccttaagtctcgggctcagagtagagctccatgcacagagagggctcagggaatgctagaagcctatgtttacaacaaacttggtcttgcaacttcttcttctctacagcttatcccaggtcccttccgcagtggaagaccctttcgggctttacttgaagttttcactaaaatgaaaagcaaatgtggtttattacaattggtctttgtttaggcaaaatgaagtatattttaccctaattaaaatgttaaaatggaaaatttggagtcaaccttagacacttttaaaataagggactgtgcctgtccatgtgcctgtgtgtgtgtgtgtgtgtgtgcttggtcctcacttaatgtctctagttgctcatatgttcttgaactccaaataaatataagggaaattatttgacttggtctgcatatggagttgggattgttcaatctggagacatgaagtctaaggggcaatagcctgtggaaagtcattgttaaataataactttaaaaagaaaatcaaaaacaggcagggcacggatggctcacacctgtaatcccagcactctgggaggccaaggtgggcagatcatttcaggacagtttggtcaacatggcgccgcatctctactaacactacaaaaaaaattagccaggcatagtggtacatacctgtaatcccagctactagggaggctgaggcacaagaatcacttgaacctgggaggcggaggttgcagtgagccaatatcatgccactgcactccagtctgggcaacagagacagagtctgtctaaaaaaaagaaatgaaacaaaagaaaaacggcttagattgctgcacgagagatttttatattaacgaaaatcatttaatgttggattaggttacatcaagaagacttagaatattctccaggggtcactaaagtgaatcttgtaggttactgcgatgtttggcactggtt

SEQ ID NO: 32629 - DNA, 1297 bp, Homo sapiens
atccgctggagtcttggtctcagaattctcagccttcagaactgtgagcaataagtttctactgtttataaatgactagtctaaggtatttttgttagaggagccctaatggaagaagatagagctatttggttgaagtctcttgacctagaatgtagccataaaagagccacaaaaatctctttaggtcaaattcatgtattctgccccatgtggtttgccatcccaagcacctagctctaccctgtaagtcattatttatgtgcccatcttctctattaacatgggttctcattttgtttgccctgtctttccaggaaaggataagcttcttccttaagtctcgggctcagagtagagctccatgcacagagagggctcagggaatgctagaagcctatgtttacaacaaacwtggtcttgcaacttcttcttctctacagcttatcccaggtcccttccgcagtggaagaccctttcgggctttacttgaagttttcactaaaatgaaaagcaaatgtggtttattacaattggtctttgtttaggcaaaatgaagtatattttaccctaattaaaatgttaaaatggaaaatttggagtcaaccttagacacttttaaaataagggactgtgcctgtccatgtgcctgtgtgtgtgtgtgtgtgtgtgcttggtcctcacttaatgtctctagttgctcatatgttcttgaactccaaataaatataagggaaattatttgacttggtctgcatatggagttgggattgttcaatctggagacatgaagtctaaggggcaatagcctgtggaaagtcattgttaaataataactttaaaaagaaaatcaaaaacaggcagggcacggatggctcacacctgtaatcccagcactctgggaggccaaggtgggcagatcatttcaggacagtttggtcaacatggcgccgcatctctactaacactacaaaaaaaattagccaggcatagtggtacatacctgtaatcccagctactagggaggctgaggcacaagaatcacttgaacctgggaggcggaggttgcagtgagccaatatcatgccactgcactccagtctgggcaacagagacagagtctgtctaaaaaaaagaaatgaaacaaaagaaaaacggcttagattgctgcacgagagatttttatattaacgaaaatcatttaatgttggattaggttacatcaagaagacttagaatattctccaggggtcactaaagtgaatcttgtaggttactgcgatgtttggcactggtt

SEQ ID NO: 32630 - DNA, 1297 bp, Homo sapiens
atccgctggagtcttggtctcagaattctcagccttcagaactgtgagcaataagtttctactgtttataaatgactagtctaaggtatttttgttagaggagccctaatggaagaagatagagctatttggttgaagtctcttgacctagaatgtagccataaaagagccacaaaaatctctttaggtcaaattcatgtattctgccccatgtggtttgccatcccaagcacctagctctaccctgtaagtcattatttatgtgcccatcttctctattaacatgggttctcattttgtttgccctgtctttccaggaaaggataagcttcttccttaagtctcgggctcagagtagagctccatgcacagagagggctcagggaatgctagaagcctatgtttacaacaaacttggtcttgcaacttcttcttctctacagcttatcccaggtcccttccgcagtggaagaccctttcgggctttacttgaagttttcactaaaatgaaaagcaaatgtggtttattacaattggtctttgtttaggcaaaatgaagtatattttaccctaattaaaatgttaaaatggaaaatttggagtcaaccttagacacttttaaaataagggactgtgcctgtccatgtgcctgtgtgtgtgtgtgtgtgtgtgcttggtcctcacttaatgtctctagttgctcatatgttcttgaactccaaataaatataagggaaattatttgacttggtctgcatatggagttgggattgttcaatctggagacatgaagtctaaggggcaatagcctgtggaaagtcattgttaaataataactttaaaaagaaaatcaaaaacaggcagggcacggatggctcacacctgtaatcccagcactctgggaggccaaggtgggcagatcatttcaggacagtttggtcaacatggcgccgcatctctactaacastacaaaaaaaattagccaggcatagtggtacatacctgtaatcccagctactagggaggctgaggcacaagaatcacttgaacctgggaggcggaggttgcagtgagccaatatcatgccactgcactccagtctgggcaacagagacagagtctgtctaaaaaaaagaaatgaaacaaaagaaaaacggcttagattgctgcacgagagatttttatattaacgaaaatcatttaatgttggattaggttacatcaagaagacttagaatattctccaggggtcactaaagtgaatcttgtaggttactgcgatgtttggcactggtt

SEQ ID NO: 32631 - DNA, 734 bp, Homo sapiens
actgcctaacagaaaaactagaattcctttgttaatattttagtctgatctccaacccatccacaaaatcctcttcaaaattgtaagaaatctgggaaacaaactgaaacaaacacatatcagaaggtctatgccatgattcacaacctatttaaacayaatgcacatttttactgtaagaaacacattataacactctagttgttattctgaaatgaattaataaatgataaaaagctacttacatatgaatttttaattcagtatagtggccttactgcataataaacgtgaaataaaaggaaattcatttataatcaaataatatgtagatcattttaatgtttgagcatgagtacactaaaacatataatgaaatagtcagatgattttacttatgtgtaatctccccagtgctatagctacaagtacagtctgttacaggcatgttgcattggccatttaaaattcgtgaattagaatgtcattgttttcataatttgtcaaaatggtaatcaaattttcatagtatacttagcaaaacaaagtacctcttttctcaatttatacaacatttgcactcctacaaatgtacataaaaacaatacaaaaactatttcttatgttgatttttactatggagctgaattttcacctcaaacataaatatatttctcacctttgcagaaataactgtagagaagttatctctacagttaaagaagcaagatttt

SEQ ID NO: 32632 - DNA, 1216 bp, Homo sapiens
aaccccatccctggcagcccctttaccaggaaatgccttcccaaatcaaccaacattctctggctatttgaatggtcagtatgttttcagtagtttctcaggtttcggagctagatgtaaatgccttcctgccaccataattggagctgccaagtagttacagcaccagctttggttatgcaaagctcagcttttcatctctgcacttggttctttagtgtcattatctcatctggtcctcagaacagctcagtttcataatcctttattcttaattctgaaatcctttttttttttttttttttgagacggagtctcactctgtcgcccaggctggagtgcagtggcacgatctcaactcactgcaagctccgcctcccgggttcacaccattctcctgcctcagcctcctgagtagctgggactacaggcacgcgccaccacgcctggcttattttttgtatttttagtagagatggggtttcaccgtgttagccaggatggtctcgatctcctgactgtgatccacccacctcagcctcccaaagtgctgggattacaggcatgagccactgaaacctttttttttttwaaaaaaagccctctctatgcaaggcaagacaaatttttgttttgtttgtccctggatgaaaaactttatctgacctgaatttattggggttctttacttattctgcttactgtgagtagccatctgttttgaggtagaaatgtgaatgtgttttattatagggtgcagcccagaccacactggaggtatcaatgggcggtacatagatcatattaccccaaatctgaaaatgttctgaatgctgaaatacttctctacttgagggctcagataaaggagtgtggagctgtagtaaagcagaccttgctgctttccagatttgaccaatgaggagactcaatgaggataagtcatcacccacctaacatcatagccctaatgtactgaaggatcaagactggaactcagatcctctgatgctatctgggcctttatccactcattataaccaactaatgtgcatgcttactgcaggctagaggggaagtagagattcttttaccatagcctgttaagtacattagattttagaaaaatcaatagattcctggaaaataatacagtttcttagaggtcatttccaaaatatagtaactactacacacctaaaaaatagctaaagta

SEQ ID NO: 32633 - DNA, 655 bp, Homo sapiens
atggctcactgcagccttgacctcctgggctcaagctatcctcccgcctcagcctctcgagtagctgggatcacagctactgtgcatgccaccacaccgggctaatttttttgtattttttttgtggagacagggcctcactatgttgcgccggctggtctcaaactcctgagctcaagcaatctgcctgcctcggccttccaaagttcctgacagttttgagcaggtggctatgtacttgttttcctagaagtttaaaagtaaggaaatatattcttttcaaaactatttcgatgttcgatgttcaagtattggctatataatgttaaggaaataaagatttttaaaaatgagttcattttgcactttgataagaaagatggattgggtcatttccatccatattaaaatagttggttctggtttttgatttataacttaatttggtttgattcttaacagtacaaacgttaaattatgtgttcattgaacccagttctccatacccacatgtagttttttatcattatatttaaaaggacataatagctccctaagaaagaaactgaaaggagtcaactaacttaacagactgagttgtttaaaataagaaatatgtatatatttttaaaaaatttaattcaaaraacatgta

SEQ ID NO: 32634 - DNA, 1320 bp, Homo sapiens
ggtcaaaaggggtgagccctgtggatttctttgactttcaccagtgagggtcaatgagattgttaagaaagcaaaacaacacagatgttgtcttgagataataatgtcttctatgggggctggaaggggaagactacttccttctactgcagagttgctccatgctgctttcttccacagacctactttgtatgaaatgctcccatttctcaggtgttttccttccttgatccccttctaacaatggcctcctgaggttccacattttcttttatgccagtttattcattttctcattcattaatccaaaagatatactgagtgctagaatctaatgagaaagagcagagctattgaaaatttgaagcaaggccaggctcagtggctcatgcctgtgatcatagcactttgggaggccgaggaaggcggatcacctgaggtcaggaattcgagaccagcctgaccatggagaaaccccatctctactaaaaatataaaaaattatctgggcgtggtgacacctgcctgtaatcccagctactcaggaggctaaggcaggagaatcgcttgaacccaggaggcggaggttgtggtgagccgaratggcgccattgcactcaacgctgggcaacaagaacgaaactccatctcaaaaacagaaagaaagaaagaaaatttgaagcaaaagccttctgaattgcaaagaccatgaggaggaaatagcttggcatgttctcggaacagaaataaggactttgaagctagaaatgagggtgtattaggagatgacatcagacagcagggagggtccagaccttggtaggaagtttagaatttattctaagtgcaacaggaagccatgggaggagggttttaaacagaagacaggatctgatttatctatcattttaattttgtaatttagaaaattttaagaaaagtgcatgttagcaaagtttggtgcttgatacacggacaatttggataatggctttagattgaagaaaggttaggaaagagttgctatttaaagaaggggggtgaccccaggatttatttcacacccacatgtttgcttttctctgttcttagctcagtccatatgaccaactgctagtttaggagagaagggtttagcagggattcccctcttccctccaattctcttagaccctgttttcttattaaaagatttgcaggatcccatctcggtcagtgatgtcagcaacccagccattatggtgagctgatgccatgctcatgaagaaaatgaagatcagctgattgacttccaagtatttctgccctaagccacgccaa

SEQ ID NO: 32635 - DNA, 1198 bp, Homo sapiens
tttatagctcactgactttttgcaagtgaaacacaccctcaaatcagcatctagaaagagaacactttcaagattccaggaaccctcttttgctcccttctgtactgtattagtctgttctcacattgctataaataactacctgagactgagtaatttatgaagaaaggagatttaattgactcacagttcatttgagggctactgtagtgaagcatgactgggaggtacgcaggaaacttaaaatcatggtggaaggcaaaggggaagcaggcaccttctttacaaggcagcaagacagagagagatagaagggagaagtgccacacattttatttatttattggagacattgtctcactctgccgcccaggctggaatrcagtggcactatctcagctcattgcaacagccacctcttgggttccagcgattcttgcctcagccttccaagtagctgggatgacaggcgtgcaccaccatgcccagctaatttttgtattttctgtagagacggggttccgccatgttgcccaggcttgtctgcaattcctgagctcaagtaatctgctcactttggcctcccaagtgtcacacactgttaaaccatctgatcttgtgagaactcactatcacaagaacagcacaggggaaattcatccccatgatccagtcacctcccaccaggctcctccttcgattggacatgagatttgggtggggacacaaatccaaaccatattacttacttaccctgaaggttatttttattaataagtttttccaagactttcatttgaggactactatagtgaacaaatcagataagtaagtttagtttcctttaatgactttttaaccaaactgttttatcaatttcgtaatagcagacatcttttttgtcatcagttcagttatagagttgataatattgaacaactatggtatttttaaaagtgcttttaagattctctgtataaaattataaaatattcttgaattggaggttttagttgtgaggttatagtttggtataacatttatttgcccttcagctagcctaagatggaagtgtatatttgtgaagaatttaagaaagtatatgtagaaaacaatcgaaaatgtggaagtatgtttttattctccacaaatgcagactttacttggctacagttttaaaagcaagtggccagttata

SEQ ID NO: 32636 - DNA, 766 bp, Homo sapiens
cactagatccctgaaataatctatgtgcatttaggattttagttaatttactatcttttttcccattactttgtctagtcagagtatttggaacagcccaaaatagaatatgtgtttacaagagaattttctgtcacttgaatcacttgaacacctagaatttgagaaactataaacagtgattagcatctctttaagactgcatatttatattcatcattagtaaaaaaagatgtttacatcatgcatatagtactgggaatgcctgtgtctaggtgaaattacgcacatctttattaaaatgcaactgtcttaaaaccaatttggtatcaaaacacatctattttgacgtgaataaaatgggtattagagcaytttatattcctgatatattcctgctaataaagtatggctaagcatttaataacattttgacatggatacgttttatacacttccagagtgttatttttagttacaatctctgaagctctgaaaactcaaagaagagggttatgatggcacaatgtgaggttgaatgtgttgttagatataccttggatactggagaaaataagactgggttagcaaagacaaaacttcacaagtggttaaagcagagtggctataatattggtctttctaacattttactacaacttttctcttttattataataggttatttggatttagtaaggatatcataactcaggcagggaagaaggtgaattaaaaacagctttaaccttaagagatagcatta

SEQ ID NO: 32637 - DNA, 614 bp, Homo sapiens
tgttttctgaggcctgcttctgagccctgaggcaccccaatattagaacaaaaggctataacaagtgttatgggagttatgttgcaggaactgtggatgaaaacatatacgtattacagtaagtacgatgaataaaaattatttgcataatatagctaacataaaaaaaagagatatagtccttaaatatgctctgtctttgtgtttccaaaaattccatgtataagagttaggactttgttttccttgtaaacttaacaaaaaatttatccgttaggaatgtgtggcctgctttatttagcacctccaattcttcttcttattttttttttttgcttttactttgtaaatattttaagacagcctacagcagtagttggattagatggaagaggcaattaaaaatgaattatattgcaaggtgatttttcgtttatcatagctaaracaattacaatgttccagtttctttgtagttacaagtggttgtccttattgtgttttctctctgcattttccggggggtggaaataagtaattatattaatatttagacatgatttagatatattgttatctataaaacagggaaaacagagcaaaactggctcata

SEQ ID NO: 32638 - DNA, 591 bp, Homo sapiens
gtggtactttctcaattatcctataagcattttaaaacttaaatttctctaagactattgataactagtgatcaaccagattttcaaaatcttcacataaaacatttctttatcaaacatatctgtgggcattcatatttttagacaattgacttattctaacatctcagctgcttcagttcactcctttagtactttgatatgtacaaagcaataaacacttttattgactgtattatcaacctaggatgatgtctactacagaatatcttttacgcaagttactccttttaaaattgaatcattttttacaactctataagtatttttaagtgaccagttattcttaaaaaatgtaatgcaaaaacatgttagaaggtaaagacccataaaaayggtacttcatcatttaagcacagtagaaaggaattatggaagtaactacaaaccagtatctgttttaaatcagcaaaagcctccaactttcaaacaaactgtatcttcaagcaagttattattccttctcccagtgtacagatataaaaggaaatagtgtgagtaagtgtgagaaggagcattggttaaaataaa

SEQ ID NO: 32639 - DNA, 611 bp, Homo sapiens
tttcaagtgctcattaggccacatatggctagcagcaattgtattaaccagtgtagatatagataatttctatcattggagaaagttctattagaatgtgctacactagagaaaccagaaaaaaaagagagcagttcctctattagatttggaaaaaaaaaaaatttagtagtttyacaatatggttaggaaaagcaactatctaaggctaaacatagtgtcaatgacactgtaaaatgtggtaacattagatttaaatgatgatgttaaaggttaatcttctctacgggcttttaaaaaggtgccctgaatttttaatagactcataaaagaaagggaagatagaattttatctttgaactctgttttcattagatttgacaattttactggcctttgaaaccatgttaataaagatctatattaaacatcattatgctgataaatggatatttaattaagacaatctcaaattaaataagtttaacatgaaaatttaaacccatgttatccacagcagagaacttattagtgtatttccaattcatatttttccagtgagtaaaaaatataataaaagttcctgacagcctgtcttctagctgacgttt

SEQ ID NO: 32640 - DNA, 554 bp, Homo sapiens
gataaaatatattgctaaatcaattatttcgacctttctcatattacagatgaagaaattgaggcccagagaatctaaacgacttgatccaattcacacagctaattacaaaatcaggacccaaactcaagtgttcagtcctctatttacagagctactacttaggctgataaagtaacaccagtgggaaaataagtttatctaggagattcctttataattttctggaagaaatctggctgattgggagaactgccactgtaattctttaaaatgccatgttgctagcactgtctctatactaatattaatggagttgccaataatcttgctcttctgttaattagttatgtctcattttaaaaacaaaggtgatccagaatgaaacaggtatcwtctgcaacaatcattgtccaatacgagagtgacagtcactttccaatgcagatgggagttcctacaatcctttcctgttttctagagctaaatttcctctttgtgagaaaacatattttaaaagtccatttataaataaaagcctataaatgttcatg

SEQ ID NO: 32641 - DNA, 1351 bp, Homo sapiens
aaacctgatcatatcacaacagtataaatgcaagaaaagctctatgctttgtagttagccctgaatggttgtttgacagatacagaattttttaaacctcattctctcatagtttaggataaacaaaagggattcaaacagatctggtctrcctctgggttgtggcgtttccatgacaagcttttacactatgcacctactttcattcgggaaacggtcttattgatctcttctacatccccaacagtgacaatgttggacttcagcatctggtcgattaataccagccagtcggctagttctgttatagttttatcaagatcagcaggaattgaaatttccgaagtacgatgagactgaacaggaatatctgacgcagatgatactagcaccaccttttggacattaggatgagctgaaatgaaaaatgtagcaaaagagaaattaatcaacaggatgttttaattatggtggtgtcatggtgacacgtgtatgtgtatttaaataaaatttagtttaagtaaaaaaaattctaagaggttattttttcatactgaaatggctatggtattacctgtaatatccatatgtctttggtagctatcaagccaacaaaacagttttgcaacattctataacataatcagcactgacactgagaaaaattaaaagtacaaatgtgggagaactggaagtattattttattttggcaagatgattttaattataaagccaacttattcataattttttatttttttcatttaactttataatgtgagcatattttattcttagtaaacacaattatgaatacctatgtaataacctatacccatattcacttttatttaacccttggatatttagattgctcctgaaattttattttaattttttaaaaaacttgcaaagaatatcttttcatgtagagtattttgcacatttctgatctctatcttagcatagatttcccaagtagaattactgagtcagaaaatacaaaaaaaagtatgtatttaatattcattgccaaattgattggttttgatacaataagtagttgaattagtaattaaaactatctgtaacctacttcaggtatgatatattagatgaggcttaaataattttctaaaatgtatagccaatctgtaaattcagcacaatcctaataaaaatcccaacaggcttgaatgtaacaaaatcattaattcaaatttctggttataaaattaatattgaagagaaaaggacaaaaaacagtcaaattattttttgatagaggaatatgccctcccagatattaagttatattatttagctaataattattaactcagtatatta

SEQ ID NO: 32642 - DNA, 1351 bp, Homo sapiens
aaacctgatcatatcacaacagtataaatgcaagaaaagctctatgctttgtagttagccctgaatggttgtttgacagatacagaattttttaaacctcattctctcatagtttaggataaacaaaagggattcaaacagatctggtctacctctgggttgtggcgtttccatgacaagcttttacactatgcacctactttcattcgggaaacggtcttattgatctcttctacatccccaacagtgacaatgttggacttcagcatctggtcgattaataccagccagtcggctagttctgttatagttttatcaagatcagcaggaattgaaatttccgaagtacgatgagactgaacaggaatatctgacgcagatgatactagcaccaccttttggacaytaggatgagctgaaatgaaaaatgtagcaaaagagaaattaatcaacaggatgttttaattatggtggtgtcatggtgacacgtgtatgtgtatttaaataaaatttagtttaagtaaaaaaaattctaagaggttattttttcatactgaaatggctatggtattacctgtaatatccatatgtctttggtagctatcaagccaacaaaacagttttgcaacattctataacataatcagcactgacactgagaaaaattaaaagtacaaatgtgggagaactggaagtattattttattttggcaagatgattttaattataaagccaacttattcataattttttatttttttcatttaactttataatgtgagcatattttattcttagtaaacacaattatgaatacctatgtaataacctatacccatattcacttttatttaacccttggatatttagattgctcctgaaattttattttaattttttaaaaaacttgcaaagaatatcttttcatgtagagtattttgcacatttctgatctctatcttagcatagatttcccaagtagaattactgagtcagaaaatacaaaaaaaagtatgtatttaatattcattgccaaattgattggttttgatacaataagtagttgaattagtaattaaaactatctgtaacctacttcaggtatgatatattagatgaggcttaaataattttctaaaatgtatagccaatctgtaaattcagcacaatcctaataaaaatcccaacaggcttgaatgtaacaaaatcattaattcaaatttctggttataaaattaatattgaagagaaaaggacaaaaaacagtcaaattattttttgatagaggaatatgccctcccagatattaagttatattatttagctaataattattaactcagtatatta

SEQ ID NO: 32643 - DNA, 1351 bp, Homo sapiens
aaacctgatcatatcacaacagtataaatgcaagaaaagctctatgctttgtagttagccctgaatggttgtttgacagatacagaattttttaaacctcattctctcatagtttaggataaacaaaagggattcaaacagatctggtctacctctgggttgtggcgtttccatgacaagcttttacactatgcacctactttcattcgggaaacggtcttattgatctcttctacatccccaacagtgacaatgttggacttcagcatctggtcgattaataccagccagtcggctagttctgttatagttttatcaagatcagcaggaattgaaatttccgaagtacgatgagactgaacaggaatatctgacgcagatgatactagcaccaccttttggacattaggatgagctgaaatgaaaaatgtagcaaaagagaaattaatcaacaggatgttttaattatggtggtgtcatggtgacacgtgtatgtgtatttaaataaaatttagtttaagtaaaaaaaattctaagaggttattttttcatactgaaatggctatggtattacctgtaatatccatatgtctttggtagctatcaagccaacaaaacagttttgcaacattctataacataatcagcactgacactgagaaaaattaaaagtacaaatgtgggagaactggaagtattattttattttggcaagatgattttaattataaagccaacttattcataattttttatttttttcatttaactttataatgtgagcatattttattcttagtaaacacaattatgaatacctatgtaataacctatacccatattcacttttatttaacccttggatatttagattgctcctgaaattttattttaattttttaaaaaacttgcaaagaatatcttttcatgtagagtattttgcacatttctgatctctatcttagcatagatttcccaagtagaattactgagtcagaaaatacaaaaaaaagtatgtatttaatattcattgccaaattgattggttttgatacaataagtagttgaattagtaattaaaactatctgtaacctacttcaggtatgatatattagatgaggcttaaataattttctaaaatgtatagccaatctgtaaattcagcacaatcctaataaaaatcccaacaggcttgaatgtaacaaaatcattaattcaaatttctggttataaaattaatattgaagagaaaaggacaaaaaacagtcaaattwttttttgatagaggaatatgccctcccagatattaagttatattatttagctaataattattaactcagtatatta

SEQ ID NO: 32644 - DNA, 672 bp, Homo sapiens
cttgaacctgggggatagaggttgcactgagttgagatcgtgccaccgcaaaaaaatcatagacagagccagaccctgtctcaaaataaaaaaaaaaaaaagtgggcataagaaggttgctagctacaaarccaatatattaaaatcaacaacatttctaccagccaccaacagtttgaaagtaaaatttctaagaagatagcaatatcataaaaattcaaatatgttagaatgaatctaataaaaatgtataagacttcaatgaagaaatcaatttttgaaagaaacttaaaaagggtataaataaatggaaagatgtcgtgtgttcattcattggaagactcaatattgtgaagatgactctggctagtgcttttcctttgccattcgttatcttcattattctgtggtcataaggatatcgtcctacttttccttctacgaattttattgtcttgtcttccttattagatctacaatttacttgcaattgattttctattatggtttcaaataggggtcaagtttcatcttttaaattaatggccaattacctcagtatcatctattgaaaatactgtcatttcccccactggttctaaccataaaggaaaagctgtaagttgaaacacattagaattaagaattcccattcatcaaaagacaacctta

SEQ ID NO: 32645 - DNA, 1334 bp, Homo sapiens
tgggaacagcaggggaaggagaaaggagctcaaatcactgaaaagcagatgacatgcaccagcctattgacctcctactggttttttgtcccaagacagacacctgactgggtaaactctgagatggagggggctgagtaacagcaaggaggcacagtcttctcacatattttctttctttcttttcttttctttttttttttttgagacagagtttcgctcttgttgcccaggctgaagtgcagtggcacaatctcagctcactgcaacctccgcctcctgggctcaagcgattctcctgcctcagcctcccgagtagctgggattacaggcatgcgccactacacccagctaacttttgtatttttagtagagatgaggtttctccatgttggtcaggctggtcttgagctcccaacctcaggtgatctgcccacctcggcctcccaaagtgctgggattacaggcgtgagccagccgcgcccggccttttcttatgcttaaaaatcaggttgacttggtctagaaatgcagatgatgatttttttttctttttccaaactggagatacaggcaggaaatttcccaggtatgaactgagcatggtgttattaggtcagcagagagccttcaataggtaactgactgtctatggatttggtcatattggcctcttgcttttcaggatctctggcttttgatccaaatacttacatatcagatccagaatcaactcatacaagcaaaccttcattcagaatatataaatggtgatgtcttcttttattcatttattcaatgtttactagtgtcctaagtgatgggctatgagttgggaacacagatgaatgagatgccaacccttcctgtaataattcatgctaagtttatctgtctattaaattgcatcacacaaaattgaaaaagagagtgatttcaggaagtattctcaacatgaataaagtctgaaaaaattggcacgaatactatactctttaaggaagagcagacttttgttctatcctggtgaagctgcttattgatgtatttttaaagtatattttatttattattattttttaattaaaaaaatttttttgagacagggtcttgctctgtcacccaggctggagtgcagtggcacaatcatggctcactgcagcctcaaacttctgggctcaagtgatccttccactcagtcttccaagtagctgggactaccggtgtgccccaccacaccaggctaacttaatttttttacamaagtgggatcttcttatgttgcaccaggctgctcttgaactcctgggcccagagcctcttgcctcagcctc

SEQ ID NO: 32646 - DNA, 544 bp, Homo sapiens
gttttctcatcgttcagctcccacttataagtgagggcatgcagtgtttgctaaggataatggtttccagcttcatctatgtccctgcaaaggacatgatctcattcctttttatgactgcrtagtattccatgatatatatgtgccacattttctttatccagtctgtcattgatgggcatttgggttgattccatgaaagactctttctttgaatgaaagtatgccctgcagcccaagtgaaactgctaagtgtggacccgcccacctcccctaggctctcagcaattgtcccctggtctcttctctcagctgcacagagccttgcttattgttgggcatggagtagctttatcccagcttaataaagcactcatgggaggaccgagaggggctttaggatgctaaccactgacaacaggattttaaggcatgaatgattcacaactgatttgtgaaagaaatagcagtatttcctaaactctttgggttaacatcctgggataaagaggaacattggcattcttcttccttagattatgtg

SEQ ID NO: 32647 - DNA, 544 bp, Homo sapiens
gttttctcatcgttcagctcccacttataagtgagggcatgcagtgtttgctaaggataatggtttccagcttcatctatgtccctgcaaaggacatgatctcattcctttttatgactgcgtagtattccatgatatatatgtgccacattttctttatccagtctgtcattgatgggcatttgggttgattccatgaaagactctttctttgaatgaaagtatgccctgcagcccaagtgaaactgctaagtgtggacccgcccacctcccctaggctctcagcaattgtcccctggtctcttctctcagctgcacagagccttgcttattgttgggcatggagtagctttatcccagcttaataaagcactcatgggaggaccgagaggggctttaggatgctaaccactgacaacagkattttaaggcatgaatgattcacaactgatttgtgaaagaaatagcagtatttcctaaactctttgggttaacatcctgggataaagaggaacattggcattcttcttccttagattatgtg

SEQ ID NO: 32648 - DNA, 1213 bp, Homo sapiens
tggaaacaccgacaaaagtactatgcactgtccaccagagaaaagaaggaagctgtatcccctgagtgggcatttcactgctgtgagctaagaagactgtcctctaaaatacctcagccatggcattcactctggcaatgcccaagcatatcactgccttctgagaacaagacaaaagaaaccaacatttcctggctctcggtgttccacagttaattttgaaaagtttggaaagaatttaaaggaaaataatattggcaacatgagcaattgttcccacattacaacaagaagttattgagaactgcccatcccaactacagataatgtggccataaagctatgacaggggaaccattattttagaaatacattcaaggatctgcaaaggaaaataattgttagaacacaataatacattatagacaataaataaactaaatgtccatttaaaaattcatttccacacatgtgaaattagaatgtcagaagtaacagaattcaagaaagtcctcaatcattctaacatttaggtttccaaatgttaactaagcaagcatttttacccctttgatccatgagtcattgtcttgcggtaaaccggtcacctacagctgctgaaatgtcacgttttgccctgtccagacatgtcaacattccaccttctcattctcctttctaatgcaaattctaggaacccatatgttggccaaaagttcatcaatttcacatggttagtttgaattgtcttcactgaagaaacttttttttttgagacgcagtctcgctctgtcacccaggctggagtgcagtgatgtgatctcggctaactgcaacctccgcctcccatgttcaagcaattctcttgcctcagtctcccaagtaggtgggactacaggcatawccaccacgcttggctaatttttatatttttagtagaggggggtttcaccatgttggccaggctgatcttgaactcctgaccttcagtgatctgcccacctcagccacccaaagtgctgggactacaggcgtgagccacagcacccaaccttgaagaaacatttcaaaacattggaattttgtttgggatacgctcagaggctggttcttggctaagacaataaatatagagttcaaataaattaaaagcccataattctcattttggtagaagtctgggaacacatcagtgttcaataataatgctcaa

SEQ ID NO: 32649 - DNA, 937 bp, Homo sapiens
atagcaatatgaagctaaaagggaaagttattagttgtttcagttttaaatttatggtataattaactcctcaaaacataattttatctaatgataataatattaactattactaactaaaaatccaggagtattttaggataaattctggagtctattttcttttacctctccattattgttttgtcataactgtacaaaatgatcatttcacttggaaaactggtaggaaaaatgtgaactatgtttaaagtaagaaaaaaacaaaggatcttaagaaagttcctgcataggtcctggaatccttcaagctatgcaccacaattatccctgtaaatccttttgaatatgaagtcatcacattttgtgttcaaagtaaagttatctgttgtagattttcaaagcctctcagagcattatagaaagggcagagtaatataagctacatatcgcctcgcttgacagacattgacaaaggctgagaaggcaatgttaatgcttttaattttttaaaaatagagattatraagttaatgaaacctgaggtcattaccattaagaactaagaactcagctttttaggtgttttcagtaaaaataattaactatgggataggtagtttaaagagctgattaacattataaatatttaacaaaatctaaaatactaccacgatcctttgttaaagataattagagctaagattgctacagaaatctagacttttgaatttctaatttcttagtgcttaatttatcattaaatctgatattgttgcagagatgatattaatatatgtttgattcctaccatgaataccacaacattttgatgtcttagaatgcagtgaatgatacacttcactcaacagacatcattacatgcttactgggttaggcaccgtgctagaacctgataatacttggctggaaaaaa

SEQ ID NO: 32650 - DNA, 382 bp, Homo sapiens
caccatttcttcatgtccttctcgagctgcttccatcaatggtgtataaccttcatcattgacctcttccaggctagctcctctttcaataagtaaagccgcaagtccacatgcccaccacatgcagccaaagttaatggtgactcaaatgaatcagcaggcatgttcacttgggcaccgctgtcaagatgtaacctagctacttcaacatggccatcctaatgataatacaatttaaaaaattaaatcagcaccattamaaaaatcttgaaaaatttgaagacttctcaattactatacaatgaagtttatctatctccactcaaaaaggaatagagctacatttaacagttgagtaaatcagatttattatgcactgcct

SEQ ID NO: 32651 - DNA, 588 bp, Homo sapiens
tcacacaagactatatgaatataatttgtgtgtgtacatcaggaattttatgaatatccttgtcmtaaaaaaatccatattaccacaatctctttagtaatggaagatgtaggaaaactgggcacacatcccaaaagaaactaaacagctagaaaaaatgcaagaactgcttttccaacattttatcttttatcccagagatatgtagatcaacactatagatgacctcaatacatctgtaagctgagtactgtaatttgaagtctcctaatcaaaactcacatatattttgagaaagtgagcatttttttttcatggtagtctatacattgtagtttggaactattcttcttaattgtttaaaatgctaagtcataactggtatggagaacaagttgcacatcaattttctctttcctaacttgattatttgaacaataataaacatttgaatttaacaattccattttctaacatttaatttttccaaccatttgaaacctggtactcctactctatggaacttaaagataaaataaaattattatttctacagagacatctaataaacacttttataattaacac

SEQ ID NO: 32652 - DNA, 588 bp, Homo sapiens
tcacacaagactatatgaatataatttgtgtgtgtacatcaggaattttatgaatatccttgtcataaaaaaatccatattaccacaatctctttagtaatggaagatgtaggaaaactgggcacacatcccaaaagaaactaaacagctagaaaaaatgcaagaactgcttttccaacattttatcttttatcccagagatatgtagrtcaacactatagatgacctcaatacatctgtaagctgagtactgtaatttgaagtctcctaatcaaaactcacatatattttgagaaagtgagcatttttttttcatggtagtctatacattgtagtttggaactattcttcttaattgtttaaaatgctaagtcataactggtatggagaacaagttgcacatcaattttctctttcctaacttgattatttgaacaataataaacatttgaatttaacaattccattttctaacatttaatttttccaaccatttgaaacctggtactcctactctatggaacttaaagataaaataaaattattatttctacagagacatctaataaacacttttataattaacac

SEQ ID NO: 32653 - DNA, 1217 bp, Homo sapiens
taccacatcactgcccactacaggtttgtaagataattacatcactctttctcccacaaagaacactaatacatgctcatacacatattaacacctccgctggcaacacctttctatttgaggacaatgtaatacatttataaagttaatcatacatttcccatgtttcacaaggcttatatgaataagataactttgcacagccctagattgggaaaaacaaagtccaaggaaatgaagaaaagaagtcacattatatgaaaaatttagcatgctatcagaaatgacctggataaacttttaggtgcaatcaatcttttctgtaattctcttcaagttaaacattgatttctatagccttttctagtagacaatgaattttaaatgtgtgccagtagtagttggcaaagagttatatgaaatggatggatgcttttctcattttttacctgtactctctcattatccctttctgaaagctatattgctccccccccaaaaaagggctctagttcttaagttttatcatgatttttgcatttcctctctcttgaggttgtggtggtagagggctctgtaaccatgtacatgttgagtgatttaaaattaaatgaccctctaagaaagattgcaggcattctctatgttgctccgagtatcgaggtctaaggtaaggatttgaatcccaaattgtcagtgttccataatgtcatgaactattaacattagaatggtttagaagggtaatctattcctgattcccttattttatctgaaagaaaataattccaaagtggcagccttccccaaagtcataacatctgttagcaattgaaggacagaaacctagacctcctgaaatggatataatctttggcaactaattggatgtggaatctttcatacgtcaaaggagtgagggtgtaacaatacatcatccaccttgattaatgaccataatggaagkttttacttaacacaacgaatgtaaatgctacaagcagatttgctgaatcttaaaagctgtaatttattttaatctgtagcttagatgtggtgcagccattatctttttaatcagtttacattacaatacttggttatttggatggacatgaagaagaaaacaaatctaaactaaataatatacccagaaataaataattatgttggaaaagtgtttatttacagataaaagttaactcatatatcagaga

SEQ ID NO: 32654 - DNA, 447 bp, Homo sapiens
cccagttgtattttaaaatcgttaagtaagagttgtaaacgtcactccacgggtaatttatgagcttggatgtgtggggttgcttttggtgtcttacgaccacctgcctctctccccacacctactgatctaaggggagaggatgtgaaagtttccctgctatcaaatcaacccatctgccaacactgttattagcaaggaacatatgtggggcattgctaataagtttttaaactccagattaggtccatggtaaaaagtatttccggtttattaatagctgactattctggcccctgagataatagttacactgcctcttctgctgtcacaaggtgtcactgttaggcagggacctagtagagcctggtgggtacttgtgcattgtggggtagatgcctgccatggcccacatccccgccggttctgtggcaatgscttatgctg

SEQ ID NO: 32655 - DNA, 1248 bp, Homo sapiens
ggaattcaaaataaytcagaatttacacaagtaatatgatatgtacactacacatgtcatatctccctggtgatgtctacagtaataaataacagaaatgattttgtagcaaaatatccaaagcaggtgcaataaagaaagactctaagtagcctcacgtctgttccatctagatttttctgttggatgaattgatgttaaatttttgtggattgggtgtcacatcacatctttctttaaggaagggggaagcccagcacagcagcgtgggatagaagagtagttcttagtagtaaacacaaagcaagcagtagctaaaacaccaatcttgatgttattatttcatctgattctccaccaagtcaagctgatcttacctctgccctcctctcatctacagcaccaccattccagtccaggttaccaactttccttgtggacaacccacagcattcatctacctagtccacaacacgtcggctcctctgagaagcagggtctccataaaccgttctccacaccagagcccatatgattgcctcaaaacgcaaatcagattctgccatatccctgctgaaattctttaaagttatcccgttattcccagagaaccaggtccacatgcccagaccttactctggcagccttcatctaccttgatctatttctttaaactcattctgctgtcacaaacctttgcatttgctattccctctgcctagaatgctgttcctctcctctcagtttctttctctcattcttgggatagggcttcaaaggttcctctgtgttgctctcatctggcagttgtgatacttgcactgagccttgcactatgatacttgcactatgagcctccttagaatctagattgtgatttaatctatattgtgattgtaagattgtgattgtatgtatttctgtggttacaattggaagtcagaggttgtacctattttgctcactcttggatcacagcacccagtatatggattggcacatagtatgatcacttcatgtgtatttattacattcatgaaaaactaaatgaatgtgaaaagtacttgttaccagccaaaccgaaggcttggtaactaatacacactcttttagtcctttttaaaatttaaaaaacaatctcttataaggctaacttcaaccctgtcaggtatgtgctattttgtagatgcaatagccaagtctgagaaaagtcaagtaaattgcaaaacatctcagtccaagtaaagt

SEQ ID NO: 32656 - DNA, 1009 bp, Homo sapiens
ttggtcgctgtgcagttgaagtacaatatttaaagataacattttaatctcagaatattcttaaatcctttccattgccctccatattttccttctcctcaatcctgaaagctgacattattagattgcaaaatagctgaaaaatattcctcccactctatttttcattcttgcactgtgctcaaagactttgaccaaaaactcatttgggtagcaacggatcatctttgaggatcccccaccccgctctgcttcttatcctttgccagctcacttttggcaggwgtctccacagcaaggaagaccagacagaagtttccgtatagaggtctcaaggctcattttcagtcagctagaaaaactacttataatgctcctgcaacccgcaggttaatgaaggggccacctctgcgctccacatcccaggtcgtcccaaacagagaaggcacatcaagactcattctcacgcagcagagattcttagctcttggcacccggctttcccattaagccctgacccctgtgctaaaaaacaaccagttaaaccacactaatatatctaaggcttatatgatttgaataatcaataaacaattaagactgttttgctcctttaataccaaaaggacatttgaattcggtcacagctaaaaggaaatagtttgttttgcttttaatttgatttgcaagattacagagcatctgctcctcagagatgtcatttcagccaattatatagattgtcttctagtcgctttctcgccactggattccgcattggtatcatacacaccagtgaaatggaggagccaggctttttggctggaatatgtctggaaaaattaaagctaactaaaagagtcattgcttgctaatccctgtaattaagcactacttgtaggagggtacattacactgattgaggctgttgccactgtattggtcctaaaaatgtttaataaccctaccctgtaatgttgaatttttcacaccggttaattaacaggca

SEQ ID NO: 32657 - DNA, 564 bp, Homo sapiens
actactcactgtttacccttaagcaagaattaacccctccaagcctcagttgccttttttgtaaatggaagattgaggggggaaaaaaaaaacctaccmagaaggttgccacagaatcaaatgagatacggtatgtcaagtgcttgatacagagtctagtgcacagtaatcattagtcaaaatggcagctatttattattaaaatgatgaaatttcaaacacaagcaaaataaagcaggcaatgcaaaaaaaatgcacgggtagcaaattaaaatcagaaaaatattataagtaacagagtactttattaggaatgggcagggtggcatgcgcctgtggtctcagctactcaaggaggctgaggtgggaaaattgcttaagcccgggaagtcaaggctgcagtgagcttcactgcatcactgggtgatagagcaagaccctgtctcaaaagcaaacaaaaaacagaagaagtaataaatctacaattacagtcctaagaatatttagtatctgaagagaggaataggggatagtcattatattcccagtagctaccacagtaac

SEQ ID NO: 32658 - DNA, 636 bp, Homo sapiens
gtatgctctctgaacaaaatgaaattaaattagaaaccagtaactgaaagatacctaaaaaaaaatccccaaatatttggctaaaacaattaatgcacaaggtcctggaggttaagggggtggaaaacaaaggaacttagccccacctgggggtaaagggaatggtgatcagagaaggcaggctggagarggtgatggatgggtgactaggaggtgggtctgtgagaactacaaagaaataagtattactagatcaatttgagatgaagagaagaaataaggagtgaacaaggaaaagagaaataagggggatgtaaaaagtaaagtagaggttcctcttcaagactttcctctctaattaagaataaatagtaacttctcttagaagcaaaatttattcaaagacctgtgctaacattcttaaatatccgctagccataataaagaaatcaatgtactttatgttcttagctcccacaatttagcctaaatatttgccctggcacgcttaggctggtccaagcaagcattaggtcatagcctgttcctcttccttatttaaaagtgtttttacctttctcaacattccacaagttacttcctccttcctttgttcccctctacctttgcctcttt

SEQ ID NO: 32659 - DNA, 614 bp, Homo sapiens
gtgtttatgtggtttttccaaaaatgaatgttttttaggcaggttttcttaacagaggcaccattaaccttttgggactaataattatttgtcrtgggaagctattctgtgcactgtaagaatgtctgatggcgtctctggcctctaccccctaaatgccagtaggaccttccctcaccctagttgagacaacaaaatttttccagactttattatatgtgcccttttgggggttggggtaaggtcaaaataatccccaaggctgggagcagcggttcacacctgtaatctcagcactttgggaggccgaggtgggcgaatcatttgaggccgggagttcgagaccagcctggccaacatggcgaaatcctgtctctactaaaaatagaaaaattagctgggcatggtcgcacacgcctgtagtcccagctacttgggaagttgaggcaggagaatcgcttgaacccaggaggtggaggttgctgtgagccgagatggcaacactacagcctgggcaatagagcaagactccatctcaaaaaaaaaaaaaaaaaaaaatccctggctgagaactattggattagggcctcctgtacctatctttgagggggaaa

SEQ ID NO: 32660 - DNA, 614 bp, Homo sapiens
gtgtttatgtggtttttccaaaaatgaatgttttttaggcaggttttcttaacagaggcaccattaaccttttgggactaataattatttgtcatgggaagctattctgtgcactgtaagaatgtctgatggcgtctctggcctctaccccctaaatgccagtaggaccttccctcaccctagttgagacaacaaaatttttccagactttattatatgtgcccttttgggggttggggtaaggtcaaaataatccccaaggctgggagcagcggttcacacctgtaatctcagcactttgggaggccgaggtgggcgaatcatttgaggccgggagttcgagaccagcctggccaacatggygaaatcctgtctctactaaaaatagaaaaattagctgggcatggtcgcacacgcctgtagtcccagctacttgggaagttgaggcaggagaatcgcttgaacccaggaggtggaggttgctgtgagccgagatggcaacactacagcctgggcaatagagcaagactccatctcaaaaaaaaaaaaaaaaaaaaatccctggctgagaactattggattagggcctcctgtacctatctttgagggggaaa

SEQ ID NO: 32661 - DNA, 499 bp, Homo sapiens
taaagctccacaaagctaatgcttgcctcttctcatgctattaattgttccttagaaaataaaaaaaaaaattaagcaacaacaacttcaattaaataatagaagctaccacttcccgtggtaattagagagatagatcgcatgtaattaatccggagcccccagaagctactttcacccttcggaaattggctttcagccgttccctttgcaatggaatgttggggatttttagttgccttttatgttcagtgtgttattaataaccaaaacacctctgtgtaaaatattaattgcctgtctgccagctttcacctgaatttgaatacttggtctattgaaaccaaatccattatcatgctttgctgggtaactgacctcactggcagagctttaatggaatccttgatgaatctgatgcacacastttatcccatatggaagatttgtcaatataactatcatcctcaagaagaaaaaaatacattttaaaatagaa

SEQ ID NO: 32662 - DNA, 1300 bp, Homo sapiens
tgcatattaacagggtaagactccaagaaacgcaatagaaagcaaaacttggaaagccacagagctaagcagaaattttactaactgtctgatgatagggaatgagaatttaagtccatttaacatgatggtatcttagtcagctttggctgccatgcaaaataccgtagagtaggtggcttgaacaacataaatttactttctcacagtttcagagcctggaagtctaagatcagggtgccaacatggtcaggtttcagcgagctctctttctgacttgaagatttccgccttctcttggtgttcctacatgacaaagagaaagagagagagagagagagagtaagctctctggcatctcttcttatcaaggcattaatcccatcatgaggttcttatcttcatggcctcatgtaaacatcattacttcccaaaggctccatctccaagtaccaycacattgcgggtgacacttccaacaggaatttgggcagaggggctgcacaatgtactccatagcaatggatcttagtttctcactgctactgtaaaaaattaccacaaatgtagagatataacagattaaaaatcatcttttagttctggaggtcagaggtctaaaatgggtttcactgaactaaactcaagttatcagaagggcagcatttcctactggaggctctagggaaaaatctatcttcctgcattttccagtttctaaaggctgtctgtattattcaaaacaatcaatatccagttgaatctttctcatgcttctctccatctctgtggttccctgtttactgcttctctcttccacttggaacccctgtggtttcacatagctcacccagataatttaagataatctttccatcttgaggtccgcctattaacagacttaatttcatctacaaacttaattgtctcttgcagtgcaacctaaagtattcatagctccttagggcatgggtatatttggggggccattattctgccccccagatatatccaatattctgtttggtaaacaactcaagttttctcttgagccctcagaagggccataccctaagaaaaagtaaaaactgaaacagcctattcctacccacacctaaaactaaactttcacaagctcaagttgatttactagccttatatttaccattcaacagaaaatgaagcatttttgaaggaatcgctatagtttttacttgttaattccagcatctaaaaaatatgaaatatgctaaaatacagaacaacgaactggagacaaaacagaagtaaatagaaacag

SEQ ID NO: 32663 - DNA, 563 bp, Homo sapiens
catgtggtggagaataatgcacattttctaattcaagttttatgctttcatayttatttgcactacagttgtcacataacggcttctggaacacattctgtattggttttgtactgtttgtaacaacagaaacaccatcatctttttttttttttttaaatcacatgcttcatttctttggagcaggtaagccacatacctaaaaggctttttgaatcactaaattgaggcatatgtccgatgtttaatttccaattagcggtgttttggttttttgtcatttgcctcacaacctatttgtcttcttttatttcatccatagctacttctgggtttcttgcttttgtactttcagtatcattataaaaattttccttgtctgagttaaaaacatgttcagtatctggtttgttgtcgttttcacagtctactttatttgtatttaaataaagctctgaaggtgactggcaagcatattctggggaccagagtatgaatgagaaagaaaggcatttttgagactgggttatttttgttcaggaaatatctggactactacagag

SEQ ID NO: 32664 - DNA, 563 bp, Homo sapiens
catgtggtggagaataatgcacattttctaattcaagttttatgctttcatacttatttgcactacagttgtcacataacggcttctggaacacattctgtattggttttgtactgtttgtaacaacagaaacaccatcatctttttttttttttttaaatcacatgcttcatttctttggagcaggtaagccacatacctaaaaggctttttgaatcactaaattgaggcatatgtccratgtttaatttccaattagcggtgttttggttttttgtcatttgcctcacaacctatttgtcttcttttatttcatccatagctacttctgggtttcttgcttttgtactttcagtatcattataaaaattttccttgtctgagttaaaaacatgttcagtatctggtttgttgtcgttttcacagtctactttatttgtatttaaataaagctctgaaggtgactggcaagcatattctggggaccagagtatgaatgagaaagaaaggcatttttgagactgggttatttttgttcaggaaatatctggactactacagag

SEQ ID NO: 32665 - DNA, 563 bp, Homo sapiens
catgtggtggagaataatgcacattttctaattcaagttttatgctttcatacttatttgcactacagttgtcacataacggcttctggaacacattctgtattggttttgtactgtttgtaacaacagaaacaccatcatctttttttttttttttaaatcacatgcttcatttctttggagcaggtaagccacatacctaaaaggctttttgaatcactaaattgaggcatatgtccgatgtttaatttccaattagcggtgttttgkttttttgtcatttgcctcacaacctatttgtcttcttttatttcatccatagctacttctgggtttcttgcttttgtactttcagtatcattataaaaattttccttgtctgagttaaaaacatgttcagtatctggtttgttgtcgttttcacagtctactttatttgtatttaaataaagctctgaaggtgactggcaagcatattctggggaccagagtatgaatgagaaagaaaggcatttttgagactgggttatttttgttcaggaaatatctggactactacagag

SEQ ID NO: 32666 - DNA, 563 bp, Homo sapiens
catgtggtggagaataatgcacattttctaattcaagttttatgctttcatacttatttgcactacagttgtcacataacggcttctggaacacattctgtattggttttgtactgtttgtaacaacagaaacaccatcatctttttttttttttttaaatcacatgcttcatttctttggagcaggtaagccacatacctaaaaggctttttgaatcactaaattgaggcatatgtccgatgtttaatttccaattagcggtgttttggttttttgtcatttgcctcacaacctatttgtcttcttttatttcatccatarctacttctgggtttcttgcttttgtactttcagtatcattataaaaattttccttgtctgagttaaaaacatgttcagtatctggtttgttgtcgttttcacagtctactttatttgtatttaaataaagctctgaaggtgactggcaagcatattctggggaccagagtatgaatgagaaagaaaggcatttttgagactgggttatttttgttcaggaaatatctggactactacagag

SEQ ID NO: 32667 - DNA, 637 bp, Homo sapiens
ctgaagtgagttcactcaggtttcctcagcagtaaccccaaaattatataaatgacttcctcttttcccaccttcctgcctcacaatccgtcttcattcggaaaataattgctacatcaggggtctcctcagttctccttctacagtgtctacggcttattatgaacagttttctgtctgtttttagcactatcatgtgacatctgtaaaatctgtacttcctctctttctccttacacccttaatgaaaagatgctccagaaataaagcaaaattatgctgtgcccaagagccccttaygtcttcaactgctctccatatttcttcctcccaattgcaatgtggggatgtgtataatcttacagtgaagatcatgttccagaccagcagcatcagcataacccaagaacttattagaaatgaagaatctcaggcctactgaatcagaatgtgcagtttcgaccagccccccactgatttattcggggaagagaacttcttatctggactgaacatgacattaaatgtgttttgcaaagttacctgtcctagatgtttctccatcctttctttctctggttatatttgaaaaagaatctttctcatcacttgtagcctgaatggaatttgaaacaaa

SEQ ID NO: 32668 - DNA, 637 bp, Homo sapiens
ctgaagtgagttcactcaggtttcctcagcagtaaccccaaaattatataaatgacttcctcttttcccaccttcctgcctcacaatccgtcttcattcggaaaataattgctacatcaggggtctcctcagttctccttctacagtgtctacggcttattatgaacagttttctgtctgtttttagcactatcatgtgacatctgtaaaatctgtacttcctctctttctccttacacccttaatgaaaagatgctccagaaataaagcaaaattatgctgtgcccaagagccccttatgtcttcaactgctctccatatttcttcctcccaattgcaatgtggggatgtgtataatcttacagygaagatcatgttccagaccagcagcatcagcataacccaagaacttattagaaatgaagaatctcaggcctactgaatcagaatgtgcagtttcgaccagccccccactgatttattcggggaagagaacttcttatctggactgaacatgacattaaatgtgttttgcaaagttacctgtcctagatgtttctccatcctttctttctctggttatatttgaaaaagaatctttctcatcacttgtagcctgaatggaatttgaaacaaa

SEQ ID NO: 32669 - DNA, 637 bp, Homo sapiens
ctgaagtgagttcactcaggtttcctcagcagtaaccccaaaattatataaatgacttcctcttttcccaccttcctgcctcacaatccgtcttcattcggaaaataattgctacatcaggggtctcctcagttctccttctacagtgtctacggcttattatgaacagttttctgtctgtttttagcactatcatgtgacatctgtaaaatctgtacttcctctctttctccttacacccttaatgaaaagatgctccagaaataaagcaaaattatgctgtgcccaagagccccttatgtcttcaactgctctccatatttcttcctcccaattgcaatgtggggatgtgtataatcttacagtraagatcatgttccagaccagcagcatcagcataacccaagaacttattagaaatgaagaatctcaggcctactgaatcagaatgtgcagtttcgaccagccccccactgatttattcggggaagagaacttcttatctggactgaacatgacattaaatgtgttttgcaaagttacctgtcctagatgtttctccatcctttctttctctggttatatttgaaaaagaatctttctcatcacttgtagcctgaatggaatttgaaacaaa

SEQ ID NO: 32670 - DNA, 1515 bp, Homo sapiens
tgtcaatatcaacgtggatatgccgagtgatgaggtcaaagtgatctaaaatcagaggagcaacacatacacctgagaatcaatgtcaaagcaggtgctacatgatcccacttacctttcatgcaacaaattaaaaggatttacaccattatamtacaaacattcatcgtgctctttaacttgcccaataactgagaaggcacacaattacgacgacaattcagttgaacgtacacttcacatcacttcagtggaagtgtgctaaattaatcaccttggatatctgtttgctgatacctagtagataatattcattatctctctcaaccatatggtgtaataatctgcctaagtttcttgtatccactagtttagccttccgaaagtttcttcatccagtcgtggcaacaaaggataatatattagcctcaataaaaatatcatcaattatcaattttgacatacatatacaaagtaaaactgctgcaagcattagatattgatcagtttttcattcagaaatcagtgcaatattcattgaaaatgaccattttaggagttaattagaatccagcataatttttgtttctaaaatagccttgttgggagtatcatgttgttctctaaagaagtttcatgaaatagctattgtatccaagaggtagctccttgaacaaggaagccaatgtattcagattcaactttgtctcatttctgtaactaaaatcaacaaaacatgtatctctgatgcctaatagtaacaaagaggagtaatgagtcagtgtgtgtgtttttatgccaattctaggattgtttccttcttccagcagttcctgcagcagccaaaatcaagtattttttattaaaatattccaaatgcatctgaagtgagttcactcaggtttcctcagcggaaaccccaaaattatataaatgactgcctcttttcacaccttcctgcctcacaatccgtcatccttgggaaaatgattgctacaccaggggcctccttagttctcctacagtgtgtatgggttattacaacaagttttctgtctgttcttagcagtacgatgtgacatctgtaaaatcgatacttcctctctttctccttccacccttactgagaacaagctggagaattaaagcaaaactatgctgttccccagagccccttatgtcttcaactgctctccatatatcttcttcccaacttcaatgtggggaactgtataatcttacagccaaggtcatgttccagaccagcagcatcagcatcacccaagaacttactacaaatgaagaacctccagcctgctgaatcaggaagtgcagcttcgacgagccccccgctgatttattcagggaagagaatttcttatctatctgcactgaacatgacattaaatctcttttcaaaattacctctcctagttttttctccatgcttttttcctctggctatattcaaaacagaatctttctcgtcacttgtagcctgaatggaatttgaaa

SEQ ID NO: 32671 - DNA, 1515 bp, Homo sapiens
tgtcaatatcaacgtggatatgccgagtgatgaggtcaaagtgatctaaaatcagaggagcaacacatacacctgagaatcaatgtcaaagcaggtgctacatgatcccacttacctttcatgcaacaaattaaaaggatttacaccattataatacaaacattcatcgtgctctttaacttgcccaataactgagaaggcacacaattacgacgacaattcagttgaacgtacacttcacatcacttcagtggaagtgtgctaaattaatcaccttggatatctgtttgctgatacctagtagataatattcattatctctctcaaccatatggtgtaataatctgcctaagtttcttgtatccactagtttagccttccgaaagtttcttcatccagtcgtggcaacaaaggataatatattagcctcaataaaaatatcatcaattatcaattttgacatacatatacaaagtaaaactgctrcaagcattagatattgatcagtttttcattcagaaatcagtgcaatattcattgaaaatgaccattttaggagttaattagaatccagcataatttttgtttctaaaatagccttgttgggagtatcatgttgttctctaaagaagtttcatgaaatagctattgtatccaagaggtagctccttgaacaaggaagccaatgtattcagattcaactttgtctcatttctgtaactaaaatcaacaaaacatgtatctctgatgcctaatagtaacaaagaggagtaatgagtcagtgtgtgtgtttttatgccaattctaggattgtttccttcttccagcagttcctgcagcagccaaaatcaagtattttttattaaaatattccaaatgcatctgaagtgagttcactcaggtttcctcagcggaaaccccaaaattatataaatgactgcctcttttcacaccttcctgcctcacaatccgtcatccttgggaaaatgattgctacaccaggggcctccttagttctcctacagtgtgtatgggttattacaacaagttttctgtctgttcttagcagtacgatgtgacatctgtaaaatcgatacttcctctctttctccttccacccttactgagaacaagctggagaattaaagcaaaactatgctgttccccagagccccttatgtcttcaactgctctccatatatcttcttcccaacttcaatgtggggaactgtataatcttacagccaaggtcatgttccagaccagcagcatcagcatcacccaagaacttactacaaatgaagaacctccagcctgctgaatcaggaagtgcagcttcgacgagccccccgctgatttattcagggaagagaatttcttatctatctgcactgaacatgacattaaatctcttttcaaaattacctctcctagttttttctccatgcttttttcctctggctatattcaaaacagaatctttctcgtcacttgtagcctgaatggaatttgaaa

SEQ ID NO: 32672 - DNA, 880 bp, Homo sapiens
tgctgatacctagtagataatattcattatctctcacacccatgtggtgtaataatttgcctaagtttcttggatccactagtttagccttcctataatttcttcatctagtcgtggcaccaaaggataatattttagactcgataaaaatatcatcaattatcaattttgacatacgtatacaaagtaaaaccgctacaagcgttagatattgagcagtttttcattcagaaatcacggcaatattcattgaaaatgaccattttaggagttaattagaatccagcatttttgtttctaaaatagccttgttgggagtatcaggttgttctctaaagaagtttgaygaaatagctattgtatccaagacgtagctccttgaacaaggaagccaatgtattcatattcaagtttatctcatttttataagtaaagtcaacaaaacatgtatctctgatgcctaatagtaacaaaaagaagtaatgagtcagtgtgctttatcccaattctagcattgtttcctgcttccagtagttcctggagctgccaaaatcaaatattttttaagcacatattccaaatgcatgtgaagtgagtccactcagatttcctcagcagaaacccctaaattatataaataacttcttttccctccttcctgtctgacaatccatcatcctttggaaaataattgctacatcaggggtctccttagttctcattctacagtgtctatggattattactatcagttttctgtcttttctcagcagtacgatgtgacgtctgtaaaatctatacttcctctctttctccttccacccttagtgaaaccatgctgtagaattaaagcaaaactatgctgttccccagagcccct

SEQ ID NO: 32673 - DNA, 681 bp, Homo sapiens
tgcatctgaagtgagttcactcaggcttcctcagcagaaaccccaaaattacctaaataacttcttccttcccctctttcttgccttgcaatccctctttcttgatgaaaataattactacatcagtggtcaccttgctcctcattctccagtgtttatgggttattatgacaacttcctccctctggtttaagtagtaccatctgacatctataatttctattacttttttctctttctccttcccctttccatagaaacatgctctgaaataagagcaaaattatgctgtccccggatcctcttatctcttatrtcttgaactgttttccaacggttcttctacacaatttccatgtagggaagtctataagcttgttactaagatcatggccaaggaccagcagcatcaacaacacctgacaactcagtagaaatgcacaatctcaggcctgctgaatcagaaagtgcattttcaatgagccccctgctgatctattcaggggtgggacattgtcttctatcttgagtgcacatgacattaaatgtatattgctaaattacctgttccagatttccaaccgcccgttattcttgtggcaatattcaaaagagaaactttctttttaaatataacctgaatggaaagagaaacaaaatagtcaatacataatatatatt

SEQ ID NO: 32674 - DNA, 681 bp, Homo sapiens
tgcatctgaagtgagttcactcaggcttcctcagcagaaaccccaaaattacctaaataacttcttccttcccctctttcttgccttgcaatccctctttcttgatgaaaataattactacatcagtggtcaccttgctcctcattctccagtgtttatgggttattatgacaacttcctccctctggtttaagtagtaccatctgacatctataatttctattacttttttctctttctccttcccctttccatagaaacatgctctgaaataagagcaaaattatgctgtccccggatcctcttatctcttatatcttgaactgttttccaacggttcttctacacaatttccatgtagggaagtctataagcttgttactaagatcatggccaaggaccagcagcatcaacaacacctgacaactcagtagaaatgcacaatctcaggcctgctgaatcagaaagtgcattttcaatgagccccctgctgatctattcaggggtgggacattgtcttctatcttgagtgcacatgacattaaatgtatattgctaaattacctgttccagatttccaaccgccygttattcttgtggcaatattcaaaagagaaactttctttttaaatataacctgaatggaaagagaaacaaaatagtcaatacataatatatatt

SEQ ID NO: 32675 - DNA, 620 bp, Homo sapiens
aagttagaaaccgatccatgaagaaagtatgaattgtcatatttgaccactgaatatgactcagcattccaaaattccttgtgataaatgaagacttcttggtaaggatgaaagtaaattgatttttgttccaggaagaaagggaattttattaaaagcaagggaaatattttcgatatattaaaattttttatggttctgttttaggttgagtttaagaattttatttttataaaactaccaagacagagcaaagaacctttgatcttcacaattgaagaaaacataaattagccatagatggctaaatgtttgcatgcctctggccagagaagtaaactagaagatcttttgaaaagctttctaaaattctgtaattctattctacaactagtcacatcaaaacttttgttctaacatttacttgagtttgtataattatattatgaaaggtctctttattctgtttacttagttgtggtcctacaattagaaaataagacttgatttgtgttattcagaaccctctttcctttyctttcctctctttataaactctgccacaccttaactctttaaggaagtaacaaaaatgataccaaagtggaaatttacatgca

SEQ ID NO: 32676 - DNA, 1279 bp, Homo sapiens
tatttggcataaatttgcataataagttcaagtagtctaacttcaagtatagaagacaaaattaattagtgtgacctgtgggcattttacttcaaacgtaaaatccagagcatgcacacgtaaaatgtataatggatttctcaaccaattaatttaatcacagtctggattatgagacatttaaaccaacaggaaatagggaaagagggttaatggaggtcaggttgaagccatagaagggtgctagggcaggacttatattttggctggaaaggggtaattkgtagtataattttctcagggcttaatatcaccagtaaattccacagtgtagttcctattacctgaatttgtcaaagcttcctcgttgttttagtctgctctggctgccgtaacaaaatactatacattggatggcttaaataacagacatttatttctaaaagatctggaggcaggaagtccaagctcaggatgccggcatggttgggtctggtgtgggctctctttcttgcttacagacggctgccttcttgctatatcctcaaatttgtgtgtgttagtccaggttctctagagaaatagaaccaactggatatgtagatatgtaacaggacatctattatgggaattggctcatgcaattatagtggccaagaagtcccacaggataccatctgaaagttggaggaccaggaaagccagtgtgtaaatcaggcaagcccaaagacctgagaaccaggggagctggtggtatatctcccagtctgagagcctgataactggagtgcaggagtgggtatcactggtgtaagtcctggaaagagaaccaggagccatgatgtcaaagggcaggagaagatggatgtccaaactcaagaagaaagaattcacttttattccacctttttgttctatccaggccccaagcagattggatgacacgatgacacttgcccacattgacaagggtgggtcttctttactcactccactgatacaaatgctaatctcttctggaaacactctcacagacacagccagaaattgtgttttaccagctatctgagtgtcccttagccaagtcaagttgacacataaaattaatcatcacagtgcgtatatacaatacagaggtttaaatattagtagtaaaataggcaccggtgtacctgccacttagactaagaaatagaacaagtaccacccctcactgttctactgggataactactttactcgttgtatttgccattctcttgataggtatatatttacc

SEQ ID NO: 32677 - DNA, 522 bp, Homo sapiens
aggactagcatgacactccatggtgtcacagtccaatctttgtttccttttgtgctgccatccttggtagatggcttctatctccttgctcaaaatggccacttgagccccagccatcacatccaaattccaactagtgggaaggaagaaggcagaagaagggyatgccctccctctttaaggacacttccactaaggacacaattgcttatatattgtccggaactgcattaggtggtgatgtacttttaggaacctaaaaatcagggttcctattatgaaagcaagagagatgttggggtaaaacagcagtctctgccatggtatataatagccttttgtgacctaggaaatgctctgagtacagaaatatgtatcatttatgtaatactgtcatgaataacctcagttacattcattcattcaccaaatatttttaaaatacttcttacagatgtagcactagagctgacaccctgaatacttcattgtgtactttcttggtcaatttatgttaactcc

SEQ ID NO: 32678 - DNA, 522 bp, Homo sapiens
aggactagcatgacactccatggtgtcacagtccaatctttgtttccttttgtgctgccatccttggtagatggcttctatctccttgctcaaaatggccacttgagccccagccatcacatccaaattccaactagtgggaaggaagaaggcagaagaagggtatgccctccctctttaaggacacttccactaaggacacaattgcttatatattgtccggaactgcattaggtggtgatgtacttttaggaacctaaaaatcaggrttcctattatgaaagcaagagagatgttggggtaaaacagcagtctctgccatggtatataatagccttttgtgacctaggaaatgctctgagtacagaaatatgtatcatttatgtaatactgtcatgaataacctcagttacattcattcattcaccaaatatttttaaaatacttcttacagatgtagcactagagctgacaccctgaatacttcattgtgtactttcttggtcaatttatgttaactcc

SEQ ID NO: 32679 - DNA, 522 bp, Homo sapiens
aggactagcatgacactccatggtgtcacagtccaatctttgtttccttttgtgctgccatccttggtagatggcttctatctccttgctcaaaatggccacttgagccccagccatcacatccaaattccaactagtgggaaggaagaaggcagaagaagggtatgccctccctctttaaggacacttccactaaggacacaattgcttatatattgtccggaactgcattaggtggtgatgtacttttaggaacctaaaaatcagggttcctattatgaaagcaagagagatgttggggtaaaacagcagtctctgccatggtatrtaatagccttttgtgacctaggaaatgctctgagtacagaaatatgtatcatttatgtaatactgtcatgaataacctcagttacattcattcattcaccaaatatttttaaaatacttcttacagatgtagcactagagctgacaccctgaatacttcattgtgtactttcttggtcaatttatgttaactcc

SEQ ID NO: 32680 - DNA, 1041 bp, Homo sapiens
  misc_feature (1)...(1041): n = A,T,C or G
tattcaccctaatgattagacctaatgtagcctgaagaaaatgtcactttacaggaatcagaggcaatgtattccaaagtgtttccactcactgctcttctgggaaatgtggtttctcatgccatgaaacttgcatgatgccataaagacactgattgtactaatntatggaccctggctctgtcagatacattgatctcctagagacagattaattacaattcaaggacccctacccccatacaaaacacacactactggtcttttcccactgtmaggaaattctggtggtaaataattcaagaaaaatgcaaccccagtgggaactgcaagtgcctgtatttcatgacccatgatatcccctatgatgtgtgatgctgtgccaatgagaccacaggctcattaatgaaccctcacactgctgtattgttccgctccctttggctcaggttatctgatctgcccaaagtcttttcattcattgtcctctacaaagaagggcaattcctccacaaaacccatcgtcatatttttttcttttctgtaaggctgatggtgttctaaacgccttatacatgttttgctgttgctgttgttgttgttattgttttctattcaggtcttttagagtttcaggaagagactttaaaatcagccaccattgtccattgaagatatttgttttttagctttattcaattgaaaatcatactccctaggcagttaataactctggttatatatttcatggtaaacagcagatatgactttagagctcaaagaattgatggtctagctcagtattgttggtaaaagagcaatgtttaaaaaagcagtcttttacaaaaaattagctgagcgtagtggcgggtgcctgtaaccccagctactcagcaggctgaggcagaagaatcgcttgaacccaggaggtggaggctgcagtgagccaagattgtgccactgcactccaggctgggtgacagagcgagactccatctaaaaaataaaaaaaatgttttagaatgggcaaaaccctcatgc

SEQ ID NO: 32681 - DNA, 599 bp, Homo sapiens
gttctctttatgagaatctaacccgtgatgatctgaggtgaaacactttcatcccgaaaccatcccccttaccgcttcccaggaaaccagtccctggtgcgaaaaaggttaaggaccgctgctctacagtcatactaggaargaggaaaaagagaaagagtggggtgggggacaggtggggaaacaaaaacaaacaaaaaggaaatccaataacattacaggaaaatttaaaaatatcctatcggcacaaaagtaattacaaaaattagagatgtctaatcttggaaataggagtccataatgaactccaatacagccaatttaacttcaaaacccatctcttaaggaccagctgtcctacctctccaaaaagatgggttgcaagacaggaataagcaactatttttttcttcaataggcaattatttttttcttcttggtggctcatttaacatgcacttcatcaagaatttattaagtagggtggataatagcttttcttggtgcagagaaaaaaggaaataaggttttatggattctgacaattggcaaataagcctgaagtatagcaaggaagataacaagcaagatagcaagga

SEQ ID NO: 32682 - DNA, 1186 bp, Homo sapiens
catgggaattgtctttggtggtgatggaggctgttttagggagacctcagaaggcttttttttttttttttttttttttttttacctccaataggctcaaatttcctattctgggatataaaacygtgcttttcacatggtaagataatgcttagaaagccaagctccagcaagagctgacacagcaactcggctcaggtgggctgtattctgcaaatcaggggtccttgactctgccactcactggcacagctctctggaatgtagtaaagtgagaaaattaaactatatgataactacataaacagttcatcttccagagcaacttctagtagagcttgggttggttggaagcatctgacggtggctagaaggatatgctccgtgggtaagaatggaccaaaatgggggaactaccaaccgtggctggccctgctggggggcaggcccttcgttttggatccttggggctgagttccacccatctaagtagtccagtgtcaggtgcagatacctgtattacagttgagctccctacatgcctccatccattctttggtgatggccatttccctgcctagatgtgcttccagaatccatctctgcagtggatcaacctacccagtgtgtgtcccacacaagtgagcagattctgtgtccagctttggctttctcacttttccttcttttccaattcacctgcttgatccttctgggagtgagccaacatgccatctgcccagggctccagattggacaagagagggggcacagtttgaaaggagacctcctcattgatacaagacagaggtcatttcatggtagaagcagtgtgtaattatatcgcttacaaatagccacttcaagcctgagaaggaggccatggaaagggaagatatactcaacaaaaatcaaacccttgaaacttactttgaacatataattttagtaacaatcatcatctggattaattaggaaattattattgatgtttaaccaatgaaattacctcttaaaacttttatgcttttctccttcctcttcttgaaatagagaataaatccaaaatgatatttatcccagtaaaatgccctggtttcaaagaacagccagccttgctgcctgttgattcttcccaggtgaatgccacccccaggctttctctgacatgcttgaacattatgca

SEQ ID NO: 32683 - DNA, 1186 bp, Homo sapiens
catgggaattgtctttggtggtgatggaggctgttttagggagacctcagaaggcttttttttttttttttttttttttttttacctccaataggctcaaatttcctattctgggatataaaaccgtgcttttcacatggtaagataatgcttagaaagccaagctccagcaagagctgacacagcaactckgctcaggtgggctgtattctgcaaatcaggggtccttgactctgccactcactggcacagctctctggaatgtagtaaagtgagaaaattaaactatatgataactacataaacagttcatcttccagagcaacttctagtagagcttgggttggttggaagcatctgacggtggctagaaggatatgctccgtgggtaagaatggaccaaaatgggggaactaccaaccgtggctggccctgctggggggcaggcccttcgttttggatccttggggctgagttccacccatctaagtagtccagtgtcaggtgcagatacctgtattacagttgagctccctacatgcctccatccattctttggtgatggccatttccctgcctagatgtgcttccagaatccatctctgcagtggatcaacctacccagtgtgtgtcccacacaagtgagcagattctgtgtccagctttggctttctcacttttccttcttttccaattcacctgcttgatccttctgggagtgagccaacatgccatctgcccagggctccagattggacaagagagggggcacagtttgaaaggagacctcctcattgatacaagacagaggtcatttcatggtagaagcagtgtgtaattatatcgcttacaaatagccacttcaagcctgagaaggaggccatggaaagggaagatatactcaacaaaaatcaaacccttgaaacttactttgaacatataattttagtaacaatcatcatctggattaattaggaaattattattgatgtttaaccaatgaaattacctcttaaaacttttatgcttttctccttcctcttcttgaaatagagaataaatccaaaatgatatttatcccagtaaaatgccctggtttcaaagaacagccagccttgctgcctgttgattcttcccaggtgaatgccacccccaggctttctctgacatgcttgaacattatgca

SEQ ID NO: 32684 - DNA, 1186 bp, Homo sapiens
catgggaattgtctttggtggtgatggaggctgttttagggagacctcagaaggcttttttttttttttttttttttttttttacctccaataggctcaaatttcctattctgggatataaaaccgtgcttttcacatggtaagataatgcttagaaagccaagctccagcaagagctgacacagcaactcggctcaggtgggctgtattctgcaaatcaggggtccttgactctgccactcactggcacagctctctggaatgtagtaaagtgagaaaattaaactatatgataactacataaacagttcatcttccagagcaacttctagtagagcttgggttggttggaarcatctgacggtggctagaaggatatgctccgtgggtaagaatggaccaaaatgggggaactaccaaccgtggctggccctgctggggggcaggcccttcgttttggatccttggggctgagttccacccatctaagtagtccagtgtcaggtgcagatacctgtattacagttgagctccctacatgcctccatccattctttggtgatggccatttccctgcctagatgtgcttccagaatccatctctgcagtggatcaacctacccagtgtgtgtcccacacaagtgagcagattctgtgtccagctttggctttctcacttttccttcttttccaattcacctgcttgatccttctgggagtgagccaacatgccatctgcccagggctccagattggacaagagagggggcacagtttgaaaggagacctcctcattgatacaagacagaggtcatttcatggtagaagcagtgtgtaattatatcgcttacaaatagccacttcaagcctgagaaggaggccatggaaagggaagatatactcaacaaaaatcaaacccttgaaacttactttgaacatataattttagtaacaatcatcatctggattaattaggaaattattattgatgtttaaccaatgaaattacctcttaaaacttttatgcttttctccttcctcttcttgaaatagagaataaatccaaaatgatatttatcccagtaaaatgccctggtttcaaagaacagccagccttgctgcctgttgattcttcccaggtgaatgccacccccaggctttctctgacatgcttgaacattatgca

SEQ ID NO: 32685 - DNA, 1186 bp, Homo sapiens
catgggaattgtctttggtggtgatggaggctgttttagggagacctcagaaggcttttttttttttttttttttttttttttacctccaataggctcaaatttcctattctgggatataaaaccgtgcttttcacatggtaagataatgcttagaaagccaagctccagcaagagctgacacagcaactcggctcaggtgggctgtattctgcaaatcaggggtccttgactctgccactcactggcacagctctctggaatgtagtaaagtgagaaaattaaactatatgataactacataaacagttcatcttccagagcaacttctagtagagcttgggttggttggaagcatctgacggtggctagaaggatatgcyccgtgggtaagaatggaccaaaatgggggaactaccaaccgtggctggccctgctggggggcaggcccttcgttttggatccttggggctgagttccacccatctaagtagtccagtgtcaggtgcagatacctgtattacagttgagctccctacatgcctccatccattctttggtgatggccatttccctgcctagatgtgcttccagaatccatctctgcagtggatcaacctacccagtgtgtgtcccacacaagtgagcagattctgtgtccagctttggctttctcacttttccttcttttccaattcacctgcttgatccttctgggagtgagccaacatgccatctgcccagggctccagattggacaagagagggggcacagtttgaaaggagacctcctcattgatacaagacagaggtcatttcatggtagaagcagtgtgtaattatatcgcttacaaatagccacttcaagcctgagaaggaggccatggaaagggaagatatactcaacaaaaatcaaacccttgaaacttactttgaacatataattttagtaacaatcatcatctggattaattaggaaattattattgatgtttaaccaatgaaattacctcttaaaacttttatgcttttctccttcctcttcttgaaatagagaataaatccaaaatgatatttatcccagtaaaatgccctggtttcaaagaacagccagccttgctgcctgttgattcttcccaggtgaatgccacccccaggctttctctgacatgcttgaacattatgca

SEQ ID NO: 32686 - DNA, 1186 bp, Homo sapiens
catgggaattgtctttggtggtgatggaggctgttttagggagacctcagaaggcttttttttttttttttttttttttttttacctccaataggctcaaatttcctattctgggatataaaaccgtgcttttcacatggtaagataatgcttagaaagccaagctccagcaagagctgacacagcaactcggctcaggtgggctgtattctgcaaatcaggggtccttgactctgccactcactggcacagctctctggaatgtagtaaagtgagaaaattaaactatatgataactacataaacagttcatcttccagagcaacttctagtagagcttgggttggttggaagcatctgacggtggctagaaggatatgctccgtgggtaagaatggaccaaaatgggggaactaccaaccgtggctggccctgctggggggcaggcccttcgttttggatccttggggctgarttccacccatctaagtagtccagtgtcaggtgcagatacctgtattacagttgagctccctacatgcctccatccattctttggtgatggccatttccctgcctagatgtgcttccagaatccatctctgcagtggatcaacctacccagtgtgtgtcccacacaagtgagcagattctgtgtccagctttggctttctcacttttccttcttttccaattcacctgcttgatccttctgggagtgagccaacatgccatctgcccagggctccagattggacaagagagggggcacagtttgaaaggagacctcctcattgatacaagacagaggtcatttcatggtagaagcagtgtgtaattatatcgcttacaaatagccacttcaagcctgagaaggaggccatggaaagggaagatatactcaacaaaaatcaaacccttgaaacttactttgaacatataattttagtaacaatcatcatctggattaattaggaaattattattgatgtttaaccaatgaaattacctcttaaaacttttatgcttttctccttcctcttcttgaaatagagaataaatccaaaatgatatttatcccagtaaaatgccctggtttcaaagaacagccagccttgctgcctgttgattcttcccaggtgaatgccacccccaggctttctctgacatgcttgaacattatgca

SEQ ID NO: 32687 - DNA, 1186 bp, Homo sapiens
catgggaattgtctttggtggtgatggaggctgttttagggagacctcagaaggcttttttttttttttttttttttttttttacctccaataggctcaaatttcctattctgggatataaaaccgtgcttttcacatggtaagataatgcttagaaagccaagctccagcaagagctgacacagcaactcggctcaggtgggctgtattctgcaaatcaggggtccttgactctgccactcactggcacagctctctggaatgtagtaaagtgagaaaattaaactatatgataactacataaacagttcatcttccagagcaacttctagtagagcttgggttggttggaagcatctgacggtggctagaaggatatgctccgtgggtaagaatggaccaaaatgggggaactaccaaccgtggctggccctgctggggggcaggcccttcgttttggatccttggggctgagttccacccatctaagtagtccagtgtcaggtgcagatacctgtattacagttgagctccctacatgcctccatccattctttggtgatggccatttccctgcctagatgtgcttccagaatccatctctgcagtggatcaacctacccastgtgtgtcccacacaagtgagcagattctgtgtccagctttggctttctcacttttccttcttttccaattcacctgcttgatccttctgggagtgagccaacatgccatctgcccagggctccagattggacaagagagggggcacagtttgaaaggagacctcctcattgatacaagacagaggtcatttcatggtagaagcagtgtgtaattatatcgcttacaaatagccacttcaagcctgagaaggaggccatggaaagggaagatatactcaacaaaaatcaaacccttgaaacttactttgaacatataattttagtaacaatcatcatctggattaattaggaaattattattgatgtttaaccaatgaaattacctcttaaaacttttatgcttttctccttcctcttcttgaaatagagaataaatccaaaatgatatttatcccagtaaaatgccctggtttcaaagaacagccagccttgctgcctgttgattcttcccaggtgaatgccacccccaggctttctctgacatgcttgaacattatgca

SEQ ID NO: 32688 - DNA, 1184 bp, Homo sapiens
tttaaaaggaagagtgaaatcttgcatgatactttcattagggattaatgtaggttggtatgctttaagcaagatcttggcgatctttcagatgcaagatgccaaattcctaaatcctttacttctaactcaagactaagacatgtgggaatcaagcacactcaaaaatactcatccaaatatttatcctattagggaaaatatctgtatcaataagtttcttttttaaatgtgacatgcccatgaagggtgaggtttaatcagtttgctttcctccttcccctttgctgtaaattatgggtactgattaaatggatatttttattaagtggagaagaaaagaaaagaaatattgggccatgagatattttatagcaaagatttggctgaagtgttaccaagctagatttgccctaacacaaaaatagctccagtgcctgggaggtagagaagaggaagaattagatgaggtagacagttgccaaasacagattttcagttatcttggtacttttacttgataacaactcatatgcttaaaatggaaaatcattttctcgttggtttttagatatatattagaaccattatttgttttttgtaagaattattaatcaattagtgctacttattgctgtaatgctgcaaatataatactgaaataagagatagcattcctgtctttatgggaaaatgcacataaatgcacacatgtatataaacaaatatagaatattatagtgctataaagaatagaaataggaggctgagagggtttttgcataggagtgctattgcgagtaggatggtcaggtgacatctgagctggcatatggtcaatatgaaaaagatagccttgtatagatcaaggtagatggaaaagatctgatagatgataataatagccagtgcaaagatcctaagtctgtacagaactaagagtggttgagaaagagcaagaagcacaatgtggctgaaccatagtgagcagggacaagaatagaagatgatcaggactgaagatgtaagactgtgtatcacattaaggagaagaacagcatgttgtaactggctattctgtgaaaaataggtgatacatcgaaaagaacagaagcaagaagacaggctaagtcaatattgtggttgtccaacatgatagtggtttggactagggtgatggcaga

SEQ ID NO: 32689 - DNA, 666 bp, Homo sapiens
atcagtgtgtgagtgtggggcatggcggagcaaagagaaggatggtgaaaatggccttgtaatctttttcgatatagttctgggytgctagaagtttttttgtatgaatatgtactatttgcattattttaaaaagaaaagaagaaaaatgagaggggttgctataatacctatgtttgtataagagtaaaaaaccaggcatcctctgacaattttataacaatgtaagttgttagaattttttggaaagcgtttggtagcatccatgaattgagtaatgttcatacacattgagccaatcatgatatattcaaaaattacacaatagctatataggcccaagtgaacaaaactgtttgaaagaatgctcattaaataatggtttttaatatttaaaatttagaaacaatctaaatatttgaccagtaaagaattggttaaacaaattatagtaagtttatttattaaaaggatatactgcaatatttaaagtattaaagcatatttctgtgtattagcagaagtggcccatgaattattaagcaaaagcaagaaattggaggacctgacttaaaatttgatcatttctgtaaattgataatagtaacattatttacataacaatgagaactatcagtctctactttgttaatgtataataaaaaa

SEQ ID NO: 32690 - DNA, 1223 bp, Homo sapiens
tgatctaattatattaagtgtgcagttgcctctcattttatcacttcccgttgctcacagaaggcagaaaggtgataactgtctactgtgtgtgcctcctcagtcttgaatttgcagagtttttgggatgaatagtatactttggttatctcagcaatggagactccatgatcccccacaaaaaacaaaaaacaaatgttcatatttacctttttgatttttagaattaattaaggcatatgttattatccttagctttcaaaccaaaaattgagataaagaggttgagtggcttgtctgaggtagatcttgctgctttcctctgtttagtatggaactgatttattagctctttataaaagataaactttaagtacttttaaaatcattaagggattcaattatgaagatggttttatagttttgtagagaagcatgaatagaacttaattcagcaagttctttgccaacataaactaatgctatccaaatcaaggtattagtgccaacgttttctatgatgtggattattaaagtcaattttaggtccacattttaagaaaggttgacaaaattagagtacctttgtgggaggagaggactatcttttgatagacaaaagagaagactttgctatggtcaaatatttgaagggctgttatgctaaaaaggaagcaacttattttttattcattcatgtaacaaatatctaagtgcctcctatgtgtttgatgctaggggtatatagatgaaagctacctcctcttctgggaaggcaatccagtaaacagaaaataacagtaccatgggatttgtattataatggtgtagagcaggagtctgcaaactatagcttacaggccaagtcttgattttgtactgtccatctgctragaatgatttttgcatttttaaaggattgtaaaaacaaacaacagtagtatgtatgaccaacaaaaccgaaaatatttaccatctgaccctttattaaaaaaggtttgctaactcctagagtttaaaatggatacataacttaaagggaagctatttttcaaattgatgtaaaaaagagctttctaatagagccatttaatactaaaaaaggctatataacaacaacaaaaagtgagcttcatgtcactgcaaaatgtctagcaaaattctgtattaggattttagcactggggaggagattgtacttcgtgacctaaaatgttttctaa

SEQ ID NO: 32691 - DNA, 725 bp, Homo sapiens
ttttttaaagcaacctacggcaggtcttacacattcatctccatagtataaagattaaagcttgaggacaagaatctgcctttgccctccaatgccagccctagtgacaatagcataatatgcatccacgtggttacccagccctagagacaagggacatattccataggatcatagtgaaatcaccttctgaatggagtatttatagctggcactgccgggcagttatcttgtctagaattatatccaaattttgctcaatcattctgggaatagccttggttagcaattgctcataatgtcaatgcttttggaaactttttactgtcattttattgtttttatttcaaaaataaaacttaaaggagcttgaaaagtagatttttagatgatcacacacaggcctgatttcagtagtttcagttctgtgcgttttactttatrtgcacccactgaaattagccaaaattaatccatatttgaacaaagactatggatacaaatgagccctaacttccaagactactcagtgaagtacactagctgaagcgtttcgaatgcattggccctgggaggcgaggaagttatagcaaacaacatatgggctctaaaatctggaactatccaagacagaacaagaaagctattttcactttccttgttccatttttttcctccagaagatgaatgatttctaatcacattttactctcatctttagagct

SEQ ID NO: 32692 - DNA, 1272 bp, Homo sapiens
agttgctgcatatatcaatagttcattcatatttagcaaagtagtattccatgtatagatacagttttttttwaaaaaaaaaatctattctccaatggatgcacatttgggttgtttccagtttttggcaataacacataatgatgctataaatattcacaggtgtgttttcatttgaacataaatttcctcttttttggacaaatagcacttgcttaggattgctgggtatgagagtcataatggccccccaagatgtctacattttaattttctaattgccaagacccgtgaagatgttaccttacatggcaaaggggaattgagtttgaggatggaattaaggtagctaattagctgaccttaaactagggagattaccctggattatttggtgggcccaatttaatcacatgggtccttccttaaaagcacagaagtccgagggatacaatgagatgttgctaggttatatcatgagttaattttcttacatttctggaagtcagaatcctaaaatcaaggtgttggcaaggctccattccttcttcaggctgcagaggagaacctgttttcttgcttttaccagcttctacaggtgcccacattccttgggctgtggcctcttcctccatcatcaaaacgcatcatcactccaacctctgttccatagccattgccttccctctacctgcctccatcatcccattgccttctgtcttcgactctaaggttccctgtggtcacactgagcccaccaagataatgcaggataatctcatctcaggatccttaacttatctgcatagtcccttttaccacagaagataatgtgttcacaggtttcagaggttacaacgtgggcattttagagggccattgttcagtctaacacaacagcattaaaaaaaaaagtaaaaaccaaaaaagcacagactattaggataatcgtctcattctggtttggctgaaacttttgagtttttagcattggaagtcttgcatccctcagtcctgggcacagtaatggttgctcaccctacctggtagacacaataaatgtttaataaaatgaacaaataaacagcaaatagatcatgaacttgctaacctagaaagaatcttagcatgtcattttggatagcactttctgctttcactaggtaaatgttaacattaccaaagattctccaccagtcatatcgattcattatctgaggcctgaggaatcccagaatagggagaagggatttcaggttatttggagcaaaa

SEQ ID NO: 32693 - DNA, 1272 bp, Homo sapiens
agttgctgcatatatcaatagttcattcatatttagcaaagtagtattccatgtatagatacagttttttttaaaaaaaaaaatctattctccaatggatgcacatttgggttgtttccagtttttggcaataacacataatgatgctataaatattcacaggtgtgttttcatttgaacataaatttcctcttttttggacaaatagcacttgcttaggattgctgggtatgagagtcataatggccccccaagatgtctacattttaattttctaattgccaagacccgtgaagatgttaccttacatggcaaaggggaattgagtttgaggatggaattaaggtagctaattagctgaccttaaactagggagattaccctggattatttggtgggcccmatttaatcacatgggtccttccttaaaagcacagaagtccgagggatacaatgagatgttgctaggttatatcatgagttaattttcttacatttctggaagtcagaatcctaaaatcaaggtgttggcaaggctccattccttcttcaggctgcagaggagaacctgttttcttgcttttaccagcttctacaggtgcccacattccttgggctgtggcctcttcctccatcatcaaaacgcatcatcactccaacctctgttccatagccattgccttccctctacctgcctccatcatcccattgccttctgtcttcgactctaaggttccctgtggtcacactgagcccaccaagataatgcaggataatctcatctcaggatccttaacttatctgcatagtcccttttaccacagaagataatgtgttcacaggtttcagaggttacaacgtgggcattttagagggccattgttcagtctaacacaacagcattaaaaaaaaaagtaaaaaccaaaaaagcacagactattaggataatcgtctcattctggtttggctgaaacttttgagtttttagcattggaagtcttgcatccctcagtcctgggcacagtaatggttgctcaccctacctggtagacacaataaatgtttaataaaatgaacaaataaacagcaaatagatcatgaacttgctaacctagaaagaatcttagcatgtcattttggatagcactttctgctttcactaggtaaatgttaacattaccaaagattctccaccagtcatatcgattcattatctgaggcctgaggaatcccagaatagggagaagggatttcaggttatttggagcaaaa

SEQ ID NO: 32694 - DNA, 1272 bp, Homo sapiens
agttgctgcatatatcaatagttcattcatatttagcaaagtagtattccatgtatagatacagttttttttaaaaaaaaaaatctattctccaatggatgcacatttgggttgtttccagtttttggcaataacacataatgatgctataaatattcacaggtgtgttttcatttgaacataaatttcctcttttttggacaaatagcacttgcttaggattgctgggtatgagagtcataatggccccccaagatgtctacattttaattttctaattgccaagacccgtgaagatgttaccttacatggcaaaggggaattgagtttgaggatggaattaaggtagctaattagctgaccttaaactagggagattaccctggattatttggtgggcccaatttaatcacatgggtccttccttaaaagcacagaagtccgagggatacaatgagatgttgctaggttatatcatgagttaattttcttacatttctggaagtcagaatcctaaaatcaaggtgttggcaaggctccattccttcttcaggctgcagaggagaacctgttttcttgcttttaccagcttctacaggtgcccacattccttgggctgtggcctcttcctccatcatcaaaacgcatcatcactccaacctctgttccatagccattgccttccctctacctgcctccatcatcccattgccttctgtcttcgactctaaggttccctgtggtcacactgagcccaycaagataatgcaggataatctcatctcaggatccttaacttatctgcatagtcccttttaccacagaagataatgtgttcacaggtttcagaggttacaacgtgggcattttagagggccattgttcagtctaacacaacagcattaaaaaaaaaagtaaaaaccaaaaaagcacagactattaggataatcgtctcattctggtttggctgaaacttttgagtttttagcattggaagtcttgcatccctcagtcctgggcacagtaatggttgctcaccctacctggtagacacaataaatgtttaataaaatgaacaaataaacagcaaatagatcatgaacttgctaacctagaaagaatcttagcatgtcattttggatagcactttctgctttcactaggtaaatgttaacattaccaaagattctccaccagtcatatcgattcattatctgaggcctgaggaatcccagaatagggagaagggatttcaggttatttggagcaaaa

SEQ ID NO: 32695 - DNA, 1293 bp, Homo sapiens
acaatacaaacctgctgctgttcaaatgtttcctaccattcaaaggagctcagttacttaagctagaaaccaaactgtgtttcacatgattcttcactcaccttcccctctcttaccaaacaattaccaagtcttgtccattctacttccaaaatctctctcaaacccacattatccacattatctttcctgcatatccacattatctttcctgcaatcacttgctgagaatataatagtctyctacctggcctccctgaacctacttttgtccctttactaatattctttccataccattgattaaataatgttttaaaatgaaactctgttaaaattcttcaatggataaagtataaaatccttcaccagtgcacgcctttcatgatctgatccttgcttatattcccagcaccatttcacatcatttttcttctccatcacttccaggaattctagccttctttcagttctctcttgcttcaggatatttgaatatgttattccctattcttaaaatacttatcctcttactcctaatgtcagtaatcttattttcttatttgtagtatccctcacagttgtaactgctaacagacctcttacagcataaactctatgaaggtaaggccccatgtctagctggttcatctctgtgtcccaagtgccaaacactaacttatcacttattgggaatgtaattaataccatatttaggtgatcattttcaccactcagacagggtcacaccttctagctgattgaatcattgcaaagtatctcattttatgaggcattttctccaatcctttacattgtacacaaaaaagtataattgcccctcaaacatcctcatcaattctatttttactgagggaatcagtaaaaaatgtaaggaaaatagatttagtttatattccaagagttgaatgttgttacagacaagtctaaaaatttattcataaaatataataagtcatgttgttaagaatttgaagaaatgcagaaaaaacaacagtgttagtgttataaaaagagatacatgtggctctcaacaagagtctcaagggacagcaccatatttgaattataaaagtgctgaaatgcaaacatcttaaatggaagtgaccactatgtatcctggaacgctgttggatgactccaaaagtggttctttgacaaagaaaccaatgtagaagataaataggaagagttttattaatactactcacggactatgagcatatataaaaaagtaatgtttctaaatcaatctattattgcatatccgat

SEQ ID NO: 32696 - DNA, 554 bp, Homo sapiens
gattttcttcgctggttgtgctggttggatcaaaccagatgtacagtcaccaccttacaaggggccacattccaaggagaaatayccatatgaggcaggggttggcagccatgtgtgcaatgagtggctggaactgagaagactctcagctgggtggtggcagtcagaggcaggaggacataatggtatttcacgggatgtcctaagaggttttctatcccattccattcaaaaagtgctagttccggccgagtgtggtggttcacacatgtaatcccagcactttgggaggccagtgtgggaagattgcttgagctcaggagtttgagaccagcctgggcaacagagtgagaccccatcactattaattaaaaaaaaaaaagtgctggttctttacctacactgatttcaggtggtaagaaagtgtgaacatttggggacagagagcattaggacaaatacctaatgcatgcacagcttaaaatctagatgaccggttgataggtacagcaaaccaccatggcacatgtatacttatgtaacaaacctgcacc

SEQ ID NO: 32697 - DNA, 1280 bp, Homo sapiens
ggcatcacccgtgcccacggcgtagcctgtgaggtttctgttaaactcccgaaggatatctggaagagaaggtgaatgggatgcagacggctcagaacagaaagccagaatagcttctctggtactgtgggacctaggtccccaaagtgggctgtgttatcatcctcatgcttcctggggagaggcagggaggcagtgtgtgtcctggacataagctgggaccaccctaagttgacatgacctgatgactaggtgggccagggtggcaagagcctctcactcttgtattaaattgtattaatacaattcacagtgcattgaagggtcactacctaatttgtctcagcacctcctgggcctgttggaaaagcctgaggctaaaaatagcgggtaacttgccctaggtcacctgacaagcacatcggagattgaacccagcaccagggattgaagcaccagggattgaactcagatcttcaggctctaaatctggtgtttattttacctgcctcggctgctttttcatagcctcctgtctcctacttaaatgctgggccataaggcagatgtcatttgctgcttacctgggaggcactttcgggaagccaaggggccagatgggtggaacagtagacagattcaagcccctgatggttacttactaggtaaggtggtcacattctccagggagccgtcccctcctgcactgtagggagtgagcaagccagtgaatgagagggagagacatattggttgaatcaatctaggaactttacacaagagcagcccccacccttcttagtgcccatcggcacctttgagatgggccagacccatctctgagtttgaggaattctgagaaaatttttaagcccctaacatattggttccctaccgaatccaggatttgaagatgagagagctgtttctttaccaratcaggagggagaatgcttagctgagtatatactatgtgcccagacatgcactagattctgtgatttcacatctcccaacaagccagtgatgtagatgtgactatgtccattttacagagtaagaaaatgaggtgcacagaggttaattaacttgttaaaagtcattgaaacccaatttgagctggaagcctttggaaaatagataagctcttctctgctcagcagtcaggtaaattccaatagaaggttcagaagggtggctgctcactacctttcaatgccccatctaattttcatttaatctaacttcaaggtacaccctattttgtttccttttatgca

SEQ ID NO: 32698 - DNA, 591 bp, Homo sapiens
  misc_feature (1)...(591): n = A,T,C or G
tgcagggtcatgtagcacaggcaggtagatcccaatccctgactctacctgcctcactgggcagggaggcctaagggactgccactgggactataaggagacaagaagtagcatccaatggagagctctgtgcacctccacatggaagcccagctgtggcncaggccgcaggatctaggtctgcactgcaggggaattagcaagtcctgcttaaagctccagggtatgtttgcagggtctccccacaacctgatattcggcaagrcccttaattgaaggagatgatgatgttttcactcaccagaggttggaacactattggaagccttccactctgtacacaggaagtcactgccccagttctaaatcaacaggagaaaagattcagtgcccaacactcattgtgcagggagataagcttcagcccaagaagaaccagctaagggatttttgatggaggctagaaatgagtcaccatacaggatcatgtgagggaaagaactgtgagttataggtgggctaggagggaaattaaagggggagaaatgggtgtgtctagctacccctatgcacaacccatagtgcatgtct

SEQ ID NO: 32699 - DNA, 1696 bp, Homo sapiens
cttgaccagcagattgactgtccaggagtctgactgccagatgctatgaaaactcatctcatctgttcagtcagatgatgaagataagacttgttgaaatattcctatcatgagagagcaaaaatggaacttcttttaaatattatttgcttaatcctatggaatttggttttttcccaagggattgctcaattcatcattctgatggatttcttctgtttaaaggtttaatgaactcaagagcatgcttgtgtgcagatgacaaatactcacagaaaatgcaacgtaaaaagttattcagccatcagcacatgagatatatctcagatagttggtgaaccagagataagcatattccatgtagattaacagatcctggttggaattgaaacgtgctcatccgtcacaagggaagaaccatgcaccacacccaaaatcagtgcatccaaatcccctgaagatcttaagctgcagattctgattcagcaggtttggggtggtgcccaggactctgcatttctaaaaagctcccaggtaaagcctctttgtggccactttattagttttgcttttattatttttaattgacatattaagtgtacatacttatgaggcatagtgtgatattttgatacatctctacaatgtgcagtgatcaaatcagggtaattagcctatccctcacttcaaatatttaccatttctttgtgttgggaacattcaaaatctgctgttctagctatttgaaaatatatggtaaactgttaactatagtcaccctactgtgctataaaacactagaaattctccttcctatatagctgtaattttctgttaatcaatttctgctatctctactccccaaccaccatccacccttcccagcctctaataaccactatttatactctacttctgtgaagtcaacttcttaagcttccgcatatggtgagaacatgtagtatttgtctttctgtgcctgacttatttcacttaacgtaatgtcctctaggctcattcacgttacctcagatgacagaattttgtttctgtggttactttgagtagaaagctgttaaaacaaacacacgcccttctagctctgggatttttagctcttccagcagcaaaagcaaagatgcatgagactgaagaaccaagagggcagatccagacccattcggctcaccaytgtctaccgagcacttagtgcagtgcccactctacataggcatccaataggtaaatgaataaatgaagaaatgcctgattcacaagatgcagctgacatttcaattctcagggaatttggtcactggttcaatgaggacaagcctccactgggctaacgtgagcctgagaaaattcagagaggctggacacagcataacccgcagccagcaatctggtattgcttgcaccccagagcttagcatccaatagttcttaatgatttcatatgggttagtttcttcagctggcttataaaatgtctttccccaatcactcctgctgatggccaacccattctacacatagcagtcagggagatctttgaaagacgtgaaccagatcatgtcactctctcctgagaccgccaatgccttcccatctttctccacttgaaatccagtggttttactcagtaattcaggctttgtgtgatctggctccttggcactcctgatctcatttc

SEQ ID NO: 32700 - DNA, 1696 bp, Homo sapiens
cttgaccagcagattgactgtccaggagtctgactgccagatgctatgaaaactcatctcatctgttcagtcagatgatgaagataagacttgttgaaatattcctatcatgagagagcaaaaatggaacttcttttaaatattatttgcttaatcctatggaatttggttttttcccaagggattgctcaattcatcattctgatggatttcttctgtttaaaggtttaatgaactcaagagcatgcttgtgtgcagatgacaaatactcacagaaaatgcaacgtaaaaagttattcagccatcagcacatgagatatatctcagatagttggtgaaccagagataagcatattccatgtagattaacagatcctggttggaattgaaacgtgctcatccgtcacaagggaagaaccatgcaccacacccaaaatcagtgcatccaaatcccctgaagatcttaagctgcagattctgattcagcaggtttggggtggtgcccaggactctgcatttctaaaaagctcccaggtaaagcctctttgtggccactttattagttttgcttttattatttttaattgacatattaagtgtacatacttatgaggcatagtgtgatattttgatacatctctacaatgtgcagtgatcaaatcagggtaattagcctatccctcacttcaaatatttaccatttctttgtgttgggaacattcaaaatctgctgttctagctatttgaaaatatatggtaaactgttaactatagtcaccctactgtgctataaaacactagaaattctccttcctatatagctgtaattttctgttaatcaatttctgctatctctactccccaaccaccatccacccttcccagcctctaataaccactatttatactctacttctgtgaagtcaacttcttaagcttccgcatatggtgagaacatgtagtatttgtctttctgtgcctgacttatttcacttaacgtaatgtcctctaggctcattcacgttacctcagatgacagaattttgtttctgtggttactttgagtagaaagctgttaaaacaaacacacgcccttctagctctgggatttttagctcttccagcagcaaaagcaaagatgcatgagactgaagaaccaagagggcagatccagacccattcggctcaccactgtctaccgagcacttagtgcagtgcccactctacataggcatccaataggtaaatgaataaatgaagaaatgcctgattcacaagatgcagctgacrtttcaattctcagggaatttggtcactggttcaatgaggacaagcctccactgggctaacgtgagcctgagaaaattcagagaggctggacacagcataacccgcagccagcaatctggtattgcttgcaccccagagcttagcatccaatagttcttaatgatttcatatgggttagtttcttcagctggcttataaaatgtctttccccaatcactcctgctgatggccaacccattctacacatagcagtcagggagatctttgaaagacgtgaaccagatcatgtcactctctcctgagaccgccaatgccttcccatctttctccacttgaaatccagtggttttactcagtaattcaggctttgtgtgatctggctccttggcactcctgatctcatttc

SEQ ID NO: 32701 - DNA, 1696 bp, Homo sapiens
cttgaccagcagattgactgtccaggagtctgactgccagatgctatgaaaactcatctcatctgttcagtcagatgatgaagataagacttgttgaaatattcctatcatgagagagcaaaaatggaacttcttttaaatattatttgcttaatcctatggaatttggttttttcccaagggattgctcaattcatcattctgatggatttcttctgtttaaaggtttaatgaactcaagagcatgcttgtgtgcagatgacaaatactcacagaaaatgcaacgtaaaaagttattcagccatcagcacatgagatatatctcagatagttggtgaaccagagataagcatattccatgtagattaacagatcctggttggaattgaaacgtgctcatccgtcacaagggaagaaccatgcaccacacccaaaatcagtgcatccaaatcccctgaagatcttaagctgcagattctgattcagcaggtttggggtggtgcccaggactctgcatttctaaaaagctcccaggtaaagcctctttgtggccactttattagttttgcttttattatttttaattgacatattaagtgtacatacttatgaggcatagtgtgatattttgatacatctctacaatgtgcagtgatcaaatcagggtaattagcctatccctcacttcaaatatttaccatttctttgtgttgggaacattcaaaatctgctgttctagctatttgaaaatatatggtaaactgttaactatagtcaccctactgtgctataaaacactagaaattctccttcctatatagctgtaattttctgttaatcaatttctgctatctctactccccaaccaccatccacccttcccagcctctaataaccactatttatactctacttctgtgaagtcaacttcttaagcttccgcatatggtgagaacatgtagtatttgtctttctgtgcctgacttatttcacttaacgtaatgtcctctaggctcattcacgttacctcagatgacagaattttgtttctgtggttactttgagtagaaagctgttaaaacaaacacacgcccttctagctctgggatttttagctcttccagcagcaaaagcaaagatgcatgagactgaagaaccaagagggcagatccagacccattcggctcaccactgtctaccgagcacttagtgcagtgcccactctacataggcatccaataggtaaatgaataaatgaagaaatgcctgattcacaagatgcagctgacatttcaattctcagggaatttggtcactggttcaatgaggacaagcctccactgggctaacgtgagcctgagaaaattcagagaggctggacacagcataacccgcagccagcaatctggtattkcttgcaccccagagcttagcatccaatagttcttaatgatttcatatgggttagtttcttcagctggcttataaaatgtctttccccaatcactcctgctgatggccaacccattctacacatagcagtcagggagatctttgaaagacgtgaaccagatcatgtcactctctcctgagaccgccaatgccttcccatctttctccacttgaaatccagtggttttactcagtaattcaggctttgtgtgatctggctccttggcactcctgatctcatttc

SEQ ID NO: 32702 - DNA, 663 bp, Homo sapiens
ccataatgcctaaatagactcccatagcaaacattcccttcctaagcatttccttttttttcttccagcaacatgctctgttttctcttagggacaccgagcttgatgtgatctgagtgaagctcttgctaggaccatgtgatgggcatgcgaccaagcactaagtgactgacgcactcattcgatggccacagtgactggttcagagatggacacatgactaaagcttgtccaaccagagtgaatcagccttggtactcttgtaagcactttyagacaagagatgctgttttcacagaacacggaattgtgaggtagtgagattatggctggaagcaccaccttgctgcaaaatggaacctgtacatgaaatcataacacagagactagcaagggctaactaagggattaagagatagtaggtcctagaaattggtttgaacacccggatcaaaataaaacttgaagccaaatgtactccggactttttggttatgagagtaaatggattccactctgtcacttgcagaaagagttttactcatgtacatctccaggtgactacataaaaagatactactgattgacttagtctctatagtcactctatagtcactcctagggcctacaatatcattgctatctatagtgggaatttattgt

SEQ ID NO: 32703 - DNA, 663 bp, Homo sapiens
ccataatgcctaaatagactcccatagcaaacattcccttcctaagcatttccttttttttcttccagcaacatgctctgttttctcttagggacaccgagcttgatgtgatctgagtgaagctcttgctaggaccatgtgatgggcatgcgaccaagcactaagtgactgacgcactcattcgatggccacagtgactggttcagagatggacacatgactaaagcttgtccaaccagagtgaatcagccttggtactcttgtaagcacttttagacaagagatgctgttttcacagaacacggaattgtgaggtagtgagattatggctggaagcaccascttgctgcaaaatggaacctgtacatgaaatcataacacagagactagcaagggctaactaagggattaagagatagtaggtcctagaaattggtttgaacacccggatcaaaataaaacttgaagccaaatgtactccggactttttggttatgagagtaaatggattccactctgtcacttgcagaaagagttttactcatgtacatctccaggtgactacataaaaagatactactgattgacttagtctctatagtcactctatagtcactcctagggcctacaatatcattgctatctatagtgggaatttattgt

SEQ ID NO: 32704 - DNA, 995 bp, Homo sapiens
tgcatttattctggtattggaagagtggcgatttgtttactcagttctttatcttttccagagtataggagttatcacagcaatcagaggggagaaattaaaagattagtgcagcactgaaaacctccagtgcggatgggctattaggaatctaaagagttcaacaagcctaaatctaagtcagcttcgtaactgctgtctctgcttcattgtagggctggattttttttttcttttcctgagcacagtttttcatcattttctcaggtgggctatggactagccagtcacttgagtagagagcccttatttcaggcagcttcaaatgcctcatcatttctcaatgagttccagctccaggagatttcagtgctggaagaattgcaataagctatgaaactttatcccttctcaagactcttccgagtcactggggaactctggcttccacgggtaatggtaatcgctccactcacttagagaaggaaggtaccacctcgggggtcacatgacaataccaaagaggttaaatcaacttccagctgaggttttacagatacttttgggatcttggaatgatattaccatattattgtgcttttactcttgtttcttttggctcaggactgagggaatagtcttgtgtaatagatttacccagggaaggcttcacctgatgcaggcaagactggcctctgggtcaccccgttttggtttaacaaataagaagggtctcaaagagaaatgttgttggtactctgagacttgtatttatctttaatttctggaagacttaggataagaatgcaacacagtatctctggggagatgagtatgggatgagagtaatagctattaaaataagagaggcgttcagggaaatgactsgtcatttgatgctttttttttttcccttcaaaaatctgcctaaaagagttacctgattcatataccactgagatatctaattgtgcctatttttaagaacttatgca

SEQ ID NO: 32705 - DNA, 1592 bp, Homo sapiens
ttcctgtgttgaattttacagagcagattttttttctgttgattcaataaaacgtttagtagtcttagtaccagctgcttgtttgtttttaattctgattaaggttagagtctagaaagagaagacaatatgaaatatgttgggtttacctaattcatagtattcttagatgtatctggcatgctgaataaaaatgtgtttaattgcatcctttcattttatacattattacatcttaagttttcttttctcttctgagagaaccaatggattaaggtactaaaataatcaaatgttgcaaagctgaggacatgtggtagaagtaactttaaatgtttttattctttatgacagctttgattaaagatgacttccttgtttgctcaagaaattcgcctttctaaaagacatgaagaaatgtaagtttttttaaagggatgattcagatatagaaattggactggctttgttagtgaaatattgtatacacaggatgacttaaaaatttgcaagcatgtcattttaattttctgacacttaagaggttttagtgttagggaatttcattgtttcttatgaataagcaagattaaaaggtatgttctatgyatttttactctttgtaagtaatatatagataaatttgcccctcctcccaccctttctaggctccacattggcatttaatgggcttctctaaacctcttacacagggctggcttcttgggtatgtgacttatatacagtcacaggtcctgcatttggtttaatgctctcatgccattgtcttgcatcattttggactggaccctgcaaattgtgtagccagtcctgctctttgctttgtattattcactcttttcctcctctgtttgtgggctttcaggttttccttttctttaattaattaccagacgttctttccttggctcctaagatactttccttaccaaaaaattgactgttcatagacctgagattttaattccacctttaagacagcctgatgaaacacagtgtttcttgagaacctccacaactatttgggaaacagtttgactgttatgtataccaacgtatgtatcttttaatcatcttacatattgtcctaaaaagaacaaaaacatataaaataagcatttgaccagcaagaaacttttaaagtatattatatgtaacgaagtagtttgaagatgtttacttgtaattttttacatctttcttcaattactgttttaccttgttgtgagtatgcatacatacacacagcctctcactcatatatcaaaccatcatctttctcttggaaaaagagggaaaaaatatttttattgcttcttcaaacatatggaagtttagcacaattctaaatgtgtaacatgagattcaggggtactgaagtgttaagcagaaggtttcatatagcaagttatatcaatgtatgtgtgtcgggaggtatatataactatgtgtacaaagggatatgtattacagtttgcattttcaccaaaaattaaaacatatcttcaacattctaaaataatttcaaaagaccagagaggctaaaaaaacagaagcatgtacttatggca

SEQ ID NO: 32706 - DNA, 562 bp, Homo sapiens
tgtaattagaatatatcattggctatatttgttcaaggcaatttccctactaggatgtaaaagttaaggtccttgagggcagaaacattgcattatccactaccatatttcaagtatctagaaatctgatatggtagacacttaacaaatatttgtttattgaataagttacaaatacatgtccctcgccaaacacatacacacacacacacacacacacacacacacacacacacactgaatgagaacactgaactctgagctttttgtaartatgagtattattaataggcaagactttctttccggccttgtttagggaaagggcatactagctcaaggtcacacttatttgaaagtaaggattaaggagggcattgttagaattctcctatctctttccttctttcaggaccctttgtggtggtttagaattacctcaaaatctgcatttccttgtatctgtccctttccctagagacaggaaaatcttcgaaagaaagggattgtcttatttgttttgtaaacaactgtattagtcagggttcacagggacagaact

SEQ ID NO: 32707 - DNA, 551 bp, Homo sapiens
tggtccttttaatagcaacrtgaaggggactcaggaaagaaaaggacagccactgtgcaaaggcagcagccttttaggagaatgggcagaccacctggaatcatcattcatttggctaccctgctattctgggaatttgggggaagacttacaaatagaatcctacacaatatactaagcttggagccagtcagaaagataccagtctatttaaacacacttttacttactttctgttccttcactcatgtaagttcctgtatttgtagtatcgttatatttaaaccattataatgtatgtcctctatgcaatactgaaagacagatagaagtcaaaaccccagaggttgaatgtctgaaatggcttatttgaaaagagactgatttttttcatactgaatcagcatatatttattaaatatttttgcaccaggacttgttcaaggttcttttttttttttttttttttgagacggagtctcgctctgtcgcccaggctggagtgcagtggcgggatctcggctcactgcaagctccacctcccgggttca

SEQ ID NO: 32708 - DNA, 590 bp, Homo sapiens
gatattcactcaacagactgttacatagtcattcaaaagagatgtgtgtatatatatgcatacataggtatatacatatatatatcttttaaaatatatatctctctgtacacaaaatttaatatattttttataaaaatactgtgatacacattgcattttaaatattactctaaaagtataaattttttaaagactggtcatcaagttacaggccagaaaaagtaatatttttgttggttatctttaggtagtgagataatggaagatgttttatttacttttcattatccgattcttcattttgcatttttttctttaatatctrtactttttaaacaatgagaatatgaagaaatgatttacaaatgctttccttttaatgccaaaatgtattgcataagtttttatttatttatttattttacagcctggtgtcattaatttattaatgccagtttatttaacctatctttaacttaagctataaaaatagagatacaagggaaaggggaaaatagaagtggtagaaaaggcatttacaatgtataagtactagtgcctcacttaaacaaaatcaagtgctcttc

SEQ ID NO: 32709 - DNA, 590 bp, Homo sapiens
gatattcactcaacagactgttacatagtcattcaaaagagatgtgtgtatatatatgcatacataggtatatacatatatatatcttttaaaatatatatctctctgtacacaaaatttaatatattttttataaaaatactgtgatacacattgcattttaaatattactctaaaagtataaattttttaaagactggtcatcaagttacaggccagaaaaagtaatatttttgttggttatctttaggtagtgagataatggaagatgttttatttacttttcattatccgattcttcattttgcatttttttctttaatatctatactttttaaacaatgagaatatgaagaaatgatttacaaatgctttccttttaatgccaaaatgtattgcataagtttttatttatttatttattttacagcctggtgtcattratttattaatgccagtttatttaacctatctttaacttaagctataaaaatagagatacaagggaaaggggaaaatagaagtggtagaaaaggcatttacaatgtataagtactagtgcctcacttaaacaaaatcaagtgctcttc

SEQ ID NO: 32710 - DNA, 523 bp, Homo sapiens
aaaccatgttctttgtagcaacatggatgcagctggaggccattatcctaaacaaactaatacagaaacagaaaaacaaatacctcatgtcctcactcataagtgagaactaaccattgagtatacatggacataaagatggaaatgatggactcttgggattattagaggagggacagaaagagtagggcaagggctgaagaaacctattaggcactctgctggctaccwgggtcacgggtgcaatcatacctcaaatctcagcatcatgcaatacaccttcataacaaacttgcacatgtacccccagattctaaaataagagctgagaaaaaagaacattctaaataacacaaattattttaataaatttaaatgcagtataatagcatatttttatctaaacttctaaatatgtaaaatgggaatgattatgttttacattgtctgaaaacatacatactggggaatagaatttttgcatgaatttagaatgtcaaaccaattagaaggctagaaaatt

SEQ ID NO: 32711 - DNA, 523 bp, Homo sapiens
aaaccatgttctttgtagcaacatggatgcagctggaggccattatcctaaacaaactaatacagaaacagaaaaacaaatacctcatgtcctcactcataagtgagaactaaccattgagtatacatggacataaagatggaaatgatggactcttgggattattagaggagggacagaaagagtagggcaagggctgaagaaacctattaggcactctgctggctaccagggtcacgggtgcaatcatacctcaaatctcagcatcatgcaatacaccttcataacaaacttgcacatgtacccccagattctaaaataagagctgagaaaaaagaacattctaaataacacaaattattttaatamatttaaatgcagtataatagcatatttttatctaaacttctaaatatgtaaaatgggaatgattatgttttacattgtctgaaaacatacatactggggaatagaatttttgcatgaatttagaatgtcaaaccaattagaaggctagaaaatt

SEQ ID NO: 32712 - DNA, 787 bp, Homo sapiens
tcagaagaatgaggtgtgagtcaacaaaaatctccagggtcctgacgcaaaataggtctctttcaatgttacagcaagagaaaaaaaaaattaaaagaatgagcaagaaatacaaatgaacaaattatatttcaaaattgaaaggtgtttactcaaaacatgtagacaygactagtactaaaaattatctgctatattatatgtaagattacatacattatgcagtactcagggcaatgaagcaaaatatcattcttttcaaatttttcaaatcactgaatttctagattcataatggaacacctctgtattcgctgcaaactaccccaaaacttagggtttgaaaatacgatttatcatgtcatagtttgtgtgtgtcaggaatttggaagtggcttaggtagatgggcaggtttacggtctcttacaagtttgcaatcggggtcagctgggctgcaaggatcgactagggagagacccacttctaagatttctcacatgggcctgcccacatgggtacctcaggacatggtagctggttctccccagggcaagtgatcccagagagagcaagagaaccacaagatagaagctgtaatccctaatctcggaagtgatgccattgcttctgccacatttcattttttggcaactgatcaggctagcctgcattcaatggcagggcaatatgtaagggtgtgactactagtaggtgggagtaattgggaacatcttagatgctgcctactatatcctcttttctgttttgattttaaatccaaagact

SEQ ID NO: 32713 - DNA, 1281 bp, Homo sapiens
tacagttattcctatcttctctagctgacatcatacacaatgttatattggaagacataattccctcagtaatattgtactgaacagaaggattaaatccttcaggctcctcctactgtctaccttgcaaatcttagcctattcagttttgcattgtaatgctgacttttccacctttgccaaatgtttttttggttgatctccaccttcaaaacccctactctctgcaaatctttcaaattcttatatcttaaaaatttacatcaaaatgaaattattattcataggtgaatttaagcataaaaatttcctcttttcatttcatttatcctcttttcattttcattcatttcctcttttcaaataataaatataaaataatgtaaaaatatgtcattttaccctatctaatatattgcctttaattttcctaaagaaggtctttttattgtaatgtgtatgtgtgttgcttctttgggcaaatcttgtgtggtatagagacaaataatagattagagttgaacgagattggtggtggtggtttttatgctgtgatctctgtagatactttctatattaatgaatggaaaccatttaatctttctaaatgtcatatcaacttatgagataacaataactcaataaaatataaataatgaaatagtataatgtatattaaagcacttgtagtttgagaggcaaaacagaaattttcattgtacacttctcatacatcattgctttatgttgttttaaaactcaccgttaaatttccatggagttwgataaatcatattaaacatacattaactctaaaatttaattttaataaatcacggatatgaacaaggaagccaggtgctgattaaaaatttgccaatttttgtcaaaggtggtagaagcatattaatagcatttcaagtcctgtttatattttttattattattaaagctaaacaacatttgtaaatgtttattagctgtaaatacttagggaaactggtgtttggttaaattaatattacatatctatattacagactagtacgtgaatattctaaacttattgtaagattataagcatacattgcttggggaagatgttaccaaatacttttatgactaaatgtagactaagaaacaacgttttcaatataaatatgttgttgtaatttgcatatatatataaaatacactaaaaattgttatatgagcatgatgacaataatagtaatttcatgatttcattttgcatttgtacttatgattttttcacaatgc

SEQ ID NO: 32714 - DNA, 586 bp, Homo sapiens
gtgacatattaaccagtgatagttactcagagtaaatattttacagaaagattaagtgatatggtaaacattgtcagagttcattaatggattttcattcattaaatcatctgatgacaaaatcaacaaaccaattcaaacaaaccaacyttaaattctgagcatcactgctaatttgagctttaagatatatcttcctatttactagaattcactatcagaagtatgttttctaggtttatgctttaaaataagcttagattgatgaaaacactttggcacagatgattgttttcaaagaagcctataataaactaaatgatgtgtaactggcatcattattttaatctgttagataaatatcccaaggtactaaagtgtttaaaaataataatttaacattattgaatgtatgctttctacaggaagggtattttttaaagtttttttttatttcaatggcttttggggtacaaatgttttttggttatatggatggattgtatagtgaagtttgagatttcagtgcatgggtcacctgaatagtgtacatcgtaccccaaatgtagctttgtgtccctcatac

SEQ ID NO: 32715 - DNA, 586 bp, Homo sapiens
gtgacatattaaccagtgatagttactcagagtaaatattttacagaaagattaagtgatatggtaaacattgtcagagttcattaatggattttcattcattaaatcatctgatgacaaaatcaacaaaccaattcaaacaaaccaaccttaaattctgagcatcactgctaatttgagctttaagatatatcttcctatttactagaattcactatcagaagtatgttttctaggtttatgctttaaaataagcttagattgatgaaaacactttggcacagatgattgttttcaaagaagcctataataaactaaatgatrtgtaactggcatcattattttaatctgttagataaatatcccaaggtactaaagtgtttaaaaataataatttaacattattgaatgtatgctttctacaggaagggtattttttaaagtttttttttatttcaatggcttttggggtacaaatgttttttggttatatggatggattgtatagtgaagtttgagatttcagtgcatgggtcacctgaatagtgtacatcgtaccccaaatgtagctttgtgtccctcatac

SEQ ID NO: 32716 - DNA, 538 bp, Homo sapiens
gtgctacagcagcagatgcaccaaacattgtgagaaaaaacatgaaagagttattaattccactcggagggtgtaatgaaatcctcataaaagtccattttggaaccggtagtttatttggtttgcatgtgtataaaatgggaatcctccaaatacgcattcacaaggaaggcaacattcataggaaggcattatttttaaaggccattaaagtctctgtttgagataaaaactgctgatactacacctgataccactattatcattattgtgaaaactcaacaacatgataattaaccacattgagtgctgggaataggggggttctgcacttcaactcgtgaacatttgaccatctccccaaacttyctccaattgtgaatcacccccaaataagcaccgaataagaaattaccaaatgcacaaaaacattcacacacacatacacacacttggaagttagtttcttaaatgttaaatgttttaatacatacaaaacatttactacactgtggaaccaagtggtgcctttccttca

SEQ ID NO: 32717 - DNA, 538 bp, Homo sapiens
gtgctacagcagcagatgcaccaaacattgtgagaaaaaacatgaaagagttattaattccactcggagggtgtaatgaaatcctcataaaagtccattttggaaccggtagtttatttggtttgcatgtgtataaaatgggaatcctccaaatacgcattcacaaggaaggcaacattcataggaaggcattatttttaaaggccattaaagtctctgtttgagataaaaactgctgatactacacctgataccactattatcattattgtgaaaactcaacaacatgataattaaccacattgagtgctgggaataggggggttctgcacttcaactcgtgaacatttgaccatctccccaaacttcctccaattgtgaatcacccccaaataagcaccgaataagaaatkaccaaatgcacaaaaacattcacacacacatacacacacttggaagttagtttcttaaatgttaaatgttttaatacatacaaaacatttactacactgtggaaccaagtggtgcctttccttca

SEQ ID NO: 32718 - DNA, 426 bp, Homo sapiens
gctttattttcttttgtatcactcttttttatctaaatccaatcactttttagaatctgttcttcacatttatgtttatataagataagaaagcttctagtagtccagtttttatgtaattttctagtctgtacttatgtcacaatcatttgtgagttgaaatcttcaaatayctattaggaatgctcaaattgagaagacattttgaggtacattacctgactatttcaaataaaagttagatatttccttcctcattgttgtctgtagtatacttatcattgctttcgttcttagcctcatgttgtataggtgtatttctcccttaggtgttggctacattctaaattgtatttttctttgaggttttaagctttaatgtttatatacaaaaaaattaatttgactgatttatagagagaatta

SEQ ID NO: 32719 - DNA, 426 bp, Homo sapiens
gctttattttcttttgtatcactcttttttatctaaatccaatcactttttagaatctgttcttcacatttatgtttatataagataagaaagcttctagtagtccagtttttatgtaattttctagtctgtacttatgtcacaatcatttgtgagttgaaatcttcaaatacctattaggaatgctcaaattgagaagacattttgaggtacattacctgactatytcaaataaaagttagatatttccttcctcattgttgtctgtagtatacttatcattgctttcgttcttagcctcatgttgtataggtgtatttctcccttaggtgttggctacattctaaattgtatttttctttgaggttttaagctttaatgtttatatacaaaaaaattaatttgactgatttatagagagaatta

SEQ ID NO: 32720 - DNA, 582 bp, Homo sapiens
gatcttaatatggtagtaatttacagccacaatgtgtacccttattttatagatgtgcatatatatatgcctaacagagatactaacttatcaaaaattatttcaccagtgcgcggcagatgttcaacttcaggctacacatccctgatctttccactaattcatatgctttgttaatgtattctccatatgcaatgaagtttgccaatctctgtgaattaaaaattatcaaatggacagttatgtccatataacatgaaaatttattatgcagctcttcccttctagatctgcagtccttcaagcgggtaataatgccatcaccatcataggtacattgaaaccttatatgcactcaagatctccacttggtttgcaaattcatggaatcttaaagaaggaagtgccytgaatttgaccattcaccttgaaactctaaaaaattcctgtcagcctcttttggcattgattcatccacttcttcctaagacgggattctatctctaaacaactctgctttacagttgttgggtttttttttaaccaagttatgtctctttatattcttacccactgacttaa

SEQ ID NO: 32721 - DNA, 583 bp, Homo sapiens
atgctgagctgttttcagaaacaaagagaacaataattccaagtaacatatgaatatatttttacaattataaatagtgtttttataattgtataaggggactctcgatgcaacatcagtcaccagagataattcaagtgatccacctgtataggcaggtaaccctgttcttctctgttacatgtgaatctacaggaactgttataaaggatgatttatcaggtagagaaagagcatccctcaatcaagagtaactcacttgttcacccctccaaagaagctatcaagattccatcttaccaaaatcaaaacatgtttatctactagtatatggaattaataaatcacatattttaactgtgcctttcttgataggtaaaaaagaataaataattggtatamataaatgacatttataaaagttttacaaataaaataaataaataatttatttatttacaaagaaatgattggtatcattaataataatattgacaatctattaatctcaagaggtgtgtgataactgggagtcaatcttaatttgaactaaattctttttagcactcagtaatctacactc

SEQ ID NO: 32722 - DNA, 712 bp, Homo sapiens
tgccacggacatcccaaagatctgggataacaggcatgagcctccgctcctgggtaacataattttwttatattatatattggagatggagtttcgctcatgatgcccaggatagagtacaatggcatgatctcggctcactgcaaccttctcctcgcgggttcaagcgattctcctgcctcagcctcctgagtagctgggaataagaggcatgtgcctccacgcccggctaattttgtatttttagtagaaatgaggtttctccacgatgttcaggctggtcttgaactcccgacctcaaatgatccgcctgcctcagcctcccaaagtgccgggattacaggtgtgagccactgcacccgacccataactgccagttttatacaaacctttatatccttatattttagatatgtctcttgtttgtacaaagtacatagcaagatatttttgtctgtttgtatttaattcaaactttcttctttgctgaacttttactctgcttctcttatttcttttttatatattttgaataaatatatgacatttttcccagtctggatgggaatccttaaatcccatcttcctgaaactaaataatagcacttttgacatttctagtcaaaatgctgttagatattgcttttattacaattctatttttctcctgaattttaatcagaattatgtacaataattttttaataatgca

SEQ ID NO: 32723 - DNA, 712 bp, Homo sapiens
tgccacggacatcccaaagatctgggataacaggcatgagcctccgctcctgggtaacataattttattwtattatatattggagatggagtttcgctcatgatgcccaggatagagtacaatggcatgatctcggctcactgcaaccttctcctcgcgggttcaagcgattctcctgcctcagcctcctgagtagctgggaataagaggcatgtgcctccacgcccggctaattttgtatttttagtagaaatgaggtttctccacgatgttcaggctggtcttgaactcccgacctcaaatgatccgcctgcctcagcctcccaaagtgccgggattacaggtgtgagccactgcacccgacccataactgccagttttatacaaacctttatatccttatattttagatatgtctcttgtttgtacaaagtacatagcaagatatttttgtctgtttgtatttaattcaaactttcttctttgctgaacttttactctgcttctcttatttcttttttatatattttgaataaatatatgacatttttcccagtctggatgggaatccttaaatcccatcttcctgaaactaaataatagcacttttgacatttctagtcaaaatgctgttagatattgcttttattacaattctatttttctcctgaattttaatcagaattatgtacaataattttttaataatgca

SEQ ID NO: 32724 - DNA, 712 bp, Homo sapiens
tgccacggacatcccaaagatctgggataacaggcatgagcctccgctcctgggtaacataattttattatattwtatattggagatggagtttcgctcatgatgcccaggatagagtacaatggcatgatctcggctcactgcaaccttctcctcgcgggttcaagcgattctcctgcctcagcctcctgagtagctgggaataagaggcatgtgcctccacgcccggctaattttgtatttttagtagaaatgaggtttctccacgatgttcaggctggtcttgaactcccgacctcaaatgatccgcctgcctcagcctcccaaagtgccgggattacaggtgtgagccactgcacccgacccataactgccagttttatacaaacctttatatccttatattttagatatgtctcttgtttgtacaaagtacatagcaagatatttttgtctgtttgtatttaattcaaactttcttctttgctgaacttttactctgcttctcttatttcttttttatatattttgaataaatatatgacatttttcccagtctggatgggaatccttaaatcccatcttcctgaaactaaataatagcacttttgacatttctagtcaaaatgctgttagatattgcttttattacaattctatttttctcctgaattttaatcagaattatgtacaataattttttaataatgca

SEQ ID NO: 32725 - DNA, 1789 bp, Homo sapiens
  misc_feature (1)...(1789): n = A,T,C or G
aaataacagtgcaaacagcatatctatgccatgtgtgagtaaacatttaaaatccttctaccccatagttagaatctgccctgtgatttcatcataggcattcaatatgactatattttagtgtataattatctaactagcggaaggacttattttatatagataaaatagttcataaggcttataaaccacatttgaatcttcatttacgaactccataactcaaaagaaaaaatgacactttgtggctttcaacttaatacaattaatttcaaataacaactcagtttctactaatgttttttcttattttgttttgtatcatacagttataaacaggtagagtcagaaatgagttagaagacgagagctcttagatcaagagttataaataagaggtcatttcccttctcatagcatctgataattctcaaaacgacatccaaaaattgtcatgatcagaaaactgacttccttgattctgagtcagcttttctctaaacagagacttctacgtggttgtctgttctaccacagacatttggccattaagagtgtgaagcagccgagtgtggtggctcaggcctgtaatcccagcactttgggaggccgaggcgggtggatcacgaggtcaggagatcgagaccatcctggctaacacagtgaaaccccgtctctactaaaaatacaaaaaattagccgggcatggtggtgggcgcctgtagtcccagctactcgggaggctgaagcaggagaatggcatgagcccaggaggcggaacttgcagtgagccgagatcgcgccactgcactccagcctgggcgacagagcgagactccatctcaaaaaaaaaaaaaaaaaaaaaaaagagtatgaagctcagaggttcaaagtggcatatttgataaaaatttcaagagattgcttttggtgtagttacatactggattcatttttttgctacatttaatacaacaccttcaaaaatatccaaaatattaatascatacacatcatatttggccttgaagtaagttcaaagactctttcaatttgtaaaaaattattcaattaacaaattaattatttaattaacaatttctataattaataataccttcattaattgcctgaataagcattgcagaaaaattctaagttagacttttaaatgcatgagatattatgtttgatgagactggcttgatttcttcntggcactggagcaatgaataggagatctagatagaaagtgtaaagccataaatttgggttaactattactttctgttctaaccaatatggatctatttcataaaataaatgtgcatttagtttttctctctcaaatatcaagcattccagcatttcaaaaaataaatctggtttcaatattattttttattcattttccatatagctaatgagaaaaatgactaccttgagccactttccataccagcattcaggaacccaacaatgaaaaaaccttgatgtctattaaaaaaaaaaaaaaaaccgaagcaggaaggggaattaaaacgcacatgtcatagaaccaactcatgtgcctatcaagagtggactgggtaaagaaaatgtggtacatctaaattatggaatactatgcagccataaaaaagaatgcaatcatgtcctttgcagccaagtggattcatctggagaccatcatcctaagcaaattaaagcaggaacagaaagccaaacactgcatgttctcacttataagtaggagctgaacattgggtgctcatggacacaaaggtag

SEQ ID NO: 32726 - DNA, 1789 bp, Homo sapiens
  misc_feature (1)...(1789): n = A,T,C or G
aaataacagtgcaaacagcatatctatgccatgtgtgagtaaacatttaaaatccttctaccccatagttagaatctgccctgtgatttcatcataggcattcaatatgactatattttagtgtataattatctaactagcggaaggacttattttatatagataaaatagttcataaggcttataaaccacatttgaatcttcatttacgaactccataactcaaaagaaaaaatgacactttgtggctttcaacttaatacaattaatttcaaataacaactcagtttctactaatgttttttcttattttgttttgtatcatacagttataaacaggtagagtcagaaatgagttagaagacgagagctcttagatcaagagttataaataagaggtcatttcccttctcatagcatctgataattctcaaaacgacatccaaaaattgtcatgatcagaaaactgacttccttgattctgagtcagcttttctctaaacagagacttctacgtggttgtctgttctaccacagacatttggccattaagagtgtgaagcagccgagtgtggtggctcaggcctgtaatcccagcactttgggaggccgaggcgggtggatcacgaggtcaggagatcgagaccatcctggctaacacagtgaaaccccgtctctactaaaaatacaaaaaattagccgggcatggtggtgggcgcctgtagtcccagctactcgggaggctgaagcaggagaatggcatgagcccaggaggcggaacttgcagtgagccgagatcgcgccactgcactccagcctgggcgacagagcgagactccatctcaaaaaaaaaaaaaaaaaaaaaaaagagtatgaagctcagaggttcaaagtggcatatttgataaaaatttcaagagattgcttttggtgtagttacatactggattcatttttttgctacatttaatacaacaccttcaaaaatatccaaaatattaataccatacacatcatatttggccttgaagtaagttcaaagactctttcaatttgtaaaaaaktattcaattaacaaattaattatttaattaacaatttctataattaataataccttcattaattgcctgaataagcattgcagaaaaattctaagttagacttttaaatgcatgagatattatgtttgatgagactggcttgatttcttcntggcactggagcaatgaataggagatctagatagaaagtgtaaagccataaatttgggttaactattactttctgttctaaccaatatggatctatttcataaaataaatgtgcatttagtttttctctctcaaatatcaagcattccagcatttcaaaaaataaatctggtttcaatattattttttattcattttccatatagctaatgagaaaaatgactaccttgagccactttccataccagcattcaggaacccaacaatgaaaaaaccttgatgtctattaaaaaaaaaaaaaaaaccgaagcaggaaggggaattaaaacgcacatgtcatagaaccaactcatgtgcctatcaagagtggactgggtaaagaaaatgtggtacatctaaattatggaatactatgcagccataaaaaagaatgcaatcatgtcctttgcagccaagtggattcatctggagaccatcatcctaagcaaattaaagcaggaacagaaagccaaacactgcatgttctcacttataagtaggagctgaacattgggtgctcatggacacaaaggtag

SEQ ID NO: 32727 - DNA, 196 bp, Homo sapiens
actggaacagggagatgtttaggttttaattgaactcttaggtccagaataaattaaaattgcatgtaaatttggattccatatacaacaccattttatatcattatacagtaagctgtttctcttttttgttattcatccgatattaatgtaggtacactactttttctttggttacttattgttcacctakttt

SEQ ID NO: 32728 - DNA, 784 bp, Homo sapiens
  misc_feature (1)...(784): n = A,T,C or G
tttgggggaaatttgttctgcagtgatagaaaaattaatacaacatgcttctcaaaagtacaataggattttttaaataatcaaacccaataaacagtataggaatcattatgagcatggttaattattaatcccgagaaagtagataaacacaaacgttctttttcttaatagtgggacttaccttgaataataggacaagcatttttttttcttacagaagaaactaccttaagttctgtgtgataactaacagggaaccagagagatatttcactggtttcaaaaatagaccaggaagtagaaaacagccccaaatttcaaaaatttaaaaatagaaccttcacatttacttctgtgaacatatttgttccttttctttagaccaactggatcttcaaccatattactcaccacagtgtcatctttaaattttggcctctgattacatgctaagacataaaagtagtgcatagaataaatggatctatacttagcattcaaattagatgayagaatatggaattnnnnnnnnnnnnnnnnnnnnnnnnnnnnnnnnnnnnnnnnnnnnnnnnnnnnnnnnnnnnnnnnnnnnnnnnnnnnnnnnnnnnnnnnnnnnnnnnnnnnaaccaatacattgggttctttgatccaaatgcttgtctgcaatcacctctactcagtcattgcaaatcaatcactagaccagaattctatgctaagttctggaccctaatacaacttgataaatatattacatatatttatttaatatattacattc

SEQ ID NO: 32729 - DNA, 632 bp, Homo sapiens
tgagccctggaggcaagaggttagaaagtgagagaagggcttgaaagttacatgcctgttgatgaagattcctgccttggactatgagaaggtctcctctggaagagagtaaaaaatccctcaacgcaaataataaaaaacacttttttgatatatgaaaaaatgctcaacatcattaatgatcagggaaatgcaaatcaaaaccacagtgcaataccaccctactcctgcaggaatggccataataaaaaaatcaaaacataatagatgctagtgtggatgtagtgaacagggaacatttctacactactggtgggaatgtaaactagtacaaccacgatggaaaacagtgtggagattccttaaagaactaaaagtagatctaccactggacccagcaattccactcctgggtatctacccagaggaaaagaagtcacyatccgaaaaagatacttgcacatgcatgtttatagcagcacaattcacaactgtaaaaacgtggaaacaacccaaatgtccatcagtcaatgagtggatgaagaaactttatatatatatatatttttttcatatatatattcacatatatattcatatatatgaatatatgtgaatatatatgtgaatat

SEQ ID NO: 32730 - DNA, 387 bp, Homo sapiens
acctacggctgggggttgggggatggatggaaagatgggatcaaggagkgtaagtgaaggagctggctctcaggctctgactccaggccaggcaaccttgagtgagtttttggacctctgggtgcttccatttccttttctgtaaaaaacaaacaaacaaacaaacaaacatcataaaaaactcatgtcctaaggtcgtggtaaaggttaaagaagataaagtacagaaggaattcgcacagtgctttgcagtagcaaacgctctatgcttttcctgtaatttcctgttatagtgttcatattaatatgcatattcctgattggtgctctgagaacttttccgttgctgtgttgggttcctccagtcgtttgtggatggagatcatg

SEQ ID NO: 32731 - DNA, 500 bp, Homo sapiens
  misc_feature (1)...(500): n = A,T,C or G
cttttttttctgagacagagtctcactctgttgcccaggctggagtgcagtggtgtgatcttggctcattgcaacctccgcctcccgggttcaagcagttctccatgcctcagcctcccaagtagctgggattataagcacccactwccacacctggctaatttttgtatttttagtagagacggggtttcaccatgttggccagactggtcttgaactcctgacctcaggtgatctgcctgcctcggcctcccaaagtgttgggaatacaggcgtgagagggtatgtttttaaacttccaaaggtccttgaactctttgacatttaatacaaaatttacactttaacacttttttatttgtaattattatgggtacctattagtacatattcaggggtacgtgtgaaattttggttccgccttcctttgggttgatccaattagggggattcgggtttccctcccctcngccttttatcttttattcatatttttccgg

SEQ ID NO: 32732 - DNA, 582 bp, Homo sapiens
tcatttatatagttggagtcttttgcaactttctaccacaaaacagaaagcagaaatccttgtatttaaagatatacaaggtctataccctttcaacagattagccagtcataaatgatctctcagtttctgctcaaacttctttcctacttactagtttgtacaacaaggacatcctggtccagttcataaaccagtcctctccagggcaagtagataagtcaccaatcccactgcctatcaacatttgattatatatatatatatgaggttggaagtggaagctttaatrtttagagtctgtttatgggattagcctggctaaccatttattaatatacccatagttctctgcatcacaataaccttccctgtcttctctgacacctacctaatgtgtttccattcacattactaatctgttacctatccaacatttcaatgacatagtggtatttgtaccattccctgagctccatcctacttggccagaatcctgatgctacttaaattttgccagccaccaagagtcttccccctacttgtctccatatcacccaaccaccagtaagcaccctgcta

SEQ ID NO: 32733 - DNA, 798 bp, Homo sapiens
tttttttttttttttttgaggcagaggaggaagggcgtcaatagtttaaagagcctcctaaacacatacattcaagtgttcctgccagtaggtgggggagtaggctggcataatcagaggttgttttttgccctgggctccaggctaatgatcagatgatcattagggtccactggaatttaggcattctccatttctcagtataattttagtgttctttacttagctttgtagcagaagaggatatttaccctgtaggtagactattaactgaacttactgtggagttgaatgaaacataaaatacacaaggctgagtgtaagttagaccaaaaatcttttctcrtattaagagctggcagatattctctagccatccaaggattcttcaacatttccgtcttgctttctaggaatgagaattatccttcacaacattctctatttagcatacatgttgtctctttgtaggtgccatttcattttgttcttacaacaactctaggcagtgaatacaattgtcatagccattttacagacgaggagattgaggaacacagaagttaagatcatttgaagaagaaagctaaggttcagggagtttggcctttttctggagcctgtggcccttgttgtgcctcattatgtccctgtttccattgatgttcttttgatccctgtctcctagtcttttcttttggatggagtttgtgcaatgggtagaggttgggaggacttgcaacttcccgatggcaatttcctaactttcctgcttcttttcttatgttattctttgtg

SEQ ID NO: 32734 - DNA, 1119 bp, Homo sapiens
aggagacgagggaagcccagtgaggccagtctcatttgaattacaagtgaataaattgaattttaagctgtatgcaattattattctataatctatcatgtatatttaatcatatgatagattatagaatcattatttatcttcgtttatctttatagaatacgtatttaatccccacccctctcagaggttattatacaaaagtaactaagttggaatatgtgctgacaattgcagtcaagattctgtggctagagagtagagggagtaatagaggtttttatagaatgattccagacaaactttcatttctgttgacatgagcttgacataatatatgcctacaagttatcattatttgtagattaataggacagtttataagcttcttatcaattttagtcaagatataattctttatccaactaatgagggattgttagcacataaataacattccaagagtgtgttttgtccatttcagtaagtcaaatacttattcaattggtgacaaargcaagatctaaattcacgagcactttatgtccttcctcagtggaaggtataacaggaagtaaattaaggttctatataatttattggatttttaaaagctttgtgcacttttcctaaaaatgccttgaggcattaacaataaaattaacttaagcatctgcatctacttatagccataatgatatattcaaatggaaatcaagagcatgcaaatcaagcagtatgctgttacccttagaatattgaagggtgcattaaagatatatagttattttaataagcaaggatgaaaacctttcatgtgtcctctttttatacattctgtacttctcttgatcgagcagcaaaacaaacaaacaaacagacaagaccaccaaaaaaccaaaacccctcaaaactaatagaagctagggttcaggggctctacttgaatgtgaatatccaagtcttttcttctgtgtctgtgccctgccatagcccctcctccctcacactgtgctggggatggctctgcttcttgcacacaccagccatcctccatcatagagctatgctggtcacacacaccttacctgagtgcttgctgccagagagcagcatgca

SEQ ID NO: 32735 - DNA, 644 bp, Homo sapiens
attttgcatgttttcttcttttgggtgtgcttcaatttgtccttcagtagttggccaatctttttctctgtgcattcttccaacacgacccatatcaagctacagaatgtcagtaaatactgccactttcccccatgaactycacaatcaggggagtgtttttcactgtgacattatccaagtatgtctcctgtgtagtacttatgctgctctcaagggcatacatggtgattctcctgcccaggcatggaggcaatcccagcacctccatagcacccacctctccccaagaccctccccagagaaaagggccacccagaccatcctgctgctggtgagtttctttgtggtcatgtactgggtggactttatcttctcaacctctttaaccctgctatggccgtatgacccacacgttgtcctgagtgtgcagagagctgtgctcaatgcctatgccactgttagtcctttggtgcaaatcagttctgataaaacaataatcagtattatgcaaaattgcaattgaagtaccaacagtttttaataagtcagtgatgaaaaatgttttttgagaaaagagtcttcagccgtcagtcaactgttcaagtagcactgaaattctttaatttgatttaagtaaaata

SEQ ID NO: 32736 - DNA, 644 bp, Homo sapiens
attttgcatgttttcttcttttgggtgtgcttcaatttgtccttcagtagttggccaatctttttctctgtgcattcttccaacacgacccatatcaagctacagaatgtcagtaaatactgccactttcccccatgaactccacaatcaggggagtgtttttcactgtgacattatccaagtatgtctcctgtgtagtacttatgctgctctcaagggcatacatggtgattctcctgcccaggcatggaggcaatcccagcacctccatagcacccacctctccccaagaccctccccagagaaaagggccacccagaccatcctgctgctggtgagtttctttgtggtcatgtactgggtggactttatcttctcaacctctttaaccctgctatggmcgtatgacccacacgttgtcctgagtgtgcagagagctgtgctcaatgcctatgccactgttagtcctttggtgcaaatcagttctgataaaacaataatcagtattatgcaaaattgcaattgaagtaccaacagtttttaataagtcagtgatgaaaaatgttttttgagaaaagagtcttcagccgtcagtcaactgttcaagtagcactgaaattctttaatttgatttaagtaaaata

SEQ ID NO: 32737 - DNA, 708 bp, Homo sapiens
tctggtgtgtatcataaatattttccttcctgaggtttaatttggacagactgtgtcccagtctgcagcataccttgacatgatcggcttatctgctcgtctccccttcctctttttttttccagacagggtctcactctcttgcccaggctggagcacagtggcaaaatcatggttcattgcagcatcaacctcttgggctccatcaatcctcccacctcaacctcttgagtagctgggactacaggcatgtaccaacacgcccagctaatttttgtattttttgtagaggtatggtttctctatgttgtccaggctggtcttgaactcctgggcccaagtgatctgctcatcttggcctctcaaagtgctgggattacaagcgtgagccactgtacccagcctcctcttcctcttgacggtgaattctgtaagggcaaaggctcattcatttttgttgtttaatgaatagactttattctttagaatagcttaagctttacagaaaaatgagcagaaagtatagtgttcccatatatgccctcaaatcytcccatcctgtttcccctgttattaacatgtggctttaatgtagtgcatttgttgcaattgatgagtcaatattgatacattactcttaagtccatagtgtaggtttctctcctggtgtgctgcacattctttggatggatgtgaccatccaccatt

SEQ ID NO: 32738 - DNA, 545 bp, Homo sapiens
aacccagacacaaccacgctggctccagccagatacggaacagggtggcatcagaaggatggcagggcagtaacagggaaactccttgggtaggtctcaaggatgtctggattctccctttccaccgtggggctagaaggcaggtagctcagccggggctccgcaggccgaactcaaatcaagtccgggcttcagccttcgtaactgcatyagctcaggcagggactggacctctggaaacctcagtttcttcatctgtaaaatgggcatcacgacagtacctggtgggattgttttgagaatttaacaaaattatgcatgtaaagctctaatcctgacacctaataagggttcaaaaagtgtttgtttttaaatatcattagcctacgtacttttttttttttttttttttggagacagtctctcactctgttgtccaggctggagtgcaatggtgcaatctcagctcactgtaacctctgcctcctgggttcaagagattcttctgcctcagcctcccaagtagctgggattataggtttgca

SEQ ID NO: 32739 - DNA, 463 bp, Homo sapiens
aacctccacctcccaggttcaagcgattcttgttcctcagtatcccaagtagstgggattacaggcattcaccaccacacccggctgatttttgtatttttagtagaaatggggttttgccatatcggccaggctggtctcaaactcctgacctcaagtgatgcacccaccttggcctcccaaagggctgggattacaggcataagccaccatgcccagcacatctactgatatctaatccagccgttacccatgaatttgccttctcatgtttgcccactaagagtaaatgatgcctgtcccctccctgcactctgtggattgcttggaattattgagttagaaataagagcaacctatttgcattgacttataccaaaaaaacaaacaaaaaaacaaaacaaaacactttatcatatggagcccagggttcctccttgtggtagacagacttctaagatgg

SEQ ID NO: 32740 - DNA, 547 bp, Homo sapiens
agtgatgtgatgtgatggcgtgaatccgggaggtggagcttgcagtgagctgagttcatgccactgcactccagcctgggtgacagagcgagactctgtctcacaaaaaaaaaaaaaaaaaaagaccgatgcggtgtctgatgagtgccttcttgccgtgtcctcacatggtacaagggacccgtgaactctctgaggcttcttttggaaggacattgatctcattcatgagatctaattatttcctaggggccacacctccaaataccatcgctttcwgggttgcaatttcaacatacacattttggggggatataaacattagtccattgcagttgcatagctagtaagtagaagaaccaggatgcaaactcagcgaatctaaccttagtctccttcttttaactgctatgctaagctcctttaaattctatttatttctggaatttactagaataaaaattataaattggtttatcccctcttgctttttaagatgactttaaaaattattttatttgattaaaagaaaattttttttgagaca

SEQ ID NO: 32741 - DNA, 1122 bp, Homo sapiens
tgtgtttttattaactctccctggtgaccttaacacacaggaacgtggggagtcattgctgtggacgtggctcacagggtcctttctgcccattagctgggtcatcccacctgtctttgggttgttgccttgttgatagaatctagttgaatttatatcacaaagtactcctgcttctcaggcaccactggttgatattttattttattttagtttatttatcttttagagacagggtcttgctctgttgcccagcctggagtgcagtggtgcaatcatagctcactgcagtctcaaactcctaggatcaggcaactctcctgcctcagcctcctgagaagctgggactacaggtatgccccaccacacctggctaatttttatacattttgcagagataaaggtattgctgtgttgcctaggctgctcttgaacccctggtctcaagcaatcctcccaccttccaagtagctgggattacaggtatgagccaacacacctggcccgggctggcattttaaatgatgatcatggcctagtgcagtgatgtttgctgatcacctatgtttcctcattgatatggtttggctgtgtcccccttcaaatgtcatcttgaattcccacatgttgtgggagggacctggtgagaagtaattgaatcatggggccagatctttcccgtgctcttctcgtgatagtgaatatatctcacgagatctgatggttttataaaggggagttttgctgcacaagctctctctttgcctgctgccatccacgtaagacatgacttgctcctacttgtctttgccatgattgtgaggcttccccagccatgtggaactgtaaagtccattatacgcatcttttgtaaattgcccaatcttgggtatgtttttatcagcagcgtgaaaacggtgcactcatgtactcatgttctgccaacagcccccattttcatctggggcccctggactgagatatgctctmtgtgatctctcaatgtttccctgtggggttgagccccagtcgcccagagcacagacctccccatcccgcctttggtactggtttccttctgttgctatttcactgttcctctccccattggagcctcttagg

SEQ ID NO: 32742 - DNA, 509 bp, Homo sapiens
ccctggggggattttggcttttaccttgaatgtaagggggagtcagtggagaattatgagtgcagcacccaaacaatctgattcaggctgaacagcatcgtctagactcaagctaccccatgagagagctatgggtccctgagaatgtggctagtgagactgagaggccaaatttgccactttatttaattggaattaacttacatttaaaaattcttacttgattcagttattagaaaacttctgcrtttggaacgacttggatatgtgaatctgcttattcaactataaatttatgaggtcttaataaagatgaggtatttacgataaagatttgtcatccaaattgagatgttgtaattctaaagcattttccagatttcaaaaatttaggatgaaaaaattaagattaggaaagaactcaattatataattatacttatcacatattgaaataatattttgaatatatctggttcaataaaatagtgacactaattgtacctatt

SEQ ID NO: 32743 - DNA, 606 bp, Homo sapiens
gttatgtaaatctgaacaaatttcttaagcttgttttatctccattttctaagctggtggtgattataactaacttgcaagtttgttgagatggttaaaagaggcaatgtctaaaaggccttgtagagtgcattcytagtgcttgtctcagccaggtttgttcattgcaaagaagagtccgactcaagctagctcaagcaaaaggagttaccaataaagctatgtgtgaatggaaagttcactgaggagtcatcagggatgaagacaactcgagaaatgggtttccaaactcctgcttcgttctctaccaacctgcttccactgctcattcataatttttgctccatataacttctatttgcatgtatttttgacttaccacattatgattacaatatcatatggtatctttcaatgtacccttttgcttctgcctctgctagtaattggcagtttatttcatttgtttttagtccacatttgcaggagcaattatctgattgacccagcttatcttttcagtttttgacctagcttataggtaatataggttccttgccagactacaacttggtttctttagctttggttcaatcattggtaact

SEQ ID NO: 32744 - DNA, 606 bp, Homo sapiens
gttatgtaaatctgaacaaatttcttaagcttgttttatctccattttctaagctggtggtgattataactaacttgcaagtttgttgagatggttaaaagaggcaatgtctaaaaggccttgtagagtgcattcttagtgcttgtctcagccaggtttgttcattgcaaagaagagtccgactcaagctagctcaagcaaaaggagttaccaataaagctatgtgtgaatggaaagttcactgaggagtcatcagggatgaagacaactcgagaaatgggtttccaaactcctgcttcgttctctaccaayctgcttccactgctcattcataatttttgctccatataacttctatttgcatgtatttttgacttaccacattatgattacaatatcatatggtatctttcaatgtacccttttgcttctgcctctgctagtaattggcagtttatttcatttgtttttagtccacatttgcaggagcaattatctgattgacccagcttatcttttcagtttttgacctagcttataggtaatataggttccttgccagactacaacttggtttctttagctttggttcaatcattggtaact

SEQ ID NO: 32745 - DNA, 606 bp, Homo sapiens
gttatgtaaatctgaacaaatttcttaagcttgttttatctccattttctaagctggtggtgattataactaacttgcaagtttgttgagatggttaaaagaggcaatgtctaaaaggccttgtagagtgcattcttagtgcttgtctcagccaggtttgttcattgcaaagaagagtccgactcaagctagctcaagcaaaaggagttaccaataaagctatgtgtgaatggaaagttcactgaggagtcatcagggatgaagacaactcgagaaatgggtttccaaactcctgcttcgttctctaccaacctgcttccactgctcattcataatttttgctccatataacttctatttgcatgtatttttgacttaccacattatgattacaatatcatatgrtatctttcaatgtacccttttgcttctgcctctgctagtaattggcagtttatttcatttgtttttagtccacatttgcaggagcaattatctgattgacccagcttatcttttcagtttttgacctagcttataggtaatataggttccttgccagactacaacttggtttctttagctttggttcaatcattggtaact

SEQ ID NO: 32746 - DNA, 567 bp, Homo sapiens
cttgcatttcaccaattgaatttagaatttattgcataggatttatactacgaaaaatgtgtccatcccttattcacaacttgtgaaaagtccaatgtcctccacaagattttggtaatatcttggtaggcttggtgtttaaaaaattattctgacacttgttaaaatggtaaggaagacttcattctagattaatgcacttgtgatcaactctgttgaaacaggagatagagctaaactctgaactctccaacagcaaaaaaagttggagatttataaccaatgagcaaagcgaagagtatagtggataagaaagtagtaagaggagcataaagggtagaggaattcttgctaaacaaatccaacatgacatgattcttgctaagataggccaaagacatacatcaaaggttgagtccttggcacctgaacctgatcagatcgcaagggtaatcacattatgagattatatayacatataagcacctgatataacaagggtaatcatatacatacacacacacacacacacccctatatatatgcatacatatacacatatataca

SEQ ID NO: 32747 - DNA, 691 bp, Homo sapiens
tggccatctgcctttttcattgtgcttacttatttatttctctggctctttcttcctcatacttgcaaccagctattgtctaggaatccctctggtcctcctactgaaaacaaggcattctagtttatctgtattgaatgaaagcacaaattactcagattacacctccatagagatggcttccaaagaaatctttcctttttaattgactttctagatgtgaggccaaatgtctccagtcctagagatcgcttatcctgctgttccacagtcacgctaaatattctgcaggagcgtaaccaaatgyggtggtgacagccttccacccaggggaaccacagtatatagagaatttacaaaacagaaattagtaaaagcaactaaaaattggtctgctttatattatcaccatatgccagcaattctacacgataatagtggtggggccgtgcatgtggtgtggaggtgggatgactgccatctgcagcccctacctctggtaagccctcctcttgagtcctgacatcgtctatagatcccggggaaaggcaattttttttccttgatgattcctagaagctcctttttggtgtccagccaaccctttcaaccttccattgacctatttgggggtgtccatgcctctggttctgggacactttacccttggtccaaacattcttttctgtcc

SEQ ID NO: 32748 - DNA, 691 bp, Homo sapiens
tggccatctgcctttttcattgtgcttacttatttatttctctggctctttcttcctcatacttgcaaccagctattgtctaggaatccctctggtcctcctactgaaaacaaggcattctagtttatctgtattgaatgaaagcacaaattactcagattacacctccatagagatggcttccaaagaaatctttcctttttaattgactttctagatgtgaggccaaatgtctccagtcctagagatcgcttatcctgctgttccacagtcacgctaaatattctgcaggagcgtaaccaaatgtggtggtgacagccttccacccaggggraccacagtatatagagaatttacaaaacagaaattagtaaaagcaactaaaaattggtctgctttatattatcaccatatgccagcaattctacacgataatagtggtggggccgtgcatgtggtgtggaggtgggatgactgccatctgcagcccctacctctggtaagccctcctcttgagtcctgacatcgtctatagatcccggggaaaggcaattttttttccttgatgattcctagaagctcctttttggtgtccagccaaccctttcaaccttccattgacctatttgggggtgtccatgcctctggttctgggacactttacccttggtccaaacattcttttctgtcc

SEQ ID NO: 32749 - DNA, 654 bp, Homo sapiens
ttttctagatgaaaggcactataactatattaattttgttattaacatacttactattgacattcattaatgccttttttgaaaatcaagagtgaagtctgtgaatttaggaactaattgtaaaaaataggacactaaatcagtaactagtcatggtatggagcccttctaatttctctaccttttttaaaacacaaaatttctaggaaattgagagatttgaggcatctaatcagcagatcgaattattaatcaaattatctgcgtgatctaaattattttttaaacaggtacttttatgttgcttgtataattttgtgtaaactctcagtaattgaaagttgagtaatctgtacaaggatcattgaatactactttgagattgactacatacaaaatcttccattatgttgagtgtcattttctaacaagcttatttaagttttaggttttcaaagtggctttctccatgagctcyaaaagttagaaatgaacttctgtcatctacttttattcttttttatatataacctttgaatcacaagaatgattgtggaaaggtataagaaagctgtagctttcaataaccactgcaaacagtaggaaattgagtttttccagtgtttagtaactcgagcaatgatcaaacactga

SEQ ID NO: 32750 - DNA, 1578 bp, Homo sapiens
gtgggaaggtagggttattgagtatagagaactcctttttggaattttgctgtaaaataaaggggagaaatgaaacagtggctgagatgttggaattaagaaggtttgctgtaattgctgttatttgaatgagtgacattaaagcaagtatataatagaaaatgaggaaaattcaaccgaggaaggacaatggatgagtcacgagaaagagataatattttcagaagcaaaacccttccacagccaagtagtaatgagttctggtgcctacatagggcttggccttatattacagcatggacagttcatctactgtaaaggaagggacagcccgggtgtgaatgcagttagtttagtctatgctatttgatgttagagggacaagaagtacttttctaagagctcctattttctcagtacagttagaagcaaggtctctagctacaactgaaaagagggaggaatgatgaaaatttaagattactacaaagacaaaagcagaagtgcaagaaagcagagctcagaggaagaaagcaacaataaagtcagcagacaagtatttataaatgaaccatgaagctaccttacttttaagaggaaataaaactatttagtcatacagcacttaacgatgggaatacattccgagaaatgtgttgttaggtgacttttgtggttgtacaaacatcatagagtgtacttacacaaacctagatggtatagcctactacacatctaccctatatggtacaggctattgctcccaggctacaaacctgtatagcatgttgctgtactcaatatggtaggcagttgtaatacaatgctgtttgcatatccaaacagatctaaacattagaaaaggtaagtaaaaatatggttctataatcctatggaaccaccattgtatatgtagtctgtcactgatgaaaatgtcattataaagcacataactatktttattttttattttcagaggcccataagtgggtaaatgttcctaaggacaaagatatctataaatctgcagagtgtacatctgtaagaatagaagactgattcctcgctcacatcctcactgatctaataactactctggcttccaagatgcttcaaaaactaaactcagcaaaaagtgcagaccaaatatgtggcagaagttgaactgagctcgttaagtttcatattatgtatatcctttaatatagccttttaatgccaataagtgtgtcatgcatagatgaaatgctaaactgtcttatggcttagcagtattggccttggtcttagatgggtatttaaaactcagcctctcttaagacttttcttctctgccaaaacctgcttagtcaccatctagggtaacccaaggttttcttgctgtccccatacaaattcacttgagaaggtattcactgtcctaggcaaagagctaagtaacaattaatctatttctgaggaaaagaacacataagttagtcatatagtgccagcatgtctgaggaaaatgcttttaatcaaataatactgaaatgtataataagaaatatgatgagaagagactgggattccactaag

SEQ ID NO: 32751 - DNA, 1578 bp, Homo sapiens
gtgggaaggtagggttattgagtatagagaactcctttttggaattttgctgtaaaataaaggggagaaatgaaacagtggctgagatgttggaattaagaaggtttgctgtaattgctgttatttgaatgagtgacattaaagcaagtatataatagaaaatgaggaaaattcaaccgaggaaggacaatggatgagtcacgagaaagagataatattttcagaagcaaaacccttccacagccaagtagtaatgagttctggtgcctacatagggcttggccttatattacagcatggacagttcatctactgtaaaggaagggacagcccgggtgtgaatgcagttagtttagtctatgctatttgatgttagagggacaagaagtacttttctaagagctcctattttctcagtacagttagaagcaaggtctctagctacaactgaaaagagggaggaatgatgaaaatttaagattactacaaagacaaaagcagaagtgcaagaaagcagagctcagaggaagaaagcaacaataaagtcagcagacaagtatttataaatgaaccatgaagctaccttacttttaagaggaaataaaactatttagtcatacagcacttaacgatgggaatacattccgagaaatgtgttgttaggtgacttttgtggttgtacaaacatcatagagtgtacttacacaaacctagatggtatagcctactacacatctaccctatatggtacaggctattgctcccaggctacaaacctgtatagcatgttgctgtactcaatatggtaggcagttgtaatacaatgctgtttgcatatccaaacagatctaaacattagaaaaggtaagtaaaaatatggttctataatcctatggaaccaccattgtatatgtagtctgtcactgatgaaaatgtcattataaagcacataactatgtttattttttattttcagaggcccataagtgggtaaatgttcctaaggacaaagatatctataaatctgcagagtgtacatctgtaagaatagaagactgattcctcgctcacatcctcactgatctaataactactctggcttccaagatgcttcaaaaactaaactcagcaaaaagtgcagaccaaatatgtggcagaagttgaactgagctcgttaagtttcatattatgtatatcctttaatatagccttttaatgccaataagtgtgtcatgcatagatgaaatgctaaactgtcttatggcttagcagtattggccttggtcttagatgggtatttaaaactcagcctctcttaagacttttcttctctgccaaaacctgcttagtcaccatctagggtamcccaaggttttcttgctgtccccatacaaattcacttgagaaggtattcactgtcctaggcaaagagctaagtaacaattaatctatttctgaggaaaagaacacataagttagtcatatagtgccagcatgtctgaggaaaatgcttttaatcaaataatactgaaatgtataataagaaatatgatgagaagagactgggattccactaag

SEQ ID NO: 32752 - DNA, 532 bp, Homo sapiens
catcccctaccaattaaatcatcatgtctggtagagttaggggcaaccaaatatcagtattattacagattcctaagtgattccctttgcccaaaatttggggaccgctgaccaatgcagattttggaggtctcagcttacagctggtcctacagtcctaaatttcacttaggagaaaccattgtgcttcaggttctggagctagacacttaactataggctatgactagtccctatatgtgtaaatcttcttgtctcccacctccccccaaccaaaaaaaatttctacaagtrcactatttaattattaggagatgcacaggtggactgagcaatggtagcatttttttttttttttttgatgcactacagcaatattggctaagcatacagagaagggagagagagatttggcaattagcagttattttgatactgttaggcagccaaataggaaaattaggtccccccaaaatccactttggaatctaattatccaatttgactctttaccgtgatcaagttagtcaac

SEQ ID NO: 32753 - DNA, 584 bp, Homo sapiens
tcgtgcctgtaatctagattatattttaaatgcttaagaatagctatgttttgattattcaaaagccaaggactttgataagattactcaaatacaggatgagaaaagaaaactgtccagaatcaaatgctgaagcacttaaacaagtaaagattgagtagatatgaaggagccatcaaaggagacgaaggaaccaaccatgaggcaagacaaaagctgagaaaaaggaagtgtcccagaagccaagagaagcrcaaatgagggagaaagcagacctgttcaatgcaagaaaaagtcaatacactgggatagagagggggccactggagttgtaaacaccgaggtttccacagtagtggtgggcaggagagaagccagacttgagtgagtggaagaatttgtgggtggcaaggaaagggagagagcaagagaggcaaactctttagagaagttttgcaggtaaatcagactgggtgagagatttggggatgaaggtagtttttttgtgtatttagtatatggcagatactagagaatgtgtgcatgctggttggaatacccagagaaacagagagagagagaga

SEQ ID NO: 32754 - DNA, 574 bp, Homo sapiens
ggaagtagaagagatttatgcaggagtattcacaaacccctccagttgtgctaagagggctcatgagtacctgacatggttctggaagcaagaaaggagagaacagattttccttgagactgctttcctttcccagaagaggaggaatgttctccaaggaagactggagaaagaggctcctcccaggasgtcagggaaccagcttcttgggaaagcaggaccaaagtgcaggcccgtgttggtgcctgccagcctggcaggactttggcacaggaacacaggtccagagccttgcctagggtcactggtcctcctttctatagagctccataaggtccagagactgttgcctcatcagatagctacatctgtggcttgggttacacgtgagatcttgtaggacagccatatgcttgtcatgcaggaaaggtggcaacaaaatcaaagatatacaggggagagagaggagagaaagttacaggccaaaggcctatcacttgggcaattctttctgtttctcaactctgtgctcattccctgtatgtctgtggccagcaaggagcttgggtagtca

SEQ ID NO: 32755 - DNA, 574 bp, Homo sapiens
ggaagtagaagagatttatgcaggagtattcacaaacccctccagttgtgctaagagggctcatgagtacctgacatggttctggaagcaagaaaggagagaacagattttccttgagactgctttcctttcccagaagaggaggaatgttctccaaggaagactggagaaagaggctcctcccaggacstcagggaaccagcttcttgggaaagcaggaccaaagtgcaggcccgtgttggtgcctgccagcctggcaggactttggcacaggaacacaggtccagagccttgcctagggtcactggtcctcctttctatagagctccataaggtccagagactgttgcctcatcagatagctacatctgtggcttgggttacacgtgagatcttgtaggacagccatatgcttgtcatgcaggaaaggtggcaacaaaatcaaagatatacaggggagagagaggagagaaagttacaggccaaaggcctatcacttgggcaattctttctgtttctcaactctgtgctcattccctgtatgtctgtggccagcaaggagcttgggtagtca

SEQ ID NO: 32756 - DNA, 535 bp, Homo sapiens
tgctgtcttactctgctagtcataagtccctctggtgtgttcttaattaagctttwtatttttagatcattatagattcacatgtaattctaagcagtaatggatctatgtaccctttatccagtttcttcaaatggtaacatcttataaaattattgtgcaatgtaacaaccaggatacccacagagataaaatccacttatcttattcagatgtccccagttttaatagcactgatttgtgtgtatgattttggtctatgtaatttgatcccctgtgttggttgtgtatccaccaccacagctgagacacagagctattctattgccgccaggatccctcatgatgcccttttgaaaacacacccactttcttctctcttctctcctagccttgaggataacaaatgggtgaatcttaagagaattatgctgaatgaaaaaagccaatcccaaaagactacatactgcgtgataacatttctataacattcttaaaatgacaaaacgatagtgatggataacaggttagtggt

SEQ ID NO: 32757 - DNA, 535 bp, Homo sapiens
tgctgtcttactctgctagtcataagtccctctggtgtgttcttaattaagctttttatttttagatcattatagattcacatgtaattctaagcagtaatggatctatgtaccctttatccagtttcttcaaatggtaacatcttataaaattattgtgcaatgtaacaaccaggatacccacagagataaaatccacttatcttattcagatgtccccagttttaatagcactgatttgtgtgtatgattttggtctatgtaatttgatcccctgtgttggttgtgtatccaccaccacagctgagacacagagctattctattgmcgccaggatccctcatgatgcccttttgaaaacacacccactttcttctctcttctctcctagccttgaggataacaaatgggtgaatcttaagagaattatgctgaatgaaaaaagccaatcccaaaagactacatactgcgtgataacatttctataacattcttaaaatgacaaaacgatagtgatggataacaggttagtggt

SEQ ID NO: 32758 - DNA, 641 bp, Homo sapiens
cctttttagaccatatagggtaaattccttacattgctgtggcgttygtaaactgttatggtgctggtgggagtgtagcagtgaggatgaccagaggtcacttttgtcgccatcttggttttggtgggttttggccagcttctttactgcaacctgttttatcagcaaggtctttataatctgtgttttgtgctgacctcctatctcatcctgtgacttagaatgcctagccatctgggaatgcagctcagtaggtcttggccttcttttacccagcccctattaaagatggagttgctctggttcaaaggcctctacagctggcaactttttatcatgagaagaagcaacatattttattttgtttacaaaggtgcactcatagccacttagctctacttaactccagccagacacccccaccaccatccactgctgctctctcatcaagatttctccttatcagcaccgcttgtaagcacaggtttctaggctcacatcaggcactgagtttgtcggactcttaccttctctccattcacattcaccaacaagaatccttgggtccctgcaccaggttatctatattatacagctttgctttccaagttggtgaaagaaagtcttacttcctagatcta

SEQ ID NO: 32759 - DNA, 641 bp, Homo sapiens
cctttttagaccatatagggtaaattccttacattgctgtggcgttcgtaaactgttatggtgctggtgggagtgtagcagtgaggatgaccagaggtcacttttgtcrccatcttggttttggtgggttttggccagcttctttactgcaacctgttttatcagcaaggtctttataatctgtgttttgtgctgacctcctatctcatcctgtgacttagaatgcctagccatctgggaatgcagctcagtaggtcttggccttcttttacccagcccctattaaagatggagttgctctggttcaaaggcctctacagctggcaactttttatcatgagaagaagcaacatattttattttgtttacaaaggtgcactcatagccacttagctctacttaactccagccagacacccccaccaccatccactgctgctctctcatcaagatttctccttatcagcaccgcttgtaagcacaggtttctaggctcacatcaggcactgagtttgtcggactcttaccttctctccattcacattcaccaacaagaatccttgggtccctgcaccaggttatctatattatacagctttgctttccaagttggtgaaagaaagtcttacttcctagatcta

SEQ ID NO: 32760 - DNA, 641 bp, Homo sapiens
cctttttagaccatatagggtaaattccttacattgctgtggcgttcgtaaactgttatggtgctggtgggagtgtagcagtgaggatgaccagaggtcacttttgtcgccatcttggttttggtgggttttggccagcttctttactgcaacctgttttatcagcaaggtctttataatctgtgttttgtgcygacctcctatctcatcctgtgacttagaatgcctagccatctgggaatgcagctcagtaggtcttggccttcttttacccagcccctattaaagatggagttgctctggttcaaaggcctctacagctggcaactttttatcatgagaagaagcaacatattttattttgtttacaaaggtgcactcatagccacttagctctacttaactccagccagacacccccaccaccatccactgctgctctctcatcaagatttctccttatcagcaccgcttgtaagcacaggtttctaggctcacatcaggcactgagtttgtcggactcttaccttctctccattcacattcaccaacaagaatccttgggtccctgcaccaggttatctatattatacagctttgctttccaagttggtgaaagaaagtcttacttcctagatcta

SEQ ID NO: 32761 - DNA, 574 bp, Homo sapiens
atccaaaagtatgctgtcaatttcagggtgggatcttgattctcttctgcttctggagtggtgtcacctcctcgtttcttctcttctacggactccatgcacttttttggaaacacctttaatagcaatgctcttcttttgtattagtctttaccttttacagatcattttattatcttgtttgagcctcacacagctagaaagaggacaaagctgaggtgcatatgtgtgtcattctgtttccaaggtaaagttatttttagtcttccaaagctaactttacagcatttaccttgtcaaaataaccattctatattattaatattagtgaaagggtcataatcaactgacacagtttagaaaagtatttttctctctcccattataagtaatttttttagtctggctagacatcttcagcattattttcttattygtattttaaaatctaatgattactttctgctactttgcatttttttaatctgtcaagtataaggggtataattttctcaactacaaaacatcttgccaaatatagtcacatccttaaatgttttcctatattttttta

SEQ ID NO: 32762 - DNA, 595 bp, Homo sapiens
ggatctcagtctaattttcatttttactgtcaacaactacctattttagtttcagttttctctgccatgataactatttgcaacaaaactacttgctgttatagaggcatcacttttggtcatttctctcatcattttccctttattatcatttttatttttcaaaatcatttttatttgctacccattcattaagagctatctcaaatgttgtttctctcataaacttttttccctgctctcagagcatgatagcttctcctaccttctgcatgtttatagcatttttactccattctcastgtttttgtgtttcaccactgtgtattgtacttttaacattttttaaaaaaatattcttattctccttataaatcctaaactctatgaaagcaaatattgcttctttttcatcataacctctctagcacctcttaagctgtactggtagaacagtaaacattattatctatacataattgaatgaatggataatgcaacccttgaataataaatgaattcattcatttatttcttcataataaacaaatatttattgaggccatactgtgtgccaatacctgtggccattgct

SEQ ID NO: 32763 - DNA, 470 bp, Homo sapiens
tgagctagtgtgtagaatatttttatacacctggcaaaaatattttagaataagtcttttctagtgacactcacagagwcaagaaaactcaacacatgatcttcctttagtttctggaatgctatcaacagagttcacattaagtaaaaacataaacgcaaagaactgctaataccagcattaaaaatagtattgttctacagatcaaattactctttaaagcaatgccttccaggaagaggcagaaatgtccaggtttagggactctcctgaccaaagaaaccctcggttattttaacatggtcttctctagagctgaggacagcttgggatgttctgtcccatcctgttcctcaaaactctaacatgcagcttcctctgctgtctctcctctgcagagtctcactttctctgtttccatgttggtctccttccatgtgtagagccgctgtctgccatatatatcactg

SEQ ID NO: 32764 - DNA, 1760 bp, Homo sapiens
caacctctcatggctcccctggaatgagggcctcagaacacaagcaggtgctgtccaggagccctaaagtcagtggggtctgagccagagggccctccacgctccccgtggggcaggtcaggtgcatgaccaggttaaagactcagatggccccatcaagacagtctgttgtatcctagacttatttttccagaaatgttcttatttccgacataatacgtccttcctgacagccctcagtgcctttaagaaatgctgatctagatgagaggcgcaggtggggagtaggggctgctgacttcaattctctgctttgtaaggagaaaatggacttctcctaaagggctgtgacccccaatcccactagcttgctcgcacttagaaattactatatttctagagactccacacaactacagttcctccgcatgcatgtcgatgtctgcaggtgataaatcacagggaacacaggggcagcaggaggagccccagtagagacaagccccgtggcaccacccccggctccagagtctgcacatgccccgcctggctggaccatgtctgcttctcattgaggaatgagtgacctcgtttagttagaagggcttggcagagtttttctaaaaatctcaattcaaaacacaaccaacccccacattggttccagctgctcccaaccctgggatgccggcccygctgtctgcacctctggcctctgaaggccactttcctgcagagcggggcctttcaacagccactctggcactaacggccgtccccacactctccttctaaatgctttttcatccctgcagcggggcggatgaagggagggggccatcaaacgcggagctgcacacgtttcagcaagctgccctgagccagcagcataaatcagaatgtgttttcctatttcagggtggaggaaatggttctccagcaaagttccctaccgtttcttaaagtgattattttgatttaaactgctgcctggtggctagacttctagctaccagtttcaggtcgtctgtcctgggatccgagagcacaaagaaacactgtttgcaggttcctgggggcctcctctgggccggcacacaagatgggctctcggcctccacgctcctgcaccttccacagaccagcgcttgttcctcgcccagggagctgccagccccaaagacaccgcctccttcgtgccacttgctgtcacgcaggctgtggttttacttcctcctgccgtcctccaaatatcaggctctctctgtgtctgaagagaacatatgaattttgggaaggacgcaattcagtccacagcaaatctgaaatccactgtacgatattcttagttttaggaggcagcggctggggctgaacttgctcaaagttgtcctaaagaactgcagccccggatgggccccatgtccagcccccatactggcgggatgttgtcttaataggtgtaataggttcgtggctaccagaacctacactgttaggaaggttgaaaagaaaaccagaagctgaataagttcacgggtcaaaaaggctgtgtttagtaatgattttctatactcccccacggtatacagaatagcaagcctcgccccaggtccttgcatgctcccatgggacagggaaggcggggcggggggaagggggtgcgggaaggggaaatatcattcctgcattttctacacacgcatcctaatgtaaagcaactatttcatggtttgcaaaagattgccagacaaagcaaa

SEQ ID NO: 32765 - DNA, 1760 bp, Homo sapiens
caacctctcatggctcccctggaatgagggcctcagaacacaagcaggtgctgtccaggagccctaaagtcagtggggtctgagccagagggccctccacgctccccgtggggcaggtcaggtgcatgaccaggttaaagactcagatggccccatcaagacagtctgttgtatcctagacttatttttccagaaatgttcttatttccgacataatacgtccttcctgacagccctcagtgcctttaagaaatgctgatctagatgagaggcgcaggtggggagtaggggctgctgacttcaattctctgctttgtaaggagaaaatggacttctcctaaagggctgtgacccccaatcccactagcttgctcgcacttagaaattactatatttctagagactccacacaactacagttcctccgcatgcatgtcgatgtctgcaggtgataaatcacagggaacacaggggcagcaggaggagccccagtagagacaagccccgtggcaccacccccggctccagagtctgcacatgccccgcctggctggaccatgtctgcttctcattgaggaatgagtgacctcgtttagttagaagggcttggcagagtttttctaaaaatctcaattcaaaacacaaccaacccccacattggttccagctgctcccaaccctgggatgccggccctgctgtctgcacctctggcctctgaaggccactttcctgcagagcggggcctttcaacagccactctggcactaacggccgtccccacactctccttctaaatgctttttcatccctgcagcggggcggatgaagggagggggccatcaaacgcggagctgcacacgtttcagcaagctgccctgagccagcagcataaatcagaatgtgttttcctatttcagggtggaggaaatggttctccagcaaagttccctaccgtttcttaaagtgattattttgatttaaactgctgcctggtggctagacttctagctaccagtttcaggtcgtctgtcctgggatccgagagcacaaagaaacactgtttgcaggttcctgggggcctcctctgggccggcacacaagatgggctctcggcctccacgctcctgcaccttccacagaccagcgcttgttcctcgcccagggagctgccagccccaaagacaccgcctccttcgtgccacttgctgtcacgcaggctgtggttttacttcctcctgccgtcctccaaatatcaggctctctctgtgtctgaagagaacatatgaattttgggaaggacgcaattcagtccacagcaaatctgaaatccactgtacgatattcttagttttaggaggcagcggctggggctgaacttgctcaaagttgtcctaaagaactgcagccccggatgggccccatgtccagcccccatactggcgggatgttgtcttaataggtgtaataggttcgtggctaccagaacctacactgttaggaaggttgaaaagaaaaccagaagctgaataagttcacgggtcaaaaaggctgtgtttagtaatgattttctatactcccccacggtatacagaatagcaagcctcgccccaggtccttgcatgctcccatgggacarggaaggcggggcggggggaagggggtgcgggaaggggaaatatcattcctgcattttctacacacgcatcctaatgtaaagcaactatttcatggtttgcaaaagattgccagacaaagcaaa

SEQ ID NO: 32766 - DNA, 637 bp, Homo sapiens
ggcttctttattcacatgtcttggggctcattggcctttctctctcttcacatagtgtctttctcttcttggagttttccacatagcttgggcttatcacagcatgatcaccttggggtggtcaatctcattacatggctgctcagggctccaaaagcaagctaatagccattggtatgaacagctaagcctgaaactaacagagcttcacatatgttacattctaacgggcaaagcagttacaggctgtcccacgtctaaggggaaggaaagagacccctcatccatgggagaagcaatgaagaatttgtggccagctttaacctgccacatgcatttacccttctaatggcactaatttatgttttatttagggcttattttttggaaggaacagaaactcaggtttccttaagtaaaaaggaatttgtatgggggaataccaaggaatggacaggaattggaaatcactggaaaccagtggacttcagtacggcctgtaataggaatcactgcatgagttstagatagggtcagtctgatgagtacgagcctgctacaatgaataacctccaatccatgttcctgccatcatgtttcaagctccaggagagagcattcatttggatgaacttgg

SEQ ID NO: 32767 - DNA, 978 bp, Homo sapiens
ttaattaaaatcaagtagtaagatcagaaatgcagttcttcattcacactaatcatatttccagtgctcaatagggacatgtggctgcaggctactgatttggacatgacaaatatagaacatttctatcattgtagaaaattctattggacagtgctgcccaacagaatttgatggacaagaggccttggaatgagacwcctacgcaccagaaccctctctcactccaaacaagaaacacaccccacccactgtactactgcccatcacacctctgaagtgtccttgcaggaagttagtgaatcatttccaacagagcccttgctagcgcttaaatcaccaccaaaatcccttccccttccaaggtcctggtggcctcggaacccccttctcagccccctacccagggcccctatctagcatgagttgcatctggaggtaaaatctcaggggatttcacaccaatgcagtgccatgttatggcattgagacaagtacacaaaagaaacccagagagaaagcacactcaccatcctaccacggagctagaaccaaagctcactcaacaaaaatggagctgaaggagtcaccaaagggaagctctgtacttctgaagtcaaggtacttgagtactaatccctttcttttctctctggtttcaccaatctgatcatctgtcaattaggtttcagtttgacctgtccctcattcaacaccatctcataaaacccacctctcctgtctgtgtgatggcttctgctgaaatacatccaaataaacacaggcagcaacagaccagccaaggctgttcagataagcattttagatctcaaccagcagggatgtgtgttggtgggtacacctgtgacagggagtctcagtctcctccaggagtcatggggggtggggggaggcttcaggcatgacttgtctaattggcctacaaaaagaattacttactctccacttacctttgat

SEQ ID NO: 32768 - DNA, 597 bp, Homo sapiens
tcagcagcagctgtggcatggaccagtctcgactgtactcagaacactggcttgatgaaaacaaatgcagtattaatgcgtagaaaggagggaggaggcacgtttacttccgtgtgtttactgcccctcttcttcttttttccagtaacaaacacaaaatactcaattttctccttcttggtgtggaggctttgacatcccactgtgggatggagagatggcctttaccacagagagaacagatgagggatcaacatccagagtatgtaaaagaattcacaagatcagtgagaaaaagatraacgccccagttaaacgagggacaaaaggtacagtcaggcagtttgcagaagaacaaatacaaaaggccacaaacttgtgaaaagtgtggccttattaggattcaagaaaatgcagattataaaacagttatcccaagctctttgactcattggatcactgaaatcagaagtgggtaataaggagcacgaaaaccatgatgcgggagatggcattaatggtgcaggactggccacaggtagggccatttggcattacttgttaacatttaatttaatttaattttttttttttgag

SEQ ID NO: 32769 - DNA, 550 bp, Homo sapiens
cagctgcctcgggtgggggagttcccgggcactcccagatgtgcctgctgggaacatttttggtgtgcgttgaaacattgggatttggttgcatttcatcgtcctctgtttcctactacatttttggtgagtgcttttgaaatttttctccctttcgcttttcttcctgtgtttgccactatgaagtagacctgttgaatgcactgtgtcctgcagaggggatgccctgcccccggcgtgtgcacattcctacctgttagtgaggtttagtgcccacttcactgggaacatgaagtgccaggggatgctgatgctgcagtcccaaaaggccacaccctgcagtggacgaggcccctctagcaggaagcacagtgagtttggctgggggaaccacaggcatgtaatccaagrggcttggatgtaatgcccagcttcatcatttccttgtggctctgagcatttgtttacctgcctgagcccatcctttatctgtaagatgccggtaatggtgtctctctgggaaggtggcctggtcgtgatgattacctgg

SEQ ID NO: 32770 - DNA, 1228 bp, Homo sapiens
acaccacacttaacttgggggaagagctggatcagcaatcgttgttctcttcattagcacttccttctcagttttggggaatccttaaaatagtgcttcccagagtgttccacaagggtattcctgctgcagaagatcataagccctctggcctctggcagtttagcccagagtagtctgctgccagggggaaatgacttgaagtcttgttttactttaacctctttgtaatatacatatgttttcatgcagaaatgatgttagaattaccaattgaataacttaatgtaacttgatgtttccccttcttcaaatccttggggaaaaaattagcctccaaaagtatgctccacacttctaatggggctgagtctggggaagcccattagtagtgcttcyggagtgtacatgctcaacctgagaaccatacccaagagaagctctggagattaagaatagattttgggggccaatatgtcatcatgaattgaaataaaatcatataataacattggattgtaaatatatgttggtttagaagccatacttttgtctctattttttgtttttaaagagacagggtctccctctcttgcccaggctggagtgcagtggtgaaatcacagctcactgcagcctctaactcctgggctcaagccatcctcccacatcaccctcccaaatgcaagtagctgggactacaggcgtgcaccaccatgcttagctcagtatttttaaaaattttatttctcctcagagttattgagcttctgtatctgcagaataacgtgagtcttttgctctcactgggaaaccagatatggggatacaaggtatcagaagattcatagctacatgcagtggcatatgattaggtgagaaatggtggtgtggatcataaataacatgtttaatagagaaagatgccaccttggaccgaaagccagaggtggtttcttcgaggtgcatagataacttgatgagtttggagaatgggtgggatttgattggttggaaaacaaggcatcttgggatatttcttcttttccattctcatagctattactaaatcttactgcttatgttttccaccagctcctgaaacactaatttatttgaacctatggcaatatctcttgtttttgaaaagacctgtagtaatggtataacatttttgttaaatgtgtttatttaaaactgtcacattttactatatgtctgtgtttct

SEQ ID NO: 32771 - DNA, 1228 bp, Homo sapiens
acaccacacttaacttgggggaagagctggatcagcaatcgttgttctcttcattagcacttccttctcagttttggggaatccttaaaatagtgcttcccagagtgttccacaagggtattcctgctgcagaagatcataagccctctggcctctggcagtttagcccagagtagtctgctgccagggggaaatgacttgaagtcttgttttactttaacctctttgtaatatacatatgttttcatgcagaaatgatgttagaattaccaattgaataacttaatgtaacttgatgtttccccttcttcaaatccttggggaaaaaattagcctccaaaagtatgctccacacttctaatggggctgagtctggggaagcccattagtagtgcttccggagtgtacatgctcaacctgagaaccatacccaagagaagctctggagattaagaatagattttgggggccaatatgtcatcatgaattgaaataaaatcatataataacattggattgtaaatatatgttggtttagaagccatacttttgtctctattttttgtttttaaagagacagggtctccctctcttgcccaggctggagtgcagtggtgaaatcacagctcactgcagcctctaactcctgggctcaagccatcctcccacatcaccctcccaaatgcaagtagctgggactacaggcgtgcaccaccatgcttagctcagtatttttaaaaattttatttctcctcagagttattgagcttctgtatctgcagaataacgtgagtcttttgctctcactgggaaaccagatatggggatacaaggtatcagaagattcatagctacatgcagtggcatatgattaggtgagaaatggtggtgtggatcataaataacatgtttaatagagaaagatgccaccttggaccgaaagccagaggtggtttcttcgaggtgcatagataacttgatgagtttggagaatgggtgggatttgattggttggaaaacaaggcatcttgggatatttcttcttttccattctcatagctattactaaatcttactgcttatgttttcyaccagctcctgaaacactaatttatttgaacctatggcaatatctcttgtttttgaaaagacctgtagtaatggtataacatttttgttaaatgtgtttatttaaaactgtcacattttactatatgtctgtgtttct

SEQ ID NO: 32772 - DNA, 1037 bp, Homo sapiens
atgattagatgctagccatacattaaggaaaaaggaaaaagatatatgttgaagtcccacaagtaaatatagagtagcatagcatagcagttacatacctatactctgaagccagatatctggattgaattcgggccctactactgactgactagttgtgtacccatggatatattacgtaccttctgtgtctcagtttcccccacaggtaacatgggaatgataatagcatctaatttataaggttgttgttaggattaaataaatttacatttgtaaagcactataaaccatgcctgacagtaagcactatgtaattattaaatcgatagacctaaagaaagccatgaaaaaacaaaaatctctagaaatgacgttttgtacaattataataagaaaattgtaattttttttgagacagtgtctcactgtatcatccatactggagtacagtagtccaatcatagctattgcaaccttgacctgggcttacatgatcctcttgcttcagcctcccaggcagctgagactacaggtgcatgccaccatgcctggataattaaaaawttttttttttttagtagagatgaggtcttattacgttgcccagtctggtcttgaactcctgggctcaagcaatcctcccacattggtctcccaaagtgctgggattataggtgtgagacactgtttctggccacaaaattgtattttaaggagtgtttactaataactcagtgcttacaagccttgtttaatttagttgaggtgaattagggcctttgaatttgataaaacttatttactgctgctactcttcaatgaaatacggaggttgctaaatgatattcccaaagtcacagcatggaagacaaatgctgtaatttggcatgttattttcttacctacatcactcaccacacagaccccagtggtctcttttctactgttgacttcatgctgaaatagagccacaagattctgatccctggagatatatatatctctctctatatatagatatgtagatatatcta

SEQ ID NO: 32773 - DNA, 1037 bp, Homo sapiens
atgattagatgctagccatacattaaggaaaaaggaaaaagatatatgttgaagtcccacaagtaaatatagagtagcatagcatagcagttacatacctatactctgaagccagatatctggattgaattcgggccctactactgactgactagttgtgtacccatggatatattacgtaccttctgtgtctcagtttcccccacaggtaacatgggaatgataatagcatctaatttataaggttgttgttaggattaaataaatttacatttgtaaagcactataaaccatgcctgacagtaagcactatgtaattattaaatcgatagacctaaagaaagccatgaaaaaacaaaaatctctagaaatgacgttttgtacaattataataagaaaattgtaattttttttgagacagtgtctcactgtatcatccatactggagtacagtagtccaatcatagctattgcaaccttgacctgggcttacatgatcctcttgcttcagcctcccaggcagctgagactacaggtgcatgccaccatgcctggataattaaaaatwtttttttttttagtagagatgaggtcttattacgttgcccagtctggtcttgaactcctgggctcaagcaatcctcccacattggtctcccaaagtgctgggattataggtgtgagacactgtttctggccacaaaattgtattttaaggagtgtttactaataactcagtgcttacaagccttgtttaatttagttgaggtgaattagggcctttgaatttgataaaacttatttactgctgctactcttcaatgaaatacggaggttgctaaatgatattcccaaagtcacagcatggaagacaaatgctgtaatttggcatgttattttcttacctacatcactcaccacacagaccccagtggtctcttttctactgttgacttcatgctgaaatagagccacaagattctgatccctggagatatatatatctctctctatatatagatatgtagatatatcta

SEQ ID NO: 32774 - DNA, 815 bp, Homo sapiens
gtgtgaaaagactttcgagtgacccaaaaatcttaaattagaggctccctgttttgtggctttaaaataaaacattgtccttatgtctaatgtccttggttctcaagagggagttgttttgtgccgtatttcaaagcatcacacttctacatttccgtctgagactcgccttttggacaggaatgcaccactgccagcagtcttggctttggtgggaagaaggtagaaggagctcatcaggttcatagaggaggaaataccaattcttagaaataaaatggttcataagaggtagaccaaaggtcatagagctctgttggctttgttcagtggcattcagggaatgaagcctcaatgtcttgtcacatttagggtgggaagagaaaatcatgttggaacagctgtgcttaaaacataagcatatcatcttgggggtgaagttggggagtgatctaagattagcattgacttraggactatagagaggaaaatgccacataccagaacacactgtgggctaaggcatttagccagatggatcacgaatagtaatggggtcttctggggatttcaagactgagtatgaagcacgccagtgactaggggctggtggaaagaaggtaggtgatagaggagcagaccctccaagtcacgagaccgtagcatggtgtgagctaactttccctatctagaggaagtggaagtctgatgtgctagagagatatgcctggatctgttccatcttgaggtcagattgcccagagagagacacaaagatttccaatctagagtagacatgaggtgatgccccagga

SEQ ID NO: 32775 - DNA, 1066 bp, Homo sapiens
ttgcgaaccaagggccccagtgttctgggaagagcagtggcctgcactttaaacgttgacactgtttctggctcgctgattaggggccggggtgggggaggtggaggaaagctgatggttttttcacagatctgagaatggtgctttttgtcttgagggtaggtgcccatctctcagcacatgcctgacaatattgtcacactccccatccactctcatccacgccccccttgttggacccctgcccaggatgtggggctgtagtttggaagccctgacctataccctgtaaagaatgatttatgaactccaggcagcactgagcaggcttcaaagatgtggcttcacggccatttaaaatgtgcaaaggcaggtctggtttgcatcatcactaattatcctatggaggatgctcagcagcttgaggcctgagctctccagcactggacatggaggccagacacccagcctccaaaagagagacaaatcttataatggtatatgatttgtaccctcacatactagagatggatgttttggagctatggagaaacatttcaagtgtatggcattagtattattttgcaattactggacatttttgtagtacaaagaaaaatrtaagaattaaaaatgtactttgtaagtagtttgagcatgtaaacataaaggatatggccctttcttcatattagatacgcatttggacagaggatgtaattgtgaataaataaggcacattattaggtagaaagaagacaatacttaagatggtaattgtttgaaattaatgtataaattcagggcgatttggtggtaggagttgagtggggaaacttgacaaaataattctaaactttatctagaagaataaacatgtgagactagctaggaaactcttgaaaaagaaaactgatgaggggagggtttcataaaatatattaaaacaaattacaaaacgatagcaatcaaaacagtatgttaatggcacaggaatagacaaagtagtagaacagactagaaagtccaggattagaagcaactatatatggacatttggtatagg

SEQ ID NO: 32776 - DNA, 636 bp, Homo sapiens
ttcgaagaaaaaagaaaagagtttctgtttcagtcacaaattagggttattgtgatgtgtatttatgatgaccrttgaacaaatgtgaagaatactgtgaattctatgactttatcaaaatcagccacatccaggagcttgcagttgttgaccaaatgaatgatgacatagagtagttcagatctatcatgtgctcttctatctaatcagtcaatatttccttggccctcaagccaacattcattttttatgtataaccttcttcatgattttgaaattttgatagggtaactgctaatgagttcacaaatgtagcactttaaaaggaaaataaatggagagtgaaaacaacttggctacgtataattgtgggttttaatttttctgtttttaaaataaaaaatggcattgatagtttcaatagcccaagtttttattccagaagatgttgcaataactgttgtcactagattatatacatgtcattttattaagtagattttttttcgtgaaagtaaatcagtgcatttgagggatctaaattttttatgaaatagtggtggtgatttccaaacagaatcaccattaatggcaagttatggttgatcaaataacctgagtctaatcaaaaaggtt

SEQ ID NO: 32777 - DNA, 760 bp, Homo sapiens
ttcctgggattagtccttaagggagatcatcatctactcactcgcagatagttactgcactcctactctttgctgcatactctgttcttgaagatgagctcctgccctcatggagcttatcatccagccaggaagatagaatttaaatgaatgattacaaatgttctgattgtagcaaaaggtgaagtaattggagccacttgacagtcaggacatatgacacaagataatcgaggcaagacacatgacatcacacagtaaagacttaggtccagacagccactggacccaactgttcagagctasgaacaaataggagaattaaataattaacttccggccgggtgcggtggctcacgcctgtaatcccagcactttgggaggccgaggcaggtggatcacctgaggtcaggagttcgagatcagcctggccaatatggtgaaaccctgcctctactgaaaatacaaaaattagctgggtgtggtggcaggcacctgtaatcccagctacttgggaggctgaggcaggagaattgcttcaacccgggaggcggaggttgcagtgagccgagattgcatcattgcactccagcctgggggacaagagcaagacttcgtctcaaagagaaaaaaaaagaattaaccttctttcatcttataatgatacctcctatgtttatagcagaagacactcaactacagccacaactcaagccaaggcatgcactctctgagtttcaacaatgtctcattctagaaa

SEQ ID NO: 32778 - DNA, 629 bp, Homo sapiens
atggctggctttagagggtttacaaacaaggaaactgaggcccagagagaaagagacttgttcatggtcccagagggctgrtggcaaggctaggcctcaaactaactctcccacttcccggaatcatgatttcttacccagcccaccagcagccatccatagcaagacccgctcctcgctgatttacattttgagtcatagaaacccaagatgccagctctttaatgaggttgtccacactacaactgaggaggcccaaagcctcagcaggactggtctctgccaggcttaatttacacagttctcaggccttctaataccccattaacgtcagaaaggaatctgcagctgttagtctgtgcactcgactacattctcatcatgtcaccatccattttcatgtcttgaggctgttgagagcctgattttcctagtccagatcatggcccagtcccctagactccagctccagccccaggtttgacctgagtcccctagacaccaggttcccccacgtgtcgtctcccctcactttaattgaagagcaagacccccttctcactgaagcagcactcaaatttcctcctttaacgagtgtcattagttaggcaagagcaagcaggtaggag

SEQ ID NO: 32779 - DNA, 503 bp, Homo sapiens
ttttcaattatttcctttatgtagttgtaatttgaaagtaattttcttctgggagtacaatgacctcggcacactcattctttatttatttatatttaaaaacctttgtgtctgcccccatttctgggcaagttccaatgatcgaatatttaaaatagttgcccaagcaggcattgtttctaagcacttcatgkggcattttaaaattggctttattaataattatggataagccattccaaagtaagaacttctttgccaacagtagctaggcactggtagagaaaggaaagaccagcgaatttccttcctggttccacctgctttggcctgactgttttggattccagtcttcctcaagggaggcagtgtgacaggcatttgaaaagacctctctcctgcctccaactacctctacagaattaagcaggattactcctttgtgtggcacaaaggactctgtgcacccagtgaccaaggtaaaaaaatgactttatcaggca

SEQ ID NO: 32780 - DNA, 615 bp, Homo sapiens
gccctactgccctgtgtgtcctaaagggatcatgttaacaagaaaacccaagtcttggtccctcccatgaggaatccacgggaaactgatagactcgtgaggccatccccttttgctggctctgtttcacacgctgtcacttggcaagtctcacccagtctctcttggaagcagttgttttgcttmaccttctgcctgaggccttcctgggagaaatcgaccatgaattctagcacccagtccacgcaccagtatctgagaaagacactctcctgccccctgagacacttcctcacccaagtgcctgagcaacatcctcacagctccagccactctcctgcaaatggaactcctgtggagcctgctgtggttcttcccacctgctcaccagcaagattctgggtttaggctcagcccgggacccctgctgcccatgtttacagaatgcctttatacattgtagctgctgaaaatgtaactttgtatcctgttcctcccagtttaagatttgcccagactcagctcagttaattttggttacatccatctgtgctctgcggaaacttcaccagagaccattgtccgctgcatcggggctagctccaatccctgccc

SEQ ID NO: 32781 - DNA, 517 bp, Homo sapiens
ggctgtatgaggctgaccatgtcccttctctgtgtggcccctgtcccrtcctctatcaaaggagggatttctattagattgctaaggtttgctctagtctgaaattcctagataattaattttatccagagggggaagggatgggggcagtttataatgaacatacagagttatcagtttctggattaagaacaatgcattttgataatgaattaacctgtgaccactcacatctttgcaggccccagagattcagacaacaggaaggagaaggctggtctggcttagcctccctgaccaaatggaggctttgcctggggaccacctcacaaggcctggctggtgcctcctgctactcagttcttggctgatgtcagatggggagactctggcccctgtggagatgagcaggtagggctcacctgggtcaacaccccgagtgagcctgccttactctctgccttgttttctagctctatcctggtcatagctggtgctaaacccatctcagtgctca

SEQ ID NO: 32782 - DNA, 1168 bp, Homo sapiens
  misc_feature (1)...(1168): n = A,T,C or G
aaaagccaaatgctgggcccaccagattcctttcctccataattcaagacggggatagggccggatggacttacaggggtgagctgaagatccgggctcggatcgggggccagccagcccttcgggccattgctcatcagagaaggcaggagagcagagagcacccaatgggagccatggcatcrtgcaccggagaccatccttcttcatccttcttctcaatgtcccagttttagagagagagagagagagagagagagaagctaaaacccagaggctttggcatgatacctaagagatgctctcacctcttttgaggagcaagatgaagagctgctttcctggcacatgtagctttctggttccagtcccaggccatgactactcttaccacatgcccacttttctttttctttttttttttttttttgagatggagtctcgctctgtcacccaggctggagtgcagtggcacgaccttggctcactgcaagctccacctcccagagttcacaccattctcctgcctcagcctcccaagtagctaggactacaggtgcctgcaccgcgcctggctaattttttgtatttttagtagagacggggtttcactgtgttagccaggatggtctcagtctcctgacctcgtgatccacctgtctcggcctcccaaagtgctgggattataggcgtgcagntacgcccggccagcccacttttctttgtgacaagaatggatacctgataccttccctagcaactgattggtttccaaggtgtttggccgactcatgagcatttagctacttcacagttgagtagagattaacctcttccatttgtgtggtgcattcacagatgagatgtcttttgattctacaacacccctgtgaagaaggcatggtgggcatcctgattctcctattttcagctgggaaaacaaagtcatgcagcactgggcctaaaacccaggtccccacattgccactccagtgctgtttttatgtaatttctctggttctcaggtcactttctacgagggtaattcctgagtttctaagcccaagactttcagtccatcctggcctatgctccctgctaacacacacaccacatacacacccaccacacacagacacacacacacacacaccacttgtccttgaag

SEQ ID NO: 32783 - DNA, 1209 bp, Homo sapiens
atgtaaaataccttcaccttagccactgggtgacscatctcagtatctaagaagaatactgtcttaccccttgagaagaggaatttgtgtgcacctgagcatacctggcaggaggactgggcagggagcagggagataaagactacacctgtctgtctcataagagccctcatcagctggcatcctcctcagacctttcacatttctcaacaccacccgtatgaacagacaatgcaggtctctccccaattctatggatgagaaaacggtggcccagagagattacgggacttgccatggccacacaggaagtggaagagctgggactagaactcaggccttgtgactcttgattcagtgccctctccaacttactgcttatccagtggtcccctctggacagctgtaaactatcaagatgaggttgtgtccttagagccaacactgccaggcatccaggcatctctgcatggtacaggcatcagattcactggctttcccaccaccacctaggaaggcagagctttgggccctcatgccctgagattctcagcagcactgctgtcagtgggggacacgtggcatcacactttgggaagaggcacagcactggttctcccactggaccttcctgaggcttaaggagagaaagttgtatgcatgcaaaggagagggactttgcaaagggagtctgggagcccagcacttggcaagttcaaggacttcgggggcaggagatggcaggagtgaggagtggtgtgtctctatctctccctctctcccctccccctttctctctccctctctcaaagacaaaggcatctctctcctttgatgatgaaagatgattccaatattattacaaagaacatagtccagcaaggaaaggcagatcattctctctctctcactacccccaccccagagtgccaccctcggagagtcagaacaggagcctgtccccaagttctaccctctaacagcaggcactacctgagggacccccagaacggggagggggcctgtccttggaagagccacttctcagggccagagtcccaccctcacccaatctgctctttcaacccttggccccgcttttcctctgtgtggctctcgttgccaaccaggcacacccaggcagcaccccagtcatggtcctccccgcctcccatacacccaccaggcccaggtgagctgtccttcctg

SEQ ID NO: 32784 - DNA, 489 bp, Homo sapiens
  misc_feature (1)...(489): n = A,T,C or G
cnnnnnnnnnnnnnnnnnnnnnnnnnnnnnnnnnnnnnnnnnnnnnnnnnnnnnnnnnnnnnnnnnnnnnnnnnnnnnnnnnnnnnnnnnnnnnnnnnnnnctggaccatgggcttgatccctaccttactaygctttaataatgccgtgcatgttttctatgaagaaaaacatggnggtgatcttacttctttatttactgtctatctcctgcctggaatgtatgctttttgagagtagcaaacagatctgtcttgtttactgctctatctgcagttcctagaacagtgcctggtttacagcagatgctgagtaagtaattgttaaactaaatgttagatgaattttaaaatatattaagtatccacttcacactgaacactagagattttaaaaaggaaaaggaagaatgtttaccctagagggattcaaatcctggtgacttcaggcagttggtttttctactctgttatacatccattaaatttt

SEQ ID NO: 32785 - DNA, 1035 bp, Homo sapiens
aggtcaaatcatatctctggaaaggggtaatttcattaagttaaaaataagacaaaagataggatggacacagctccaattagtgagtccaccaatgaagccagaatttctcaagacacattcaacagttctgaaaagtgcaaataagattttacatgcaaactataacacaggtcaaggactctttattgtgccagaaaccattctgcaaacgtcacttgcatttcctcataattaccattatgactcctattttacagatgatgaaattgaggctcagagaggctaaataatccatccaaagtcatacagaaaatgtgaagttggggacccaaatacacctctttgtgatctcctgccccaactactatgcccattgctctttaaacaagtaaacaaacgtgaataatttgattaatgtttcctgtgttaagtagttttgggaaatgctaggttaaactatgttaaatagtctgcttttctctgggatttttaaatgtttgtaacattagtgtgcttggcgaatcttcagtgagtgatgtgggtacagtgtcgccctcactaattgggccatggcaccctttgtgtcaggagggaactaaagctcagaagaacaaacattggcaaaggctgctctaggaaccctagcagggccagcaacccgcttstctgtgggtcaaccctccccttgtgtaaacacagacccaccgatggagtctgagtcaatgatctttgagggggctccaattttctcagccccaaataggacatcattcctggatcccctaggcttcaggggccctaccagtccactacttacatcagtgcttttgacaactcttcattgtgccttttcacttcccatgttaaactttctgatttgtttgttttcaccttatcttctcatttacaagcctaggagtctccacaggggaccatataagctggttttggccagtgtgctactacattgtaacaattgaaacctcctgagcatttagggtgcaggagctgaagatgagaaaaagaaagact

SEQ ID NO: 32786 - DNA, 466 bp, Homo sapiens
ctgttgagctgttagatgtcaggcattgttctttgcattacattaaatcttcaacctctgagatagatactgtcatctcaaatgtttcatatgagaaaacataaacacagcctgtgttctctagatcagtggtccacaacctttttggcggcaccagggaccagttttgtggaagaaaatttttccacyggttgggggtgggagtgggggtgggatggtctcagatgaaattgtttcacctcagatcacaaggcattcgttagattctcataaggagtgagcaacctagatccctcgcttgcacagttcacaatagggttcgcgtgcctatgagaatctaatggccgtgctgaaatgacaggaggtagagctcaggcggtgatgactgctcataggctgctcaccttctactgtgtggcccagttgctaacggaatactggtctgcggcctgtggttcgggatccc

SEQ ID NO: 32787 - DNA, 646 bp, Homo sapiens
tatgttacctaggtagcaactgaatgaagcagctagagacaaaaaaataaaaaagaatatgatttatctcagaccatacaaacatacaaatgaccctggtaaggaaaagatataaatgattattaatctccatttcttgaactgctccgggagactaattttgttttttgttttgttttttgagacagtctcgctctgctgcccaggctggagtgcagtggtgcaatcttggctcactgcaacatccacctcccaagttcaagkgactctcctgtctcagccttccaagtagctgggactacaggcacacaccaccacacccaaataatttttacattttttagtagagatggggtttcaccatgttggccaggttggcttgaactcctgacctcaggtgatccgcccgccctggcctcccagagtgctgggattacaggcttgagcaacacgccagccagggatacctaatttttaacccaaaatatttcatttcaagcacctaactgccatcccccagaagatatcatgccaaaagtcaaattgccctagactccagcatcgaccccatcctgctcgcaataccaggagaaaagcctacctgtgagtcagtgcctcctggaatccctagaatcatggcaccatg

SEQ ID NO: 32788 - DNA, 646 bp, Homo sapiens
tatgttacctaggtagcaactgaatgaagcagctagagacaaaaaaataaaaaagaatatgatttatctcagaccatacaaacatacaaatgaccctggtaaggaaaagatataaatgattattaatctccatttcttgaactgctccgggagactaattttgttttttgttttgttttttgagacagtctcgctctgctgcccaggctggagtgcagtggtgcaatcttggctcactgcaacatccacctcccaagttcaagggactctcctgtctcagccttccaagtagctgggactacaggcacacaccaccacacccaaataatttttacattttttagtagagatggggtttcaccatgttggccaggttggcttgaactcctgacctcaggtgatcygcccgccctggcctcccagagtgctgggattacaggcttgagcaacacgccagccagggatacctaatttttaacccaaaatatttcatttcaagcacctaactgccatcccccagaagatatcatgccaaaagtcaaattgccctagactccagcatcgaccccatcctgctcgcaataccaggagaaaagcctacctgtgagtcagtgcctcctggaatccctagaatcatggcaccatg

SEQ ID NO: 32789 - DNA, 646 bp, Homo sapiens
tatgttacctaggtagcaactgaatgaagcagctagagacaaaaaaataaaaaagaatatgatttatctcagaccatacaaacatacaaatgaccctggtaaggaaaagatataaatgattattaatctccatttcttgaactgctccgggagactaattttgttttttgttttgttttttgagacagtctcgctctgctgcccaggctggagtgcagtggtgcaatcttggctcactgcaacatccacctcccaagttcaagggactctcctgtctcagccttccaagtagctgggactacaggcacacaccaccacacccaaataatttttacattttttagtagagatggggtttcaccatgttggccaggttggcttgaactcctgacctcaggtgatccgccygccctggcctcccagagtgctgggattacaggcttgagcaacacgccagccagggatacctaatttttaacccaaaatatttcatttcaagcacctaactgccatcccccagaagatatcatgccaaaagtcaaattgccctagactccagcatcgaccccatcctgctcgcaataccaggagaaaagcctacctgtgagtcagtgcctcctggaatccctagaatcatggcaccatg

SEQ ID NO: 32790 - DNA, 646 bp, Homo sapiens
tatgttacctaggtagcaactgaatgaagcagctagagacaaaaaaataaaaaagaatatgatttatctcagaccatacaaacatacaaatgaccctggtaaggaaaagatataaatgattattaatctccatttcttgaactgctccgggagactaattttgttttttgttttgttttttgagacagtctcgctctgctgcccaggctggagtgcagtggtgcaatcttggctcactgcaacatccacctcccaagttcaagggactctcctgtctcagccttccaagtagctgggactacaggcacacaccaccacacccaaataatttttacattttttagtagagatggggtttcaccatgttggccaggttggcttgaactcctgacctcaggtgatccgcccgccctggcctcccagagtgctgggattacaggcttgagcaacacgccagccagggatacctaatttttaacccaaaatatttcatttyaagcacctaactgccatcccccagaagatatcatgccaaaagtcaaattgccctagactccagcatcgaccccatcctgctcgcaataccaggagaaaagcctacctgtgagtcagtgcctcctggaatccctagaatcatggcaccatg

SEQ ID NO: 32791 - DNA, 1285 bp, Homo sapiens
  misc_feature (1)...(1285): n = A,T,C or G
ttaagctttacatattttggaaactagattatcctcatgttttacatgtttctggtcagtttttgaaaactgagtggctgaggagtaagttttaatcagaaaatagtcattgggtttacccccgtcctccatggtgaatattcagtaagaaattgcacaaagtaagttttggagtgctctttatttgaaattcttcattagatccatatgtacttttaaggctctggcaatcacatttataaccttgaaagtcatttttaattgagaacagaagtgtgtcacaaatagttttttttatttttttttgagacagagtcctgctctttcacctaggctggagtgcagtggcacgantctcagctcactgcaagctccacctcccgggttcacaccattctccttcctcagcctcccgagaagctgagactacaggtgcccgccactgcggccggctaatttttttgtatttttagtagagacggggttttacagtgttagccaggatggtcttgatctcctgacctcgtgatccgcccacctcggactcccaaagtgctgggattataagtgtgagccactgcacccagccatcacaaatagtttaatgcttgtttagatatctgctaccaggcagcactgaataacaaatagaagagatatttttaattctttttaaaacaacatatttcggaaactaaatccaaattacttacactgtaaattacttttctttaaggaattctttgcraagttttccttacataatttgaatacataatataatgtctggcacatagtaggcagtggtatgtatttagcaaatgatttactattcatgtttctgaaatgttattaatagaatctagtaaatagttgctatttttgtgaattaaataattcaaagatttaatctgcctggcagaaaactgtccagcagaaaagcttcagagatcatgtgtataacatgaatgatcagatctctaacaataaatgtgaatacactattccttgtttaatagcagattcttttttcttttccttctagagctatacctatctgaaactttgaaggacacaggaacttaaattattttaacatctgctaaataattcttcataaatgatattttgtatttctttagaaagttgtattttattttacatttctctattatattttctatttctatttactatagatagtatcaagagcctaagagcaaaaatgagtatttaaattcttgtattcattatttagactatctgactttttaatggagatgca

SEQ ID NO: 32792 - DNA, 763 bp, Homo sapiens
catttcatagattaagagttgatgtttaggaccatgttgttcctttgggtagtttctgtaayaaaagggactcatgtcttgttctgtcactgggatatctgtgattcagctaccacaaactatcagctcagctctccttttcctgacccagatggacagcttctgtaccaaagttccatttattcaactctacataatcaaatggaggcaaatgttttttgttttatgtttctttcccttttttttttgagacagagtctcactctgtcgcccagactggagtgcagtggcgtgatctcagctcaccgcaagctccgcctcccgggttcatgccattctcctgcctcagcctcccgagtagctgggactacaggcgcctgccaccacatccagctaattttttgtatttttagtagagacagggtttcatcgtgttagccaggatggtctcaatctcctaacctcgtgatccatccgccttggccttccaaagtgctgggattacaggcatgagccaccgtgcccggcctgtgtttatttcttttgctgaaacttaaaatatttcaagacaaagtccaactgacatagcccagtaaattccgattgcatacagctaaaaacagaataaatcaatattcaagacacaatttgtggagtaacaataacaagacagaaggcaaaattagtttcgaagacataagaattctcaaaatgttaggatgtgggaaattaatatatttagttcaatttcttccaggattga

SEQ ID NO: 32793 - DNA, 592 bp, Homo sapiens
ttttttgagacggagtctcgctctgtcacccaggctggagtgcagtggcgcaatctcggctcactgcacgctccgcctcccaggttcacaccattctcctgcctcagcctcccaagtagctgggactacaggctcccgccaccatgcccggctaattttttgtatttttagtagagacggggtttcaccgtgttagccaggatggtctcgatctcctgacctcgtgatccgcccgcctctgcctcccaaagtgctgcgattacaggcgtgagccactgtacccggcccatatattctattttaatggaaaacgtaaccagcggaatcaggatgaaagtctaaagatgtgatatctgagtcttaaaattataaagaagaaatcttgagagggtttctgatttttctatagcttcctcattataacctactcatattagtgaactaacaataatctgatagggaagaaaaacttgcagtccttattttctgagctgtatttggcatcttgtgttgtcaatmagttcttccttatatcagatgcaaatccttgccaatacaatatgggctcttgtcactaattctttgtttttct

SEQ ID NO: 32794 - DNA, 795 bp, Homo sapiens
ccatcagttggacatgtctaagttccagaaaaatgactgtctccatactttataaattctctgtttcctcaaacacgcttgctgcattaagtgtggatttcactcatacttatagaaggtgaagtcagcttttccagtccatgccacaggttactgacagcaataaaataggaatkattcagatttaatcactttcctccccatctctccgcccccgctcctctgtgctatcttggttttgtgtttttagacacgtcatttaatgtctctaaacttaagtttccttttgaaaattcaatgagatattgtttattaaagtactttttaatgtaccccagaacttaaagtataataaaaaaaagtgctttttaaattcagaaaatgtcctacttttaaagaacttatgccactaagtttcgaaaaacagctagtcaaattttactttgagtgtaagtcgcatctactgatccgtatactcttcattcggtacacaggccatattttcatatcagtgattctcaatgaaaagaccataggatatctcagtatttcaataaatgctctttgaaaagataaaggtttttattagcaagtataatagccacactagctgatttatatgcatggagtacatctactctttctaatcgagatatggtattatctagtcaggttgtgcttctgtgttatcaagtgagcaactaccaaattccttcaatttactttccatcccattcccacaccatgatctgtgtcagatgctcagtgtgtccctgttattaaggagtgactatg

SEQ ID NO: 32795 - DNA, 1859 bp, Homo sapiens
ttcatcgccagctgtggaggcacagaggcaaggcagcctcagatccaattccccagggaagcagggcttcaaggaaacctgcttgttcagaaactctgaactctcccaacaatcacaggagtttgggtattgccactctactagtgaggttggggaattccaagtccataagaagcagaggaagaactatattctgctaaggtgggaaggtctgcgatgccttggctggggcatacactcccattaccacggtaaccactggactctgaagtgtaggcgcaagaacaaagtcatcaatgtgaccagaggcattaggagtggtagttcagattccccagctcccaagcccatctgctccttcagaatgatagataggtctggaaacaagggcctctcttcatcccttcctttccctatggctagggatcaaagtggctcagactgttttttggtactctttgtcagctttcagggagccaagcgaagaggagaaacaggtatcaaggaatgaggccacamtgccactaaggcagagttctcttatcatgaactccacccatccctaccttgtgggcttgttcccaacgaccagcctgggtgtacatgtctatggcatcttttgtccgatctcccttagtatagagctcctcagcaatctgtagttgatgggaggtagatacaaaaggtcagagcaacagacttaaagcagcttgaatgaggaaagaacaaaccttggctgggatggtggagagcctgcgatacaaccttgtaataatagagaagaaaagatgagtatgggtgtctcatacattctaccatttaaaaagaaagaccagccccaaacagtggaatccaaaagggcctcacatttctgcaatgcaaagcaattttatatcataactatgttagcattattcatgaagaatcacgctgactggaacacagctagagactcactttatatatctggggtgaagggcgatatctgtgtcacactggaatgaaaatgggaaagtaaactgttctcttccccttcaaggtgatgatgctgtttggagcccagaaagaaggatctggtgaacttgcctccacttcctgctttgggttctctcattgttatcctctactgcattgcctcgtgctgcggaaagggactcttcctcacctcatactcctgcagggatgcatagtgttgggccacgagaggatagtatttggatgcagtgttccggtcctgtagatctaatatataaattgccttcttccactggcgggcacccagggcggcctcaattgccttaatggagcacctggcaaagttgggaaagatataaatatgtaggatgaaagatgaagatgaatggaggtaaaaggaccctttaagcacacttcaacctacattttgagatctcttctttaaggccttggtgtccttacttgctccactgcccctcacttcacacctaaatctcctttacattcccatactcccatacctggcttcgatgtagtgattaatggctgcatcaagctgcttctgctgcaccaggtggtccccccatgcctcctctagtttcaccacctccactgggaaggccaatcgagccagctctaccgctgccagggagagaaaagatgctcagcccagatttccagggatgggcctcaggaaaaaggtaggacagggagatgaagcatggagaataggtaagaaggggaggaatggaggactggagccaggcatcctgaacacacgcaccaagaggtgtggggaaaagcaagagagatcagattgttactgtgtctgtgtagaaagaagtagacataggagactccattttgttatgtactaagaaaaa

SEQ ID NO: 32796 - DNA, 599 bp, Homo sapiens
aatttgcctttacctttaatataatataaataaaatacatattttataaacatacttatatttataaatataatataaataaaattagcaagcttatataatttacttttaatataattcacttttatgatgtsatctagaataattcttcttagtactcaaactttctacattcagatacaaatgactactttgcctttaacagagtgaaatcagcaaagtttagaaattccccaaaggttagggaggataatagccactgagtttcagatacatgaatttacagtgctttaatcacaccacagacattaacagaccaaatatggtatactttataataatctctaaatggtctgaagcataattagtagggtagcattgagaaacatcattaataattttggggtgaaatagaatgtgcattgtgaagatccaaactttgccagaattttttttccacaagatgactgtatgggtctacaaagaagaaaaaaaacaattttgaaagattaatttcattatgctaacacaggctctgagggttcatgagtcattgcaggttaatcatgaatatttgttattcattcttaaactaaaat

SEQ ID NO: 32797 - DNA, 599 bp, Homo sapiens
aatttgcctttacctttaatataatataaataaaatacatattttataaacatacttatatttataaatataatataaataaaattagcaagcttatataatttacttttaatataattcacttttatgatgtgatctagaataattcttcttagtactcaaactttctacattcagatacaaatgactactttgcctttaacagagtgaaatcagcaaagtttagaaattccccaaaggttagggaggataatagccactgagtttcagatacatgaatttacagtgctttaatcacaccacagacattaacagaccaaatatggtatactttataataatctctaaatgstctgaagcataattagtagggtagcattgagaaacatcattaataattttggggtgaaatagaatgtgcattgtgaagatccaaactttgccagaattttttttccacaagatgactgtatgggtctacaaagaagaaaaaaaacaattttgaaagattaatttcattatgctaacacaggctctgagggttcatgagtcattgcaggttaatcatgaatatttgttattcattcttaaactaaaat

SEQ ID NO: 32798 - DNA, 583 bp, Homo sapiens
tgctgaacaaggaaacattaatggatgaggaattttcagaccaatttagttgtttgtgtatatacatatatatatatatatgtgtgtatatatatatatatatatatgtatatacacacatgcatatatatacatatatatacatatatgcataccaggctttaaaacatgctactttgtatttctatttttttcaacatttcctatacacatatagctatagaaaattcatgtatattaaaatgagtatccgtgtttcttaaatgatttttgaaagaattgtaatcactataaagagaatgtccctgaatctctttatagaattgctcttacataatgcacttccaakccctccaaaatggttctactcccatacacagatgtttttctttcttaaagtaggaaaacatacatagcataaaatgcacacaggcttattttaaaataatttcaggattaaatttctgaattaagctttatttttagcttgtcacaaattccaaacagcacatgcttttacagattttttaatgcttctatcaacaaacatgataaattatatttttatcattccatagagaaa

SEQ ID NO: 32799 - DNA, 1182 bp, Homo sapiens
aaatcctgaacaaaaagtcactactataattttaatttttatgccaatgaaagcgtattcatgtaggataaaaataaaaagtttaggccaggtgcggtggctcatgcctgtattctcagcactttgggaggccgaggagggctgaacacctgaggtcagaaattcgagaccatcctgaccaacatggtgaaacccgtctttactaaaaatacaaaattagccgggtatrgcggtgtgtgcctgtaatcccagctacttgggaagctgaggcaggagaatcccttgaaccccggaggcagagggtgcagtgagctgagattgcacgattgcattccagcctgggcagcaagagcgaaactcggtctcaagaatgaatgaatgaatgaatgaataaataaataaattaattaattaatttaaaaatatctgctgcagaaagtatatatggctgcatatattttttgtcacacttgcagtttgttactttccttaatggttacatttaagctaactaggattttattttcagtatgctctccttgaatatctttaaagcagaccaaatatggatgatttttcagctaattcgggttttgggaaatcttaattttaaaatttatatgaaaaaatcataatggattttgcacagatgttctgttaccataattgatagttttaaaacatttttgtctttagagaattactttttactataagataataataaaatttgctatttaaattggtattaaggcaattttgttcgtaatccttaatagagaaatttctgcattgtacaaaataataaaatgcttcctcggtttttggacatcacttaatgtttatttactttaagacataaagttgtttatgcttaattgtcaatttttataacgtttatgttctttggtttcttttattgtgcatatggtctataaaacttgctttatctgtagaccttacataacaaagaatcagagtttcaataaaataaatatttaattttaaataagacctaaattataattatttttgaaatatataatatgtcatatttttaatagtatagtttgtacatttcaaagaaaatttaaaaaatagaaaaagcaaagagaatgttaccaattatttaatcacttatgtaagaatattgttaacatgttagcactaatataagcccat

SEQ ID NO: 32800 - DNA, 1182 bp, Homo sapiens
aaatcctgaacaaaaagtcactactataattttaatttttatgccaatgaaagcgtattcatgtaggataaaaataaaaagtttaggccaggtgcggtggctcatgcctgtattctcagcactttgggaggccgaggagggctgaacacctgaggtcagaaattcgagaccatcctgaccaacatggtgaaacccgtctttactaaaaatacaaaattagccgggtatggcggtgtgtgcctgtaatcccagctacttgggaagctgaggcaggagaatcccttgaaccccggaggcagagggtgcagtgagctgagattgcacgattgcattccagcctgggcagcaagagcgaaactcggtctcaagaatgaatgaatgaatgaatgaataaataaatwaattaattaattaatttaaaaatatctgctgcagaaagtatatatggctgcatatattttttgtcacacttgcagtttgttactttccttaatggttacatttaagctaactaggattttattttcagtatgctctccttgaatatctttaaagcagaccaaatatggatgatttttcagctaattcgggttttgggaaatcttaattttaaaatttatatgaaaaaatcataatggattttgcacagatgttctgttaccataattgatagttttaaaacatttttgtctttagagaattactttttactataagataataataaaatttgctatttaaattggtattaaggcaattttgttcgtaatccttaatagagaaatttctgcattgtacaaaataataaaatgcttcctcggtttttggacatcacttaatgtttatttactttaagacataaagttgtttatgcttaattgtcaatttttataacgtttatgttctttggtttcttttattgtgcatatggtctataaaacttgctttatctgtagaccttacataacaaagaatcagagtttcaataaaataaatatttaattttaaataagacctaaattataattatttttgaaatatataatatgtcatatttttaatagtatagtttgtacatttcaaagaaaatttaaaaaatagaaaaagcaaagagaatgttaccaattatttaatcacttatgtaagaatattgttaacatgttagcactaatataagcccat

SEQ ID NO: 32801 - DNA, 1182 bp, Homo sapiens
aaatcctgaacaaaaagtcactactataattttaatttttatgccaatgaaagcgtattcatgtaggataaaaataaaaagtttaggccaggtgcggtggctcatgcctgtattctcagcactttgggaggccgaggagggctgaacacctgaggtcagaaattcgagaccatcctgaccaacatggtgaaacccgtctttactaaaaatacaaaattagccgggtatggcggtgtgtgcctgtaatcccagctacttgggaagctgaggcaggagaatcccttgaaccccggaggcagagggtgcagtgagctgagattgcacgattgcattccagcctgggcagcaagagcgaaactcggtctcaagaatgaatgaatgaatgaatgaataaataaataaattaattaattaatttaaaaatatctgctgcagaaagtatatatggctgcatatattttttgtcacacttgcagtttgttactttccttaatggttrcatttaagctaactaggattttattttcagtatgctctccttgaatatctttaaagcagaccaaatatggatgatttttcagctaattcgggttttgggaaatcttaattttaaaatttatatgaaaaaatcataatggattttgcacagatgttctgttaccataattgatagttttaaaacatttttgtctttagagaattactttttactataagataataataaaatttgctatttaaattggtattaaggcaattttgttcgtaatccttaatagagaaatttctgcattgtacaaaataataaaatgcttcctcggtttttggacatcacttaatgtttatttactttaagacataaagttgtttatgcttaattgtcaatttttataacgtttatgttctttggtttcttttattgtgcatatggtctataaaacttgctttatctgtagaccttacataacaaagaatcagagtttcaataaaataaatatttaattttaaataagacctaaattataattatttttgaaatatataatatgtcatatttttaatagtatagtttgtacatttcaaagaaaatttaaaaaatagaaaaagcaaagagaatgttaccaattatttaatcacttatgtaagaatattgttaacatgttagcactaatataagcccat

SEQ ID NO: 32802 - DNA, 524 bp, Homo sapiens
ctacacggccaagtgcaggagacgctggcatgatgtcttcaagagggtgcaggctcccgagtagtgcagctacaaagctgccccccagggtttaactggccaattcttgcaaaggggcactcaataaataatktgaaatttgaataagtctctccatcctgcctactcccagcacaaaatccatcaacagactggatcttctcgtaacctgttgggcctatgaggacgcagaagtgcaaaatacattccctgccctcaaagggtttattgtcatctaggcccgatggttccttccaaattgtgggtagcctcctacagtggatagtcaaaatcaattaaatgggtcaaaataaacactgtttttaacacacacaaaaaaagaagaaaatgttcctgtggaactcttaattaaaatgtatgtgcccatcacaacattaaaatatattccttactatgggacaaattaaaaataatttcaaaaataactgattactgaagaaaccaggcacatctaaccatttaca

SEQ ID NO: 32803 - DNA, 524 bp, Homo sapiens
ctacacggccaagtgcaggagacgctggcatgatgtcttcaagagggtgcaggctcccgagtagtgcagctacaaagctgccccccagggtttaactggccaattcttgcaaaggggcactcaataaataatttgaaatttgaataagtctctccatcctgcctactcccagcacaaaatccatcaacagactggatcttctygtaacctgttgggcctatgaggacgcagaagtgcaaaatacattccctgccctcaaagggtttattgtcatctaggcccgatggttccttccaaattgtgggtagcctcctacagtggatagtcaaaatcaattaaatgggtcaaaataaacactgtttttaacacacacaaaaaaagaagaaaatgttcctgtggaactcttaattaaaatgtatgtgcccatcacaacattaaaatatattccttactatgggacaaattaaaaataatttcaaaaataactgattactgaagaaaccaggcacatctaaccatttaca

SEQ ID NO: 32804 - DNA, 1468 bp, Homo sapiens
ggcatgtctattcccataggatccctgtacattctgggagattcgyaggtcccaggcagccgtgaccctggcagggagatggaaaaatttagtctcgggacgagaaaccgaggctgtggccaaccccatctaattatctttcactaactttgtgatgtttggagaatgtcacactggctttgagaatgtctcagttcttgggtcctgtgttccagaagaacctattaattgatagaggggcgggggagggtggtgtcttagctcctattttatttatttatttatttatttatttatttatttatttttgagacggagtctcgctctgtcacccaggctggagtgcagtggcacaatctcggctcactgcaacctctgttttgtgggttcaagtgattctcctgcctcagcctcccgagtagctgggatcacaagtgcgtgccaccacgcccccgctaatttttgtattttttggtagagacaggtttccctatgttggccaggctggtcttgaactcccgacctcaggtgatccacccaccttggcctccaaagtgctgggattacaggtgtgagccaccgcacccggcccttagctcctatttaaatgtatatatatatttaggttagttaatttcagagatggcaaaacaaaaagaaaatgtgtgtgcatcggagggaacctttgatccacagccaccggcctgtgcttggagacatttctggctcgtcttcaaaattctgtgctaattgacatttgtctttttctctgtgaagcccgccatccccaggtcattaggacattgggtctgggctgtagtttctctcccatcagggccagacactgcagcaattatcataaaagacagtcggataaggaacttgctttgtaggcttaactaaattattagactcctcttgtgaccagaaagactctccttttatttggcactgaaaagttctcaggcatgtgtctgcacagaacaaaaggcgcctagacatctttatttctgcccaactcctttccctaccccaaaacgctatctagaagtaaaagatgacacatgcattacagaaacaaaatgactcccctgacaatgggagccgcagtctggaagatacatctgaaaagagtagtgagaggaccttatttttctgattctatgttgtctgaggaagctttttgtttgtttgttttgtttttgagacagggtcttgctctgttgcccaggctggagtgcagtagcatgatcaggaatcactgcagcctcaaactcctgggctcaagcgatcctcccacttcagcatcctgagtagctaggattacaggtaatgtgtcaccacacttgggtaatttttgtttctctagagatggggtgtctctatgttgccacggatggtcttgaagaccggggttaacgaatatcctgtgtctgggtccccagtgctgggattatacgtgtgggcc

SEQ ID NO: 32805 - DNA, 651 bp, Homo sapiens
ttaaattacataaggagagaggtatgtgtggcagtggaagtgggggaaaacagtattttcagtgttttggccccagccttgtaagttcctgactatagctaatgcctttgtccttctcttcttataaaatcccttgagaatagccctgatcagattcaggattacttatccctcttgtatgtgaacactgactctttaggtagataatcgtataatcctgatgagctttttaaatccccctagattgtttgtgcactttctttctctctggcctagacattccaaacagccttgtagccatggctctcctgtcattacattatgacagttattataaaagctgagaatataaaagtggttattaattataaacctgtaaatatatagatgaatcctctgtaggaggcatcatgagaagaatatagcaacataccrtgtaaatcattctatttcagattcttaaggcacatcacaaaagtccaaagaattgtcccttggggcgtgacttctggagttaaggaaacaactctgtaattcttgaagaatcaaagatcaagtgccatcatctaatatttattaggtgagggcaatgaaaaatgaaaataatttaatacatgggttacacaaacaagttgacctgcaaacattata

SEQ ID NO: 32806 - DNA, 1955 bp, Homo sapiens
ctccagatcaaatcttcacaggacaggggcattatatttttaaaacataaatcagatcagataagccttctacataaactctctctatttgaaattctcctatggcttatttattgtgatataaatccaaacttctcaccatggcttaaaaggccttattattctagtgtggcctttattacttctctgacttccagccactttcccttttctctgccatcacatccttccacactagactgattcctaaactttcttatcccttaaaactttatatctgctattctctatgcctgtaatttttttcccctagatcttttttttttttgtcatttgtaaatcggtgcaaattttatagtttattttttcacagcatttatcaatatctgaaattatgttattaaattatctaatttttgacgttttgccctaactagggtataaactcaatgacaacaaggactttttctggtttactcatcaccgtatattcaatgccacaagagtgtctagcacttagcaatcactcagtaatgaccacttgaataaatagccataaatttatcaataaaaaagtttgaagtaagtactgtcagtcatgccagatgttgtgggaggacataaaatgatcccagtagtctagttcatgttaagaatgatgcccagtcacctgatgcatgacaagatacaagtgatttattagggactttcaaaatgcctacctgaaagcagtcttatgaagttaaattgataagttcagtcattgctattgcctcagggatacatgatggtgggtgttaagccaatcttatattaaagaattttctaaaaaatccatgtcacagccacaaagagcctaaggaaacctgacaagtaaatgtaatgtagtattttggatggaatactggaacataggcaaaaagtaaggaaatctaaataaattatgaactttagttactagtaatgaatcaatgttggttccttacttctaaaaattgtaccatataggccaggcacagttgttcacacttgtaatcccagcactttgggaggctgaagtgggaggatcacttgagtccaggagttcaagaccggccttggcaacatagcaagaccccatctctacaaaaagaataataataataataattagctaggtgcagtggtgcatgcctgtaatccaggytactggagatgctgaggtgggaggatcacctgagtctgggaggtcaaggttgcagtgagctgtgatcctggcactgcgctccaacctggacaatggactgagatcctgtctccaaaaacaaacaaacaacaacaacaaaacaacaaaactaaaactaactacccaggataaaataaaaattgtatcatgtaaatataaacagttaataagggaaactgtggagcagggtgggaggatatatagagtctaatacagatctgaaaatatagtctgttaattaaataatatatattattcacacatttgttgagaaaagccttaagggaaagaaaaaatgttcccttataaatattgtggtagcacccttcctgagtcaattgcattctatattaaaccatcttttgctattttaactgaaggaaaaatttactagtgatcttgccgactaaattgcatatttcaaaatccttaatgttctaaaaaacttttattgatggcaactctctggaaatagtgaattaaaatgaaattcaaaattttattgaaagctagttgattaaatagaactgtttaaaagataacaaaaccacaaaaaaatctataattttagtattatgtttatttacatttaaaggaaaggtttaatttggtaaatattaggtttaataagaatgcaaggcaattgccttaaattttcctttctattgagttattttttgatacattagttaactttgtcaggctaatttaaattatctgccataatatg

SEQ ID NO: 32807 - DNA, 1955 bp, Homo sapiens
ctccagatcaaatcttcacaggacaggggcattatatttttaaaacataaatcagatcagataagccttctacataaactctctctatttgaaattctcctatggcttatttattgtgatataaatccaaacttctcaccatggcttaaaaggccttattattctagtgtggcctttattacttctctgacttccagccactttcccttttctctgccatcacatccttccacactagactgattcctaaactttcttatcccttaaaactttatatctgctattctctatgcctgtaatttttttcccctagatcttttttttttttgtcatttgtaaatcggtgcaaattttatagtttattttttcacagcatttatcaatatctgaaattatgttattaaattatctaatttttgacgttttgccctaactagggtataaactcaatgacaacaaggactttttctggtttactcatcaccgtatattcaatgccacaagagtgtctagcacttagcaatcactcagtaatgaccacttgaataaatagccataaatttatcaataaaaaagtttgaagtaagtactgtcagtcatgccagatgttgtgggaggacataaaatgatcccagtagtctagttcatgttaagaatgatgcccagtcacctgatgcatgacaagatacaagtgatttattagggactttcaaaatgcctacctgaaagcagtcttatgaagttaaattgataagttcagtcattgctattgcctcagggatacatgatggtgggtgttaagccaatcttatattaaagaattttctaaaaaatccatgtcacagccacaaagagcctaaggaaacctgacaagtaaatgtaatgtagtattttggatggaatactggaacataggcaaaaagtaaggaaatctaaataaattatgaactttagttactagtaatgaatcaatgttggttccttacttctaaaaattgtaccatataggccaggcacagttgttcacacttgtaatcccagcactttgggaggctgaagtgggaggatcacttgagtccaggagttcaagaccggccttggcaacatagcaagaccccatctctacaaaaagaataataataataataattagctaggtgcagtggtgcatgcctgtaatccaggttactggagatgctgaggtgggaggatcacctgagtctgggaggtcaaggttgcagtgagctgtgatcctggcactgcgctccaacctggacaatggactgagatcctgtctccaaaaacaaacaaacaacaacaacaaaacaacaaaactaaaactaactacccaggataaaataaaaattgtatcatgtaaatataaacagttaataagggaaactgtggagcagggtgggaggatatatagagtctaatacagatctgaaaatatagtctgttaattaaataatatatattattcacacatttgttgagaaaagccttaagggaaagaaaaaatgttcccttataaatattgtggtagcacccttcctgagtcaattgcattctatattaaaccatcttttgctattttaactgaaggaaaaatttactagtgatcttgccractaaattgcatatttcaaaatccttaatgttctaaaaaacttttattgatggcaactctctggaaatagtgaattaaaatgaaattcaaaattttattgaaagctagttgattaaatagaactgtttaaaagataacaaaaccacaaaaaaatctataattttagtattatgtttatttacatttaaaggaaaggtttaatttggtaaatattaggtttaataagaatgcaaggcaattgccttaaattttcctttctattgagttattttttgatacattagttaactttgtcaggctaatttaaattatctgccataatatg

SEQ ID NO: 32808 - DNA, 1955 bp, Homo sapiens
ctccagatcaaatcttcacaggacaggggcattatatttttaaaacataaatcagatcagataagccttctacataaactctctctatttgaaattctcctatggcttatttattgtgatataaatccaaacttctcaccatggcttaaaaggccttattattctagtgtggcctttattacttctctgacttccagccactttcccttttctctgccatcacatccttccacactagactgattcctaaactttcttatcccttaaaactttatatctgctattctctatgcctgtaatttttttcccctagatcttttttttttttgtcatttgtaaatcggtgcaaattttatagtttattttttcacagcatttatcaatatctgaaattatgttattaaattatctaatttttgacgttttgccctaactagggtataaactcaatgacaacaaggactttttctggtttactcatcaccgtatattcaatgccacaagagtgtctagcacttagcaatcactcagtaatgaccacttgaataaatagccataaatttatcaataaaaaagtttgaagtaagtactgtcagtcatgccagatgttgtgggaggacataaaatgatcccagtagtctagttcatgttaagaatgatgcccagtcacctgatgcatgacaagatacaagtgatttattagggactttcaaaatgcctacctgaaagcagtcttatgaagttaaattgataagttcagtcattgctattgcctcagggatacatgatggtgggtgttaagccaatcttatattaaagaattttctaaaaaatccatgtcacagccacaaagagcctaaggaaacctgacaagtaaatgtaatgtagtattttggatggaatactggaacataggcaaaaagtaaggaaatctaaataaattatgaactttagttactagtaatgaatcaatgttggttccttacttctaaaaattgtaccatataggccaggcacagttgttcacacttgtaatcccagcactttgggaggctgaagtgggaggatcacttgagtccaggagttcaagaccggccttggcaacatagcaagaccccatctctacaaaaagaataataataataataattagctaggtgcagtggtgcatgcctgtaatccaggttactggagatgctgaggtgggaggatcacctgagtctgggaggtcaaggttgcagtgagctgtgatcctggcactgcgctccaacctggacaatggactgagatcctgtctccaaaaacaaacaaacaacaacaacaaaacaacaaaactaaaactaactacccaggataaaataaaaattgtatcatgtaaatataaacagttaataagggaaactgtggagcagggtgggaggatatatagagtctaatacagatctgaaaatatagtctgttaattaaataatatatattattcacacatttgttgagaaaagccttaagggaaagaaaaaatgttcccttataaatattgtggtagcacccttcctgagtcaattgcattctatattaaaccatcttttgctattttaactgaaggaaaaatttactagtgatcttgccgactaaattgcatatttcaaaatccttaatgttctaaaaaacttttattgatggcaactctctggaaatagtgaattaaaatgaaattcaaaattttattgaaagctagttgattaaatagaactgtttaaaagataacaaaaccacaaaaaaatctataattttagtattatgtttatttacatttaaaggaaaggtttaatttggtaaatattaggtttaataasaatgcaaggcaattgccttaaattttcctttctattgagttattttttgatacattagttaactttgtcaggctaatttaaattatctgccataatatg

SEQ ID NO: 32809 - DNA, 481 bp, Homo sapiens
tgaagatcccacatatgtaataaattgcttttctcttgatgctttcaagattttgtctgtcttcgaaaagtttgattataatgtgtatgtgtctttgagttcttcttacttgtagtttattgagcttcttggatggttatattcatgtccttcatcaaatttgagaaattttcacccattctttcctcaaatattctctctaccctaaccatacctcttctgttactcacacarattcgatggcaactgctgagtgacaacgccaactatattaaaaactctcattaattacaactgaaaataggaccattatgtttaacatattattatgtggcatatatgtgcatatggccctattctatatacgtatgtaatattccataattttaattgatttaaatgaacaaatgtaattgagaaacttttatgtcgtagatatgcttgcttaaattagataattggacataaccactaatctcaa

SEQ ID NO: 32810 - DNA, 481 bp, Homo sapiens
tgaagatcccacatatgtaataaattgcttttctcttgatgctttcaagattttgtctgtcttcgaaaagtttgattataatgtgtatgtgtctttgagttcttcttacttgtagtttattgagcttcttggatggttatattcatgtccttcatcaaatttgagaaattttcacccattctttcctcaaatattctctctaccctaaccatacctcttctgttactcacacagattcgatggcaactgctgagtgacaacgccaactatattaaaaactctcattaattacaactgaaaataggaccattatgtttaacatattattatgtggcatatatgtgcatatggccctattctatrtacgtatgtaatattccataattttaattgatttaaatgaacaaatgtaattgagaaacttttatgtcgtagatatgcttgcttaaattagataattggacataaccactaatctcaa

SEQ ID NO: 32811 - DNA, 508 bp, Homo sapiens
ttacaaaacctagattgattaaattagcacatgtagatcaaaataaaaatgagctcttctttttataagccactgcattattctgttctcacattgctataaagaactacccgagactgggtaatttatgatgaaagaggtttaattgactcacagttctgcaggctgtacagaaagcatgactgggaggcctcaggaaacttacaatcatggcagaaggtgaaggggaaktgagcatgtcttcaggccagagcaggagaaagagagtaaaaggggaagtgctacacgaactttatacaaccagatcttgtgagaactcattcactatcactagaacagtaagggggaaatctgccttcatgatccaatcacctcccaccaggccctaccttcaacactgggggataacaattcatcatgtgatttgcgtgggaacacagaaccaaatcatattattctgcccttggcccctcccaaattccatgtccttctcttatttcaaaacaca

SEQ ID NO: 32812 - DNA, 624 bp, Homo sapiens
ttcccagaagaatctctacagggatgtgatgcgggaaaccttcaggaacctggcttctgtaggtaagggtgacaatattcctttcctcagtgaattagagaacaagtgtttctagctccttaacactttggggaataaaccaggcatgggtacagggaattatgaatatagaatctaatacttttttcataattttatactaattcataatgacttttctgggtctaaattttaggaaaacmatgggaagaccagaacattgaagacccattcaaaattcccaggagaaatataaggtaatttgcactcaccaaagaaagttctgttccttgagagcatttcgtattgttaggaattttttttttttttttttttagatgaagtctcgctctgtcgccaggctggagtgcagtggcacatcttggctcactgcaacctccgcctcccaggttcaagtgattctcctgcctcagcctcctgagtagctaggactacaggcacgtgccaccacgccgagctaattttttgtatttttagtagagacggggtttcaccatgttggccaggatggtcttgttctcttgacctcgtgatctgcctgcctcagcctcccaaagtgctggg

SEQ ID NO: 32813 - DNA, 624 bp, Homo sapiens
ttcccagaagaatctctacagggatgtgatgcgggaaaccttcaggaacctggcttctgtaggtaagggtgacaatattcctttcctcagtgaattagagaacaagtgtttctagctccttaacactttggggaataaaccaggcatgggtacagggaattatgaatatagaatctaatacttttttcataattttatactaattcataatgacttttctgggtctaaattttaggaaaaccatgggaagaccagaacattgaagacccattcaaaattcccaggagaaatataaggtaatttgcactcaccaaagaaagttctgttccttgagagcatttcgtattgttaggaattttttttttttttttttttagatgaagtctcgctctgtcgccaggctggagtgcagtggcrcatcttggctcactgcaacctccgcctcccaggttcaagtgattctcctgcctcagcctcctgagtagctaggactacaggcacgtgccaccacgccgagctaattttttgtatttttagtagagacggggtttcaccatgttggccaggatggtcttgttctcttgacctcgtgatctgcctgcctcagcctcccaaagtgctggg

SEQ ID NO: 32814 - DNA, 781 bp, Homo sapiens
gcatttttccatttaattttcacagcaayctgtgaggtaggtattcttatcccccttttactgatgaagaattaaatgagcacaaaaattgagttacttcctggaatcacacagctagtgagtaaccctagtctgactcaggtctatacttttcatcaacaatatgtaaactaaaggtatctcaaggctttaaaataagtttctgaagactaagttgttgtaatgaaaactttcagaatgctaccgaaaaataaaccatcattccacaaataaacttaagtgatctaagtaaaaatgaagcattgcctttaggttaatgctagaaacagcttactccttattgttatctctaattcctttaaggaactgaaataacttgaaataagtttggaaattcccaccagaattggtaagatgatgatcaaatattcaccaaaactcctgctaggtactatgtacttacgtacttaccaggatacagagatcaataagaaatagctcttgctctaaaaatattcagtggtactggtggggacatgggtgcggtgtcagaccacacacataatacattgtgaaggtataataccgagttaggtgcaaggtattatagaagagtgaggaagggtctctactctagctgtgggtggtagggaagtttactggaagagacacacagagctggccagctgaaggggctgggctgctcattccaggcagagagcagagcctgggcacagcgcagatgagcatggagtgggaggcagggagtaggcactggaaa

SEQ ID NO: 32815 - DNA, 572 bp, Homo sapiens
ttttttctacctttataattaaatataggcaatcgggcatttattctggcatttcacttttctcctagaagttgtttatgggttacttttaagaaacagttttagaacacgcagcattagttataatgttgtttttattattttgttaagaaataatcaatatttattgagtgccttctgaacaccaaattgcaagagctttatagttgttgagcagttgcatataggggcttttcatatagaattttmaattcaataataaattctattcaaaagaaaatgtactgtacttttttttaccctctcccatttccctaacctttaactcaccacttgccatattccataaaacttcctacaaatatttgattaattacacatgtagtcaaatacaaaatgggaggccagggagagatgccttccttaacaaatctgcgtctctctatgagaaacatgctatgcttcacctgcttataagttcaaaacttgttacaggtaaggacacccaggacatctttattgatctaaacaccagtctgctctgctccccttgtgcatgagaggatcatgag

SEQ ID NO: 32816 - DNA, 470 bp, Homo sapiens
cttttaattatactcttttaagtctattcaatattgaaacaaataatcacggagaaaactaaaatgctattctgtaaatcttttatgccttttaaactcagtttctttcacgtgctactctatccataaaaaggaatctgtctttcacttactaacttatctttattttccaatccactgactgcactattctatttcagtgtggttggccaatcaccacctaattgcaaaatgtgaaagaatctttattttcaatatttttcctgtcttcatcttatctaattttaatgcccttttggacactgtctttawtccccttaaaatgtacttctcttgctgtttctctaactgggctctagtgttacacattttatcatactcatttggttttcttctttttcacagttgttcttcatgttttggtgctcttcaggattccatcctcagccctcttctcatgttctccttct

SEQ ID NO: 32817 - DNA, 530 bp, Homo sapiens
tgaggagagagtataagtggtgccaatgggtttcaagaggctacatttttgtgcccagctctgttcttcggaagtgcaaccgtgtcctstcctatatcgcaaagattacagacagatttatttaaaacatagcttccccctttcacaaaatccaatattttgtacctttagagaggcttgaatcaattgattaagactcacatcataaccctgggaagtttagcaggtgagaaacagaaaacctgagaacttatttatatattgagttgagagcccagtgaatgttcttgttgttgaaactttaaacctaacttaaacttttgaatattcaagttcataccttcttggcaaagcatgacctcattttcttcatgggaaaaaattctaaaagcttcaaaagttattttttaaaataattttaattgcaaatggattagaaacatatgaattaagtatctctgaaattacacatagttgctaataccaaaggaaaaagattaaaacaatttcttttagacttcatcaaacca

SEQ ID NO: 32818 - DNA, 252 bp, Homo sapiens
cgattttataatatttgtcgtactatgtctttgagatcccgtgcaccttcatttagactagtctcattttgagtgatcaaagccacagtggctaatggctaacttattggacagcacacttcaatgtcacaatatgaaaacaatacactatatcctttaaatatttgtctgttttgactaaatgttttgagcaaaatttgtcaatgtatgttttattatttatttatttatttatttatttatttattwttt

SEQ ID NO: 32819 - DNA, 1848 bp, Homo sapiens
aacatggtgctggatctgacctaggtgcctcctaggacctcattatgcactcattagcatactcaacacactcccaccagtgccatgacagttccgggaacacctgtatttggtgtaaaaatgggtagcatgacaattctgagaaatgatcacctttttccaggaatcttcatgaatattccactctttggttaagaaatccataaagacagaaatgctaaatcccatcacagcactctcttgagtatgcaygcactctttttttctggtgtgtgtactttccctttgcataaatctctgtactttcacattttctgacttgtcgttgaattcattctcacgatggcatcaggagcctggacaccggctggggttaaggtcccactgacatttagagaccttccctagcccaccagtatcaatctctgccccattttaccagcttccctcttggttttcctctctggtgtggaaaacctcagtttagaactgtttgagccagattgcttcttcttcctttgctatccaccttttagctattttattattttgcaaactgctggtaaaagctacggggaggaagggactacatccttgatttggtcattgatttaaagactgtatctccttatacagctggcatcatcttctacttgcagatggaaaatacgcaggccccgtgaaagacagcaaagaaacatcttgccttccccgtctctcccccttggattcctgatctctacctcttacggggctctgccttctcttaaccccttgcccttttcctcaatttaaattgtctgtccctcagcttcatcccattctctcctggatagatccagggctttgagccaggagagtgctggaaaaagagggcctgctctcagggagccgcggagggagggatccaaacattggacacttcccagcttcacacatttttaggttattatgttaagaagcctgtctgcctcattttgttattctagtctatttcgcattcaaccccaggaggaggaagggtaaaggagaaaaaaaaatccttcctgccacaaataaaatgtagcagatgttagctgatgattacaaaaagacagtaaagcaggccaagaaaccatgggagggagggggtggaccacagcagagggcgggggagtgggtgttcgtggagctgaatgttcagggcagatgctctggaggattaaattacaccgagagtgaggctgctggtgccgtccctcagccctgctctgtagcgctgggagctatttcaagccagtgagaaagagagtctgcactatttgtctttaggaggtgctttatttccttccctgttttggaaaatgatacctagctctgcatgcatgtgggtgccttttttaatgaagtgctactcaaggactcaaaagaaggaacagtggcagatggggcatctgtgggttttgcctcttctgcagccattcccccctcctctggtaacagcactatgatttggtggcggggaagggctgggggtgcatctttttcactgtaagtccctgtggttcaggtgagactgattccatcctgcccaatgcccctgctccaagctgggcacttacgccagcctaagccattgattgccctggaatgttcatgtgacttaagttaggatgaggagagtcagctccaggacttttgctgacactgttgtgaaagaggggctttctgctgcgaatgccaagtggatggtatgcaagtctggagctgttcctggcttgttctgtgaaaacttactggagaatgaagccattagaagagatgcatttgagcatgaagaaagaagtttcctgaggacattgagcatct

SEQ ID NO: 32820 - DNA, 542 bp, Homo sapiens
ttttggttgtcacagtgggggctgctaccagcatctgcaaaactcctatgatacacaggacagataatgacctggccccaaatggcaaaagtgccaaccttgaaataaatgaatgattaaatattcggccggatgcggtggctcacgcccttaatccctagcactttgggaggctgaggcggatggattgctggaggtcaggagtttgagaccagcctggccaacacagtgactcctcgtctctactaaaaatacaaaatgtagccaggcatggtgatacatgcctgtaatcccagctactcagaagactgaagcagaagaatcacttgaacctgtgaggtggaggttgcagtgagccaaggttgtaccaatgtactccagcctgggtgacagagcaagastctgtctcaaaaagaaaaaaagaaaagaactaaatactctaggtccatgcagtcaagctgccgtccaagataaaacatcaaagaacctggccatgtcctctcccaaatgccttcccagattatgtgggtcacaggtcagca

SEQ ID NO: 32821 - DNA, 566 bp, Homo sapiens
cacctacagagttgtgcagccatcatcgccagaaagaaaccccacagcccttacccttcacccctccagcctccccattccttccagtcccaagcaactaccaggtgactttctgtctcagtggctttgcctatgaaacaacctgtttttataacctgagagaggtatccacagggaagcttctcagcctctcctgttacactctgtgataacctggtgcacctttgtaagccgctgagagaggaatgggacctgcctgcttgtcagcattagagagttattctcccctttaaaggaagcaggagttattttgctttggtagtacaggttgagtatcacttatccaaaatgcttgggaccagaggggttgtgaatttccggtttttcttttagattttctttyagattttgaaatatgtgcaaatactccctgttgagtatcccagatctgaacatcagaaatctgaaatgcttcagtgaatattttctcttaagtgtcctgtcggcactcaaaatatttcagacttggagcattttagatttggactttggattgggacattcaa

SEQ ID NO: 32822 - DNA, 741 bp, Homo sapiens
atcaaagattgttttaaataaaagttaaactgaagggtggagggttcaagcaactaaagattaccaaaagcaaatgtacaacaattttaaacaaaaccaaacctttctaactacagtatatacaaactactayaatttctccattgaattttttaattacaaaagaaaaaagctagatattatctatattataaagctctcacaaagaactttataagtcttttttatatgtctagtaggaaacttaccaaaaaagaaaaaaaggctttccaaacatgttataacaaaaatcgctggtttggataaaacacagaaaacgcatcccaggattacagatgagctccatcagtcaattccctcggtgcctgccaagcagcctgacttcagaacttctttcaccttttccctctccctctccctctccccaacttcattggctttccattaaatcacctggaacaccacttttctaaaagactgtctcctttgcctatgaaaactagctaccacttgtttttagtaataaagcctttctaaaatgctttgcctaattaccacatcactctacagatggtcacaacacaactgcatgtttcaagtacaatcaacttacagatattctcaagctaatcccaaaatgccattaagtgcttatcactttaattttccaaaggtagatttgaatctatcagtgggtgatccttttttttaagaactcacagtgaatccaacatgaaaaac

SEQ ID NO: 32823 - DNA, 741 bp, Homo sapiens
atcaaagattgttttaaataaaagttaaactgaagggtggagggttcaagcaactaaagattaccaaaagcaaatgtacaacaattttaaacaaaaccaaacctttctaactacagtatatacaaactactacaatytctccattgaattttttaattacaaaagaaaaaagctagatattatctatattataaagctctcacaaagaactttataagtcttttttatatgtctagtaggaaacttaccaaaaaagaaaaaaaggctttccaaacatgttataacaaaaatcgctggtttggataaaacacagaaaacgcatcccaggattacagatgagctccatcagtcaattccctcggtgcctgccaagcagcctgacttcagaacttctttcaccttttccctctccctctccctctccccaacttcattggctttccattaaatcacctggaacaccacttttctaaaagactgtctcctttgcctatgaaaactagctaccacttgtttttagtaataaagcctttctaaaatgctttgcctaattaccacatcactctacagatggtcacaacacaactgcatgtttcaagtacaatcaacttacagatattctcaagctaatcccaaaatgccattaagtgcttatcactttaattttccaaaggtagatttgaatctatcagtgggtgatccttttttttaagaactcacagtgaatccaacatgaaaaac

SEQ ID NO: 32824 - DNA, 741 bp, Homo sapiens
atcaaagattgttttaaataaaagttaaactgaagggtggagggttcaagcaactaaagattaccaaaagcaaatgtacaacaattttaaacaaaaccaaacctttctaactacagtatatacaaactactacaatttctccattgaattttttaattacraaagaaaaaagctagatattatctatattataaagctctcacaaagaactttataagtcttttttatatgtctagtaggaaacttaccaaaaaagaaaaaaaggctttccaaacatgttataacaaaaatcgctggtttggataaaacacagaaaacgcatcccaggattacagatgagctccatcagtcaattccctcggtgcctgccaagcagcctgacttcagaacttctttcaccttttccctctccctctccctctccccaacttcattggctttccattaaatcacctggaacaccacttttctaaaagactgtctcctttgcctatgaaaactagctaccacttgtttttagtaataaagcctttctaaaatgctttgcctaattaccacatcactctacagatggtcacaacacaactgcatgtttcaagtacaatcaacttacagatattctcaagctaatcccaaaatgccattaagtgcttatcactttaattttccaaaggtagatttgaatctatcagtgggtgatccttttttttaagaactcacagtgaatccaacatgaaaaac

SEQ ID NO: 32825 - DNA, 644 bp, Homo sapiens
ggcttgtgatgttgtatgatttaaatatgatagtatatgtaaagagtgtagtgtttattgttactaccacctctatattcttttcctcaatttagtgcaaagttacagctgtcaataatgacatttattagattgggaaaacagcttcccatagtaatttattatacaagtttcttctttctccttttccaggacttaggggaaaaaaaamctccctaagaatatttattacataagaaatgttgcaacttaattgctttggagtctgcttagtggaatatctggcatacatattttttggtttttattaaactataagcttcctatatctgtcagcatgtttaaatgcaagaagtagaaataactctgattaagcagaataatttttaaaaacgaatattgggagactcacagaggcactaataaggctagaggataacttcaaagcgtcaaagctatgcctttaggaaaaagactccaaatcatacagcataccagcctgaagagaaaatgacccagtggctgccatgtctaccaggcactggatgctacagctgtgttccactcagacctcgaggtccttgtgttgagatctcacttcgcaatcactgctgtcctccaaagtccaatgcctctgctgccca

SEQ ID NO: 32826 - DNA, 518 bp, Homo sapiens
cattattatatgtctatatttctatgtgcgtataatataaaaatacacaaaatatcatggcatgcattcaataaatttccacaaagtaaacacacctgtgtaattagcactcaagtctagaaatagaacattatcagccactcataaattccacccctcccttttctagtaactatctcccaagcaataataatmaattatgtatcatcttaaacccagcagagttcacagtctttagaactcaatacaaaagctaggaagggaaataaaagggagtgaagaaaatgagggcacactttagtctcatgacccaattactcaatatttatagtttttatgccatgttgaatgtaaaaataggctataggaggagatatcagagaaaagaagacataatctctttctcagtgatggctttctaaccttgaactacctactcccctttgagattaaaattatgtaaccagtacctagaaaaataccaatatatttgaattaattacttgaaatatttcttt

SEQ ID NO: 32827 - DNA, 649 bp, Homo sapiens
aaatgtaattctgaatttgaattggcttaaactcatactgataagtcatgaaaataatttatgaaatattacttagtgaatttatactgtaggagactatatttacattattcctacacagcaattatttggaaagctctatctctggaaatcttttaaactgtaataaatagctgttgttgagatgaatatgattcagatatgaaacaagagccaatataagaagtcttgtattactaaaattattaataattagcataagggggatttatctgaaattataggacaaggaaattaaaattgtgtaagtaatactcacttatatgggagagtttttttttcctcccaaatctgcatgtaatagctgaaataaatttactaatatccagcacaaaaatatgaagcactcagattcacaaggatgggggcattatatattttatcattttagaaattatatatakactagcctctatatatatcctatatatagagtagttttttgttgctcttctttcagatattcagcaaaacatacagcagaattccagaaatatgataatagttacagcccagcttctatctcatgcagctttgttgggtttgcctttcttacaacatgtacgatgattcaacttgtgttagaatt

SEQ ID NO: 32828 - DNA, 649 bp, Homo sapiens
aaatgtaattctgaatttgaattggcttaaactcatactgataagtcatgaaaataatttatgaaatattacttagtgaatttatactgtaggagactatatttacattattcctacacagcaattatttggaaagctctatctctggaaatcttttaaactgtaataaatagctgttgttgagatgaatatgattcagatatgaaacaagagccaatataagaagtcttgtattactaaaattattaataattagcataagggggatttatctgaaattataggacaaggaaattaaaattgtgtaagtaatactcacttatatgggagagtttttttttcctcccaaatctgcatgtaatagctgaaataaatttactaatatccagcacaaaaatatgaagcactcagattcacaaggatgggggcattatatattttatcattttagaaattatatatatmctagcctctatatatatcctatatatagagtagttttttgttgctcttctttcagatattcagcaaaacatacagcagaattccagaaatatgataatagttacagcccagcttctatctcatgcagctttgttgggtttgcctttcttacaacatgtacgatgattcaacttgtgttagaatt

SEQ ID NO: 32829 - DNA, 649 bp, Homo sapiens
aaatgtaattctgaatttgaattggcttaaactcatactgataagtcatgaaaataatttatgaaatattacttagtgaatttatactgtaggagactatatttacattattcctacacagcaattatttggaaagctctatctctggaaatcttttaaactgtaataaatagctgttgttgagatgaatatgattcagatatgaaacaagagccaatataagaagtcttgtattactaaaattattaataattagcataagggggatttatctgaaattataggacaaggaaattaaaattgtgtaagtaatactcacttatatgggagagtttttttttcctcccaaatctgcatgtaatagctgaaataaatttactaatatccagcacaaaaatatgaagcactcagattcacaaggatgggggcattatatattttatcattttagaaattatatatatactagcctctatatatatcytatatatagagtagttttttgttgctcttctttcagatattcagcaaaacatacagcagaattccagaaatatgataatagttacagcccagcttctatctcatgcagctttgttgggtttgcctttcttacaacatgtacgatgattcaacttgtgttagaatt

SEQ ID NO: 32830 - DNA, 649 bp, Homo sapiens
aaatgtaattctgaatttgaattggcttaaactcatactgataagtcatgaaaataatttatgaaatattacttagtgaatttatactgtaggagactatatttacattattcctacacagcaattatttggaaagctctatctctggaaatcttttaaactgtaataaatagctgttgttgagatgaatatgattcagatatgaaacaagagccaatataagaagtcttgtattactaaaattattaataattagcataagggggatttatctgaaattataggacaaggaaattaaaattgtgtaagtaatactcacttatatgggagagtttttttttcctcccaaatctgcatgtaatagctgaaataaatttactaatatccagcacaaaaatatgaagcactcagattcacaaggatgggggcattatatattttatcattttagaaattatatatatactagcctctatatatatcctatatakagagtagttttttgttgctcttctttcagatattcagcaaaacatacagcagaattccagaaatatgataatagttacagcccagcttctatctcatgcagctttgttgggtttgcctttcttacaacatgtacgatgattcaacttgtgttagaatt

SEQ ID NO: 32831 - DNA, 501 bp, Homo sapiens
atatatattatgctatatcacatatcactatgatataatgatgatatattatacattatgacataatctctctctctctctcwcacacacacacacacacacacatatattatatatatatattagaaggcctgaacagcaaatctaaagggccaaaaacatggactagtacatgtaaactacgatacttcatgagagaacatcttcctgaggagagagagttgaagacgcctggtaaagtctggaagagagagaaaatattaactcttgagcagtatgttattaaaatgattcctaaattcatctcctatggacttgcatctgagtcttggtagaggaggtgtacacttaaattgtaactatctatcttctggaatcacaaggagttaatcttgggagcattttgagacgcctttctagcaggaaatgcttataattattgggagggatctgaaggtaactaaattctcacagttctgcagtatgattggcgaactacta

SEQ ID NO: 32832 - DNA, 501 bp, Homo sapiens
atatatattatgctatatcacatatcactatgatataatgatgatatattatacattatgacataatctctctctctctctcacwcacacacacacacacacacatatattatatatatatattagaaggcctgaacagcaaatctaaagggccaaaaacatggactagtacatgtaaactacgatacttcatgagagaacatcttcctgaggagagagagttgaagacgcctggtaaagtctggaagagagagaaaatattaactcttgagcagtatgttattaaaatgattcctaaattcatctcctatggacttgcatctgagtcttggtagaggaggtgtacacttaaattgtaactatctatcttctggaatcacaaggagttaatcttgggagcattttgagacgcctttctagcaggaaatgcttataattattgggagggatctgaaggtaactaaattctcacagttctgcagtatgattggcgaactacta

SEQ ID NO: 32833 - DNA, 501 bp, Homo sapiens
atatatattatgctatatcacatatcactatgatataatgatgatatattatacattatgacataatctctctctctctctcacacwcacacacacacacacacatatattatatatatatattagaaggcctgaacagcaaatctaaagggccaaaaacatggactagtacatgtaaactacgatacttcatgagagaacatcttcctgaggagagagagttgaagacgcctggtaaagtctggaagagagagaaaatattaactcttgagcagtatgttattaaaatgattcctaaattcatctcctatggacttgcatctgagtcttggtagaggaggtgtacacttaaattgtaactatctatcttctggaatcacaaggagttaatcttgggagcattttgagacgcctttctagcaggaaatgcttataattattgggagggatctgaaggtaactaaattctcacagttctgcagtatgattggcgaactacta

SEQ ID NO: 32834 - DNA, 501 bp, Homo sapiens
atatatattatgctatatcacatatcactatgatataatgatgatatattatacattatgacataatctctctctctctctcacacacwcacacacacacacacatatattatatatatatattagaaggcctgaacagcaaatctaaagggccaaaaacatggactagtacatgtaaactacgatacttcatgagagaacatcttcctgaggagagagagttgaagacgcctggtaaagtctggaagagagagaaaatattaactcttgagcagtatgttattaaaatgattcctaaattcatctcctatggacttgcatctgagtcttggtagaggaggtgtacacttaaattgtaactatctatcttctggaatcacaaggagttaatcttgggagcattttgagacgcctttctagcaggaaatgcttataattattgggagggatctgaaggtaactaaattctcacagttctgcagtatgattggcgaactacta

SEQ ID NO: 32835 - DNA, 1098 bp, Homo sapiens
ttgaaaaacgcacctaaataagagtttcctaaaggtgaatttaagatcactttcaatctcaacacgcagtaaagaaaatgctttccacatggctttcagcataccacaatctagttctcctcattgaagatcatttagagtrgcagagagggaagactctgaaggcagtgtgattctaagtccaattttgtgactagttttctgtctccaagagactctctgacctgggcaattacagtcaacaagattctgggtccaaagctcagcctttcagatgccttgggttctgcataatgtttccattttaaagtaaatttcagtcaaattttagaatatatatttgctaatatgcaaatttaatttgtaattataagcaattttaaaaagtgagcaggataaacttcaactgtcagttgtaaaacagactagattttcatgaataaaggtggaatgcatagtcacctactttcatggaacatatagaaaatctgttcttgaacatgatttaccacagtaaagcaattgtgaagctaatatgcaatatttaccaagaaatacctgaggagattgtaagtactaattgctacaacagtgtttatctggtgtttaattaatttcttagtttaattgaagacaaatgcttactgttctagctgtctttcacaaagctcaaaactatgaaaaacacaaaaagacaatctcattaaatttcattttcccaatatctaaaaaatgggattgataatatgaattaaatgaagtgatgagtataaaatgcctggcacgtgtatgtgctcaacaaatgtaaggtatgattagacagtatttaatttcattatttttaaaactttagtcctcatttttttttatttggagcattatttcataatatttgcaatttttagatagataaaacatttacatggttcaaaattcaagagtaacaaaggacgtgttttggaaattcttaatcacctcactctctttccaacaactggttccttgtctgaaaataacaaatacgatcattttcttctctatctatacaggtatattttatatatttacaggcaaatataaaagtattattcactttta

SEQ ID NO: 32836 - DNA, 1098 bp, Homo sapiens
ttgaaaaacgcacctaaataagagtttcctaaaggtgaatttaagatcactttcaatctcaacacgcagtaaagaaaatgctttccacatggctttcagcataccacaatctagttctcctcattgaagatcatttagagtagcagagagggaagactctgaaggcagtgtgattctaagtccaattttgtgactagttttctgtctccaagagactctctgacctgggcaattacagtcaacaagrttctgggtccaaagctcagcctttcagatgccttgggttctgcataatgtttccattttaaagtaaatttcagtcaaattttagaatatatatttgctaatatgcaaatttaatttgtaattataagcaattttaaaaagtgagcaggataaacttcaactgtcagttgtaaaacagactagattttcatgaataaaggtggaatgcatagtcacctactttcatggaacatatagaaaatctgttcttgaacatgatttaccacagtaaagcaattgtgaagctaatatgcaatatttaccaagaaatacctgaggagattgtaagtactaattgctacaacagtgtttatctggtgtttaattaatttcttagtttaattgaagacaaatgcttactgttctagctgtctttcacaaagctcaaaactatgaaaaacacaaaaagacaatctcattaaatttcattttcccaatatctaaaaaatgggattgataatatgaattaaatgaagtgatgagtataaaatgcctggcacgtgtatgtgctcaacaaatgtaaggtatgattagacagtatttaatttcattatttttaaaactttagtcctcatttttttttatttggagcattatttcataatatttgcaatttttagatagataaaacatttacatggttcaaaattcaagagtaacaaaggacgtgttttggaaattcttaatcacctcactctctttccaacaactggttccttgtctgaaaataacaaatacgatcattttcttctctatctatacaggtatattttatatatttacaggcaaatataaaagtattattcactttta

SEQ ID NO: 32837 - DNA, 1098 bp, Homo sapiens
ttgaaaaacgcacctaaataagagtttcctaaaggtgaatttaagatcactttcaatctcaacacgcagtaaagaaaatgctttccacatggctttcagcataccacaatctagttctcctcattgaagatcatttagagtagcagagagggaagactctgaaggcagtgtgattctaagtccaattttgtgactagttttctgtctccaagagactctctgacctgggcaattacagtcaacaagattctgggtccaaagctcagcctttcagatgccttgggttctgcataatgtttccattttaaagtaaatttcagtcaaattttagaatatatatttgctaatatgcaaatktaatttgtaattataagcaattttaaaaagtgagcaggataaacttcaactgtcagttgtaaaacagactagattttcatgaataaaggtggaatgcatagtcacctactttcatggaacatatagaaaatctgttcttgaacatgatttaccacagtaaagcaattgtgaagctaatatgcaatatttaccaagaaatacctgaggagattgtaagtactaattgctacaacagtgtttatctggtgtttaattaatttcttagtttaattgaagacaaatgcttactgttctagctgtctttcacaaagctcaaaactatgaaaaacacaaaaagacaatctcattaaatttcattttcccaatatctaaaaaatgggattgataatatgaattaaatgaagtgatgagtataaaatgcctggcacgtgtatgtgctcaacaaatgtaaggtatgattagacagtatttaatttcattatttttaaaactttagtcctcatttttttttatttggagcattatttcataatatttgcaatttttagatagataaaacatttacatggttcaaaattcaagagtaacaaaggacgtgttttggaaattcttaatcacctcactctctttccaacaactggttccttgtctgaaaataacaaatacgatcattttcttctctatctatacaggtatattttatatatttacaggcaaatataaaagtattattcactttta

SEQ ID NO: 32838 - DNA, 1361 bp, Homo sapiens
gggtggcacgttttattatttggccctgcccacatcctgctgattggtccaatttacagagtgctgattggtgcatttacaatcctttagctagacacagagcactgattggtgcatttacaatgctttagctagacagaaaagttctccaagtccccaccccacccagaagcccagctggcttcccctctcatgagtcttcataaatggtggctttattaaactctcctcagtcccagatttgaaagaccatctatttcctgccagtacactgacacacaccctcaatcaatttcatgctatcttgcaatacctaatcatggtatttattctgcttatctcaagtcaggygtgtctgtggagagatctgtcctcttgtttccttgctacctatgcgtctttgctaatgttcactcctggaatgtactctgagcctctatctctgtctaaattcctcactattcaaaacccttccatatcctacaggaaactttgtcttcaatgccatctcctataggaaactttgccaaatctaccagccagaagcaatcttgcctttctctagactcccacagctctttactcaacctttgtaatgatgcttatttctactttgtatgactttttgttcggcacacatattatcttccttaattaactagattcgtgccttcattaattggaaggctagatgcatgcctttcaagacttgcatcccaacaagaggctaaaagaatgcctcatacatcttggcattcagaaagtattgtttaattgaaagagtgaacaaattgctaaattccagtgatatcacttacagagctaatctcaggcagttgtgttcacattttaatatatattcattgatcctacaaattcattaaatattttttatttgaatttttaatatcacctgtgcagaaatacgtaaggtccttagaaaaaatcttgaatagcccctccacactggtttccagaggcactgaagttaattctttattcttaatagtactggtagtaacctcaaatacaatttgcacccatatagagctgtgaagctcaaactttgctggctgtaacaaaatcatatagggagctttgaaatgtagataaattattgtcatcttagtcttcacttctaccccagacccgctggatgggcatttgggtgagagggctggctgatttgaattttatcaccttcccttttgctactttcgctcagttttggctctgctaactaaacattcgtccaagaactggtattcaggagctgctgttttaaagtacagtttggtaataaaaacttctcataaggaaaataaaaggtttacctacatttaataaatgagaaaatggag

SEQ ID NO: 32839 - DNA, 531 bp, Homo sapiens
aagttagtctcgaactcctgaagtgatccaccgcctcagcctcctgagtagccaggattacaggtgtgagccaccacacccagtgtaattcataaactgaggacaatcagttgcagtgagtggctggggtcgcatatcagggggtcccttgctggcctcctgcaggctcaatggcaacacgctgctgctcccatcctctcacctcctccacccacagatccaagtactcaacacgcactgtggctgtcacttttgcaatttcagatgtaacagcgaaattaaagggactttttttccctttttcacaatttcataaagaagagatttgttcttaccttagatcttagcaacctcacacacaatctgtttctttctagtcaggaactttcaccttttcatctttaggtcaaggaagtgctttctgtcttctctttggcatatctgaattgccagcatcacgctcttgcgctttgggccgcctcaygtcacataagagcaacctgagcacgagcaccctggcactgcggcagt

SEQ ID NO: 32840 - DNA, 547 bp, Homo sapiens
gtcaggcccattttcattggcartgaccttcctggcatatgctgcattttcctatgttggtgagaaatttaattttactctccagaggtattagggaaaatattacaaaccacttttcaagttgaggttgaacaaatgaccaggtataactggttcaggaccccaaaataatgtcattgtttctttaagcattgtcattgagttgaaagccatggaggtcacaaataaaaagagttaggctcatattctaaagatccccagctctttaatttaaaaaaaaatcagtgtcaaaatgttttgttttaattacatcattgttttcagactatgctttaaagaattttaaaattagcttagttttttagtaatctatgaataaagcttctcttctcgtgtgcctgccttagagatggactgacttttttgcaaaatgcagcttttattcttagagaacttagtagtgcttaaactgtgttcatattcatcctgtcatttgagctctgtgacagccttgtgatggagacagaactggattcttacccaaatt

SEQ ID NO: 32841 - DNA, 715 bp, Homo sapiens
ctactctatcatattaaaaaataaactccaaatggattgaagacctaaatgtgaaagggaaaattataaagctaatgaaagaaaatattggagaatatctatatgatctcagtttctttaggcaagatcataaaagtgcaagccataggagataagttgatgaatttgactagaagaaagttatttctgctaaatgaagaattccaaaggtaagactaacctctgggtgccagaaaggaaaagatatttgtagatgttgaggtattcatgtctagaaaatcccccaaaacagcaagaaaaagacaataraatccactggcaaagattttgaatagacaatttgcagaaaggcaaacctgataaatttgtgaagatgatcaaatgtagtaacattaaaataagatactacattataagcatcagattggaaacagttagaaaatccagtaataacaagtactggtgaggatatggaggaaattaggaacactagtacatggctgatagaataaaaggtatagctattctgcagtacttagtgaaattaatatgactatacccacaacttagcaatcctactacattatcaatcttgctgagaaactctgatcacaagtacagcagcatgaggttcttcattacatcaatatttgtggagacaaggaactggaagtcaactaagtgcccctcactggaagaatggttacataaaatg

SEQ ID NO: 32842 - DNA, 1441 bp, Homo sapiens
tgcccttttccttcattattaaatattaaatgttcctatttacatattctgccttactgaagaggtgttgctggtccctacacaaaacggtccctgatgactgtactctgatatttcttacattctttccctgtgagtctgtttctaacggcaacctcatcttctaaatgtaatttcacacatgttactaaatcactttgcttcagcctgaacctaggatgttgcttctccttcagaataagatgccagctgggaatakagatccaggcagtcccagaagccccatgctaacaacttctgctaattcttaggctgattatgtggattattgaatagatcgtctttctgctttttatcctttaaactctctctgctcggccttgtctgtttcatcagtaaaggtgggcatggggaacatagagactgtgaaatctaaacctactctactccacttccatttggtcaggttttggaataaaaaaatctactctattagtaaagaattatagtcattttagagccattctctgagtaaaactgtcaattaataaacttggccattctgtttggggaataaaagaaaggaggagggagttaaggagcttatttcccccaattctctaactcaccaatgggtttgtggctgcaattgcctgaagtcccattgactgtgttgcctgcctattgagtaggatcttctggggtacatacaacttaaatgtagttttgaaagttgcttgtctttctctcaggtcatattgctaatattgtatacattgccaattgagcaatcagtttaccaactagaggaaatctggctcactagatttactgagcacctgctgtataccaggctctagactgggtgccctgtctccttgacctctaatcttcacaagcaatctaggaaaagtgttatgaacattttagagatgaaggaagagactcagagaggttatttacttcttgctcaagcccatacagcaatgatttcccaaacctgtagggtgtttcttccttgggtgttttgtagcggggaaaaagaaagtcaaagcctgtttccattatcgtggattttagggaaaggggagtattaaacatagtaatcagagaagcctggttcttctgaagcttctgactgtcatcaaattggaagttaatgctgggggagaagctctgtgtgaaggaccacatactccgtctctggccagccaaactgccttggcttacctgaggctgccagtgacttctggctcctagatcttcatcttgcagctacgtgacaggtggtgcagcctggtgccttatgtctgtgctgtagttcttaacagcaagtgagtggtagcaggcaggaaggccatcggtgggaaggaataggaggggttgtcatagaccaaggagggtgaccacagcattccacagattcaaaaatgcccatttt

SEQ ID NO: 32843 - DNA, 1441 bp, Homo sapiens
tgcccttttccttcattattaaatattaaatgttcctatttacatattctgccttactgaagaggtgttgctggtccctacacaaaacggtccctgatgactgtactctgatatttcttacattctttccctgtgagtctgtttctaacggcaacctcatcttctaaatgtaatttcacacatgttactaaatcactttgcttcagcctgaacctaggatgttgcttctccttcagaataagatgccagctgggaatagagatccaggcagtcccagaagccccatgctaacaacttctgctaattcttaggctgattatgtggattattgaatagatcgtctttctgctttttatcctttaaactctctctgctyggccttgtctgtttcatcagtaaaggtgggcatggggaacatagagactgtgaaatctaaacctactctactccacttccatttggtcaggttttggaataaaaaaatctactctattagtaaagaattatagtcattttagagccattctctgagtaaaactgtcaattaataaacttggccattctgtttggggaataaaagaaaggaggagggagttaaggagcttatttcccccaattctctaactcaccaatgggtttgtggctgcaattgcctgaagtcccattgactgtgttgcctgcctattgagtaggatcttctggggtacatacaacttaaatgtagttttgaaagttgcttgtctttctctcaggtcatattgctaatattgtatacattgccaattgagcaatcagtttaccaactagaggaaatctggctcactagatttactgagcacctgctgtataccaggctctagactgggtgccctgtctccttgacctctaatcttcacaagcaatctaggaaaagtgttatgaacattttagagatgaaggaagagactcagagaggttatttacttcttgctcaagcccatacagcaatgatttcccaaacctgtagggtgtttcttccttgggtgttttgtagcggggaaaaagaaagtcaaagcctgtttccattatcgtggattttagggaaaggggagtattaaacatagtaatcagagaagcctggttcttctgaagcttctgactgtcatcaaattggaagttaatgctgggggagaagctctgtgtgaaggaccacatactccgtctctggccagccaaactgccttggcttacctgaggctgccagtgacttctggctcctagatcttcatcttgcagctacgtgacaggtggtgcagcctggtgccttatgtctgtgctgtagttcttaacagcaagtgagtggtagcaggcaggaaggccatcggtgggaaggaataggaggggttgtcatagaccaaggagggtgaccacagcattccacagattcaaaaatgcccatttt

SEQ ID NO: 32844 - DNA, 466 bp, Homo sapiens
aagtaaaagagatgggcaatgctgagatgagaactcagtgttcctgtgtgcccatccagtggaagtcccatgcaaaccctgaggcaaagcagcatctctttggaaaaagacttcaagccttttagagtctcactgctgcctcgcaggcacggccaccacctcttcccagctcccctaccctgtccctattctcagttgtcctgcttctcctggtccaggctggaggatatcagakttgaaaaaattccagcctcaggtgcccatgggaccagagagatgataaaatccagaaaggggatgagccaggctcccctatgctctcagccctgggcatgaacacgtaacagtgggacttaactccctgggagacaggcccaaagaggcagcattcctggtggtgagactctgagtgcatctgcacctagacatttccgcatttaaatctgcagctctgcaagtggagaga

SEQ ID NO: 32845 - DNA, 609 bp, Homo sapiens
agattcacayacatgttggtgccgaaatatagccaagccatcaccttcctttagtcattcctggcttttctacttgttgctgtttacttttaggtttccattacgaatttacaccaacctcttccatcatggtttctctgtccactcacctccagaaccctccctcacctttctggattttatactggctttctccaacccattccttgcattttactcttaggccttcattaatatgttcaaaactaccatttgaactgggaaatacagaaaagtgatctgcagtaagaaaagaagagtaaaacagattcactgaggggacttcctgcatctccacagcactctagttcctgattgccctctggagactatgaagagcccctgctcttagagtcccaggagatcctagtgtccttcccatttaattcaagttagttcaaattaagtttctattagaacaaatcgttttaggtgtttttttttaaaacatttgtctaaagtcagaaaaagtcacagcgctcatgttaatgtggtcttcatttatggcatgaagtaagtttcttactgtctctgcctctttttttacttagcaaaatgagagactgcatt

SEQ ID NO: 32846 - DNA, 520 bp, Homo sapiens
aagactcatgttaacctttcacaatggcagatatctctctctctgcgtcctaaatatttcataaatctaagttttatttctgccacactacaggagtatcttatggaacaatcacagaaaattaaacttgctgaggtattgttgatttgatgtttaatagaagtatatttaacaaackgtcttcaatgactactttctcagaggtcatagatcccagcttttgtaatgcatatcatcaaatattttttctcatattacttggtaaaatgatatatttcagataagggagataagatatagcttattgaggccaacttgatcagactgcaaaaggtaattcaggtacataaatacgtgtttcaaagttgttgctttatagtcagactaagtattaagaatatatatttatccaattgtacacagcagggacaggatacaatgcacatagggctaacagcagtgggggaaatcaaacaaaatccaggaattatagcatcatacttaatggaaaaaaatagca

SEQ ID NO: 32847 - DNA, 520 bp, Homo sapiens
aagactcatgttaacctttcacaatggcagatatctctctctctgcgtcctaaatatttcataaatctaagttttatttctgccacactacaggagtatcttatggaacaatcacagaaaattaaacttgctgaggtattgttgatttgatgtttaatagaagtatatttaacaaactgtcttcaatgactactttctcagaggtcatagatcccagcttttgtaatgcatatcatcaaatattttttctcatattacttggtaaaatgatatatttcagataagggagataagatatagcttattgaggccaacttgatcagactgcaaaaggtaattcaggtacataaatacgtgtttcaaagttgttgctttatagtcagactaagtattaagaatatatatttatccaattgtacacagcagggacaggatacaatgcacatagggctaacagcagtgggggaaatcaaacaaaatcyaggaattatagcatcatacttaatggaaaaaaatagca

SEQ ID NO: 32848 - DNA, 607 bp, Homo sapiens
ctactttacatcagaggcaaaggaatgccttaagaagggaaaagaaactgtgaggaaaatgcaattttctctgccagaaagaacttactttgaatgaaatcacattggtttcactaagattatgtcatttcagtggatttcacagcattgcttgtagccatgctaacttgctcagtagacaaagaaaatattaaaagtaaaggcaaagtaagaagtaatctgtgtttattgagcttacttaataayttgaagataataactaaaaattagtgaagtctagttgctgcttttcttagaaagcctctgtaatcacttgaactaaatgttcagaacaaccagataaaaataatttatagaagaaagcagaagaaattaagaatctcataactccagcaatgctctcccagatgcacaagaaaatggttcaatttcctcaaccttcactctcagcacaatcctagccccacacctaacttctctctcacaggctaacttctgactacaattccattgtctgcttggcttttcagctaccacagagctagtttataaagtgagggtgttgagaattagctggagaggaaggatgcccctactctagatacca

SEQ ID NO: 32849 - DNA, 607 bp, Homo sapiens
ctactttacatcagaggcaaaggaatgccttaagaagggaaaagaaactgtgaggaaaatgcaattttctctgccagaaagaacttactttgaatgaaatcacattggtttcactaagattatgtcatttcagtggatttcacagcattgcttgtagccatgctaacttgctcagtagacaaagaaaatattaaaagtaaaggcaaagtaagaagtaatctgtgtttattgagcttacttaataatttgaagataataactaaaaattagtgaagtctagttgctgcttttcttagaaagcctctgtaatcacttgaactaaatgttcagracaaccagataaaaataatttatagaagaaagcagaagaaattaagaatctcataactccagcaatgctctcccagatgcacaagaaaatggttcaatttcctcaaccttcactctcagcacaatcctagccccacacctaacttctctctcacaggctaacttctgactacaattccattgtctgcttggcttttcagctaccacagagctagtttataaagtgagggtgttgagaattagctggagaggaaggatgcccctactctagatacca

SEQ ID NO: 32850 - DNA, 607 bp, Homo sapiens
ctactttacatcagaggcaaaggaatgccttaagaagggaaaagaaactgtgaggaaaatgcaattttctctgccagaaagaacttactttgaatgaaatcacattggtttcactaagattatgtcatttcagtggatttcacagcattgcttgtagccatgctaacttgctcagtagacaaagaaaatattaaaagtaaaggcaaagtaagaagtaatctgtgtttattgagcttacttaataatttgaagataataactaaaaattagtgaagtctagttgctgcttttcttagaaagcctctgtaatcacttgaactaaatgttcagaacaaccagataaaaataatttatagaagaaagcagaagaaattaagaatctcataactccagcaatgctctcccagatgcacaagaaaatggttcaatttcctcaaccttcactctcagcacaatcctagccccacacctaacttctctctcacaggctaacttctgactacaattccattgtctgcttggcttttcagctaccacagagctagtttataaagtgagggtrttgagaattagctggagaggaaggatgcccctactctagatacca

SEQ ID NO: 32851 - DNA, 703 bp, Homo sapiens
atctgcagtctcaactagggaaggaggtgcttcctggtcactcagtggctgttggcagcattcatctctttgtaggctgctggactgatggttttaattctttactagttcttttctaaaggcagctctcggttccttgcttgggggcccctacaacataacatcacgctttatcaaagtgtgcgagccaagaaagcaacagagagcatctgctagcaagaaaaaagtaccaatattttataacctaattatggaagtgacattccctcaatgttgccatgaatagcagaggcaggaatcattggcacctatcatagagactgcctaccacaaggagtccttcttgcccaaattattacatttagatccatctgactctaaaactataccsaagtgcttcagtttacagatgaggaaactgtgactcaagcaattcctttactcacccaaggtcaagtctagagtgagaaccaagatgtcctcagctccattttaattttcattacctatatttcgctgcttctaaatccaagcacagatcctacatcccaacagttttagggtttgcctgtggacaaccctccttctgaagattcaccaatagcatgaagtctctatgttactgacatcgtattgaatcacatagtagctgagtgactgtttaaggttttagagtagctcccttacctccccaaaaatgtac

SEQ ID NO: 32852 - DNA, 656 bp, Homo sapiens
aagagcttgctggtaccaggtggcatttagagagtaaaatcttttcttagtcatcagaatatataagttcctcctactatggtgtaaaggcgagtttttaaagacaccacagtgcaaaaggactgccagggtgaaaagccgagagtgaaatggtttcttcagatgatttagcaaatctctagagaaggatttgtcttaagaactcattgcttaagttcagcatagcggcactcgtgttctaagagactaaactgcctcaaaagggagagaaaataattgtctagccagattgtatttgtaacctgtttatccagcagatattggatgaagttcagcacctctggtgtgtggcctgtgagtgtggttgtgagtgtgcacatgtgtccagcctagaagacgacggcctgtggattgatgacaagcgtttatatcagcctgaagagaacctccaaatctcattgctgtgtgatatgccacgttttgtcctttggtggcagacttggataacaacatcaattcatcattttatttgtctcctaacacaggtgggctgacctgcagctttatgatgtaaaagtttgtgtttgtatttgaaatattgaaaatgtatttgaatcatagkcaaccacaacccaagaacatttttgttggcaaaa

SEQ ID NO: 32853 - DNA, 1280 bp, Homo sapiens
tgcaacttgagttctcaagaagcatctgctgtgtgtgtaattacacttccggcaagcaagttgagaaggttgtaaattggtacacgattgtgcaaaaaaaggttaacatagtccagactgttgttccttaaaaggactgttgactaggctggcccttgcctggcatctgggaacttgtattttgtgaaggtttacaccattcctagacctgctaagcatggctcactctgcctgaactgtttgtacaaacactacagcttgtgttagacccctgcttccttatgaaagcctagaatgttggtatgtgcccagcagagggtatctacaggatcagcctccaataaaaaccttgggcttgggctgggcgtggtggctcacacctgtaatcccagcactttgggagaccaaggctggcacatcacctgaggtcaggagttcaagaccagcctggccaacatggtgaaacctgtctttactaaaaatacaaaaattagccaggtgtggtggcacacacctgtaatcccagctacttgggaggctaaggcaggagaattgcttgaacctggaaggcagaggttgcaatgagccaagatcgtgccatagcctgggtgacagagctagactccatctcaaaataacaaaaaaacaaaaaacaaaccagacaaacaaaaaaacccttgggctcagaagagacacataatacacatataacaaaacttcacatgtatcctataaatttatacaaaaaaaaaaaaagccaccttgggaccaggtatggtggctcacacctgtaatcctagcactttgggaggccaaggtgggctgatcacttgaggtcaggagttcaagaccagcctggccaacatggtgaaaccccgtctctactgaaaacacaaaaattaggtgggcgtgatggcgcatgcctgtaataccagctacttgagaggctgaggcacaagaatcacttgaacccaggagacacaggttgcagtgagctgagatcgcaccactgcattccagcctgggagaccgagggaggtttttgtctcccgggaaaaaaaaaaaaagaaaataaaagccatcttcagttctgagtcgctaaggagcctccctagctggratcatctgcatgtgttgtcttagcttgctgctgggggaacgaggtgcgcccggtgtgactctactggaagaggacccttgactgcttgtgcctgctttccccgactcagccccatgagccttttccctttgctgattttgctgtgtaacctttcgttgta

SEQ ID NO: 32854 - DNA, 542 bp, Homo sapiens
ttaggcwaaatttttattgagactgcatttctctgtgatgagtaattaaagtcacagataatttagagactgtggagttcagttttcttcattgcttatattactttgcattttcaggaaatatgctgtccgatgggttagcaatattagggaccactagaggacatttatttaatcgtcgaaagcaaccatgacagtagcaagccaatatatgaaagaaatgaagtcatttcagcacaaaataaatgttctgacttttagaagataagctaacatctcaacttaaaatgagtgaatgctagcattttggaagaaacgtagacagcagatatttcaatttctccactttatagataaagatattgaggatcaaaacagttaaatgatttttccaaggtcccatagctaattagcagtggagtttagaaataactttctagttcctgtccagtgaatcttccatcgacattttctatttcaatgtcccataaccattgtgattaattttttccaaatattatatgtaataaatagattggtac

SEQ ID NO: 32855 - DNA, 544 bp, Homo sapiens
gaggcaacctgattgcctttatttcccagttcttggaagatactgtatcactttcctgtcattttcatgcgctgcctccaactctccctaggttggacttcaaattctacataaatgtaaaaaatattatactttgtcagggatttagatggactgatatataagggcagttgtcttcctggtgctctgttaaactccacaatactagttctcattcacccaccattaataataatgaagctgacatattatgtctcttgtaagcagcaaaaaaaagtgagaacatgataaatacatgaattcctaagacacatacaatgaggatcatcttggaagtcagacacagctgggtttgaagcaggcctcactttttactaactatgtgacctggggcagatatmtttgcatctgattctgttttatcatccataacattttaatgatacatattttttagggttgttttaggaataaaagcagttctatctatttattaactatttattgtcaatgtgagtaccacataataggtctttaataatca

SEQ ID NO: 32856 - DNA, 695 bp, Homo sapiens
ccccaataaatgtagatttatttagaaaatacatwcagtaatgtcttcttatctatgtagggaccctgcataagatacttctttctctgactgtattcctcatccttaaggcagagataaacagtatcattttcataggggtgttatgagcattaaaagagttaataagcaatatatttagaacagtgcccagagtctaataagttctaaataagtcatctattattattatattgtaaaatatatcccaaacagaaaattttaagtaatgacaaaatatgaagtaaatattttttaaatgtgtgacattattaaaatagggcacaaaagttttgagatcacagaaacattagttattaataaccctagccagagaaatgtgatttaatatgcaatagtacttttgactattttggtttacttggtgataaaggagttcaaggctctgtttttaaattatgtttatcactatagtactaggttgtaatggcttttagagtggaaaaagacattgtaaggaatctatgagaccaaaagaactacatttctgggtgcacttattaagtaatttaatcattgttcagttccatccacgtttttcaggtttttttgttagtttcatttaataaattttcatcttcactgatgtcactaagttgttctaaaaaagaatcagaagatactgaaatttatat

SEQ ID NO: 32857 - DNA, 1333 bp, Homo sapiens
cataagggaattaatctgtggattcccctggctatctcttggggtaaggctgacttcttaccccaagagacaggtaaaacacccttcactggggctcacccagaaagacctcttcagtaagaagcttaacctgtatacagcagtgattacaattctttgctctggattaagaaaaacaaattgttttttctagatccctgaataaatataattgatcaattagcttgatttttaccctttatctcacatgatagcaaattaaatgctacccagaaagcttacttggattcatctatcaccaccttgaagaaaatttaacgttattcacatattcatagaacactagaaattgaacttaygcaaagcttcatctgaaaccaattactacttctaaacaaaactagagccaaacattcgggacaacggttatcttccaaatactacagaatgtcctagcatgaatggcataattctcctagggagacccagggaaaggtgtttgcccgaaaataagttagccttgtcctgcagagaataggttggaaaaatacgcaggccttttcctcatccatgagtctaacaaggacactactgcactgtcaagcagtttcatatctgcctagctgcaatttggagttgataggccacagaggtgaaagtcttatgattatacaatttgtggtattgtataacagcataaactcaaaaagtcaccaaaacatgagtgttgctatgtagtgagtgtatcatttaggtattggtatctatctcaaagccaactagaatgagtctattctaaaatcaccagtgataaaggtatcaaataggaaaaaaagcaccccaggtcaaaagaggcacattgattaaaagaactttactatatgttatagagctcagagagagaaatattttgcttctagaaactaaacattataggccaggtgcagtggctcacgcctataatcccagcactttgggaagctgaggcaggcgggtcacgaggtcaggaaatcgagaccatcctggctaacattgtgaaaccccatctccactaaaaatacaaaaaaataaaaaattagctgggtgtggtggtgggtgcctgtagtatcagctatccaggaggctgaggcaggagaatggcgtgaacctgggaggcggagcttatagtgagctgaggatctgccatgcactgcagcctgggcgacagagtgagtccgtcaaaaagaaaagaaaagaaaagaaacattatattttaaattaatttcccacagattttcctactgctaaatcagaaaatagatgtggttatatgccagtgataatggataaagat

SEQ ID NO: 32858 - DNA, 1333 bp, Homo sapiens
cataagggaattaatctgtggattcccctggctatctcttggggtaaggctgacttcttaccccaagagacaggtaaaacacccttcactggggctcacccagaaagacctcttcagtaagaagcttaacctgtatacagcagtgattacaattctttgctctggattaagaaaaacaaattgttttttctagatccctgaataaatataattgatcaattagcttgatttttaccctttatctcacatgatagcaaattaaatgctacccagaaagcttacttggattcatctatcaccaccttgaagaaaatttaacgttattcacatattcatagaacactagaaattgaacttatgcaaagcttcatctgaaaccaattactacttctaaacaaaactagagccaaacattcgggacaacggttatcttccaaatactacagaatgtcctagcatgaatggcataattctcctagggagacccagggaaaggtgtttgcccgaaaataagttagccttgtcctgcagagaataggttggaaaaatacgcaggccttttcctcatccatgagtctaacaaggacactactgcactgtcaagcagtttcatatctgcctagctgcaatttggagttgataggccacagaggtgaaagtcttatgattatacaatttgtggtattgtataacagcataaactcaaaaagtcaccaaaacatgagtgttgctatgtagtgagtgtatcatttaggtattggtatctatctcaaagccaactagaatgagtctattctaaaatcaccagtgataaaggtatcaaataggaaaaaaagcaccccaggtcaaaagaggcacattgattaaaagaactttactatatgttatagagctcagagagagaaatattttgcttctagaaactaaacattataggccaggtgcagtggctcacgcctataatcccagcactttgggaagctgaggcaggcgggtcacgaggtcaggaaatcgagaccatcctggctaacattgtgaaaccccatctccactaaaaatacaaaaaaataaaaaattagctgggtgtggtggtgggtgcctgtagtatcagctatccaggaggctgaggcaggagaatggcgtgaacctgggaggcggagcttatagtgagctgaggatctgccatgcactgcagcctgggcgacakagtgagtccgtcaaaaagaaaagaaaagaaaagaaacattatattttaaattaatttcccacagattttcctactgctaaatcagaaaatagatgtggttatatgccagtgataatggataaagat

SEQ ID NO: 32859 - DNA, 938 bp, Homo sapiens
caattgccagacaattcctttatagctttagaaactgccgactccatgaaatgcagctaaattaacagtttggataagagaagaaaattctcaatgacttttatttattctattgctttctctcaaatgttggtgatttgtaacaaatgaaattccattgttaaaattaaatatagattgtaaagccaacaccattaatcttatttgttactattattgtatgggcattggtttgccatcactgagcatggtctgaactgtaactcacgttccttttttgtgtgcatgttgtcttttttattagataaaagcccaactgcgggaggagggtttcttaaccatctctgatttccccatgtagaatttgttgaacattctttttcttctctctccttccccagcacctgtaagtatagcaaagatcaacgtgtggaacattaagaacctatacttcagtgactcatgctaattatcttggtgcctttaacagacattttttagttcaattactttgtgattccactgcagacagagtcttacacagagagaaaactcataaagctttctttcttcacctttcaacgcaacagagatggaatgaacctacatgtaaatattttttccccgctctggattgtacttaaaatatttttccctgtaaaacaacctcactaatttcaactgttcatcacaggctttaataatttggatataagccttagctgaagtccacttttctattatataggattttaaaagtcaactatgaaaatgaataatatagaaaakgttgtaaaaagaacatttagctccttataataaaactaattttctcattcttcttagaaagttcgtttatgtgaaaatttgatctgctaattaaaactagtcttacctcctcattaaagtagagccccaaagaatctcagacaaaactg

SEQ ID NO: 32860 - DNA, 543 bp, Homo sapiens
ttctgtttcctatacttttttctaactttcttgcttacattagagtttaattctgccactttacattttctacttccagcactttttaaatgttcctactatggactaatttcattctgctggttcgaaagttatgcattgtatttttgctgttctggtgattgtcccttacttactgacctatatataggtataatttttccatcaatcctttaacttattagtacctgtgttgttccccaaataaaataagtgcactagctcagtctcacctcccttcaatcactcctacgttatacctccatcctcamcatttcacgacatctaaaattaatccccggtcatctcagttcactttctcttttattagttcttgttttcttggaaaacaataaactttactaaaatatttgctttcccacacctctcatatcagcattctggttttatttctcttcttactgaagttctttctttaagattctgtccacagaaaggttttgtgtgacaagtcgtattaggctgtgtattagtccattttca

SEQ ID NO: 32861 - DNA, 527 bp, Homo sapiens
ccctccttggcttcccaaagtgctgggattacaggcatgagcatcccacccagcccagctccaatatttcataggcctcaaaggtaatggtgaagagtctcagactgttacaacatttctaccttttatgcctgtgcagcaactcaaaaccatcacattcttgtatctgagctgagattttttaataattctgtgttgtaaaagtggtatcasaaacagtccaaatgatcaggtcttcaacaaatagtatatgcagcatatttattggataagttatttcaaaggatagaatttttggagaaaaaaagtattacatggatcactggtagggaagagatcctacaaccctggcccctgtttggcattatgaagtgtctcctagataacagaataaatggagaggggatgctggctttgcttccactgcaaatcctcctgagagttagctgtttgtggacaaatgcaagaaaacaagaagacaagttttaatatttgatttaataagtgaaatttgcaaacctaagtga

SEQ ID NO: 32862 - DNA, 527 bp, Homo sapiens
ccctccttggcttcccaaagtgctgggattacaggcatgagcatcccacccagcccagctccaatatttcataggcctcaaaggtaatggtgaagagtctcagactgttacaacatttctaccttttatgcctgtgcagcaactcaaaaccatcacattcttgtatctgagctgagattttttaataattctgtgttgtaaaagtggtatcagaaacagtccaaatgatcaggtcttcaacaaatagtatatgcagcatatttattggataagttatttcaaaggatagaatttttggagaaaaaaagtattacatggatcactggtagggaagagatcctacaaccctggcccctgtttggcattatgaagtgtctcctagataacagaataaatggagaggggatgctsgctttgcttccactgcaaatcctcctgagagttagctgtttgtggacaaatgcaagaaaacaagaagacaagttttaatatttgatttaataagtgaaatttgcaaacctaagtga

SEQ ID NO: 32863 - DNA, 527 bp, Homo sapiens
tgcccagctaatttttgtatttttagtagagatgagattttaccatgttggccaggctggtcttgaactcctgacctcaggtgatctgcccgcctcggcctcccaaagtgctgggattacaggtgtgagccactgctcccggcctaaaataaagaatttaaaatgcaagtccaagcaaccaagatttgttagcatacatgactggaagtcatgcaccacttaattaagtgcctcatgaagtgggaagtgcagattatgggtatgaaacagcacgagtgctagaattgtttaaaacaaaagtcagtggttataacaakgagtatttctgtctgtttataaagatgtgttggttacgagttttgttttttgtttttcgtttttttcgagatggagtttagctcttgttgctcaggctggaggcaatggcacgatctcggctcactacaatctccggctcctgagttcaagtgattctcctgcctcagtcttcggagtagctggaattactggcacacaacaccacagcc

SEQ ID NO: 32864 - DNA, 733 bp, Homo sapiens
tgtcacctgcctggatgccatgtccccagagtgtgctgaggacatggggagtgagcctgggcccaggcagaaatggtaaagggccaagcatgggcgcctcgctgctgggagctttcctgagaccaaactgccctcatgtaatggacacagtcactgtggaatgtcctggggagcatgggagccttgaacagggagaggaaggcagggagggacatagagcaggggctcctgcagatgtagcactggcaggctggacttctctgcagcttctgcagagccaggaaggagcccctcccagctcctgagaccccatactcccctccacacccacgacactctcctgaccatggccagtcgtccaagaccctagctagtctacctcctgcagtgccatggaagcgggatgttctcactctgtctttctcaagaaatcagaggttttccaggggcctctctgcctggctgcctctgagttgctgtcctgaggtttagctgcaaatgctcatggaagctgcaggctcgggactgagaggtgctcgggccctgaggcagaattcccacatggggaggctggagtmtcctggaagccaagcttcccagaagccctctcagccctgaccagcctctcagtcctgggtccctcactgcaggaaccaggagactccaagccctgggacagcccaggcaataacctcttgctgctctctccaaccctcgtcacttgcttccatga

SEQ ID NO: 32865 - DNA, 543 bp, Homo sapiens
ttttttttttttttgagatggagtttcgcttttgttgcccaggctggagtgcagtggcacaatcttggatcgctgcaacctccccctcccaggttcaagccattctcctgcctcaccctcttgagtagctgggactacaggcgcccgcacccaygcctggctaatttttatagttttaatagagatggggttcactatgttgggcaggctggtctggaactcctgacctcaggtgatccatgcgtctcagcctcccaagtgctggaattacaggcatgagccaccgtgcctggcccagcactttccacataactgttgttatagacttcactagtcattcttttgttgttgttattgtgaagcattatttattaataatgacatttctatatagcttggactataaatcctcacactttgtgcctggcaataattagtatgaaacaaatgacaacatgtgcaaaaggagactttctatcattctgtctacactgattatataggattctctaaagaattattttaaaaaagcttctttaatca

SEQ ID NO: 32866 - DNA, 761 bp, Homo sapiens
tgtgcttagcagacctcacaccttggttagtgttctactgaaactgttttaaaattcctaataatttatgaacaaggaatcttatatattcattttgcactgggcctgtccaattatgtacccagtcatgctcctacccaatcacatctccttctccctcacaaatacccattatcctaactttcacgggtcccttttttgctcttctgtatwgttttatcacctcggtatgcatatctgcacattatagtttacctgtcagaattttctgtaaatggaattgcatggcatattatcttgtgtgtcaaccttgttggtgagattcaaccatttgttatttgcacttgtctcattcctgtataacattttcatctgtgagtatatcataattttaaaaatatattctatttttgatggaaatttgagagatttctagttttggctattatgaataaggttgttataaaaattgttgtatgtgtatctccgcaccaaagtgcatctgctcccattgagcattttacctgtgagtggaattttgctaggttataaggtgtgtgtttgctcagctttatggataatgccaagtgttttccaaagtcattgtctcaatttacactccctccaacagcatcagaggattttcttgtgccacattttcaccaacgctggatgttgttggttctttcaatttcaaccattccagtgggtgtgtattaaatcacactaataatctcattgtgattttttttttttttttt

SEQ ID NO: 32867 - DNA, 761 bp, Homo sapiens
tgtgcttagcagacctcacaccttggttagtgttctactgaaactgttttaaaattcctaataatttatgaacaaggaatcttatatattcattttgcactgggcctgtccaattatgtacccagtcatgctcctacccaatcacatctccttctccctcacaaatacccattatcctaactttcacgggtcccttttttgctcttctgtattgttttatcacctcggtatgcatatctgcacattatagtttacctgtcagaattttctgtaaatggaattgcatggcatattatcttgtgtgtcaaccttgttggtgagattcaaccatttgttatttgcacttgtctcattcctgtataacattttcatctgtgagtatatcataattttaaaaatatattctatttttgatggaaatttgagagatttctagttttggctattatgaataaggttgttataaaaattgttgtatgtgtatctccgyaccaaagtgcatctgctcccattgagcattttacctgtgagtggaattttgctaggttataaggtgtgtgtttgctcagctttatggataatgccaagtgttttccaaagtcattgtctcaatttacactccctccaacagcatcagaggattttcttgtgccacattttcaccaacgctggatgttgttggttctttcaatttcaaccattccagtgggtgtgtattaaatcacactaataatctcattgtgattttttttttttttttt

SEQ ID NO: 32868 - DNA, 620 bp, Homo sapiens
tgagtaggcatgctttcagaatgcaaacaagcccttatgtaagtgtgtatgtctgctgacctgtctgaggtgtatgcctaaccagtttcctgtgtatggaaaatgcacgtgcatgtgaaaattctggacaatgttgccaaatacaggtatatggaatgagttattcaggaccattgtaatacaattcttgccctatttcatgcacatatttattgcatatactccacgtgcagtgcagtatcaaaaggtgaaggcttcaaactrtgaacataatccttcacagtcaatagttctggcacagtgggaaaaagcacggaactcggagtcaggaaagtcagagtaaattcctgatacttccccttagaagctgaatgtctcaattaggtatttaaagcctctgggctgaaattcaaccatctgtattataggaatggtgataacacccacttctgggtagatgctggaattaagtaaaacaagctctgtgaaagtgccaggcacctaataaacatcagtgtctgcatagatactagagttcaactgggagctaacacaataaaacagtaagtctaatatcagcgtctgctgggtcttatgtatcttttttttttttttttttt

SEQ ID NO: 32869 - DNA, 1048 bp, Homo sapiens
ttagctgcttatgagctatgagatatgatgttgcagtgaattactaaattggcctagatataaacttaagttgatgatttttcgacacccatcctaaatttgaccccatccctaacttgcgaaattgaatcaggaatcagtttacaagctcttccctgatttccacccacccacccacacagacaataaaataagcagccccaacaagcccaggatcacaactgggagcttgctcacaggggaggtcgtaaacccactgtttcccttttgtctatatggctgaccccattctctctgccttgggggaacaagcttggctgtaaaagtctggatagaggcccaaataaaaggtctgaggaagagggagaggctcatgaaggaagaagacaaaaatcagggttcagccgactgccactgaaagtcatacaaatgaatgtcataaatataccatcaaacgggtacaaaggacatgtccggttaggtaggggccatgtgctcaaccatggctttccccgaccaaaaagtatagcccggacttctccatttctcattcatcaacctcatgcaacattcatttagctgctcatggggttgttgggagaaacattatggtcaatcaacagaaataatctcactttrtaacttagaacccatttatattttcaaaggatttgaagcatccagcaaaaaggtactaataatctaaaaggataaagtaagtagttgttggacatcagggcccagagaggacagagtttgaaaaatccgagagaggagggtgatacttccacttcccactcattgccattccccattgcagggtcaaccaaagcagctgaaattcacagcaacaaggaaaacaactaatatttattgagctcttattatgtgttaggcattttacatgtcttttctcagttttctcaaaataaccccaaaaaaaaagtagtatgttcttttcatggaagagaaagaaacaaagtaacttcactaaggttttacaactatttaagtggcagagctgtgatctgaacccaggccatttcat

SEQ ID NO: 32870 - DNA, 572 bp, Homo sapiens
tggctctttcaataagagatgcaatgtmttttcatttctgggaagtaatgttgcattatttgagtatttcttactctcttttaaaaatatttcatcaactcaaattttaatttctatattctctactggattcttttttatgaaggtgtctgtatcttatagttctctgagattataaaacacacatgttctgaatatctgttctgcctacaagcatgttttttcaggtgtaaattctcctgtttgttgagtttcttggctttcctctgttgttgattctggacacggaaccaatcttgctagttgagtctcaccattgggtacaagagtaggacaatatgctgcagctactctatcttggggagaacagaggagggcagaatgttccatggggcagggtactcactcatatcctgagctacccaaggcactgcgccctttctctcctacccacgagcccccattcatggtctgtctcaaagacagagagtttctactgtttttttttttttttttttttttttttgagacagagtcttgctctatcacccaggctggagtgcagtggctca

SEQ ID NO: 32871 - DNA, 1253 bp, Homo sapiens
tcactgcatcatttttcttcattctcatttctctctcccttctccctggcattatagtatttcctgccactagaatgtaaggttcataagggcagggattttgtctaggtcactttgattacatgaagcacatagaatatagattgtctaacacagcactcagattcaataaatagttgtggattgagaatgttgagcacattcccactaagattgtcagctgaaccaaatgctgagggtataaccatcgtggataggataaacacaggccctcacctcaaagaatttatagtctagtatgtttgtaaatatttatatagaaacacaagttttttgcccaatatttgtgtttccacagctcctaacaagttcttgcaaaccattgtccaatcaggakgaaggcataaggataaaaactccctagaccgctctaaacatggttacataactaaaacctgcttttagtaaggggagaagaagtagaatgactcgatgtagtcatgcctaaaccatgatgcctaaaccacgatcactaaatgattaattttatttaatgaaagtactttcaaactactttgaggttgtgagaagagtagattctgctcagccactggttcgtaaaagtaaagtccatttcctctttttttgcccacctgtgtttggaatgtgctagcctctctgtaaccccaagaagctaaaagagggctactccccaggtttggagaataactttgaagacctttagagaagagtttttacttagatctgcaaaagctatttacagctgttcatccaattgcagagactacgtatgctgtcttgcataggattaaaaaagaataaagccctttacacagttggaactgaccttgtatgccctttctaaagaaaaaaagtattaacctataaacttgataatgattaagtaaaaacatatttacaagagtcaaataccagttaaatggatcatattcagaatgaatttttcttataagttagtaagaaaaaaatccccacaaataacccaataggaaaaaaaaattgcacatggccaaagcacatgggcaggtaattcacaaaaaagaaacctggacagccagtaaatataaaaagatgcaacattacaccagtaaatcagagaaatataaactgaaatgagaagatactgttgcttatctacaaagttaccaaagatctaaaagtctgacaatatccagcaatggaaaaggtagagagaagcaagcaagcaaatg

SEQ ID NO: 32872 - DNA, 599 bp, Homo sapiens
gatgttcatcacagtgttgtttataataaaaaattaaaacaagccaggcacggtggctcatgcctgtaattccaggactttgggaggctgyggtgggcgggtcacttgaggtcagtagttcgagagcctggcaaacatggtgaaaccctgtctcgcgtgtgacagtctctactaaaaatacaaaaattagccaggcatggtggttcatgtctgtagtcccagctattcaggaagctgaatcaggagaatggcttgaacctcaggaggtgaaggctgcagtgagccaagattgcaccactgcactccagccttggtgacggaatgagactccatttcaagaaaaaataaaaaataaaaataaaagaaagaaggaaaaaaaatatgtaattgactgaatccctctcttcgcgggttttcacgaaacccaaaaccaatggtgaagatctggcaaccttgtcatctgttagtgcttctatgattgtgctcttcatcgggtcatgattttctgcgattatttctattttccccatcctgtggtcctctctgcaagcccctctcttttattaccatttcaattttcattttctgtagcctcaaat

SEQ ID NO: 32873 - DNA, 582 bp, Homo sapiens
cacacacgcctttccttaataccagggccccttgcagccaacgaccaagcaatctccccctttctattcataaccaaactttttttcaagtctacttttgtattctttaatgcaattaaaaaaatttattattaatattatttttgtttgacaagtcataattgtagacatgtatagcatacaacatgatgttttgatatatgtatacaaggtgacatgattaaatctagcgaattaacatatccatcatcttgcttccctactatttcttatggtgagacatttgaaatttactctcttaatctcttagttattttgaaatataaactacattattattgataatagttgtgcagtagatctcaaaacctttttctcctgtctttgtatcctttgatccacarttcattccctccctctccatgccccactccaggctctggtaactgctgttctactctctgcttctatgagtttacccttattagattccaaatgtaagtgagatcatgtgttatttttctggacctggcttatttcatttagcataatttcttccagattcatccatgttgtcacaat

SEQ ID NO: 32874 - DNA, 758 bp, Homo sapiens
caaaacgatttgaaagcaacctagcctaacttaaccctttatttattgcctaaggaaacagagtccagtgtctcagggcctgcagagttacattttgaaggcttaccagcaatgaggctctgtgtctgttccctgagacactgggttctggacactggtagactttcaggacccctgtgatggaaatctactgcctccaacctgttttatcacgttgtgggtaattgttattcttccttcttaatgatggatataagaatatatttataaactccaatttcactccgataaacagaaaataatctttttctccttcagaaatgacgggatgaaggatagtgctgggatggtgaatggggcagagttggcagtttaagagtaatcttcctttacatgaaactccatctgctttctgtggcgtgttctgccataggtagcttttcccaacagttttcgtcagtttctcctgtttgtgattastccttttaagatcatttccatcaattatccaatcaacgtcagctttcagcaatggcggcttatgttgactttaactgctgcagatgttcactgagtctgcagttactactggttgctatgataggttaatggtgtcccagcatcactctgcagctgcccaagagttcttccaccctgattagcacctctacagtgtttttcttagaagcaattccgggaaagtttttaaccacagctaccttgcaatacaccctttcaaggtgtatattcaaataacc

SEQ ID NO: 32875 - DNA, 758 bp, Homo sapiens
caaaacgatttgaaagcaacctagcctaacttaaccctttatttattgcctaaggaaacagagtccagtgtctcagggcctgcagagttacattttgaaggcttaccagcaatgaggctctgtgtctgttccctgagacactgggttctggacactggtagactttcaggacccctgtgatggaaatctactgcctccaacctgttttatcacgttgtgggtaattgttattcttccttcttaatgatggatataagaatatatttataaactccaatttcactccgataaacagaaaataatctttttctccttcagaaatgacgggatgaaggatagtgctgggatggtgaatggggcagagttggcagtttaagagtaatcttcctttacatgaaactccatctgctttctgtggcgtgttctgccataggtagcttttcccaacagttttcgtcagtttctcctgtttgtgattactccttttaagatcatttccatcaattatccaatcaacgtcagctttcagcaatggcggcttatgttgactttaactgctgcagatgttcactgagtctgcagttactactggttgctatgataggttaatggtgtcccagcatcactctgcagctgcccaagagttcttccaccctgattagcacctctacagtgtytttcttagaagcaattccgggaaagtttttaaccacagctaccttgcaatacaccctttcaaggtgtatattcaaataacc

SEQ ID NO: 32876 - DNA, 577 bp, Homo sapiens
attacccaaatacaaaattataatagcataattatgtggtcgcaaaaaatgtatttttaaggatttcttcagtagggagagacagaagtccaacacaaagtagcttaaacaatggagataattacttgttcctaaaaatttataagtctaatgacatatcaatggctggatttagatgaatatatgccataaagacagtttaactctcatcacttctcggttttctcttcctctatgatagatccacgcttaggtaagactgctgccctcagtttcaagtctgtaaactatctcagaaaaatacatagataaattttctcttctctatagcttamaaaataatctccataattaagtttaatttgatttgtttggttagtgcatcacagcaaaaaccaatcactgatgtaagagggagagaatgttctgatttgccagtcttgttttcctttctgttattgaaagtggagaagggtagtaactcatgaaaaattgtggtgctgtttctagagaaggagagaaaatgacgcttaggcaagaaaaatacataaaagacatgtctacctacataggagtt

SEQ ID NO: 32877 - DNA, 640 bp, Homo sapiens
ctgcattatctgaaagggtaaatttttaaatggtaccctaatgttggataatgtagattttatttttcaatctttaaattttgctgcaatgagtagccttttatcaacatcctggaccacattcaaattttttttttacttttttttgagatggtgtcttgctctgtcacccaggctggagtgcagtggtgggatctcggctcactgcaagctccgcctcccaggttcacaccattctcctgcctcagcctcctgagtagctgggactacaggcacccgccaccaagcctggctaattttttgtatttttttttttagtagagacagggtttcaccgtgttagccaggayggtctcgatctcctgaccctgtgatccaccagcctcggcctcccaaagtgctgagattacaggtgtgagccactgcacccagcccatattcagattttttgtctcatgatttatcttaaaaagtggccagccatgaattgtcaaataattaaaatgtctgaaatattgtcaaaatccctttaagtagtctatcaatttacagtctattcagtaatatacagtaatgtctatttttattgtgctgcatttaataaattacacactcaggaaaactataatatagactaaaa

SEQ ID NO: 32878 - DNA, 640 bp, Homo sapiens
ctgcattatctgaaagggtaaatttttaaatggtaccctaatgttggataatgtagattttatttttcaatctttaaattttgctgcaatgagtagccttttatcaacatcctggaccacattcaaattttttttttacttttttttgagatggtgtcttgctctgtcacccaggctggagtgcagtggtgggatctcggctcactgcaagctccgcctcccaggttcacaccattctcctgcctcagcctcctgagtagctgggactacaggcacccgccaccaagcctggctaattttttgtatttttttttttagtagagacagggtttcaccgtgttagccaggatggtctcgatctcctgaccctgtgatccaccagcctcggcctcccaaagtgctgagattacaggtgtgagccactgcacccagcccatattcagattttttgtctcatgatttatcttaaaaagtggccagccatgaattgtcaaataattaaaatgtctgaaatattgtcaaaatccctttaagtagtctatcaatttacagtctattcwgtaatatacagtaatgtctatttttattgtgctgcatttaataaattacacactcaggaaaactataatatagactaaaa

SEQ ID NO: 32879 - DNA, 513 bp, Homo sapiens
taatatgatatgaaaattgctggaatgattacatagtcatatcttgttaggcaactcaaattctaaaattatatgattctaatataaaatgaaagaaaattgttaatattataaaaagtttctaatgtgatatgaaggcctatctggaaaaaaaacagtttaagttattttgatgtgatttcttggaaatagtttctttataggaaccaggtggtgacaaagaaagagaaattgggcttgagaacatcactgctgaactgcctatgtaaatggaaaatatttctctcaggtaagtaatacactgcatgaaattttttaaatccattctaaacaattatgaatattrattagcagagttgagatcttttttgtttagtgcaggcctagatagctgtagtcatttagatttttgtataaggagagacacttaataatgtttctttacataaattgctatcatgtgaaagttactattaattaattaaagtttctaaggaatgtgtaaacataact

SEQ ID NO: 32880 - DNA, 1016 bp, Homo sapiens
gaattctaaaccacacattctagttggttatttggtcagcccccaactcaattatttttctgcataccattccaattgtgacatgttccataagcagcaagtaatactaccttctctatgttctgttacaggcactaaactaaacattttacatttgttatctcatttaatacttacaaaaatcccattagaatatatcattattcccattttgcrgatttactagaataaatagttcttcaagcttaaaagtagggtggcagagctgaattttactgtgctttttaactctaaattaccctgcttagtacataatacataccaaatatttgaactgaatacctcccaatccttcttctagttatcctttaaaattgtcagtttatgtatctatcttcatcaagcagcgagaaatttgttgagatcaaggttattgtattctctgtatctaaaacacagaaggtactcaataccagaatgaatgaatgaatgaagtctatgtaaatccataattagttggtattattaatttgcttggggtacataacaaagtaccacaaactgggtggcttaaacaacagtaatttattttctcacagttctggagattggatatccaaaatcgaggtgttggcagaattggttactttgaagactgtaagaggactggccaatcctctaaccttggcttgtagatggccagcttctctctttggctcatcatgttgttttccctctgtgtgtatttctgtgtccaaattatcactcttataaaaatacttgtcatttttggattcagcctcccctgatgacctgactttaacttgatgacctctataaagaccttatttgcaaataaggtcacatgctttcttttctttttctttttcttttttttttttttttttttttttgtgctacagagtcactctgtcacccaggctggagtgcagtggtacaatcttggctcactgcaacctccacctcccaggctcaagctatcctcctgcctttac

SEQ ID NO: 32881 - DNA, 1016 bp, Homo sapiens
gaattctaaaccacacattctagttggttatttggtcagcccccaactcaattatttttctgcataccattccaattgtgacatgttccataagcagcaagtaatactaccttctctatgttctgttacaggcactaaactaaacattttacatttgttatctcatttaatacttacaaaaatcccattagaatatatcattattcccattttgcggatttactagaataaatagttcttcaagcttaaaagtagggtggcagagctgaattttactgtgctttttaactctaaattaccctgcttagtacataatacataccaaatatttgaactgaatacctcccaatccttcttctagttatcctttaaaattgtcagtttatgtatctatcttcatcaagcagcgagaaatttgttgagatcaaggttattgtattctctgtatctaaaacacagaaggtactcaataccagaatgaatgaatgaatgaagtctatgtaaatccataattagttggtattattaatttgcttggggtacataacaaagtaccacaaactgggtggcttaaacaacagtaatttattttctcacagttctggagattggatatccaaaatcgaggtgttggcagaattggttactttgaagactgtaagaggactggccaatcctctaaccttggcttgtagatggccagcttctctctttggctcwtcatgttgttttccctctgtgtgtatttctgtgtccaaattatcactcttataaaaatacttgtcatttttggattcagcctcccctgatgacctgactttaacttgatgacctctataaagaccttatttgcaaataaggtcacatgctttcttttctttttctttttcttttttttttttttttttttttttgtgctacagagtcactctgtcacccaggctggagtgcagtggtacaatcttggctcactgcaacctccacctcccaggctcaagctatcctcctgcctttac

SEQ ID NO: 32882 - DNA, 694 bp, Homo sapiens
tactccacattagatgtttaatttaaaataaaaataatgaaacaaaaccaacaaaactgcctccctaatctagaggaaaatcggtactccagaatgattcaaggaaaaatataaattcacggttgtcattctcagtatcccttacccaccccactatactccagcatatagacaaktgtttgtaatatttgtctcagtgtgagaatgagtatgcttttttctacttaatttattatttagacagaaaccatgttgtcaatatgaaacattaaatacaacagaataaacacatataagtagaagccacttcttttgttttattaaacaatctgcagccacatgtattgagtctgttttacctgaatcattaaaagaggcctttgaaaaatgtactggccaattctgttctgttgtaaattatacacagtcaataactgtgtataatttgaccagagacgatttttccaaaagcaccagaattgagcaattatagtgaagttagacaacatagaaagtcacttcagataactcagtctcataaaaaccctgacaatgtatttgtgtggcatttgggtttgaagattattgcccaaacctccaatatctctattgaaatccaaattagagttttagaggcaaaagagagaaaaagtgtaatttagtataatgtcatggaattgattatttgccaaca

SEQ ID NO: 32883 - DNA, 694 bp, Homo sapiens
tactccacattagatgtttaatttaaaataaaaataatgaaacaaaaccaacaaaactgcctccctaatctagaggaaaatcggtactccagaatgattcaaggaaaaatataaattcacggttgtcattctcagtatcccttacccaccccactatactccagcatatagacaagtgtttgtaatatttgtctcagtgtgagaatgagtatgcttttttctacttaatttattatttagacagaaaccatgttgtcaatatgaaacattaaatacaacagaataaacacatataagtagaagccacttcttttgttttattaaacaatctgcagccacatgtattgagtctgttttacctgaatcattaaaagaggcctttgaaaaatgtactggccaattytgttctgttgtaaattatacacagtcaataactgtgtataatttgaccagagacgatttttccaaaagcaccagaattgagcaattatagtgaagttagacaacatagaaagtcacttcagataactcagtctcataaaaaccctgacaatgtatttgtgtggcatttgggtttgaagattattgcccaaacctccaatatctctattgaaatccaaattagagttttagaggcaaaagagagaaaaagtgtaatttagtataatgtcatggaattgattatttgccaaca

SEQ ID NO: 32884 - DNA, 523 bp, Homo sapiens
gagagagagagaatggcttgaataattgaatgagaattgtcttccccagtgcctggcatggtggctcacgcctgtaatcccagcagtttgggaggctgagggaggtggatcacttgaggtcaggagttcgagagcagcctggccaacatggtgaaaccccgtgtctacaaaaattagtcgggcatagtggtggtgcacgcctgtaatcccagctactcaggaggctgaggcaggagaatcgcttgaacctgggaggcagaggttgcagtgagctgagatcacgccactgcactccagcctgggcgacagagtgagactctgtctcaaawaaataaataaataaataaataataataataataactgtcttccctgagatgaaaaggatcatttcccagcagggaaaccctagagcccaggtggcccgatggcttcctcggggtcataaacagcacagttgcaacgtgaacttctgttggttttcttcactgaagtagagctgctgctgccgtgagttaaggca

SEQ ID NO: 32885 - DNA, 629 bp, Homo sapiens
tttccgacctcaggtgatccatctgcctcagcctcccaaagagctggaattacaggcatgagcaaccaggccgggcccaatattgtactttttgatgtgggtggtggttcatgagtgagttcacttcttgaaattctatgatctgtacatttgtgattggtgagctcttcatgtatcttctttttcaataaaagtttatacatgtatgtatatataatatacatatatagatgacagagagagcaagagctgtattaagagacttagctgtattgaaccaggtyttagaaatatagtgagtataaaagaaggatgatttttcaataccatctgccattcctccagaatatgcaatccatcatgtctgaaagagctcataattaaagtaattccaggattacatagagattgttgtgaagtctggagtcacagtcagtgcagtaagaccttttttattaaacagctataaaaatattttgggataagatgttaaataacttcatagatataaacatgttgaatcaaagtttgctgaaaaaagcctaattttaataataaacactatcctacctcaaataaatcgaaaatgtagttggaatatattgtctttttcctccacaaccaagaaa

SEQ ID NO: 32886 - DNA, 578 bp, Homo sapiens
tggtcaaggaaggcagtgatacacagaagacaaggagatctgagtcgaagcctttctttatgacaattaaacaggtgactttgggaaagttatttaacttttgagcctcaattttcacatgttgaaaggagagctaataagcctgctacatrgggttaaatgagataatatgtcaggcatgtagcattatgcctgatgtttgactttcaagaggaagaaggcagtgttagggcccggtaaggtggatgctgccccttggcaatcacaggcctagacacccaggcatgcccagaagagcagcatcctcaccatcagcggggggagtgggagctttgttccagaaggaaagttgcagtaaagaaaggtgattaatgtgggtacgggagggaagaaggcatgagtggtgggaataatgagaaagaaatggaaacatctagattatatcctttcttcctaaaaataaagtaaaagactcatttcttttgcccagcacgtctgtcagccagttgattctgcagttctgtttcagtgcctactcgagtgttttgtagactggttttgggaaaatgtgtatatgt

SEQ ID NO: 32887 - DNA, 603 bp, Homo sapiens
ttcctcatgccccagacatggtgaaaaggagaccagagttagcaagaatctcggaaaaggaaaaaaaaaaggcgggggggccaggactccacagccttttcagtctggttctacaaggccacggttgctgtgtaaacttgctgtgaggggaaggagggccagaagcaggcagccttaggcagaaatggaagccaggaaccccagggagcacagcaggaagatgaagaaaaaaatccagcaagagggagacaccctcctaggccaccccaagccctccgggtgaacggagagcagccctaggaaagaaagtaaaaagaagccagttaaaatkgaggctccagaatatatcccagcaggagatggccttcaagcccagtgaaaaagaaaatgaagttcaagaaagaggtagagccactaatcactgagcagctggctctgaaaaggaagaaaaagaagaagaaaagtggggtagaaggagacccttggaagtagtaaccatacacagatttggaggtgatgttggaaaagaggctacatggatgaggcacacatagaccaggtgaggtgagagcccttgcaagaagacacccatcatgaagagga

SEQ ID NO: 32888 - DNA, 603 bp, Homo sapiens
ttcctcatgccccagacatggtgaaaaggagaccagagttagcaagaatctcggaaaaggaaaaaaaaaaggcgggggggccaggactccacagccttttcagtctggttctacaaggccacggttgctgtgtaaacttgctgtgaggggaaggagggccagaagcaggcagccttaggcagaaatggaagccaggaaccccagggagcacagcaggaagatgaagaaaaaaatccagcaagagggagacaccctcctaggccaccccaagccctccgggtgaacggagagcagccctaggaaagaaagtaaaaagaagccagttaaaattgaggctccagaatatatcccagcaggagatggccttcaagcccagtgaaaaagaaaatgaagttcaagaaagaggtagagccactaatcactgagcagctggctctgaaaaggaagaaaaagaagaagaaaagtggggtagaaggagaccctkggaagtagtaaccatacacagatttggaggtgatgttggaaaagaggctacatggatgaggcacacatagaccaggtgaggtgagagcccttgcaagaagacacccatcatgaagagga

SEQ ID NO: 32889 - DNA, 1058 bp, Homo sapiens
tacacactttgtcatgttacttttcactaaacagagagtctctttctttgccccttgattttgggcttggccatctgacttgttgtgctaacagaatgaggcagatgtcacagtgaaccatttctaagtccaggccttcggagtccttgtatgttcctgcttttttttgtttttcttaagttggtcaggtctggaraaagaaggtgcttaggccagcccactggcctgggagaatgatgaaagacacatggaatagcattgctacggtcaagcccagtctcaatcagctggctcctagctaacatggagactaacaataagtaattacagttttaagtcactatatttcaataatgtgttttatacagcaactgtttactaatacgttgagggaatgtatcactttttaatagcaaaatatttgttagaactattccacgttaataactaatatttaatttcctatttggaggagtttttaacctgctggtataaaaatggacaagaaaaaaaaaattttaaaaataacattttttcctccagattagcaggtcttaggtatcatatcatgtgatcttttaaaaattaacatgaactggaacttggtattcttaactatcatatgtacttatgtcaagggcatgatgatgttttatgatactcagaaaaatctacatctggtcacattgctctcttactctaaatggttcagttcataaggtaaacaggtgaattgcaagctccctaacaaggcttatcatggcctggcctctgcttattgatctggagcagacacctttgtgccccatatcatatccccttagcccatctgtgatctcagctgcagctaaggacagtttatgtaaacaccaattcatctcatgatagcagcatccaatatcaagtggacacagcaagtctttcacttgctttccagcctagtgcctctcttcctacagtagaagttgttgccaggctggcaagtcttctaggtgcaccctggaaatatgagggagttaatacctcaggacaacttcagttgatagaggttgaatgca

SEQ ID NO: 32890 - DNA, 1058 bp, Homo sapiens
tacacactttgtcatgttacttttcactaaacagagagtctctttctttgccccttgattttgggcttggccatctgacttgttgtgctaacagaatgaggcagatgtcacagtgaaccatttctaagtccaggccttcggagtccttgtatgttcctgcttttttttgtttttcttaagttggtcaggtctggaaaaagaaggtgcttaggccagcccactggcctgggagaatgatgaaagacacatggaatagcattgctacggtcaagcccagtctcaatcagctggctcctagctaacatggagactaacaataagtaattacagttttaagtcactatatttcaataatgtgttttatacagcaactgtttactaatacgttgagggaatgtatcactttttaatagcaaaatatttgttagaactattccacgttaataactaatatttaatttcctatttggaggagtttttaacckgctggtataaaaatggacaagaaaaaaaaaattttaaaaataacattttttcctccagattagcaggtcttaggtatcatatcatgtgatcttttaaaaattaacatgaactggaacttggtattcttaactatcatatgtacttatgtcaagggcatgatgatgttttatgatactcagaaaaatctacatctggtcacattgctctcttactctaaatggttcagttcataaggtaaacaggtgaattgcaagctccctaacaaggcttatcatggcctggcctctgcttattgatctggagcagacacctttgtgccccatatcatatccccttagcccatctgtgatctcagctgcagctaaggacagtttatgtaaacaccaattcatctcatgatagcagcatccaatatcaagtggacacagcaagtctttcacttgctttccagcctagtgcctctcttcctacagtagaagttgttgccaggctggcaagtcttctaggtgcaccctggaaatatgagggagttaatacctcaggacaacttcagttgatagaggttgaatgca

SEQ ID NO: 32891 - DNA, 538 bp, Homo sapiens
acctctaagagatgaggccatgcgggctgtacccaatgagtggattgatactgttttcatgagattgggttcattattgcaggaatgagttcctcctgagaagattacttcagcccccttccctctcacgtgtgtgcactcttgcctgtgtgatgccctccgccatgttatgacagcaagaaggccttcccagatgtggcaacttgatcttggacttcccagcctccagaaccatgagccaaataaatttctgttcattataaattacccagtctatggtattctgttgtagcagcaaaaaatccactaagacaggtatgtatcctctcctgtgtttgagaaacttcacctcccacctacagggactggtctgtcacacaaggctctcccacacccyacccaactccccccgagagttgatttagccaagtcttagttattccattcagaattgcacctggtagctcatcaaactggtccaagacaaacttgggctctccaagtccctcagagccagacgagctgtcggggatgcagg

SEQ ID NO: 32892 - DNA, 538 bp, Homo sapiens
acctctaagagatgaggccatgcgggctgtacccaatgagtggattgatactgttttcatgagattgggttcattattgcaggaatgagttcctcctgagaagattacttcagcccccttccctctcacgtgtgtgcactcttgcctgtgtgatgccctccgccatgttatgacagcaagaaggccttcccagatgtggcaacttgatcttggacttcccagcctccagaaccatgagccaaataaatttctgttcattataaattacccagtctatggtattctgttgtagcagcaaaaaatccactaagacaggtatgtatcctctcctgtgtttgagaaacttcacctcccacctacagggactggtctgtcacacaaggctctcccacaccctmcccaactccccccgagagttgatttagccaagtcttagttattccattcagaattgcacctggtagctcatcaaactggtccaagacaaacttgggctctccaagtccctcagagccagacgagctgtcggggatgcagg

SEQ ID NO: 32893 - DNA, 1189 bp, Homo sapiens
ccagttgaaagcattgaagagttctgcctaagccctcacagtgtttccccaattttgagtgaccaaatatcattttcttggccctgaccatttataagggacagtgtgatgtaacataagtataagggattttagtttagagggcctgagttgtaataattggatggctccctactgggtacgtatccaagcgcatgtcataataacgtattacactgtcatagcttacatttcaaggtgaaaatttctctatatcatttagccccaatagaacactggaaggaagttttagctaaggttaccccagatgtttcatggttacacaagaatacaaaacaaaacatgttttccccacagaatgaaaatacaatataagttttctttagcagctgtggctggagattgcaaaatggaatagtctggccaccctccaagccattagcaccccctccctttcccccaagggtgaaagacaatcaagccaaagagaaggaaaaacactctgctctcaacttgacagctaatacccagaaacggagctgccggagcatctgcgatgtgtcaaaatagagatgacagagaggagtacagagcacctcaccccacaacctctagatcagactagtccactttgaatggctctcagaagcaggaccccaatactcatctcaaagaaatgcgtgacaagattgcaggcattgtggtagatgtggtagagaaaattggggagcaaaagtctttccagtgcccttcatatagcacgccagcaatgactgtctttttcacctggatttaataatgcccccacttctgagactgttaaggactgttargcccatggcatcttcagaagagtgcagggtgggataatgggaacagcatagatttggagtctgacagtgtgaggataaatctttatgcacttccatatcccagccgtataacctttagcaagttacttaattttgctgagccttagttttctaacaatacctcactgggatcattgggacttgggactgctgcaagggttaaatgaggtcataggccaagaacacagtaattgctccaaaaatggccattcccgtcatctcttggacagtactttggtgtcttcttcaccctgatgtgaaggacacaaaaaatactctgttgatgctcagaagaaaaaaacaaatctcatcatgca

SEQ ID NO: 32894 - DNA, 1189 bp, Homo sapiens
ccagttgaaagcattgaagagttctgcctaagccctcacagtgtttccccaattttgagtgaccaaatatcattttcttggccctgaccatttataagggacagtgtgatgtaacataagtataagggattttagtttagagggcctgagttgtaataattggatggctccctactgggtacgtatccaagcgcatgtcataataacgtattacactgtcatagcttacatttcaaggtgaaaatttctctatatcatttagccccaatagaacactggaaggaagttttagctaaggttaccccagatgtttcatggttacacaagaatacaaaacaaaacatgttttccccacagaatgaaaatacaatataagttttctttagcagctgtggctggagattgcaaaatggaatagtctggccaccctccaagccattagcaccccctccctttcccccaagggtgaaagacaatcaagccaaagagaaggaaaaacactctgctctcaacttgacagctaatacccagaaacggagctgccggagcatctgcgatgtgtcaaaatagagatgacagagaggagtacagagcacctcaccccacaacctctagatcagactagtccactttgaatggctctcagaagcaggaccccaatactcatctcaaagaaatgcgtgacaagattgcaggcattgtggtagatgtggtagagaaaattggggagcaaaagtctttccagtgcccttcatatagcacgccagcaatgactgtctttttcacctggatttaataatgcccccacttctgagactgttaaggactgttaggcccatggcatcttcagaagagtgcagggtgggatartgggaacagcatagatttggagtctgacagtgtgaggataaatctttatgcacttccatatcccagccgtataacctttagcaagttacttaattttgctgagccttagttttctaacaatacctcactgggatcattgggacttgggactgctgcaagggttaaatgaggtcataggccaagaacacagtaattgctccaaaaatggccattcccgtcatctcttggacagtactttggtgtcttcttcaccctgatgtgaaggacacaaaaaatactctgttgatgctcagaagaaaaaaacaaatctcatcatgca

SEQ ID NO: 32895 - DNA, 1189 bp, Homo sapiens
ccagttgaaagcattgaagagttctgcctaagccctcacagtgtttccccaattttgagtgaccaaatatcattttcttggccctgaccatttataagggacagtgtgatgtaacataagtataagggattttagtttagagggcctgagttgtaataattggatggctccctactgggtacgtatccaagcgcatgtcataataacgtattacactgtcatagcttacatttcaaggtgaaaatttctctatatcatttagccccaatagaacactggaaggaagttttagctaaggttaccccagatgtttcatggttacacaagaatacaaaacaaaacatgttttccccacagaatgaaaatacaatataagttttctttagcagctgtggctggagattgcaaaatggaatagtctggccaccctccaagccattagcaccccctccctttcccccaagggtgaaagacaatcaagccaaagagaaggaaaaacactctgctctcaacttgacagctaatacccagaaacggagctgccggagcatctgcgatgtgtcaaaatagagatgacagagaggagtacagagcacctcaccccacaacctctagatcagactagtccactttgaatggctctcagaagcaggaccccaatactcatctcaaagaaatgcgtgacaagattgcaggcattgtggtagatgtggtagagaaaattggggagcaaaagtctttccagtgcccttcatatagcacgccagcaatgactgtctttttcacctggatttaataatgcccccacttctgagactgttaaggactgttaggcccatggcatcttcagaagagtgcagggtgggataatgggaacagcatagatttggagtctgacagtgtgaggataaatctttatgcacttccatatcccagccgtataacctttagcaagttacttaattttgctgagccttagttttctaacaatacctcactgggatcattgggacttgggactgctgcaagggttaaatgaggtcataggccaagaacacagtaattgctccaraaatggccattcccgtcatctcttggacagtactttggtgtcttcttcaccctgatgtgaaggacacaaaaaatactctgttgatgctcagaagaaaaaaacaaatctcatcatgca

SEQ ID NO: 32896 - DNA, 599 bp, Homo sapiens
tcttgagtagctgggattacaggtgtacaccaccatgccyatctaatttttttatttttaatagagacagggtttcaccatgttggccaggctagtctcgaactcctgacctcaggtcatccacctgcctcagcctcccaaagtgctggcattacaggcgtgagccattgcacccaacccaaatactttcttaaacaacaaaacacagcactgagtgcaatcagagaataatctttgactttgactttagaaaaaagtgttttaaaaattattcttcctcatacccatcaagatggctactatcaacacttgttaatagaaaattacaagttttggtgagggtgtggacaaattggaagcctggtgcactgttggtgggaatgtaaaatgatgcagctggtatgaaaaaagtatggcagttcctcaaaatatgaaaaatagaatccccatatgatccagcaatttcacctctgagtatatatccaaaagaattaagagcagggtctcaaagagatatctgtacaccatattcatagcagcattattcacaatagccaaaaagtgaaagcaactcaagtattcactgatggatgaaagga

SEQ ID NO: 32897 - DNA, 614 bp, Homo sapiens
aggggaaataagactgcaaagcctgtcttctctgcccaaatgctgggctcttcccaattgacaaagctaactgttgatgctaacctttcctaagactcaaaagcaggacaatgaatgctcatctctgttttttcccttgtggggagagaaaggatcaagtctttaccacactccattgccagytctccttccctcctgcagcccttctttgttttcctatcccagagccaggccccatcaccacttttcagaaatgccatcttaccggggcaccaccctcagaggccctaaaagacagagtgatttgggattctcatctcatctccatttgtctgctagagtctgggcagacagcagaacacagtcatctaattagaagtctcgtctcctctggggctcggggctactggtgcatggctcccacatttcccaggcagggatgggatgcctcatcagctaggctagcagtggaggcttccccacaaagtcctgagaggcaagagtgtttcccaaaccctggattaggaagtcaggagcctggatattgcagacccaggaccagggtttacatggatgtggctgctgagaaggacatcaccctgctctctgagcct

SEQ ID NO: 32898 - DNA, 648 bp, Homo sapiens
aactcacagtgcaaggtatgtggcaggatagcagtgaaatcagtcatttctgggagatgagagaaagatttgaggccagagaagaagaaaaaaaaaagaaacgagggtattttttctctgacccgctatttatattctacccctattcagcagcagttagaaactatctggtattcagaaggaaagaactgcttcttccttccttgcaggcttaagttcaagcaaatgtcagtgcatctagtgcycttgcctaggaaataacaagattgcaagtccacaggaacaactgggttctcccgggtcaaaaggagatgatgagagtggaggtcaagaattcttcatgttaaaagatattctagcattaaattcagaagctaaagtgcttatttgcaattattgttaattgaaacaacaacagtaacagcaataataaggatgactctgaaatttactgaggaaacaaagataccagatgtttaaagtgcattattttattttgttgtataatataataggtagtattttgatattgttaaaattccaaaggggaaatggagaaacagaagttaacttactggaccaagggcacacagctggttggtggcagagtttgtgttagaaccagatctgcctgactcctaagcacca

SEQ ID NO: 32899 - DNA, 648 bp, Homo sapiens
aactcacagtgcaaggtatgtggcaggatagcagtgaaatcagtcatttctgggagatgagagaaagatttgaggccagagaagaagaaaaaaaaaagaaacgagggtattttttctctgacccgctatttatattctacccctattcagcagcagttagaaactatctggtattcagaaggaaagaactgcttcttccttccttgcaggcttaagttcaagcaaatgtcagtgcatctagtgctcttgcctaggaaataacaagattgcaagtccacaggaacaactgggttctcccgggtcaaaaggagatgatgagagtggaggtcaagaattcttcatgttaaaagatattctagcattaaattcagaagctaaagtgcttatttgcaattattgttaattraaacaacaacagtaacagcaataataaggatgactctgaaatttactgaggaaacaaagataccagatgtttaaagtgcattattttattttgttgtataatataataggtagtattttgatattgttaaaattccaaaggggaaatggagaaacagaagttaacttactggaccaagggcacacagctggttggtggcagagtttgtgttagaaccagatctgcctgactcctaagcacca

SEQ ID NO: 32900 - DNA, 792 bp, Homo sapiens
ataatatctcctagctatgtagtctcacctccctacaaatctgagatatggtttctgacacaagggaagggtatctgttagactgtaaagatgtaccacttttattctcagctagaggccttctctttggggtgatgaccagctagtagctgcaggtgtgggaaagggttgccttttcttgatacttggccaccttttaygaaagaatgcaaaagtgagcctaaagacaataaatattagatagaagaatagattcctaagaatatattcctttctaatattagaaagaggaatagattccttggccagtcagcctctgtatgtctgaaatcacccaaagagttctacttaaaaaaaaatgtttagattgagttatccagttaaaatcaaactctccaggctgactgatatcaatggctcatatgtgcaattggctttcctcctggttgtaagcaagaggacaaggaccacatcttccctgtgcacccagcataacatggcccctagcaggtgctccataggcacttgttgtacacatgtacaacagtaattatggcttgttgtaattattcaacttgttgaatgaaggttgaacatcatcaggagagactcacttggccttcgtctgtggaagcaaaggatgaaaatgtaatagagaataatagaatagagacatcttcatggtccctgactcccagtaaagctaggatctttgtacctaatcataagtaacagggatattctgaaggggttctgtggccccttgacaatcataagtgattttgagaaata

SEQ ID NO: 32901 - DNA, 636 bp, Homo sapiens
caagatgtcctctcaactctcacatgcagatcctatttcaataatttcacaactaattggagtttttgccatgactgctcctcaaaacaccacttaacttgaagaacacatcacagagaaactatagtcagaatctgcctgagtcactcgtgcctgatcacaagtcgaagagaaagccctgcaactgtgtttcttgggtctgactaggtcggtttccttttactttcatgagacagtacattaacccagaatgttcagagaaaatagtttgctttttttaaaaaaaatattgttttattgtggtaagaacacttaccatgagatttaccctgttaacaaattaagtgtatataatacagtattgttgactatagggacaatgttgtacagcagatctctagaatgtgttcattwtgcttaactgcatttttaagcccgttgattagtaactccccatttcctcctctgcccagcccttgacaaccaccattcctctctttgattctatgagtctattttagatatatcatctaagtagaatcatgcaatatttactcatctgtgactgttgtttcactaagcatgatatcctcaaggtccctctatgtgaccaagtaggatctataggatcaagta

SEQ ID NO: 32902 - DNA, 627 bp, Homo sapiens
tacaaaaattagctgggcgtggtggcaggtgtctgtaatcctaactatctgggaggctgaggcaggataattgcttgaacttgggaggtggaggttgcagtgagctgagatggtgccattgcactccagcctgggcaacacaagagtgaaactccgyttcaaaaaaaaaaaaaaaaaaaggtgagtctatccctaaataaacaaatacaaccagagaaggaccttgcatggctgtctaatgttcatgtgagagaaatatatacttacttgaacatgtatatatttttactatacgttgcttaaatgttacccttaatacactgtgagctcgctgagggcaggaattagcactcagcatataacaggcatttatattggtgggatgaatgaaagaaagtacataggcttcctctgcaactggtactttgctgggattctgtggggacaacctgagataacaggcatccatactcacagaaagtttaagaagtgtgttcctggaatgttccttagaattcatcaggcccagtggttactggacttctgaatttcataaatggagttaagaataggtggatggattaaaaaaaaatgttgcatactccaggtcagactgcccaccttttt

SEQ ID NO: 32903 - DNA, 627 bp, Homo sapiens
tacaaaaattagctgggcgtggtggcaggtgtctgtaatcctaactatctgggaggctgaggcaggataattgcttgaacttgggaggtggaggttgcagtgagctgagatggtgccattgcactccagcctgggcaacacaagagtgaaactccgcttcaaaaaaaaaaaaaaaaaaaggtgagtctatccctaaataaacaaatacaaccagagaaggaccttgcatggctgtctaatgttcatgtgagagaaatatatacttacttgaacatgtatatatttttactataygttgcttaaatgttacccttaatacactgtgagctcgctgagggcaggaattagcactcagcatataacaggcatttatattggtgggatgaatgaaagaaagtacataggcttcctctgcaactggtactttgctgggattctgtggggacaacctgagataacaggcatccatactcacagaaagtttaagaagtgtgttcctggaatgttccttagaattcatcaggcccagtggttactggacttctgaatttcataaatggagttaagaataggtggatggattaaaaaaaaatgttgcatactccaggtcagactgcccaccttttt

SEQ ID NO: 32904 - DNA, 1303 bp, Homo sapiens
tcttaaggtacagtgaaagcatgtaggaggcaggctggggtggtacgggaaggcttcctggaggaggagttacctgataggagttttgatgcctgagtacattaattaggagaaggagcagggcaaagaccacgtctgacaaaggaaacagtgtgtgcraagctacagtggcttgacaaggcctggtatgtctagggaactaccagtggttcaggacggcaggagcccagagtggttatgatgtgcaaaaaaagagaggctggagaggcagggtagggccacatggtgccttcctaacctgtgtgccctgctgaacagtatggattttcaccagaaggtaaaggggagtagctgagggatcttaagcaaggattgagagcttgtccttgaggggaaatagaacatctcttccactgggttgggcagaaaggaagtaagaattaggtattggtgtgaaactgagagacaatccaggcttatcccagcacacttccttccacggtatactgttttaattcttgttactacatgtatgttctaaagcaccatgtcttgaaaaaaattatgtaattggatcacattctaattcagagtaatcaaggctaacatttctccatagatttgtggacaatgggaaatgtatacctgaaatgttaccttggtacatgaaacagtaaatataaatccaattctgctccaagttaggagaaaaagctaggaatacgcagctttggaaagtaaagacacaggatctgggaaagagcactaggtgaggagtctggagagtgggtttagccatagctctgccaccagctcccttggtgaaccctgagaaactgagtttgcactaagagcaaacacttgcattgtgtatacagtatgccatggcacggtcctaaacactgcataggttttaattcttttaaactctcataattgtctccttaggtaggcttagtagtattatccccatttgaaaactaacacattgttgagttcacaacttgcccgaatttctacatctggaaaagttcgggtgattgcgaaggctcacctggagctatgagagtggaaggtcttactcacgtagcttctgtagccctttctctccagacgttttttggagcttctctgcacatttccattaagaagcccagaatagaccctttgctgaaaggtggtcacacagataaggtcacccaggaaaagcaggtgaggtggaacagatgaggggagctgccattccctgaatgcctccgggtgcctggcccttttctcccacacatcccccaaggaggatgca

SEQ ID NO: 32905 - DNA, 325 bp, Homo sapiens
taagtcccttacatgtattaatttaatcacaatcccatatgctaagtatacaagttaaattttataaggtgtgctaaaacagagcagaaatctgattagacagcaattctggtaaaggagacctgggaatttaatgagaaaatactattattttctcataataagaaatatgcagcagatttacaacgaaactaatgaaacaaacttcgggatctctcattttcacaagccttgaaactaactttataattttgtatttcattttgtgttttttaaagagtccctaaagtcatataagcttttgggcccataaaacattgawcca

SEQ ID NO: 32906 - DNA, 586 bp, Homo sapiens
gtgttacatagttcttaggaaaaaaggaaccaatttcagacactactctttgtactcattactaaatattggcaggataaagagtcatttagaatttttaatgtgtaaaattgaagaaaattattggacattttgaactagtaragtctaaattgatgagcttttaccattaatgggggtcaggatatgctactccataatattttaagctaaaggaatttgagaaaacagcagaagtaggaaagtcactctctgccctcctgcccttccctgaaggaggtcataagacccacatttgagatatgcgctctctatgcctggaggaatggaacatcctcctttctgaggacaccgggtcacagaggagaagctgagtcagtaggccttgctaagtttcccccagtttattgccattagatcatactttttaattcaattgtacttctccacaactatccacttcttcatcaaacatagcataaaaatacacaggtttacatgtttatttgggtcattattttcttataaaaggtcccatgtctcataaaacttctattaaataaattggtatgcttgtctcttgtta

SEQ ID NO: 32907 - DNA, 533 bp, Homo sapiens
tttctcatctctctcttaatcctttttattctcacctcttttatttacttgattttcaatcaaacactttctaaatggactgactttgtaccaggcattattctaattatcttattaaatatcaatttcatcctgacaaacctatgaggtatgggctgtcttcgttcattttgtgttgctataacagaatacttgaggctgggtaatttatgaaggaaagacgtttattgagctcacaattttgcaggctgggaagttcaagagcatagcactgcactggctggctcccggtgagaaccacatgctgggtcaaaacatggcagagaagtggaaaagtgagtgggtgcatgcaaagagatcacttgccgatagaggaagcaagtgagaatctaggaagcctaattcacttttatragagcgtactctttagtaactaatccagtcccatgaaagtgagaacatactcctgatgtaaggcattcatctatttatgagggatccacccctgtgacccaaacacctcccacaaggct

SEQ ID NO: 32908 - DNA, 660 bp, Homo sapiens
tgtgcaattcaagtgaaagaaacaatgccaataattcattagtgattgctagtgaaactaagttcattctacagagatgataaaaacctggactataaatcctcaggcatttgaaagtcatcatatacttgtagaaagggaagaatgtcctttctaaaattctacaactatttataagtagcagctcttttttgggaggacatcttgctaactttttttcatgaccttttatcaggtaaatgccttgaggataaatcagggcttctgaataatgcttgctcacctacaacaagatgaaaaatggtaggttccaagcttcaacctattatttgtggcaactccataagaaacacatgtctctgaacatgtcagcagtagcactcaaagatgctctgtgttacctaattgctcttgtacctttttctgactttgggataagcagtgggtatgcctgtgatggcacatccctactgactgctaaagcgtgaaatggttgcagttgtggttcctgctctctatcctttccctcacacgcatcccctttccggaagcrgtagcactccaccctggttataaaaaggaatgaaggccctggtaatcataactcataaagcatgtcacattcttcctctgtctcttcttttctcctattttaattaa

SEQ ID NO: 32909 - DNA, 521 bp, Homo sapiens
cccatgaatcagtgcttgaagattgatttttacagcttactgaatcatatattggtatctgatttttcttacagcactcaagaagttaagaattttctatttcaattggattcaagtggtttctgccttttctcagggyacaagttctacaaggagctgggagataattttaaaatagccaaaaaataccctttgcatgaggaaacgatcagaacgagagtctagttatttccattaggctgtcctcttccacaagtgatgctagcatgatagtaaatgccagaactataaattctataaatgtgtagagactgtccatacagaagagaaggccatcatttcataacaacatatggaaagtaaacacaacttgatctttagattttaaagtagttggcagtgttggaaattcaagaaacttgagttcatttggagcaagtaagttaagatggagctcataagaaatgtaacagatttttttccttgatattatttttagagtccattttcagaattcaact

SEQ ID NO: 32910 - DNA, 336 bp, Homo sapiens
taatcagtaatactagaaaagtagtattcacacagccaaaagaggcatcctcaatgcagcagaacatacagaggatgatgcctggtcaacatatgaataaacaatcactgtgatgttacctcaatttaagatgactccawtaaaacttctatggtttgcattattagttgatcagactttaagcattatcttttgatagggtcaaggaacctgtcttaactccccatctctgaccaaaatatacttgttttctataagctataaagccagatagccaattttatgagaattgtccctatactatatccatgtgagcgatgagtgcctggcatgaag

SEQ ID NO: 32911 - DNA, 689 bp, Homo sapiens
aacatttaatatcatgaaatgttataagtagacatacattttgggattgtgatcttagaggtttgtgtgtgtgtacgtatgtgtgtgttctacaagaacggaagtgtgatatgtttaaagatgatcagagaaaagacagtgtctaaatataagacaatattgatcagctctagaataactttaaagaaagacgtgttctgcattgataaactcaaatgatcatggcagaatgagagtgaatcttacattactactttcaaaaatagtttccaataaattaataatacctacctaaatggtcaatatttttcggacaaggaagaaaatcatccacaaaaataatactccaaagtacttggtgattggcaggaacaggatgtgtgcccataaatacagttaacaaatacatgcagattttgtaccaaacaaaataatttgcrgtatcttgagtactactgcatgcaaagcagacttgttctaattattttggttttaaaataatcaataagtagatatcacaaatccttcctcattccactcttcttttctctgctaggtgagtttcatatttcaagttttgtttaacctgaaatctattgattggaatgaggatacggatacagtattttaaagaaaacccacaggaataaaatctaaattttctttgcatttgtacttgccagatttca

SEQ ID NO: 32912 - DNA, 689 bp, Homo sapiens
aacatttaatatcatgaaatgttataagtagacatacattttgggattgtgatcttagaggtttgtgtgtgtgtacgtatgtgtgtgttctacaagaacggaagtgtgatatgtttaaagatgatcagagaaaagacagtgtctaaatataagacaatattgatcagctctagaataactttaaagaaagacgtgttctgcattgataaactcaaatgatcatggcagaatgagagtgaatcttacattactactttcaaaaatagtttccaataaattaataatacctacctaaatggtcaatatttttcggacaaggaagaaaatcatccacaaaaataatactccaaagtacttggtgattggcaggaacaggatgtgtgcccataaatacagttaacaaatacatgcagattttgtaccaaacaaaataatttgcaktatcttgagtactactgcatgcaaagcagacttgttctaattattttggttttaaaataatcaataagtagatatcacaaatccttcctcattccactcttcttttctctgctaggtgagtttcatatttcaagttttgtttaacctgaaatctattgattggaatgaggatacggatacagtattttaaagaaaacccacaggaataaaatctaaattttctttgcatttgtacttgccagatttca

SEQ ID NO: 32913 - DNA, 828 bp, Homo sapiens
cctattcatagacaggcccccccaacacctacacacacacacactcacacacacacagagtcaggtataacattttgaaaagaaaggaggatagaaaagtagcttattatatatatatgccttttcatttgaatccatctgccatttgcacaatggaaagataatcaagagagggtctctcttcttctcatccttgtttttctttcttygtttaccttaacccttcatcaaaatatcagtaatcttatttgctttgtaacttaccttcagacttaaaatcagttctacagctggtggccagaaatatcaggaaatatctatcttattaagtttaaatttatcaaaagacaaaggtatttttgaagaggagataaggttttttttttctattttttagagacatttaactttcagtttggaggaaagtcagaaaaagaacctaatactttcttatttttaattatactgtgaacaaagggttggacaattttctagaagttacttgcaaatcaaagaatatttataatttcttatttttaattatactgtgaacaaagggttggacaattttctagaagttacttgcaaatcaaagaacatttataatttcccttattaaggaattagtttattcattcattttcattcaaaaggctacctactttgagtgtcttctcattccttaaacataacatttatttcctactgcttttatgctaaataaactttacttcattttgcagtgattattaaaaatggtatttacagaattttattacctataatacactttaagttatttttttcaccaactaatcaaatattttt

SEQ ID NO: 32914 - DNA, 490 bp, Homo sapiens
tatccttacctggctttatttttcctgtcatgcatttattccaaccaaccaaatagtttttacacacatagtgtttgtatgtgtgtacatgattctatttctgccccttccataagagcagaaacattttcttcctggtaagtygtaggtgctcaacagatattttagtaggacgaagatactacaaagtatggttcctcttttcccttctgacttacttatacttaacatttatttacacgtgcctaaaactagtttttctgagttttctgagtaccataaaaattcgcagcactcttgcatctagaacaagcatgacatatattgtaagtcccacatgtgccagggccattgcagccacatcctgcagtctgtcaccaattcttatcatgaaacctggaatgtttgaggtcctcaatatttcttgatgaacagactgcattttgctgaaaatattgttgaataatttatgatacattgttatataaaa

SEQ ID NO: 32915 - DNA, 1203 bp, Homo sapiens
gctttctccaaccatgctgatgctaatattgctgactcaataaacattttgcatgttgtatagaatatatttcacaaccttaaaaatctagatgtaaagttatcatcccaaatgaagtgtcggtcattttctctttctttctgtgtgtcaaagtaggtagttctcatttcaaatgagctgtgttccagaatttaatttttaaattggctttatacttctctttcccacagaaagagtattaaaaatactgcatgtgttctcaacctaaaccacaaataacttgttcaattaatagtgtgcctacatcrgagtatttttgaggggtaacggaacataacaaagtgaattctttagagtcagaaccagattggaatcctggctctgcacttcccagttaagcaaatcatttaaagtcagtgatcttcagtttcctccagtgaaaaatagaaatcatagcatttatttcccaaaggtgtctcaagaattatctgagataatgtaagtggtcatttcttccttcctgtcaaccccactagcctcctatttatcctaggttttgctgccttacctagtattttcaaactagagaagtttttttggtgtttgctctatagcacaattatagtattaattaagctataaaaatgggcttgcctaattttaatcatagccccaagcatcacctgaaacatgaatatagcttcaactctggagaagcaggagaacagagccgcaaagctcctgccatgacctttggtggcgatgactcatatcacagtggccatccatactcatcaatgactaataccacaggctctgcagtcagagatcaagttcaaaatcctagatctaccacttaccagatatgcaaactgcaaccatatatttaacctctttgttcctccattttctcatctgtaaagtggagataataatagaacctgtcacctaagagttttcttaaagactaaatgaaacaattcatgaaaaatgcttattagagtgtctttctggtaatatttttctataacttaagcttattaattatagttttaatgctttttaactaaaaatttaaataaaaaagaaagcatgtatatactgctaaattcagttgggaaaatattgcaagttaatttaatttttaaaaattttttaaggatgctcccatacttctaaatttaggatttgaggtttcatgca

SEQ ID NO: 32916 - DNA, 1203 bp, Homo sapiens
gctttctccaaccatgctgatgctaatattgctgactcaataaacattttgcatgttgtatagaatatatttcacaaccttaaaaatctagatgtaaagttatcatcccaaatgaagtgtcggtcattttctctttctttctgtgtgtcaaagtaggtagttctcatttcaaatgagctgtgttccagaatttaatttttaaattggctttatacttctctttcccacagaaagagtattaaaaatactgcatgtgttctcaacctaaaccacaaataacttgttcaattaatagtgtgcctacatcagagtatttttgaggggtaacggaacataacaaagtgaattctttagagtcagaaccagattggaatcctggctctgcacttcccagttaagcaaatcatttaaagtcagtgatcttcagtttcctccagtgaaaaatagaaatcatagcatttatttcccaaaggtgtctcaagaattatctgagataatgtaagtggtcatttcttccttcctgtcaaccccactagcctcctatttatcctaggttttgctgccttacctagtattttcaaactagagaagtttttttggtgtttgctctatagcacaattatagtattaattaagctataaaaatgggcttgcctaattttaatcatagccccaagcatcacctgaaacatgaatatagcttcaactctggagaagcaggagaacagagccrcaaagctcctgccatgacctttggtggcgatgactcatatcacagtggccatccatactcatcaatgactaataccacaggctctgcagtcagagatcaagttcaaaatcctagatctaccacttaccagatatgcaaactgcaaccatatatttaacctctttgttcctccattttctcatctgtaaagtggagataataatagaacctgtcacctaagagttttcttaaagactaaatgaaacaattcatgaaaaatgcttattagagtgtctttctggtaatatttttctataacttaagcttattaattatagttttaatgctttttaactaaaaatttaaataaaaaagaaagcatgtatatactgctaaattcagttgggaaaatattgcaagttaatttaatttttaaaaattttttaaggatgctcccatacttctaaatttaggatttgaggtttcatgca

SEQ ID NO: 32917 - DNA, 1203 bp, Homo sapiens
gctttctccaaccatgctgatgctaatattgctgactcaataaacattttgcatgttgtatagaatatatttcacaaccttaaaaatctagatgtaaagttatcatcccaaatgaagtgtcggtcattttctctttctttctgtgtgtcaaagtaggtagttctcatttcaaatgagctgtgttccagaatttaatttttaaattggctttatacttctctttcccacagaaagagtattaaaaatactgcatgtgttctcaacctaaaccacaaataacttgttcaattaatagtgtgcctacatcagagtatttttgaggggtaacggaacataacaaagtgaattctttagagtcagaaccagattggaatcctggctctgcacttcccagttaagcaaatcatttaaagtcagtgatcttcagtttcctccagtgaaaaatagaaatcatagcatttatttcccaaaggtgtctcaagaattatctgagataatgtaagtggtcatttcttccttcctgtcaaccccactagcctcctatttatcctaggttttgctgccttacctagtattttcaaactagagaagtttttttggtgtttgctctatagcacaattatagtattaattaagctataaaaatgggcttgcctaattttaatcatagccccaagcatcacctgaaacatgaatatagcttcaactctggagaagcaggagaacagagccgcaaagctcctgccatgacctttggtggcgatgactcatatcacagtggccatccatactcatcaatgactaataccacaggctctgcagtcagagatcaagttcaaaatcctagatctaccacttaccagatatgcaaactgcaaccatatatttaacctctttgttcctccattttctcatctgtaaagtggagataataatagaacctgtcacctaagagttttcttaaagactaaatgaaacaattcatgaaaaatgcttattagagtgtctttctggtaatatttttctayaacttaagcttattaattatagttttaatgctttttaactaaaaatttaaataaaaaagaaagcatgtatatactgctaaattcagttgggaaaatattgcaagttaatttaatttttaaaaattttttaaggatgctcccatacttctaaatttaggatttgaggtttcatgca

SEQ ID NO: 32918 - DNA, 1027 bp, Homo sapiens
  misc_feature (1)...(1027): n = A,T,C or G
tcgctgggacctattatcatctatattcacttcacttctcctccatctctcccctaacatatgataaatctttgaaagcaatggcattggggtttcttcaagtgacaatgaaaggaatgaggagagtatttgtgtgtggtgaggaggtaaagaagagaatggtggaagagaatggcaacaaacattgcactatttggatcatttttaagctgtgtctacaaataagaagctgctttttcttacttttttattccattcctttattttccctttcckaactctactttttttttttttttgagacagggtctcactttgtcacccaggctggagtgcagtggcacaatctcagctcactgcagccttaacctctcagactcaaatcattctctcacctcagccccccaagtagctgggactacaggtgtgggccaccaaacctggctagtttttgtatttttactagagatggggtttcaccatgttgcccaggctggtaattctactttttactgggtgtgctaaatcattgtttgttagcattactcagaggcctttttgagactgccttgcttagatttaatttatttgtatcctaacttgttccagagtttcttagtgacattattcatactgacacccttatcatgttatcaatctctgccttccttctcttaatcatcctaggtgctttttctctgcactctcatctttcctgattgggaaactctctaggtccatgtatattatgtctctatttttactggcattttgagctagtttttagttcgtgaagttctgttattttccacatcaatttgactcacatttacagtgttgcgagaaactatatcaaatgttttcgctcattttgtcagtcaaggaaacttatcnnnnnnnnnnnnnnnnnnnnnnnnnnnnnnnnnnnnnnnnnnnnnnnnnnnnnnnnnnnnnnnnnnnnnnnnnnnnnnnnnnnnnnnnnnnnnnnnnnnntattgaatttcagtttgaatgtcttggggcctca

SEQ ID NO: 32919 - DNA, 1027 bp, Homo sapiens
  misc_feature (1)...(1027): n = A,T,C or G
tcgctgggacctattatcatctatattcacttcacttctcctccatctctcccctaacatatgataaatctttgaaagcaatggcattggggtttcttcaagtgacaatgaaaggaatgaggagagtatttgtgtgtggtgaggaggtaaagaagagaatggtggaagagaatggcaacaaacattgcactatttggatcatttttaagctgtgtctacaaataagaagctgctttttcttacttttttattccattcctttattttccctttccgaactctactttttttttttttttgagacagggtctcactttgtcacccaggctggagtgcagtggcacaatctcagctcactgcagccttaacctctcagactcaaatcattctctcacctcagccccccaagtagctgggactacaggtgtgggccaccaaacctggctagtttttgtatttttactagagatggggtttcaccatgttgcccaggctggtaattctactttttactgggtgtgctaaatcattgtttgttagcattactcagaggcctttttgagactgccttgcttagatttaatttatytgtatcctaacttgttccagagtttcttagtgacattattcatactgacacccttatcatgttatcaatctctgccttccttctcttaatcatcctaggtgctttttctctgcactctcatctttcctgattgggaaactctctaggtccatgtatattatgtctctatttttactggcattttgagctagtttttagttcgtgaagttctgttattttccacatcaatttgactcacatttacagtgttgcgagaaactatatcaaatgttttcgctcattttgtcagtcaaggaaacttatcnnnnnnnnnnnnnnnnnnnnnnnnnnnnnnnnnnnnnnnnnnnnnnnnnnnnnnnnnnnnnnnnnnnnnnnnnnnnnnnnnnnnnnnnnnnnnnnnnnnntattgaatttcagtttgaatgtcttggggcctca

SEQ ID NO: 32920 - DNA, 1719 bp, Homo sapiens
tgcccatgtatttgagaattctctctccctggcatgaagcctgtccgtggtttcccctcagttagatgttcacgttaaagctatttaatgtcctatctgatggcctgtgtagcttcctttcttgccatttcccttcttggtcaacagtaacatgaccctgtgttccttaaacatgccagagtttgccattcttttaccatcatctagaatgctatttcctacctgcttcacaaactgtgtggcttaaacagcataaatttaatgtctcgcagttttagagcctagaagtccaaaatcaaggagtcatctgggttggttctgcaggctttgaggaaggatcttttccaggctcctctccttggcttttcgatggccattatcttcctgagtcttcaccattgtcttctctttatgcatctctctgtatctatatttattttcattttctttttttttttttaatagacagggtctcactctgtcacccaggatgaagtgcaggtgtgatcatggttcactgtagcctcacactcataggctcaggtgatcctctgatctcagcctcccaggttgctggcactacaggcgaggcacgatgtctggctaattttttgaaaagtttttgtagagatggggtctcaccgtgttgctcaggctgctcttaaacacctggcctcaagtgatcatcccacctcagccttccaaagtgctaggattataggcatgagctgttacacagcacccacagtttctctttttataaggacaccagttatgttggattagggcccaccctaatgacctcattttaacttgattgcctctgtaaaacctatatctccaaataaggtcatgtcctgaggtactgagtgttaagacttcaacatgttattgaaccaacaattcaatgcgtaatatttaagtgaaattcaatttattttataaaacccaactaaaatacaacctgttttaaggctctattttgctccccccatcctgcttcagagttatccctaaaaactgtatgaatcactgcaacttgcataattctatagttgcttttagcttagactgtaattgatttatttgcaaactaatatttgcctctctattagaccatgcacaatttgagactagaaagtattatatttatctcagtatcctcagaacttagcataaaataagattgcrattatataatcattaccatgaacaccaaaaagctttatgaaaatttatattattttacttattaaatatgtaagatagtataagttttccacctctctcttttttaacttttattttaggtttggggtacatgtgtacatgtgcaggtttgttatacaggtaaactgcatgtcacggggggtctggtgtatagattattttgttaccctggtatttaataatgagcatagtacttgataagtagttttctgatcctccccctcctcccactcttcagcctcaagtaggtcctagtgtctgttgttcccttttttgggtccatgcagtctttgtttttctgtttgtgtgttaatttcctaagaacgatggcctccagttccatccatgttgttgcaaaggacatgatctttttcttttttatggctgcttagtattccatgatgtatatgtaccacatattctttatccagtttactgttattgggcatctaggttgattccatgtctttgttattgtaaacagtgttg

SEQ ID NO: 32921 - DNA, 1719 bp, Homo sapiens
tgcccatgtatttgagaattctctctccctggcatgaagcctgtccgtggtttcccctcagttagatgttcacgttaaagctatttaatgtcctatctgatggcctgtgtagcttcctttcttgccatttcccttcttggtcaacagtaacatgaccctgtgttccttaaacatgccagagtttgccattcttttaccatcatctagaatgctatttcctacctgcttcacaaactgtgtggcttaaacagcataaatttaatgtctcgcagttttagagcctagaagtccaaaatcaaggagtcatctgggttggttctgcaggctttgaggaaggatcttttccaggctcctctccttggcttttcgatggccattatcttcctgagtcttcaccattgtcttctctttatgcatctctctgtatctatatttattttcattttctttttttttttttaatagacagggtctcactctgtcacccaggatgaagtgcaggtgtgatcatggttcactgtagcctcacactcataggctcaggtgatcctctgatctcagcctcccaggttgctggcactacaggcgaggcacgatgtctggctaattttttgaaaagtttttgtagagatggggtctcaccgtgttgctcaggctgctcttaaacacctggcctcaagtgatcatcccacctcagccttccaaagtgctaggattataggcatgagctgttacacagcacccacagtttctctttttataaggacaccagttatgttggattagggcccaccctaatgacctcattttaacttgattgcctctgtaaaacctatatctccaaataaggtcatgtcctgaggtactgagtgttaagacttcaacatgttattgaaccaacaattcaatgcgtaatatttaagtgaaattcaatttattttataaaacccaactaaaatacaacctgttttaaggctctattttgctccccccatcctgcttcagagttatccctaaaaactgtatgaatcactgcaacttgcataattctatagttgcttttagcttagactgtaattgatttatttgcaaactaatatttgcctctctattagaccatgcacaatttgagactagaaagtattatatttatctcagtatcctcagaacttagcataaaataagattgcaattatataatcattaccatgaacaccaaaaagctttatgaaaatttatattattttacttattaaatatgtaagatagtataagttttccacctctctcttttttaacttttattttaggtttggggtacatgtgtacaygtgcaggtttgttatacaggtaaactgcatgtcacggggggtctggtgtatagattattttgttaccctggtatttaataatgagcatagtacttgataagtagttttctgatcctccccctcctcccactcttcagcctcaagtaggtcctagtgtctgttgttcccttttttgggtccatgcagtctttgtttttctgtttgtgtgttaatttcctaagaacgatggcctccagttccatccatgttgttgcaaaggacatgatctttttcttttttatggctgcttagtattccatgatgtatatgtaccacatattctttatccagtttactgttattgggcatctaggttgattccatgtctttgttattgtaaacagtgttg

SEQ ID NO: 32922 - DNA, 1719 bp, Homo sapiens
tgcccatgtatttgagaattctctctccctggcatgaagcctgtccgtggtttcccctcagttagatgttcacgttaaagctatttaatgtcctatctgatggcctgtgtagcttcctttcttgccatttcccttcttggtcaacagtaacatgaccctgtgttccttaaacatgccagagtttgccattcttttaccatcatctagaatgctatttcctacctgcttcacaaactgtgtggcttaaacagcataaatttaatgtctcgcagttttagagcctagaagtccaaaatcaaggagtcatctgggttggttctgcaggctttgaggaaggatcttttccaggctcctctccttggcttttcgatggccattatcttcctgagtcttcaccattgtcttctctttatgcatctctctgtatctatatttattttcattttctttttttttttttaatagacagggtctcactctgtcacccaggatgaagtgcaggtgtgatcatggttcactgtagcctcacactcataggctcaggtgatcctctgatctcagcctcccaggttgctggcactacaggcgaggcacgatgtctggctaattttttgaaaagtttttgtagagatggggtctcaccgtgttgctcaggctgctcttaaacacctggcctcaagtgatcatcccacctcagccttccaaagtgctaggattataggcatgagctgttacacagcacccacagtttctctttttataaggacaccagttatgttggattagggcccaccctaatgacctcattttaacttgattgcctctgtaaaacctatatctccaaataaggtcatgtcctgaggtactgagtgttaagacttcaacatgttattgaaccaacaattcaatgcgtaatatttaagtgaaattcaatttattttataaaacccaactaaaatacaacctgttttaaggctctattttgctccccccatcctgcttcagagttatccctaaaaactgtatgaatcactgcaacttgcataattctatagttgcttttagcttagactgtaattgatttatttgcaaactaatatttgcctctctattagaccatgcacaatttgagactagaaagtattatatttatctcagtatcctcagaacttagcataaaataagattgcaattatataatcattaccatgaacaccaaaaagctttatgaaaatttatattattttacttattaaatatgtaagatagtataagttttccacctctctcttttttaacttttattttaggtttggggtacatgtgtacatgtgcaggtttgttatacaggtaaactgcatgtcacggggggtctggtgtatagattattttgttaccctggtatttaataatgagcatagtacttgataagtagttttctgatcctccccctcctcccactcttcagcctcaagtaggtcctagtgtctgttgttcccttttttgkgtccatgcagtctttgtttttctgtttgtgtgttaatttcctaagaacgatggcctccagttccatccatgttgttgcaaaggacatgatctttttcttttttatggctgcttagtattccatgatgtatatgtaccacatattctttatccagtttactgttattgggcatctaggttgattccatgtctttgttattgtaaacagtgttg

SEQ ID NO: 32923 - DNA, 1120 bp, Homo sapiens
gtttccattggtgatgaaagtgatgctaggggcctttgttggaatctaccaaaaatgactattctaggaaaagtcagatagtaaaattctagtttcccagaactagcagaatgtgcccccctgacagtggggcagttcccttccagtgtccagccacccttcctggcctctttgcacacctctgctcctgttttcaggagaacacaggccctggttcatattatttctcctcctccaagattataagaagtggcagcttatttccacaaatttatttactctaagtttcactctgtcaaagcagggtctaaatattattagtccaataataccatcttgctgagtgagacaaagtttctgttgctttgggaatcaacacattctcatgtgctgagtgccttcagtgtgctgggcactgtgcttagccttttaatgcgttatttacggtcctcacaaaaaccttgcatgataagtgctcaagttttcttcttatagatgaaaatcagagaggttaagtgtctcaactaccattacagacgagtaagtggaggacctaactaaaaccaaagtccatttgacttcaaagtttgtgccctttttgtgatattagaagaaaagagaagtccagattttgcatgaactagcagtaaactttgtccccttccttgcagggctgaatcccctatgccaggccttggaagccccaagtaggctttgtaaatggagcaatctcattgcataggcctgaagggtctgtgattttattttctccaggctacccatggagtgattgctttctgtaatgtgggacttaagcttttatgggtttgccagtgaatttcagtctcacgaacaatattgttcctgtaaaaaaatatattttgagacaaaatccaccaattccaatgggaagtagtctatatttatcactttaaagaattaatttgttaaaaatgattmttattcaaaagtagtacaatctgatttgacaatatatcctagtcatacagacttgaataatatagagacacaaacacggttttttttttcaagttaggcctaatttagaatgaagactgaatatgtacagaatagttgtatagaaaaatattacttatcc

SEQ ID NO: 32924 - DNA, 815 bp, Homo sapiens
gcgtactaataatttattgaatacctagtatgcttcagcctctaatgaaatacagggacaagcatgctaacacaccttaagccattttttctgcatgtgggctccttttcctttctcacacacttgctgagggtaataagggctttattgaggtcaggtactgtattaagcactttattacgctgttttcatttaagccttataatcaacaaatgaggtaggtatcgccatcacgattttaggatactcagactgagtaagtgtcaataacaggttcaaggtaatactgcaggtaggcagcagggcatgatttgaacctgttagtcggcagagtggtgggatagattgaggatttaaaagagcataaaagttcagaggaggctgttttgttgtggcatcagctggggaactcattaaataatgtgttatttctctttaatgtgagctccctactgtcatccttttctctctcttccttccagtattcatagagcatctcctttccgtgctattcactggtaacaaactctgaagatacaaacacagaaggatactttagtgagatactgatttctgtttccccagatktttttcctttttggattcccagctcttatgttcccttgtctgaggagaggtggaaaataagttgctagaggcaaccttcatttggctttttgctttcttaaaacataaggtatccaaaaagttgtactgagggaggaaagaagggggaaaatacagagcagagctttgaagcataagaagaggtaagaggagacatttcctcagaatgtgaataaaacagtgtcagt

SEQ ID NO: 32925 - DNA, 567 bp, Homo sapiens
aaaatgcatctaaacctgtctgcttttctctgtcttcactgcaactaccttattctaaacatcatcctttcttacttggattattacaacagtttccttgcttctattctacacaacagcaagggtgatctttaaattaaaaaataataaataaataaataaataaaatcactttgttgtcctgcttcaattctccaacaacttcttactgtagctagaataaagtacagaccctttgccatggcccctcagggttctcaaactctggcctatccctgcctatcatgtggcactgactctgctccagctgctcaggccttctttctcatcctcaagcatgctaatctcccttctgatggagagtcttgtgctctgcctggaatgctctggccccagagttaygcatggtttcaagttacagttaactaccatcaccagctgaggtgttttcagaattcccaaaccaaatgaacccctattatatgaaataattactgtgtccatttatttattgtctgttgcctgcccatgccatgtaaactcaaagtgagtgaggatcactggttt

SEQ ID NO: 32926 - DNA, 1095 bp, Homo sapiens
agtctccgggaaccagttcaattccagcatcctaatacacactgtctggtctccctagttcagcttgccctccctgataacggcccctttggcagagcagcttattcttaatgctaacagtaggtatcacttacagaacacttgctgactgttcagttcccatcaaagaaagccttatgtggcagatcctttgatgatgcttgttttacagacaaacgtttggggcttaggttaagaaacttgagagggggcaaactaataagtggcaaagccgagctttgaacctaccactcttctgcttcagaattcatatccttaactcatgcactcccatttaattatttatgtttattatttcattgtttggtgagcgcttatattgaaaattcattttttttttggtggggggcatgctttctgtcactttgcagaaacaaataaaagttgagctgaaccctcaattaagttctttccagtgcgatgattcaacacaatattctaaccataaggatactcagaggaaggagkatgccatccagaagtctagtatctttgtaaggcacgatttttgccaggcacaattacaggtgaagggctcattgaactaaagggaggaggggtcctatggtcacatttacctccaagcccttctctgcaccctttccctcccttctttcccctctctccctcccaccctacaagcttaccttggttaggaaagcatattctgagaaaatcaaaaggaaaaggcatgtgtgcgattcaggctgctatgacacacacacacttaactttgttgcctatggattctgctttctaataacttgccctcaacatgaccccagggagtggattagaaagtttttttccccatccccattttttacctgttattcacactgtgagcaggaggacccttttcaccatcgttgttcggctgaacttgcttcgcggtttgttctcggctgggtcaggaactctggtagagggaaaccagtgccctgtctctgccgggctgggactccgcgagtcactcacctgtaggggaggtccgaggcccgcgcgggcgcaggggcggcgcctgtctcctcccag

SEQ ID NO: 32927 - DNA, 1095 bp, Homo sapiens
agtctccgggaaccagttcaattccagcatcctaatacacactgtctggtctccctagttcagcttgccctccctgataacggcccctttggcagagcagcttattcttaatgctaacagtaggtatcacttacagaacacttgctgactgttcagttcccatcaaagaaagccttatgtggcagatcctttgatgatgcttgttttacagacaaacgtttggggcttaggttaagaaacttgagagggggcaaactaataagtggcaaagccgagctttgaacctaccactcttctgcttcagaattcatatccttaactcatgcactcccatttaattatttatgtttattatttcattgtttggtgagcgcttatattgaaaattcattttttttttggtggggggcatgctttctgtcactttgcagaaacaaataaaagttgagctgaaccctcaattaagttctttccagtgcgatgattcaacacaatattctaaccataaggatactcagaggaaggagtatgccatccagaagtctagtatctttgtaaggcacgatttttgccaggcacaattacaggtgaagggctcattgaactaaagggaggaggggtcctatggtcacatttacctccaagcccttctctgcaccctttccctcccttctttcccctctctccctcccaccctacaagcttaccttggttaggaaagcatattctgagaaaatcaaaaggaaaaggcatgtgtgcgattcaggctgctatgacacacacacacttaactttgytgcctatggattctgctttctaataacttgccctcaacatgaccccagggagtggattagaaagtttttttccccatccccattttttacctgttattcacactgtgagcaggaggacccttttcaccatcgttgttcggctgaacttgcttcgcggtttgttctcggctgggtcaggaactctggtagagggaaaccagtgccctgtctctgccgggctgggactccgcgagtcactcacctgtaggggaggtccgaggcccgcgcgggcgcaggggcggcgcctgtctcctcccag

SEQ ID NO: 32928 - DNA, 1095 bp, Homo sapiens
agtctccgggaaccagttcaattccagcatcctaatacacactgtctggtctccctagttcagcttgccctccctgataacggcccctttggcagagcagcttattcttaatgctaacagtaggtatcacttacagaacacttgctgactgttcagttcccatcaaagaaagccttatgtggcagatcctttgatgatgcttgttttacagacaaacgtttggggcttaggttaagaaacttgagagggggcaaactaataagtggcaaagccgagctttgaacctaccactcttctgcttcagaattcatatccttaactcatgcactcccatttaattatttatgtttattatttcattgtttggtgagcgcttatattgaaaattcattttttttttggtggggggcatgctttctgtcactttgcagaaacaaataaaagttgagctgaaccctcaattaagttctttccagtgcgatgattcaacacaatattctaaccataaggatactcagaggaaggagtatgccatccagaagtctagtatctttgtaaggcacgatttttgccaggcacaattacaggtgaagggctcattgaactaaagggaggaggggtcctatggtcacatttacctccaagcccttctctgcaccctttccctcccttctttcccctctctccctcccaccctacaagcttaccttggttaggaaagcatattctgagaaaatcaaaaggaaaaggcatgtgtgcgattcaggctgctatgacacacacacacttaactttgttgcctatggattctgctttctaataacttgccctcaacatgaccccagggagtggattagaaagttttttyccccatccccattttttacctgttattcacactgtgagcaggaggacccttttcaccatcgttgttcggctgaacttgcttcgcggtttgttctcggctgggtcaggaactctggtagagggaaaccagtgccctgtctctgccgggctgggactccgcgagtcactcacctgtaggggaggtccgaggcccgcgcgggcgcaggggcggcgcctgtctcctcccag

SEQ ID NO: 32929 - DNA, 1095 bp, Homo sapiens
agtctccgggaaccagttcaattccagcatcctaatacacactgtctggtctccctagttcagcttgccctccctgataacggcccctttggcagagcagcttattcttaatgctaacagtaggtatcacttacagaacacttgctgactgttcagttcccatcaaagaaagccttatgtggcagatcctttgatgatgcttgttttacagacaaacgtttggggcttaggttaagaaacttgagagggggcaaactaataagtggcaaagccgagctttgaacctaccactcttctgcttcagaattcatatccttaactcatgcactcccatttaattatttatgtttattatttcattgtttggtgagcgcttatattgaaaattcattttttttttggtggggggcatgctttctgtcactttgcagaaacaaataaaagttgagctgaaccctcaattaagttctttccagtgcgatgattcaacacaatattctaaccataaggatactcagaggaaggagtatgccatccagaagtctagtatctttgtaaggcacgatttttgccaggcacaattacaggtgaagggctcattgaactaaagggaggaggggtcctatggtcacatttacctccaagcccttctctgcaccctttccctcccttctttcccctctctccctcccaccctacaagcttaccttggttaggaaagcatattctgagaaaatcaaaaggaaaaggcatgtgtgcgattcaggctgctatgacacacacacacttaactttgttgcctatggattctgctttctaataacttgccctcaacatgaccccagggagtggattagaaagtttttttccccatccccattttttacctgttattcacactgtgagcaggaggacccttttcaccatcgttgttsggctgaacttgcttcgcggtttgttctcggctgggtcaggaactctggtagagggaaaccagtgccctgtctctgccgggctgggactccgcgagtcactcacctgtaggggaggtccgaggcccgcgcgggcgcaggggcggcgcctgtctcctcccag

SEQ ID NO: 32930 - DNA, 562 bp, Homo sapiens
ctatctgtgcttgcmatgcacccaccttcattgtcagtcagcctttgcagcatcaaaccgttgggctcacactgcctcctctgagatgtagacacgtgagggaattagagatcatcttcacgtggggaaaaaaaggcttctggaattaaatgaatgatatgtacacgtaaattctccagctgcacttttaccagataatttcactttgggggaaaactcgtggtccttaaagtcactattttgccactacttgcacaaaaggaaagtatttcttcaggattcatttttttcctttaagatcttcataaattgcttcaaaatattaatgtgcaatgaaaaatagcatagaaaccaaagtgacttccattttatgctgtccttagtgccctagttaccaatttacatgtgacctattattacagaaacatatgtcatagaagaaagaaccgtgttcaggaggttagtcaggagaagattttgtgtagcaatgatcttgttacttggttttattggagctgtacaaaaggcacaaaaatggaaatactgaatgtatcagtcagca

SEQ ID NO: 32931 - DNA, 562 bp, Homo sapiens
ctatctgtgcttgcgatgcacccaccttcattgtcagtcagcctttgcarcatcaaaccgttgggctcacactgcctcctctgagatgtagacacgtgagggaattagagatcatcttcacgtggggaaaaaaaggcttctggaattaaatgaatgatatgtacacgtaaattctccagctgcacttttaccagataatttcactttgggggaaaactcgtggtccttaaagtcactattttgccactacttgcacaaaaggaaagtatttcttcaggattcatttttttcctttaagatcttcataaattgcttcaaaatattaatgtgcaatgaaaaatagcatagaaaccaaagtgacttccattttatgctgtccttagtgccctagttaccaatttacatgtgacctattattacagaaacatatgtcatagaagaaagaaccgtgttcaggaggttagtcaggagaagattttgtgtagcaatgatcttgttacttggttttattggagctgtacaaaaggcacaaaaatggaaatactgaatgtatcagtcagca

SEQ ID NO: 32932 - DNA, 562 bp, Homo sapiens
ctatctgtgcttgcgatgcacccaccttcattgtcagtcagcctttgcagcatcaaaccgttgggctcacactgcctcctctgagatgtagacacgtgagggaattagagatcatcttcacgtggggaaaaaaaggcttctggaattaaatgaatgatatgtacacgtaaattctccagctgcacttttaccagataatttmactttgggggaaaactcgtggtccttaaagtcactattttgccactacttgcacaaaaggaaagtatttcttcaggattcatttttttcctttaagatcttcataaattgcttcaaaatattaatgtgcaatgaaaaatagcatagaaaccaaagtgacttccattttatgctgtccttagtgccctagttaccaatttacatgtgacctattattacagaaacatatgtcatagaagaaagaaccgtgttcaggaggttagtcaggagaagattttgtgtagcaatgatcttgttacttggttttattggagctgtacaaaaggcacaaaaatggaaatactgaatgtatcagtcagca

SEQ ID NO: 32933 - DNA, 520 bp, Homo sapiens
aaatatgaggcctgctgcatgttaattaatctatgccattgagtgagaaggaagatggtgacaccttagggggaagtattatttgttcattaaatctgccacttactgactagcttttagcaagttacttagtctgttcctcagtttcctcaggtgtaaaaacagggatgattaatagttccctcataggcctgttgtgagaattaaatgcatttctagttaacaagctcttagatagatgcttggcatatactaaagactgtataaaaaatcattgccctagttagcatgagctaatgtagttgtgtaaggtaatcatatggtaataatatcrctttttattaatgttttgttgaggagacaaattaaacacatgatgggaaagaactgacagtccaactttatattgtctgtatggtacagaacgccaaatgatggaactatctgtttagggaaggctttatgaagatgcacttttggttggtaggggatgaggaaattccagatgggtaagcagtgg

SEQ ID NO: 32934 - DNA, 584 bp, Homo sapiens
ccctggctgcaagtaaactcagaggtaggccaggaggatgcaggacaggacatcayagcatctgctaacttcccaaacccatttcttccccaattcagtaagtggcaataccatcctccaattgctccccacagaaacttcatccttggatgcattaatttcttccacactccacattcaaatccttttagtgttacctttgaaacatatcctgaatccaatatttctacctcctccactacaactctggtccaagccaccagcaactctcacttggattattggattattgcaaccatctatttattatttttttatgagacagagtcttaccctgtcacccagacaggagtgcaatgatgagatcatggttcactgtagcctcaacttcctaggctcaagcaatcctcccacctcagcttcccaagtagctgggactacaggtatgcgccgccgcacctggctaatttttttattttatttatttatttatttagatggagtctcactctgttgcccaggctggagcacagtggtgaatctcagctcactgcaacctctgtctcccacattcaagtgattct

SEQ ID NO: 32935 - DNA, 584 bp, Homo sapiens
ccctggctgcaagtaaactcagaggtaggccaggaggatgcaggacaggacatcatagcatctgctaacttcccaaacccatttcttccccaattcagtaagtggcaataccatcctccaattgctccccacagaaacttcatccttggatgcattaatttcttcyacactccacattcaaatccttttagtgttacctttgaaacatatcctgaatccaatatttctacctcctccactacaactctggtccaagccaccagcaactctcacttggattattggattattgcaaccatctatttattatttttttatgagacagagtcttaccctgtcacccagacaggagtgcaatgatgagatcatggttcactgtagcctcaacttcctaggctcaagcaatcctcccacctcagcttcccaagtagctgggactacaggtatgcgccgccgcacctggctaatttttttattttatttatttatttatttagatggagtctcactctgttgcccaggctggagcacagtggtgaatctcagctcactgcaacctctgtctcccacattcaagtgattct

SEQ ID NO: 32936 - DNA, 1176 bp, Homo sapiens
  misc_feature (1)...(1176): n = A,T,C or G
aatcacttgaacctgggaggcagaggttgcagtgagccaagattgtgccattacactctaccctgggcaaaaagagcgaggctttgtctcaaaacaaaacaaaaacaaaaacaaaacaacaacaacaaacattccatactttaaagaagaatactggccgggcgcggtggctcacacctgtaatcccagcactttgggaggctgaggcgggcggatcacgaggtcaggagatcgagaccatgctggctaacacagtgaaaccccatctctactaaaaatacgaaaaaatgtagctagtggcgtgtcaggcgccaccagctactgcaggaggctgaggcaggagaatggcgtgaaccgcaggaggcagagcttgcagtgagccgagatcatgccactgcactccagcctgggcaacagagcaacgtccgtctcaaaagaaaaaaaaaatgaatgcttaagtgtaaatttggtagtgaatagtcttgtgttatgttcttatnnnnnnnnnnnnnnnnnnnnnnnnnnnnnnnnnnnnnnnnnnnnnnnnnnnnnnnnnnnnnnnnnnnnnnnnnnnnnnnnnnnnnnnnnnnnnnnnnnnntgattgtttttgttagtgctctggttacaacattgcattaggatttgagcagttngctacagacctgtttccctgaagtccagttgattttattttattttattttattttacgagacagagtttcactctctcacccaggctggagcgcagtagcatgatctcggctcactgcaacctctgcctcccaggttcaagcaattctcgggtctcagcctccccagtagctgggattacaggcatgtgccaccacgccmagctaacgtttgtatttttagtagagacaaggtttcaccatattggccaggctggtcttgaactcctgacctcctgacagggttacatcatattgcccaaggctggtcttgaattcctggctcaagccatttacctgccttggcctcccaaagtgctgacgttgcaggcatgagccaccgcacccagctgagaattcattctttttgcctcttctggcttctgatggctgctggcattccttggcttgtggaagtatcactccaatattcgcttttgttttcacattacctcttccatgtctgtctcaaatctccctctgc

SEQ ID NO: 32937 - DNA, 599 bp, Homo sapiens
gcattcatctaggaaggtaagaatttcacgggagagaaagatgtcaccgtggtagaaagacagggatcacctcctctgggctcttgagtttacttattcattctggattctttctaacaagaatatgaggacaagaggcactgtcctcaggcacttcgtcctgtggagccaccaccatctctgcatggccccaattaggaaacgtgaagagctaggagagggagagtatggtcagtgcttagcagctgaagttccacttgcctggccatcgtgaatttccaggctgtcttctgagttgaacatgatggcaaaggagagcaaaatagcagatgtcactgaaggagagctcagcgagggagtgattgattaatagctgtattgaaaggtgggagtcaggtacgggggaagagckgcgatggaaaattttcgctttctttcagcagcttatttttaactcagctttctgttcttgctttattatggaggaaaaattgggccatagagtttactgccttatgccagattgttcaagaaaatgccttgcaacttacaatattttgcagctagtttcttccgtgaccaccacaaagactgcattg

SEQ ID NO: 32938 - DNA, 741 bp, Homo sapiens
tcaaacttcttcctattttcccagaagcatgatgctcactctgcttctcttgcctagaatgtccctattcattacccacctcctagctggtgagcacctgcttatcttccaagaggtgcctaagcttccctttctctatggtcttttctgtctgctgccaaattgaatgatccactcccttctttgtgccccaactctattttgtacatatttcaactacagyactatacataacactgtacttatttatttaaaagtgtatcttcccccctagactgtatgccctcaagggaagggataatactctacttatatttgtatcattagcatggagctcagtgcctaacatgtaacactagttaataaaattttagtcaatgattaagtatgttaatgaaagaatttatatattgaaactagaaatctgatagaggctattgttacttcgcaaagacaaatcaaataatctgaagacaaaacatagaaaagcatggaagaaaaattatcaaaggaataacatgaaataattttgtagctgaaggaaaacagaagattatcgggggaacccgcctccaatatttcaacataggttctttctgttttccttaagtgttggccggctgagaaataaagagagacaatataaagagaggaattttacagctgggccgctggcggtgacatcacatattggtaggactgtgatgcccacctgatcctcaaaccagcaagtttttatta

SEQ ID NO: 32939 - DNA, 1208 bp, Homo sapiens
  misc_feature (1)...(1208): n = A,T,C or G
gacactgggaattggtgctggatgatttcttagacaatttaacacatccagaaaaccttaaaaattgctgaagtctattttggttacttaatttgtaattttgtataagcagaatgaattattcatagaaagtaccagccagtatgggtgttttgtacataagggcaatttgtagtctctgggaaccctgaaaccacgaagtaccaacattagcatcccatgtcctgcttctgggtctcaggattcctgtggttgatkcaggccagcacctctcctccccgcttttctctttataacaaagtctgaaattgtcccaaagcacaaaagttcccagtacactaccggaagtgactacatttaagtgtttgaggaaaaataaaaatgatcatgattcaaggagccagcttttccttggcctgagaacttgacattaattaaaatgaactgtcttaatctcatctaactttcatgaagggacagtgtcatgctactttagcttttgctttgacagactttcctgaaaattctgatcaagtcacttactgtagactgagcatgcagaagagtattcaaacagcaaaaaattccagtgggtggcgagagaatggttactctcggccagattacttttcatacgttatgactgcgatttcnnnnnnnnnnnnnnnnnnnnnnnnnnnnnnnnnnnnnnnnnnnnnnnnnnnnnnnnnnnnnnnnnnnnnnnnnnnnnnnnnnnnnnnnnnnnnnnnnnnntcatctggttgtgtgactggtcaagatgaacacaggtagggtaaagaggagacaatttagcaaccctcccagaagcagaccatgctccagtgacgtagtttcgtgagcttccaccaagagcctggagcgctttaatgatgttattttttgtagctcctgtcccttctgctcgaattgcttttttctgcaggctcagcagaggtgaaacacaactggtcgtcgttacattcccctccagtatctccatgcaattgaaaacaactgcatgagataccccttttccagatgaaaccatgccaaaaccctaaatatttcctccgtgttcccttttcccattcaaatcatcaatgctaacatctcatttgggggcttgacttaaaatcagtgtatttcgtaatggacaaatatttacattagataaattttaaattattttattttaaacagataattta

SEQ ID NO: 32940 - DNA, 1208 bp, Homo sapiens
  misc_feature (1)...(1208): n = A,T,C or G
gacactgggaattggtgctggatgatttcttagacaatttaacacatccagaaaaccttaaaaattgctgaagtctattttggttacttaatttgtaattttgtataagcagaatgaattattcatagaaagtaccagccagtatgggtgttttgtacataagggcaatttgtagtctctgggaaccctgaaaccacgaagtaccaacattagcatcccatgtcctgcttctgggtctcaggattcctgtggttgattcaggccagcacctctcctccccgcttttctctttataacaaagtctgaaattgtcccaaagcacaaaagttcccagtacactaccggaagtgactacatttaagtgtttgaggaaaaataaaaatgatcatgattcaaggagccagcttttccttggcctgagaacttgacattaattaaaatgaactgtcttaatctcatctaactttcatgaagggacagtgtcatgctactttagcttttgctttgacagactttcctgaaaattctgatcaagtcacttactgtagactgagcatgcagaagagtattcaaacagcaaaaaattccagtgggtggcgagagaatggttactctcggccagattacttttcatacgttatgactgcgatttcnnnnnnnnnnnnnnnnnnnnnnnnnnnnnnnnnnnnnnnnnnnnnnnnnnnnnnnnnnnnnnnnnnnnnnnnnnnnnnnnnnnnnnnnnnnnnnnnnnnntcatctggttgtgtgactggtcaagatgaacacaggtagggtaaagaggagacaatttagcaaccctcccagaagcagaccatgctccagtgacgtagtttcgtgagcttccaccaagagcctggagcgctttaatgatgttattttttgtagctcctgtcccttctgctcgaattgcttttttctkcaggctcagcagaggtgaaacacaactggtcgtcgttacattcccctccagtatctccatgcaattgaaaacaactgcatgagataccccttttccagatgaaaccatgccaaaaccctaaatatttcctccgtgttcccttttcccattcaaatcatcaatgctaacatctcatttgggggcttgacttaaaatcagtgtatttcgtaatggacaaatatttacattagataaattttaaattattttattttaaacagataattta

SEQ ID NO: 32941 - DNA, 1208 bp, Homo sapiens
  misc_feature (1)...(1208): n = A,T,C or G
gacactgggaattggtgctggatgatttcttagacaatttaacacatccagaaaaccttaaaaattgctgaagtctattttggttacttaatttgtaattttgtataagcagaatgaattattcatagaaagtaccagccagtatgggtgttttgtacataagggcaatttgtagtctctgggaaccctgaaaccacgaagtaccaacattagcatcccatgtcctgcttctgggtctcaggattcctgtggttgattcaggccagcacctctcctccccgcttttctctttataacaaagtctgaaattgtcccaaagcacaaaagttcccagtacactaccggaagtgactacatttaagtgtttgaggaaaaataaaaatgatcatgattcaaggagccagcttttccttggcctgagaacttgacattaattaaaatgaactgtcttaatctcatctaactttcatgaagggacagtgtcatgctactttagcttttgctttgacagactttcctgaaaattctgatcaagtcacttactgtagactgagcatgcagaagagtattcaaacagcaaaaaattccagtgggtggcgagagaatggttactctcggccagattacttttcatacgttatgactgcgatttcnnnnnnnnnnnnnnnnnnnnnnnnnnnnnnnnnnnnnnnnnnnnnnnnnnnnnnnnnnnnnnnnnnnnnnnnnnnnnnnnnnnnnnnnnnnnnnnnnnnntcatctggttgtgtgactggtcaagatgaacacaggtagggtaaagaggagacaatttagcaaccctcccagaagcagaccatgctccagtgacgtagtttcgtgagcttccaccaagagcctggagcgctttaatgatgttattttttgtagctcctgtcccttctgctcgaattgcttttttctgcaggctcagcagaggtgaaacacaactggtcgtcgttacattcccctccagtatctccatgcaattgaaaacaactgcatgagataccccttttccagatgaaaccatgccaaaaccctaartatttcctccgtgttcccttttcccattcaaatcatcaatgctaacatctcatttgggggcttgacttaaaatcagtgtatttcgtaatggacaaatatttacattagataaattttaaattattttattttaaacagataattta

SEQ ID NO: 32942 - DNA, 569 bp, Homo sapiens
cagcatcaattttattcttattctactttcatacgtgtaagcatatggaatactattgtatgtaaataaatagataacaatggaagaaaatttgttaatactaatgccattctgttcttagaatttcttcctagttacatgctaaaaagtcataaactcttctaacattaaaaatgattttcaagaattgtttgcttacagctggattagggcctcctacatttttttctttagaaaacaaggaactagagacaattttttacccagtgaatagagtcatttattttctcaagaccagaaaccagtattttgaattgtctcattgtttggtgtcctggagactttatgtcccagggctcggtactcaataaatggtagctattctcactgtttatgggccccagagaccctcaaggcactgactatacscctactgtggcagtttcctcttattcccttcaaaatatccaacatgaattcacaatttcttttagactattcagatctatgtagataatctcttaccttctttatgaaattgtccttagcacttccagccctcagagatc

SEQ ID NO: 32943 - DNA, 590 bp, Homo sapiens
ttttatagtcagtcaattttgtttatagatcaatgtgtactttgagctgttttctcactcattaagaaagcttgttcatcacacctcataacactttatcctacctcccaaaacacaaatactacaatactaattattggttttctgtatgtccaatctagtgcttattagttratgtattcaattcaatctcatctcagttcaaaactatcccggaaaagttaatctgatagaaaatggtttaatggttaatgtcctacaaatgaagttgagttaagtattttgagaatcttgtttactgagtttgacaggtttcaacacaactactaatatccccaattttaaggagattactcaaaataatacttttaatattatctattgctattctgaagtaaataaaattcatggcattcttattttacagacaattgttgcataaacaaggctagatattgttactcttccaaaagaagttccatttaaaacatatttatccagatgggaaatactcattagcagaggacccggtaataggaaataataagctgccaatcaagcaaattaccttcatgatgatgatcattaga

SEQ ID NO: 32944 - DNA, 778 bp, Homo sapiens
tggcccccctgaggccaccctccaggagcttaaacatttagtcgaagctccccaaaccctgtcctctagggcttttatgagagcttcactacgtaggcatgactaataaccatatacaaatgtgattagacaaaaaaaacgcaggatctagacctagcgaggcctgtctgttctgacttttcttggcctctctgtgtagcattccttctctagggtatggggcaggamtctccctagaatggggggtttttgacccacaatcagattacagtcctgaggtgaaagagaacaggaggtcagaaacagagattctatttcctgtggcctaaagtgcctcaacattataacaaaaactgtgggagttagaagccaggaaggatgaaaatctataaataaataaatatttttatatctatatctatatctaatagcaccacgaggggagagagagagaaagagagagagaaattttaacaaactagctaaactgtcttagaattccataggacaaaatatcaaattttcctttgtaataaaaatgacaatactatattagagtatgagcataacatctaaattatacagacaagcaccataaaatacctatacaaaggaaaaacaaaagaaccacacagagtcatagatttgtttcaaaactatgtttagtgtcaaggatacagattgctttttagcattttggaggtaacttcttgagatctgtgagtttttaaaaaaaacatgatgttatgttgtagcctatgactatggttccaagcaa

SEQ ID NO: 32945 - DNA, 549 bp, Homo sapiens
tatctatttaattttttataataattttcataacctaacatttagcatggtaataattgtaataactatttttttactatctactattatagcttaggcatgtggcttaacctatttaaccattctcctacaattattttataacatcattatattttagtgtgtatgtgaaggtgctctagtgaagagatctgtcatatattaactagagcaaaacagaaaactgtcatgtggcagttcaaaggtgtacaggtataccagtcttttctcgcactgcaataaagaaataccttaaactggatgatttataaagaaaagaggtttaggctgggtggggtggctcacgcctgtaatcccagcactttggtaggccgaggcgggcggatcatgaggtcaggagatcragaccacggtgaaaccccgtctctactaagaatacaaaaaattagccaggcgtggtggcaggtgctagtagtcccagctactcgggaggctgaggcaggagaatggcgtgaacccgggaagcggacgttggagtgagctcagatc

SEQ ID NO: 32946 - DNA, 1383 bp, Homo sapiens
cttcaaaatagggaagaaatttggctttcctatgctttttggttctatccagatccacaatcaattggatgacatctggccacattggatggagttggatcttctttaatcaattcactgattcaaatgtcaaacttttctggaaacccccttgaagacatccccagaaataatgctagctatctgggtatcccttaacccaatcaarctgatatctaaaatcaaccactccacaccttagaactcttttagtctctaccctttacacagttccaaagccattttcacatatttaagtgttacaagagcattccatttatggtaccaatttctgtcttagtccattttggctgctacagcagaatgttctagactaggtggattaaacaacaaaactgtattcttcacagttcccaagcctggaagtccaggatcagggtgccagcatggttgagttctagtgagagccctcttctgtgttgcagactgttgactcctaactgcatcctcagaatgtgggccatggcagaaggtgagagagctctctgggatctcttttgtaagaggttccaccctcatgacctaattgtctcccaacggtcttgtttcctaataccatataattaccttgagggttaggatttcacatataaatttgggggtgacacaaagttttactctgtagtagtcaataaaaaatagtgatgcaacatttttctgtgcaattacttatacagaacataaaagtttgtctcgtatagaccagaatcaaaacttgaaaaataataactcctttaagtgatgccatgaataccattccattctctgaaatttagctggaaattagaagagcctgattttagattaagatattctaattctcaacttcctggagctaaggtatttcagtaatgtgcattctgagtaggaagggaaggaaaaatgttattctaaaagcaatctcagtattagaaagaggggagagttattaaacatttaaaatggtgaggagatttggcaaagtctctgatgcctacattgaatgttacaataccttgcttaatgagtgaaaaacagaaatgtaactaatattgagtgcctactccattctttgtgttttacacgtcccacccatttaatcctcacatcaactataaaaaaaataggtattaccatcatcctcatttataggtgaggagactaaagcagtaaaagattaaatgactagaaaaaatatttactgaaaataccttagtcacttgggtaataagtggcttagccaggcttttaactcagcctgactgacttttattagtaacataggaagttttaagcactatttaaaatattgctgagtagcaattatccccaagaaactatgca

SEQ ID NO: 32947 - DNA, 639 bp, Homo sapiens
ttatcttgtggttgggccaaattcctgaagttgggaaatttgtattttaccttaatctgagggaaaattaacaagaattaacgacttgccgtgcttgacttacagckgattatagctaatttgttgaaacatattgaaagagaaaccagtattttgagaacaatgctaacttattgctcttttttttccttgtgaatcataaggcatagaaggtagaattagggaagaatatatatagtcatgtgctacataataaaatttcagtctatgatggacctcatatgtaatactggttccatgccaccaggaccactggtatattaaaaatgtattattttttactatacctttttatttatttatttattttaagaaatgtggtctcactctgtcacccaggctagaatgcagtggcgtgatcacagctaactgcagcttgaaacttcttggctaaagagattttcctgcctcagcctacccaaaagctgagactacaggcacacaccaccacactctaccaattagttttttctttcttctctctcttttttttttttttttttttgtagagatgaaggagtctcacaatgttgccaagacttgtctcacactccttgcctcaagagatcctcccacttt

SEQ ID NO: 32948 - DNA, 555 bp, Homo sapiens
gacagcaagaaaggggagcatggatatttagtttcatttagagaaaaataaacatacatgcgtgtgttttttagactcaactaattttgtaaagtacaactcatagcaaatgtgtatatagctaattgtttagtaaactagtaattgtgtaatacttttctattagcacacgtttaattctcccaaacctatgcttttctgttgtctttaaaaatatcaggtctgtaaacccagtactttgggaggagaatcgcttgagcacaggagtttgagaatagaatggacagcatgcaaaaaccctgtctctacaaaaaatacaaaaattagttgggcatggtggcacacgcctgtgtttccagttacttgggaggccaaggttggagcatcacttgagcacaggatgtggaggttgcagtgagcagagatcatgccactgcgctccagcctgggcaacagagcragaacctgtctcaaaaaaagtaaaacaaaacaaaaaattcagaagcccctttgaaatcgttttagaggattaactgaacaaaagccaacccaaca

SEQ ID NO: 32949 - DNA, 1242 bp, Homo sapiens
aatttctaggtacaaatgaaattttagaaaccagaaatctgttggttatataaagcatgagactagattctaaaaacagtagccatcttctcttcagaaatcccttccttgagaaattaacactcctgattttctatggtgtcccacatattcaagttgtgcaagtattagctgcctacatgagcaagactggcagtactttatattaagctagaagcaacttaattttatcagtaggaagattatttcctttcaagtctgtttaaaaggaactagcacatcttttaactaaaaaataggaaaaaaattgaaatatgtagggtaaagtaaaatggtctggtttcaggtctaactttcagactcaaaagtaccatagtgcattttcaaaatctataaatgtttcaaatgtgtcaagcaaataactaaggcctcctttcctgacacacaaacacaattgtcatatgacatcataaatttgatcacagacctaaaactcatacgatgttagttttcatctaggccaaagaagtcagtaaagggttaacaaattcctggcaattcaaaaacctctggattaaatgaaataaagatgaaaattatacttatccagtcttggaaaaaattgagacactacttctcaaaaatgtaaaatgtatgatacattattgtttgtgcagctaaatggagaaaagcagaaaagatggagatgtggccaggagtcccaggacaaggctgaagttaatgggacctagctggacattcctattagctgttcagtgaagacagtagtccacgtgtgaaccaactgacccctgaatagacttaaacagctagtcgggtctttgctcttctttctgagagaactgccatgaaagcagttcaggaaaacagcatccacccttttctttaagatctccagagcgtgactccatataagctctctcagtagctagcacacagtccaaaaccttcacctctactatattatgtgaggctgcctatcagttgcgtggtctttaattttaaaaggttacacatgacattttcaaaaggtgaaayggagcaaagtgtgacttactaaaaagagaattatatgtatccttcaaagtgagcataggtataaattagaatattatgtcttctagcatttcatgacactcagagcaaataaaactttaaaggagtcacaagtctctacctattacacattcatcaaataagaaactgaaaaaatagttctta

SEQ ID NO: 32950 - DNA, 1242 bp, Homo sapiens
aatttctaggtacaaatgaaattttagaaaccagaaatctgttggttatataaagcatgagactagattctaaaaacagtagccatcttctcttcagaaatcccttccttgagaaattaacactcctgattttctatggtgtcccacatattcaagttgtgcaagtattagctgcctacatgagcaagactggcagtactttatattaagctagaagcaacttaattttatcagtaggaagattatttcctttcaagtctgtttaaaaggaactagcacatcttttaactaaaaaataggaaaaaaattgaaatatgtagggtaaagtaaaatggtctggtttcaggtctaactttcagactcaaaagtaccatagtgcattttcaaaatctataaatgtttcaaatgtgtcaagcaaataactaaggcctcctttcctgacacacaaacacaattgtcatatgacatcataaatttgatcacagacctaaaactcatacgatgttagttttcatctaggccaaagaagtcagtaaagggttaacaaattcctggcaattcaaaaacctctggattaaatgaaataaagatgaaaattatacttatccagtcttggaaaaaattgagacactacttctcaaaaatgtaaaatgtatgatacattattgtttgtgcagctaaatggagaaaagcagaaaagatggagatgtggccaggagtcccaggacaaggctgaagttaatgggacctagctggacattcctattagctgttcagtgaagacagtagtccacgtgtgaaccaactgacccctgaatagacttaaacagctagtcgggtctttgctcttctttctgagagaactgccatgaaagcagttcaggaaaacagcatccacccttttctttaagatctccagagcgtgactccatataagctctctcagtagctagcacacagtccaaaaccttcacctctactatattatgtgaggctgcctatcagttgcgtggtctttaattttaaaaggttacacatgacattttcaaaaggtgaaatggagcaaartgtgacttactaaaaagagaattatatgtatccttcaaagtgagcataggtataaattagaatattatgtcttctagcatttcatgacactcagagcaaataaaactttaaaggagtcacaagtctctacctattacacattcatcaaataagaaactgaaaaaatagttctta

SEQ ID NO: 32951 - DNA, 767 bp, Homo sapiens
ttatttgtggctagattcctgcactaggtttcacaggttgtgtatgcctgcaattttttttttttttttttttttttggkggtgtaattcaggttacaatccagtagatagcacttaagagtaaagtaaaggcaggcagctaggctactcacctgcatgcctcttttgtatttcagtgtgttcacagcagtgcattgtggcaagggagacaggaagggagtagagatgacccctttgccagatccgttcctgggccttaagggagcccgatcactggcactgcacctgcatttccttagccccaagggtggggtggcctgaatcgatggttaggttgccaggagacctgcagctccccagtggcccactggttctctgtgtttggcagagtcagaatgggctgtgggaaatgtccgcgggtgatctgttgaggcagtaggtcaaggacagggtatcttgaggcaggatgttgttgctgtaggtgtggagctgatgtggcacctgtggcttgggttttttttgcccaacacacagctgtggggaccacccagctcactttccctcaactgggtctccttctggtgtctgtcccagtatctggcccaatttgctagttttgtcccaagccttctacacccagatcactgggttattagatgctccaggccatgggggttccctcaggatgagtctgtggcttgcagccatgccacacccttcgcagccctgaggagggagacacacccagctcctgcaccagcctaaga

SEQ ID NO: 32952 - DNA, 767 bp, Homo sapiens
ttatttgtggctagattcctgcactaggtttcacaggttgtgtatgcctgcaattttttttttttttttttttttttggtggkgtaattcaggttacaatccagtagatagcacttaagagtaaagtaaaggcaggcagctaggctactcacctgcatgcctcttttgtatttcagtgtgttcacagcagtgcattgtggcaagggagacaggaagggagtagagatgacccctttgccagatccgttcctgggccttaagggagcccgatcactggcactgcacctgcatttccttagccccaagggtggggtggcctgaatcgatggttaggttgccaggagacctgcagctccccagtggcccactggttctctgtgtttggcagagtcagaatgggctgtgggaaatgtccgcgggtgatctgttgaggcagtaggtcaaggacagggtatcttgaggcaggatgttgttgctgtaggtgtggagctgatgtggcacctgtggcttgggttttttttgcccaacacacagctgtggggaccacccagctcactttccctcaactgggtctccttctggtgtctgtcccagtatctggcccaatttgctagttttgtcccaagccttctacacccagatcactgggttattagatgctccaggccatgggggttccctcaggatgagtctgtggcttgcagccatgccacacccttcgcagccctgaggagggagacacacccagctcctgcaccagcctaaga

SEQ ID NO: 32953 - DNA, 767 bp, Homo sapiens
ttatttgtggctagattcctgcactaggtttcacaggttgtgtatgcctgcaattttttttttttttttttttttttggtggtgtaattcaggttacaatccagtagatagcacttaagagtaaagtaaaggcaggcagctaggctactcacctgcatgcctcttttgtatttcagtgtgttcacagcagtgcattgtggcaagggagacaggaagggagtagagatgacccctttgccagatccgttcctgggccttaagggagcccgatcactggcactgcacctgcatttccttagccccaagggtggggtggcctgaatcgatggttaggttgccaggagacctgcagctccccagtggcccactggttctctgtgtttggcagagtcagaatgggctgtgggaaatgtccgcgggtgatctgttgaggcagtaggtcaaggacagggtatcttgaggcaggatgktgttgctgtaggtgtggagctgatgtggcacctgtggcttgggttttttttgcccaacacacagctgtggggaccacccagctcactttccctcaactgggtctccttctggtgtctgtcccagtatctggcccaatttgctagttttgtcccaagccttctacacccagatcactgggttattagatgctccaggccatgggggttccctcaggatgagtctgtggcttgcagccatgccacacccttcgcagccctgaggagggagacacacccagctcctgcaccagcctaaga

SEQ ID NO: 32954 - DNA, 553 bp, Homo sapiens
ccacattcattgcttcatacgttctctggatgatattcaaatgaacaggacaaagcttcatgaagaaaatccagggttcagttttccatttaccaaaaaggcttgaatgacagatgtccacattttcctaatttttctttttgcagtattttattattttctctcaacacgttttttgtttgtttttacttaaatcttcaatctcctatacatttttctcaagggtatagcctagtctatttccttcacttaaaagagtatgaagttggccgggtatggtggctcacccctgtaatcccagcactttgggaggccaaggtgggcagatcacctgaagtcaggakttcgagaccagcctggccaacatggtgaaaccccgtctctactaaaaatacaaaaattagccaggcatggtggtgggtgcctgtagtcccagctactcgggaggccaaagctggagaatcctttgaatccgggaggcagaggttgcagtgagctgaggttgtgccactgcactccagcctgggtggcagagtgagaccctgtctcaaaa

SEQ ID NO: 32955 - DNA, 859 bp, Homo sapiens
tccatcagtgtggatgctactgttcagggggagtggtgtcacagaagaagagaaaatgaaagactaagcctttgtttagggatacaagtgtttaaggaaaaggcaaggagaaatgagtgcacacaaaggacactgagaaggaccaaagaaagagggaggaggagacctaagggcctggcaggaatagctgttaccgtgaattggaggtctgctatgattcacatactattctgagaactccaggtccctcagtttgtaaatctgcaacagtcttgcaggtgggtggaattagccatgacttgggggctccgagtttaaataacatgtccaagtttagctgtccagccaaagtggcagatctgtgttttttttttccccaaagcccatgttcttttccaccccatgggaatggtggtggtagcagagatggaggctccagagtccagaaaacctcctcctttaggggacctcagtaacttgggcagatgtcaaattggaggaacttgagcattacaggtgccaatgagagggaggcccactgggctcatttctctgttggccccactgagcaggtcacatgacagggacctggacargaaggctgtttaaaatggaacatgaaaaacaatgccaggaatttaattgcaccgtgaattgtggccagaaaaggaacctagcaacaaactcattttctgttgggcacaaggcacagaggatctactataattatttctgttgttttccttgttggcacatgcctccctgtttaatatttccttccttgagtgcacatggtggatcagtttttatctaaggtagtggtgttagaattgtttagctacattgtaaagagtttgtg

SEQ ID NO: 32956 - DNA, 481 bp, Homo sapiens
aaaatagaagtctaagaactccgtttaaaatatgaaggtgggctgggctctgtggctcaggtctgtaatcccagcactttgggaagctgaggtgggtggatcacgaggtcaggagttcaagaccagcctgaccaacatggtaaaaccctgtctctactgaaaatacaaaaattagctgtgtgtggtggcatgcgcctgttatctcagctactcaggaggctgaggcaggagaatcgcttcaaccygggagttggaggttgcagtgagccgagatcacaccactgcactccagcctgggcaacagagcgagagactccattaaaaaaaaaaaaaaaagaaggtaactatcataagaaacagattgaagagtcaaaagtgattgtaagagggagttgaactgggggctgggcaggaactgggcagggacctgctgattttctttataagattttgtttttattttattttttatatgtatgca

SEQ ID NO: 32957 - DNA, 477 bp, Homo sapiens
ataaagtccaccctattattccacgtgtctgagacatttcaccaacatctcgtttagttttgcaacatctctgtgtagtaaagcaagggcaagcttcactctacaggcatcaagaagtcagacgacctttagaaaaatcccctaagtcagcagcaaacctgggaataaatccagggttttctgattcaacttttgtatctgcgtgtgaatgtttgctctagaccttgctrccttagtaaaatagaacaaagtactgtgtaaacagccagcaccttgtaaattctagataatgaccctgctcagcctagaagagatggtctgttcacaagggaagtattctccttttggggttctacacccattcccaatgctggtggagaaggtgtggctggactgcttgggcacagctggccccaggcatggcaggaacgcccttggctgtgcacagcggctggggttttattgcatttgtttggg

SEQ ID NO: 32958 - DNA, 602 bp, Homo sapiens
gcctgtaatcccagcactttgggaggccgaggcaggcagatcacttgaggtcaggagttcgagaccagcctggccaacatggtgaaaaccccctctctactaaaaatacaaaaattagccgggcatagtggtgggcgcctgtaatcccaggtactcggggctgaggcaaragaatcgcttgaacccgggaggcagaggttgcagtgagccgagatggccccattgcactctagcctgggcaacaagagcaaaaccctatctcaaaaaaaaaaaaaaaaagatagaatttttatcccatttaagggagagaaacacaagtgattcattatcaaaatcaactgtaaatatttttctttttgtttcgtttttgttgagacagggcctcattctgttaccaacgttggagtgcagtggcatgatcatagctcactgcagccttgacctcccaggatcaagcaatcctcgtgcctcaatgtcctgagtagctgggactacaggtatgcaccacaacacctggctaatttttaaatattttgtagcaatagggtcttgctacattgcccaggctggtcttgcactcctggcctcaagggatcctccca

SEQ ID NO: 32959 - DNA, 602 bp, Homo sapiens
gcctgtaatcccagcactttgggaggccgaggcaggcagatcacttgaggtcaggagttcgagaccagcctggccaacatggtgaaaaccccctctctactaaaaatacaaaaattagccgggcatagtggtgggcgcctgtaatcccaggtactcggggctgaggcaaaagaatcgcttgaacccgggaggcagaggttgcagtgagccgagatggccccattgcactctagcctgggcaacaagarcaaaaccctatctcaaaaaaaaaaaaaaaaagatagaatttttatcccatttaagggagagaaacacaagtgattcattatcaaaatcaactgtaaatatttttctttttgtttcgtttttgttgagacagggcctcattctgttaccaacgttggagtgcagtggcatgatcatagctcactgcagccttgacctcccaggatcaagcaatcctcgtgcctcaatgtcctgagtagctgggactacaggtatgcaccacaacacctggctaatttttaaatattttgtagcaatagggtcttgctacattgcccaggctggtcttgcactcctggcctcaagggatcctccca

SEQ ID NO: 32960 - DNA, 602 bp, Homo sapiens
gcctgtaatcccagcactttgggaggccgaggcaggcagatcacttgaggtcaggagttcgagaccagcctggccaacatggtgaaaaccccctctctactaaaaatacaaaaattagccgggcatagtggtgggcgcctgtaatcccaggtactcggggctgaggcaaaagaatcgcttgaacccgggaggcagaggttgcagtgagccgagatggccccattgcactctagcctgggcaacaagagcaaaaccctatctcaaaaaaaaaaaaaaaaagatagaatttttatcccatttaagggagagaaacacaagtgattcattatcaaaatcaactgtaaatatttttctttttgtttcgtttttgttgagacagggcctcattctgttaccaacgttggagtgcagtggcatgatcatagctcactgcagccttgacctcccaggatcaagcaatcctcgtgcctcaaygtcctgagtagctgggactacaggtatgcaccacaacacctggctaatttttaaatattttgtagcaatagggtcttgctacattgcccaggctggtcttgcactcctggcctcaagggatcctccca

SEQ ID NO: 32961 - DNA, 602 bp, Homo sapiens
gcctgtaatcccagcactttgggaggccgaggcaggcagatcacttgaggtcaggagttcgagaccagcctggccaacatggtgaaaaccccctctctactaaaaatacaaaaattagccgggcatagtggtgggcgcctgtaatcccaggtactcggggctgaggcaaaagaatcgcttgaacccgggaggcagaggttgcagtgagccgagatggccccattgcactctagcctgggcaacaagagcaaaaccctatctcaaaaaaaaaaaaaaaaagatagaatttttatcccatttaagggagagaaacacaagtgattcattatcaaaatcaactgtaaatatttttctttttgtttcgtttttgttgagacagggcctcattctgttaccaacgttggagtgcagtggcatgatcatagctcactgcagccttgacctcccaggatcaagcaatcctcgtgcctcaatgtcctgagtagctgggactacaggtrtgcaccacaacacctggctaatttttaaatattttgtagcaatagggtcttgctacattgcccaggctggtcttgcactcctggcctcaagggatcctccca

SEQ ID NO: 32962 - DNA, 630 bp, Homo sapiens
cttgatctagtcaaaatttaatcaagcttgggagtggaataaaaatattttyagctatgtaaagggctcacaaaaattactctccatgtattcttttttttgggaaactacctgtggattgcaaatggcaataaaggaaaaagcaaataaagaagacatgggccgggcatggtggctcactcctggaatcccagcactttgggaggccgaggtgggtggatcacttgaggtcaggagttcgagaccagactggccaacatggtgaaagcttgtctctactaaaaatagaaaaattagctgggcatggtggtgggctcctgtaatcccagctacttgggaggctggaggaagagaattgtgtgaacccgggaggtggaggttgcagtgagctgagatcatgccactgcactccagtctgggagacagagcaagactctgtctattaaacaaacaaacaaacaaaacccagacatggacccaggacattgaatgcaaccccgttgagaggaagagtatgtgggatggagaagtttaggtggatgacacagctgatggtaaaaattaaggaacagtatttacagagtgataagatgcaaacactgattactgcattaaccaaaaaataaaaaa

SEQ ID NO: 32963 - DNA, 630 bp, Homo sapiens
cttgatctagtcaaaatttaatcaagcttgggagtggaataaaaatattttcagctatgtaaagggctcacaaaaattactctccatgtattcttttttttgggaaactacctgtggattgcaaatggcaataaaggaaaaagcaaataaagaagacatgggccgggcatggtggctcactcctggaatcccagcactttgggaggccgaggtgggtggatcacttgaggtcaggagttcgagaccagactggccaacatggtgaaagcttgtctctactaaaaatagaaaaattagctgggcatggtggtgggctcctgtaatcccagctacttgggaggctggaggaagagaattgtgtgaacccgggaggtggaggttgcagtgagctgagatcatgccactgcactccagtctgggagacagagcaagactctgtctattaaacmaacaaacaaacaaaacccagacatggacccaggacattgaatgcaaccccgttgagaggaagagtatgtgggatggagaagtttaggtggatgacacagctgatggtaaaaattaaggaacagtatttacagagtgataagatgcaaacactgattactgcattaaccaaaaaataaaaaa

SEQ ID NO: 32964 - DNA, 1202 bp, Homo sapiens
ggctttgcacaggtacaaggccgagagcatttacctagcagtccctcacccagccgcttacccccatacacacttacattagtaacagccttggtgatcttgctgacagtttaagaagcagatgaggactcacatttgtgtcattaaaacacaaatccctttgcaaaactggatctcattcccagctgtgcgtgttagtggactgtcctcctcttcaaatatgaccaagctttttagaacagtcatgcaaacgtcctagaatccaactacagaagaatactgtaggacatggcatttatgaagccctatggtggttataagagggggattcattttacaaagatacaaagataaccagaagaatactcactttatctacacgtccaaacactcatccacatgcacacgcatacacacctacacatacagacatacatgcacaaagggtctcatataccacctcctgccagcgtcctaagttacggtgtccctcagaaacagaggtggcgttgtgggatagggtagttccaaattgcagccattcacacctgcacaatttttatatccaagtgcaatttttaagcttatttttatttttttatttttaaatttttttgagacggagtttctgtcgtcaggctggagtgcagtggtgcgatcttggctcaccgcaacctctgcctaccggtttcaaktgattctcctgcctcagcctcctgagtagctgggattacaggcgtgcgccaccacacccagctaagttttgtatttttagtagagacggggtttcgctatgttggccagactggtctcgaactcctgacctcaagtgatctgcccacccccaaagtgctgggattacaactgtgaaccaccgcgcccggccttacatttatttttaaaagaaactttctaagactagaagaaatggaaaacttctaacatggttcaccataaattgtaaaaataaacagctgcccatcagggtaaatcgtgtcagctcacacaccgcaagtaggggcgagcactgatcaggccgggaggtctggctctggaaagtcatgtcacagggactcatctgttgaggagggctcctccagaccctgctagcccccgatctgaggacagcacccgtctgtgttccgggaccatacacactgtgtgtgtgaaaatccagcccccagatgccgggagagggaccc

SEQ ID NO: 32965 - DNA, 1206 bp, Homo sapiens
gcatttcagaaacattatactaattggcactcccaccagcagagtataagagtatttaaatgactgcacaattttttagttatcctgttattttttcttaaactgatgcaaatctgttttggaaaccagataacataatataagtgtatgtatataaacatacacagacctatacatctatttgtatatatacatatgtgtatacacacatatacagataaaaatctttctccaaataatcttaatgatctgggcaccaatatgaatgcaaaaggcctttattgcctcttctacagaatagtgataaggaaactaattacaaaggacagaagagtgaagtctggataccgttctcatcacgtaatccacgtgaacatcagaaacgggacatatcaccgttgtgccccgcccgttaggatgcaatgacaaaaaccacagcatcaaacagactcttctactgtccccataaactactgaggtttcctagaaagtcaaatgtctcagcctcgaatctaccatcaaacagttcagtaagaaaaaaagtgttatttgcatagtacttgcaacttttctataagcttgacattgtttcaaaataaaacgaaaaatatagggtcagaggcacagtgggggaggaagggagggcgtcgtcacccctgaacgtcgtcaaaggccctgctcttggttccaggctgtgctgtcgtcttcaactgttattaattttcaaaggggcgctgtgggttcattttgcaggggccccacggattatgtgaccagtgccggtagcggctcccctgttgctaacctctggctttcctttgcttggcgcacatttctttgttgtgtacgtgtgggtgagcatttctgaatcctgacgctgggacctctcccttccagatctgcatgagtctgccatgctggaggacggragacggctgctctctcagattcttctccaagctcaacaaggcctcgtggttggcctcgggaataagcagagcttagattggcccatgtgcgaaatatttggccaggggtagtcctgccactggctccacggatctatcttggttcaagatgctcccttgatgaatatgcagattatgtaaattcttctctttttttcagcagcttaaccactaggttggaacgacggccaagttcagtttttcctctgttcatcagtcagttcttctacctcaatgc

SEQ ID NO: 32966 - DNA, 1206 bp, Homo sapiens
gcatttcagaaacattatactaattggcactcccaccagcagagtataagagtatttaaatgactgcacaattttttagttatcctgttattttttcttaaactgatgcaaatctgttttggaaaccagataacataatataagtgtatgtatataaacatacacagacctatacatctatttgtatatatacatatgtgtatacacacatatacagataaaaatctttctccaaataatcttaatgatctgggcaccaatatgaatgcaaaaggcctttattgcctcttctacagaatagtgataaggaaactaattacaaaggacagaagagtgaagtctggataccgttctcatcacgtaatccacgtgaacatcagaaacgggacatatcaccgttgtgccccgcccgttaggatgcaatgacaaaaaccacagcatcaaacagactcttctactgtccccataaactactgaggtttcctagaaagtcaaatgtctcagcctcgaatctaccatcaaacagttcagtaagaaaaaaagtgttatttgcatagtacttgcaacttttctataagcttgacattgtttcaaaataaaacgaaaaatatagggtcagaggcacagtgggggaggaagggagggcgtcgtcacccctgaacgtcgtcaaaggccctgctcttggttccaggctgtgctgtcgtcttcaactgttattaattttcaaaggggcgctgtgggttcattttgcaggggccccacggattatgtgaccagtgccggtagcggctcccctgttgctaacctctggctttcctttgcttggcgcacatttctttgttgtgtacgtgtgggtgagcatttctgaatcctgacgctgggacctctcccttccagatctgcatgagtctgccatgctggaggacggaagacggctgctcwctcagattcttctccaagctcaacaaggcctcgtggttggcctcgggaataagcagagcttagattggcccatgtgcgaaatatttggccaggggtagtcctgccactggctccacggatctatcttggttcaagatgctcccttgatgaatatgcagattatgtaaattcttctctttttttcagcagcttaaccactaggttggaacgacggccaagttcagtttttcctctgttcatcagtcagttcttctacctcaatgc

SEQ ID NO: 32967 - DNA, 586 bp, Homo sapiens
ttggggttacaaaaaatgatttcataatgtaaaataagcaggctgatttagagttgagtggaagaaagtgaagacccttccatcacacttcaataaattcacacttgtaaatattatcttgggttgtgaaatggaaagctgtgttatgcgayagtgaagcagatgattaaagtgccacttttggtattttgttgcttgggccatgtgcttatcgaggctgggacattaattaaggagcttggtagcaaactgacgaaatactggatcttatggactatattttgaagcctcagtaacgtcctaccgaaaaaaaggcaagttcaggtagatgcagtcctgtctgaaggcagagacagaagaaaatgtgtttttgccaagagagatattttctgcatgcagcccagaatccaagaccatttaggggtctggttttacaggttttgaaaatcctaattctctgctttgagttcaggatatttacacaaagtcaggatggtgtgttcagacaggaggtgggaaacataataggaggtcagactggggcctggggaaagtatgttttcacaagctccttcaggcaagttct

SEQ ID NO: 32968 - DNA, 610 bp, Homo sapiens
atatgtatacatatagatgaacatatatgaatatatgtatacatatagatgaatatacgaatatatgtatacatatatacgaatatatatgaatatatgtatacctatatatgaatatatatgaatatatatgtatacctatatatgaatatatatgaatatatatgtatacctatatatgaatatatatgaatatatatgtatacctatatgtgaatatatatgaatatatgtatacctatatgtgaatatatatgtatgcctatatatgcatatatatgtayacatatgaatatatatgtatacatatgaatatatatgtacacatatgaatatatatgtatacatatgaatatatatgtatacatatgtatctccatctgtatatctacctgcaggaaaatattatatgtagttttatatatacatatattcggtgtgtgtgtgtgtataggtgtggatgtgtgtttatgcgtataatttttggttatttgttctgtttctctgaagaaccctgactgcatcacctcatctatctgcctatctgtctatcatctatctgtctacccacctacctactgggacctctgtgtgtgcataggtggttgca

SEQ ID NO: 32969 - DNA, 2444 bp, Homo sapiens
gcccacaaaaagttctgctcttgccagttgccctgaagctctcatcctggcctctgcacccactcacctatgtgctcccctccctcaaggggttgaaagctgtgagctgagtaaatgagccaaccttttgcaagtccctgaaggggtcaagggaactatatcccatttcaatatgaggcaagttatccaatcattgcatactaattgcaaagagatctctcatatgaatttcttctgattatcaatctttcaaaatatattgagatttaagggataatcacatcaaaagaaacgacaagtcatagtcctgcctcaaaaaaatttctttactagaggagaaacagaaaaatgcaattaaatgcatgttaacgtctttatataaaaatcacacacaatcaaatgacatttattcacatcacagctaaagctggggtgattcagataatgggacccaaatgaggttagtgatcaagttttattagtggtgattcttyaataagtttgcttgtagaagttaaacacacgatgtttactgactcagaattcccacgcagcaaatctgattatatttattaagcattatctatgaaacaaaacttttttatgcactaggttaaaaaaatagtaagaaaatttgtttgtatttttaaaggaaaacaaacatttttttttgtgatctgtaagggaaagaaaagtatttacatgttaaggaagtaaattaaatgggatgttattgccgtgaagaattgctggacagttcaagtcaattgagattaatagtaatatttgtatttgtataattatttacatataacaattatctttcttagagttgtccttaaatagttttgggggttaaatttttactatctccattttattgatcatgaaagtgagactcagaatattcaaaggatactggaaaatggaagagtctgaattcaggtttcctgaatcctgattttgctctatttctgcatatatgccctggccgtgagaagagcctggaaatacatctaatttgatccagcaattaaatgaactcttaaaaaccagagggcccaatggaaatctattagtgcatataattagtcaagcagccaaatagctttcttctcccttggggatccctcatgctgtctgattgtttcaaattctgctgatatgtcattgtatgccattttatatggtccttttgtttcttcgttttttgttagatgattgaaactcactgacaaaattagacataaccaagtgggtcatactgtgagtttttaccttaaaaagtatcccttttctgttaatggaaaaaacaaagccctggttttcaaaatattttcttgctgcaatggaaatgcaaagttgatttagtatgcccatgagtttctatgtgacatcctgatactctgatgagaaaaaaaaaaatctaaaactattcatcactacagcagtagtgtggaattcttttcctaccaccatccattgtcaaaggagttaactgacctaagctcaccatgtctaagtgcattttattttggcatcagccaaaacactggcatattctccttgaaaaagactatgcattgtatctgggaggaatcaggaaacagtaatgagttattgctggttatctcttttttttttttaatttagtcccatgttaaaagagaactttaactgctatttatgagcttcatgccctagattacaagactttggcagaaggtggaattataacatcaaagtctaccgaacctattctggtttattttcatgtgtttatttgtaattcatacctcattacaaaataagcaattcaggacaaatgctgcagaagtgaacataacaggtgttcactggattgtaccaggcaaaccagaaggtatgtttcattctgaccacgtaccacactatcacagcacccttggtaagcggcaatacctcagaaaaacatagttgcatagtgtgcctaaggagactgggtgctagggttcctatcttgtcatataatcctgggaacaatactgggcctattatttgtttaataataggttaggaagcctaactcatttaataatgagttagggagcctatttacttatttaatgtatttatttgtagcagcttaaagaaaaacatattttattaattagtagaaaactataaaatttaaatgatgaccccaggtgcagtggctcacacgatcccagcactttgggaggccaaggtgggaggatcacttgaggccaggagttcaagaccaccctgggaaacagtacctcgtctctacaaaaataaaaattaaaagattagccaggtgtggtggcacgcacttgtatcctagctactcaggaggctgaggtgggaggatggcctgagcccaggagttcagggttgcagtgagctatgatcatgccactgcactccagcctgagtaacagagc

SEQ ID NO: 32970 - DNA, 2444 bp, Homo sapiens
gcccacaaaaagttctgctcttgccagttgccctgaagctctcatcctggcctctgcacccactcacctatgtgctcccctccctcaaggggttgaaagctgtgagctgagtaaatgagccaaccttttgcaagtccctgaaggggtcaagggaactatatcccatttcaatatgaggcaagttatccaatcattgcatactaattgcaaagagatctctcatatgaatttcttctgattatcaatctttcaaaatatattgagatttaagggataatcacatcaaaagaaacgacaagtcatagtcctgcctcaaaaaaatttctttactagaggagaaacagaaaaatgcaattaaatgcatgttaacgtctttatataaaaatcacacacaatcaaatgacatttattcacatcacagctaaagctggggtgattcagataatgggacccaaatgaggttagtgatcaagttttattagtggtgattcttcaataagtttgcttgtagaagttaaacacacgatgtttactgactcagaattcccacgcagcaaatctgattatatttattaagcattatctatgaaacaaaacttttttatgcactaggttaaaaaaatagtaagaaaatttgtttgtatttttaaaggaaaacaaacatttttttttgtgatctgtaagggaaagaaaagtatttacatgttaaggaagtaaattaaatgggatgttattgccgtgaagaattgctggacagttcaagtcaattgagattaatagtaatatttgtatttgtataattatttacatataacaattatctttcttagagttgtccttaaatagtttkgggggttaaatttttactatctccattttattgatcatgaaagtgagactcagaatattcaaaggatactggaaaatggaagagtctgaattcaggtttcctgaatcctgattttgctctatttctgcatatatgccctggccgtgagaagagcctggaaatacatctaatttgatccagcaattaaatgaactcttaaaaaccagagggcccaatggaaatctattagtgcatataattagtcaagcagccaaatagctttcttctcccttggggatccctcatgctgtctgattgtttcaaattctgctgatatgtcattgtatgccattttatatggtccttttgtttcttcgttttttgttagatgattgaaactcactgacaaaattagacataaccaagtgggtcatactgtgagtttttaccttaaaaagtatcccttttctgttaatggaaaaaacaaagccctggttttcaaaatattttcttgctgcaatggaaatgcaaagttgatttagtatgcccatgagtttctatgtgacatcctgatactctgatgagaaaaaaaaaaatctaaaactattcatcactacagcagtagtgtggaattcttttcctaccaccatccattgtcaaaggagttaactgacctaagctcaccatgtctaagtgcattttattttggcatcagccaaaacactggcatattctccttgaaaaagactatgcattgtatctgggaggaatcaggaaacagtaatgagttattgctggttatctcttttttttttttaatttagtcccatgttaaaagagaactttaactgctatttatgagcttcatgccctagattacaagactttggcagaaggtggaattataacatcaaagtctaccgaacctattctggtttattttcatgtgtttatttgtaattcatacctcattacaaaataagcaattcaggacaaatgctgcagaagtgaacataacaggtgttcactggattgtaccaggcaaaccagaaggtatgtttcattctgaccacgtaccacactatcacagcacccttggtaagcggcaatacctcagaaaaacatagttgcatagtgtgcctaaggagactgggtgctagggttcctatcttgtcatataatcctgggaacaatactgggcctattatttgtttaataataggttaggaagcctaactcatttaataatgagttagggagcctatttacttatttaatgtatttatttgtagcagcttaaagaaaaacatattttattaattagtagaaaactataaaatttaaatgatgaccccaggtgcagtggctcacacgatcccagcactttgggaggccaaggtgggaggatcacttgaggccaggagttcaagaccaccctgggaaacagtacctcgtctctacaaaaataaaaattaaaagattagccaggtgtggtggcacgcacttgtatcctagctactcaggaggctgaggtgggaggatggcctgagcccaggagttcagggttgcagtgagctatgatcatgccactgcactccagcctgagtaacagagc

SEQ ID NO: 32971 - DNA, 2444 bp, Homo sapiens
gcccacaaaaagttctgctcttgccagttgccctgaagctctcatcctggcctctgcacccactcacctatgtgctcccctccctcaaggggttgaaagctgtgagctgagtaaatgagccaaccttttgcaagtccctgaaggggtcaagggaactatatcccatttcaatatgaggcaagttatccaatcattgcatactaattgcaaagagatctctcatatgaatttcttctgattatcaatctttcaaaatatattgagatttaagggataatcacatcaaaagaaacgacaagtcatagtcctgcctcaaaaaaatttctttactagaggagaaacagaaaaatgcaattaaatgcatgttaacgtctttatataaaaatcacacacaatcaaatgacatttattcacatcacagctaaagctggggtgattcagataatgggacccaaatgaggttagtgatcaagttttattagtggtgattcttcaataagtttgcttgtagaagttaaacacacgatgtttactgactcagaattcccacgcagcaaatctgattatatttattaagcattatctatgaaacaaaacttttttatgcactaggttaaaaaaatagtaagaaaatttgtttgtatttttaaaggaaaacaaacatttttttttgtgatctgtaagggaaagaaaagtatttacatgttaaggaagtaaattaaatgggatgttattgccgtgaagaattgctggacagttcaagtcaattgagattaatagtaatatttgtatttgtataattatttacatataacaattatctttcttagagttgtccttaaatagttttgggggttaaatttttactatctccattttattgatcatgaaagtgagactcagaatattcaaaggatactggaaaatggaagagtctgaattcaggtttcctgaatcctgattttgctctatttctgcatatatgccctggccgtgagaagagcctggaaatacatctaatttgatccagcaattaaatgaactcttaaaaaccagagggcccaatggaaatctattagtgcatataattagtcaagcagccaaatagctttcttctcccttggggatccctcatgctgtctgattgtttcaaattctgctgatatgtcattgtatgccattttatatggtccttttgtttcttcgttttttgttagatgattgaaactcactgacaaaattagacataaccaagtgggtcatactgtgagtttttaccttaaaaagtatcccttttctgttaatggaaaaaacaaagccctggttttcaaaatattttcttgctgcaatggaaatgcaaagttgatttagtatgcccatgagtttctatgtgacatcctgatactctgatgagaaaaaaaaaaatctaaaactattcatcactacagcagtagtgtggaattcttttcctaccaccatccattgtcaaaggagttaactgacctaagctcaccatgtctaagtgcattttattttggcatcagccaaaacactggcatattctccttgaaaaagactatgcattgtatctgggaggaatcaggaaacagtaatgagttattgctggttatctcttttttttttttaatttagtcccatgttaaaagagaactttaactgctatttatgagcttcatgccctagattacaagactttggcagaaggtggaattataacatcaaagtctaccgaacctattctggtttattttcatgtgtttatttgtaattcatacctcattacaaaataagcaattcaggacaaatgctgcagaagtgaacataacaggtgttcactggattgtaccaggcaaaccagaaggtatgtttcattctgaccacgtaccacactatcacagyacccttggtaagcggcaatacctcagaaaaacatagttgcatagtgtgcctaaggagactgggtgctagggttcctatcttgtcatataatcctgggaacaatactgggcctattatttgtttaataataggttaggaagcctaactcatttaataatgagttagggagcctatttacttatttaatgtatttatttgtagcagcttaaagaaaaacatattttattaattagtagaaaactataaaatttaaatgatgaccccaggtgcagtggctcacacgatcccagcactttgggaggccaaggtgggaggatcacttgaggccaggagttcaagaccaccctgggaaacagtacctcgtctctacaaaaataaaaattaaaagattagccaggtgtggtggcacgcacttgtatcctagctactcaggaggctgaggtgggaggatggcctgagcccaggagttcagggttgcagtgagctatgatcatgccactgcactccagcctgagtaacagagc

SEQ ID NO: 32972 - DNA, 1287 bp, Homo sapiens
aactttgtacatgaagatagatggtacttaaaaacggtgagaaagaactgcataaatgccagaacaataacaataacagcaaaaatttatctcccatctagtaagtgctgaaaagaagaagaaaccaatttaaagtctttcctaattatagtgcttgatccttaatttatctctttttaaggattgaccccaatagtccatacatcttcctgatattgttgtaaatattcagataatacctcaaattaggctaattttataatttgattacattgacatttaactcttacctggcctcagatattgtatctccactactgttagtaattcatttaactttttcatactgtctgaaattttaccttaaatttattcgtaaacagcctatttcacaatgccataacccctggtcatcagttacatattagcaggtcacttgaatagctcccctgaaataaataatactggggcaaggaggaatttgatggggaagaggaaggcaatttagtagtttgggagtttatggggatgagagtaaggataagggctggaaaaagctgaacacagcacgcaaacatgtaccagggtcgaagaatgagtgtacatggtacttgaagattctgtgcaatggtctgaatgtttgtgtcccctcaaaacctatgttaaaatcctaaaccccagggtgatgatattgagaggtggggcctttaggggggtgattaggtcattaggacaagtcctcatgaatggaattagtgcccctataaaataggcccaagcaagctccttcaccccttccaccacatgaagacatagagagaaggtgcccttccatgaaccaggaagtagacccccaccagacatgaaatctgccaggagactgatctttgacttcccagtctccagagtgggtgaaataaatttctgtcgtttacatgccacccagtttatagcacttctttatagcactctgaacaggctaagatgttacgcgataacagtcctagaaagtcagaaattagcacaaaatagaattggacagtgccaaacaccacattttgtccagcatcaactttccatatggtgtgtctctgaattacttttagaatcctttgattactaccaacttgcatttgtataaagcatgctaacaattttcccagattgcttcacagtttcattctgccttctacattgtcacattttgttattgatcaactcactgtggtcccttacttttttcayaaatcataaagaagaatgatgacccttgattaataccaatga

SEQ ID NO: 32973 - DNA, 1513 bp, Homo sapiens
acatctacattaactattgcatcatggacttcatgaagccaagcccccaaattaatctccacctccttctctggcattcaggatataaactcaccagaaacattccaaatgcagaagtggttctcatctttttttgcagcttaagatctgccttggtatttgaagagatataaactagatcaatttctttcacaggatcaactaaacaggttgtacttttttattattaatatcaatacttagattttagatatataaaatatagaatgaaaattatrtattacaaagctcttaaaaataaaatatacaaagaccaaagtcttgattgatactttagttaattaatgatgtgaagcatttaaaaccttttaaaataatttgttgttaaaaataatattttacatttatgtagtattttgttgcttattgctttaatgtaaaattacagtaccattgctatcttaaaagtgctgaatgctggacgtgttctccattttaccaatgagaaaataaagcaagcagggtagaaggaggtagaatagagattgacttttagttttgtgttcctgtgataaggggtcttgcaaataggggcattactttcatgtaagaaacttcagataaatatgacagaaatccaaagtccttggtaaataattaatatgtaggtcattgacatatattgccttttaaatctgtgaatccttacttagtagaaactagagagcttcttgatctaataattgaacttaacaaatatttctgaacatctactttgtgtcatagtgctggagattgggatagaaacatgtacaaaagtcacttttgcctcatacaggtaaatctaagaaagtagggactatgagaacccctatgtatctatatccaccatagtattctagcactgactacagggcctaggaaaagggtaggcattcacatagggagtatttgctggataaaaggcaggttggaagatgcaggaggggagtatgcagaaagaaaggaagaaagagaggaaggagagcgggaaggaaaaacactttctgagtttaattgaatttataagtcacaattttaacaacttttttgatgtttatttctgaacaactgacctacatactcagaataaaaaattgacaatttctaactgaaatagatcttttgagaaaatggggatcacataggaagtaaatccatacattgtaatatgagacaatttaccaaaaggaatagaatgagaaaagatattttattacatgccacctactttgcctctcagaccaaaattgactatgaaggagtagctggaagtcagccaaccacttaatgataaatctaccactcccagctgactataagccaattcttataaacttggctgaacaccaagaaagtaattcacatgagtaagcaaaccaataggcaggacaaatcgtggtgcattttatacacatttcttctagtgaaagatctattttctgagactaaggagaaggcttggggaacaagt

SEQ ID NO: 32974 - DNA, 551 bp, Homo sapiens
  misc_feature (1)...(551): n = A,T,C or G
gtcttccaatcatttgaagaagtgattgtgtttatttgctctgtatcctttacttgactttcatttaaattccacaaacattttctgaacacctaccaagtgccaggcaccgcactagaccctggggaaattacaaagataaagaagaccttgtcctagtttcattcttgcagaagagcccagcatataaacaaacaagtatttattgcactttgcagaaagaattagggctaattagttattcctgtacctagtgttgggagcccaggacaaggtgttaattctgacagcaggggatatggragtgatgttgagggatgagcatggtgttgataaacaaggaaaggagctagatttatctttgcgggcaaccaatacaaaacaggaagcaacattcttcaattgttttcatacatagttntgtctgtaggttagtacgcatagataatatgtgtgtgtgtgcatatatgggggtctgtgtctgggtatgtatgtgtaggaaagagtcactgagatgcaaagagaactatttcatatctggccagccatag

SEQ ID NO: 32975 - DNA, 1198 bp, Homo sapiens
tccatctccaaaaaaaaaaaaaaaaaaaaaggattagcaaaaataacccctctccatttaggccttggtggctatgattgctaatacaatgagtttagtttatagaaacagttccaaagtattacacaaggcaatcagctggatacatgagagcttcaaaaagtatgactcctttgtcagctaggctaaccaaaaacaggttgtgtaaaaactgaaactctgcctagaaaacctatatgaaacttagtattattgtggcaatatgatttgataacttctgatcatgtcttatccaatatttcagacaattttctatgttaattagttgacagttacaatatcattattatgggcatgtgttatggtcagcagagcaatgcatgagttttattttcctataacattttgttatgaaaaattaaaacattcagaaaagttgaaagaataatgaactctcatttatcctatgcctagatgaaacaaaaatattagaattttgctatatagcatgcagtttattttctttctttcttttttttttttttttttgaggtggagttttgctcttgtctcccaggctagggtacaatggtgcgatctcggctcactccaacctctgccttctgggttcaagcaattctcctgtctcagcctcccgagtagctgggacttcaggtgcccaccaccatgcctggctaatttttgtaatttttagtagagacggggtttcaccgtgtaggtcaggctggtcctgaactcctgacctcaggtaatctacctgcctcagcctcccaaagagctgggattgcaggtatgagctactgtgcctggccagcctgcagtttattttctttagtgcttgtagtagtgtttttktttttttttttgagacagtctcactctgttgcccaggctggagtgcagtagtgagaatttggctcactgcagcctccaccttctgggctcaagcagtcctccttcttcaacctcctgtgtagctgggactacaggcatgtgccaccatgcctggctaatttttaaattttttgtagagacgaagccttggtatgttgcccaggcatgtcttgaactcctgacctcaagtgatctatccccccgactcagcctcacaaagtgttgggattacaggtgtgagctatttggcctggccaattactgggttttttttttttttttt

SEQ ID NO: 32976 - DNA, 1198 bp, Homo sapiens
tccatctccaaaaaaaaaaaaaaaaaaaaaggattagcaaaaataacccctctccatttaggccttggtggctatgattgctaatacaatgagtttagtttatagaaacagttccaaagtattacacaaggcaatcagctggatacatgagagcttcaaaaagtatgactcctttgtcagctaggctaaccaaaaacaggttgtgtaaaaactgaaactctgcctagaaaacctatatgaaacttagtattattgtggcaatatgatttgataacttctgatcatgtcttatccaatatttcagacaattttctatgttaattagttgacagttacaatatcattattatgggcatgtgttatggtcagcagagcaatgcatgagttttattttcctataacattttgttatgaaaaattaaaacattcagaaaagttgaaagaataatgaactctcatttatcctatgcctagatgaaacaaaaatattagaattttgctatatagcatgcagtttattttctttctttcttttttttttttttttttgaggtggagttttgctcttgtctcccaggctagggtacaatggtgcgatctcggctcactccaacctctgccttctgggttcaagcaattctcctgtctcagcctcccgagtagctgggacttcaggtgcccaccaccatgcctggctaatttttgtaatttttagtagagacggggtttcaccgtgtaggtcaggctggtcctgaactcctgacctcaggtaatctacctgcctcagcctcccaaagagctgggattgcaggtatgagctactgtgcctggccagcctgcagtttattttctttagtgcttgtagtagtgtttttttttttttttttgagacagtctcactctgttgcccaggctggagtgcagtagtgagaatttggctcactgcagcctccaccttctgggctcaagcagtcctccttcttcaacctcctgtgtagctgggactacaggcatgtgccaccatgcctggctaatttttaaattttttgtagagacgaagccttggtatgttgcccaggcatgtcttgaactcctgacctcaagtgatctatcmccccgactcagcctcacaaagtgttgggattacaggtgtgagctatttggcctggccaattactgggttttttttttttttttt

SEQ ID NO: 32977 - DNA, 1880 bp, Homo sapiens
atatccctttcccatctaattgtcctatgaccctgggtgtgcctcgcaaactctttaaaaactattgcctcaaccttcatcatatggaatatgtcacttcaaacgtttgctttaatgattaatgagataatgtgtatgaaatacctgcacatactgagtaatcaataaattttcactgaatcatgatcttccctctacatctgtttgtggcttctcaaagaaatattttgtttggcaattttaaaaaaatctatatctagggcagattattctctgagggcaagtgtttgcaaacattatatttctcttccaacatttctttcccatgaagaaaatacctatgtttttccagtggctaggttaaactgcatcacagggtctttctcatacctctgacataaacccttgcattataaatattttgtaggaatataagaatcgaacagttttgatggcttcatttacaatttaagtagctatatcatattccctaggaactaagatgccacaatgtgtaccatatttgttatttgaaacaaagctaaagacttagtcaatagctttcgaataggcccaatttataatgtaaatgatgcatgcagatgctgtaaaaagtaataataatttaaaacccctatatcctgtcgtatattttgatagcagctacaaggaaactgctagcataattctcttgatggctttctgtgaatgtattgaaccaatccattaagcctcgataataagccaattaattgtttagaaacattaccccagctcttgtgtgtggttttcctcacacagagacaggtgcctatttatctcacaggagaaatgaccaagttagatatcaatactctccatgagcgagttctctaaaatggatttgctatcgatctgtccattcgctattgttagcaaacttgctctacaccatgaggcctctgaattttttacccctacttagtaccatgaatcattcttcttctaaccaaccaaaataaaattagagtttgcatgtttatatatagggttttttcctacaagtgcaatattgattttcctcaaaaagtatacttttcttatggyttaattacatatagatttttgaggatttacacgtgctatataaactaatgtcatttctcaataaagtttaatttgactgcaaaataatgaagggaggaattgtatccttcctctcattttacaggtaataagactgaggctcagagagaccaaatgatttgcagtaagacagacctgtgtgaaactctggctctgacacctgccattagccaaacttgctcttcttaaatcacagtttactcacttcaaaatgggaacaactctagtgttcacctctgctagttgttatacaaattaagtggtttatataaagctctcagcatataataaggactcagtgttactactgtgaggcacagatctgtaattacttccctaccttggttcttacacgtagcacattgaatctcatgcaatgtctgtttggtttttggaaatcaaaaatcatacaggtataagatttaacatcactggggaggcatgaccccagtccaaaatctgtggctcacattgccaagctgcaaaaggcaaaagctaaagaaattccactaaacttggttaaatgtatactgttgaggtttctgtatataaaaataataaaaattctttttcaaaatatgtcatcagatatcagcatttctatatggttcaacctaaattctttttttgctcattgagaaatagactgagattttgagggcaagtattgtatcttcttcatctctttacaatccaagagcctggaacacactaagcgctcaatgaaatgtaaataatatattataaaacatgca

SEQ ID NO: 32978 - DNA, 514 bp, Homo sapiens
tgattatgttttttctgtcaagagccagagaaatacttgatattcttagttgtgtttctgtaatagttaataaattacacaacaaaaacctgactatataaatctattggtctaactacgtatttgtaacttgcacagtagtcaagcccttttgttactttgccccatcgtgctcttaaagccagccttgcagatctgtgcagaaacccagccccattttttttcctttagaacagccttccccattcctcaaaatggaattgaggaaatcagcattccttagyagattcctggcttcagtttttatccacggctgggaaaggagtgacctgcaaggctgctttaaacaccctttggcgtggcctgaaatcaaagccgcacccacactggagtgcagttgtctcaaatgagaactcactccctcagggcaggcacatccaggaagtgctaagacacttaaaagttcctagtgctggccaggtgcggtggctcaagcctgtaatcccagcacttt

SEQ ID NO: 32979 - DNA, 571 bp, Homo sapiens
gtgagcatcttggaagcagatcctgcagccccagtcgtcagacagctgaagccccagccaagagcttggctgaacctcatgagagaccttgagtcagagtcaccgacctaagtcactggtaaatttctgacccacagaaactgtgtacaataatacatgtttattgtggctgcaagaccmtaaattttgggatgacttcttatgcagcaatagataactaatacatttcacaaaaaccatttattgaacaattcattttcctactaatttgagatgctacttttgctatacgaaattgctctttgaatttggatctttgctggattttctgctaagttccatctagttccatctatctactccattgttctgattgagacgtaaaagctttattttatgttttaatgtctggtatggtaaattctgcctaccttccttcattgatctaatctcaaaaattatgtcaccgtgattattagaattatactgtttcttcaacttttaagttctggggtacgtgtacaggatgtgcaggtttgttacataggtaaacatgtgctatggtggtttg

SEQ ID NO: 32980 - DNA, 1105 bp, Homo sapiens
ttccaccttgctcaatgcgtgtgtttggcaagctttcccatgacaatgcctggggtggacgtccactcatctgcctcctatgcccccttccttcccttcaggacagcccctggtttcccgtggggaatcacccgcctcgtctcagtccagggctcttgtggtgccgcccactctcctcatcaccagtgagcagtgacctcacctcacccagggggttccacccctgggccctgggactggtcatggatgagcatgtcaccccagccaggccaacgacaccatccccaggacagttttaaacatgtatcacaaaaatgttcttcacttttctcattgagttttctactaggagctctctttgccactgagagcatgagaatgaagccagcccagaggaaagtgtttgactattagaaaccggttgtttgactatgagaaaccggttgtttgactatgagaaaccggttgtttgactatgagaaaccggttgtttgactatgagaaaccggttgtttggctatgagaaaccgtttgtttgactatgagaaaccggttgtttgactatgagaaaccggttgtttggctatgagaaaccgtttgtttgactatgagaaaccggttgtttgactatgagaaaccagttgtttgactatgagaaaccggttgtttggctatgagaaaccggttgtttggctatgagaagccggttgtttgactatgagaaaccggttgtttgactattagaaaccggttgtttgactatgagaagccggttgtttgactatgagaaaccactcatttaatttgcacacctttaaaaaaaaaaaaagtaactttacggtggagaaatctggcaacctcagccaagcaatcaaggggtgaggaaatggcactgtttctgtagtcttcttcccccaaacccacagccctagtccaatcatgagaaaaatatccgacagtctcaatcgagggatacgctacgaaatgytcgaccagccctcctcaaaactgtccaggtcatcaaaaccaggaaacaaagggaactgccacagccaccaggagctaaggaggcctgacaagtaaaggtgacgtggaatcctgcata

SEQ ID NO: 32981 - DNA, 1105 bp, Homo sapiens
ttccaccttgctcaatgcgtgtgtttggcaagctttcccatgacaatgcctggggtggacgtccactcatctgcctcctatgcccccttccttcccttcaggacagcccctggtttcccgtggggaatcacccgcctcgtctcagtccagggctcttgtggtgccgcccactctcctcatcaccagtgagcagtgacctcacctcacccagggggttccacccctgggccctgggactggtcatggatgagcatgtcaccccagccaggccaacgacaccatccccaggacagttttaaacatgtatcacaaaaatgttcttcacttttctcattgagttttctactaggagctctctttgccactgagagcatgagaatgaagccagcccagaggaaagtgtttgactattagaaaccggttgtttgactatgagaaaccggttgtttgactatgagaaaccggttgtttgactatgagaaaccggttgtttgactatgagaaaccggttgtttggctatgagaaaccgtttgtttgactatgagaaaccggttgtttgactatgagaaaccggttgtttggctatgagaaaccgtttgtttgactatgagaaaccggttgtttgactatgagaaaccagttgtttgactatgagaaaccggttgtttggctatgagaaaccggttgtttggctatgagaagccggttgtttgactatgagaaaccggttgtttgactattagaaaccggttgtttgactatgagaagccggttgtttgactatgagaaaccactcatttaatttgcacacctttaaaaaaaaaaaaagtaactttacggtggagaaatctggcaacctcagccaagcaatcaaggggtgaggaaatggcactgtttctgtagtcttcttcccccaaacccacagccctagtccaatcatgagaaaaatatccgacagtctcaatcgagggatacgctacgaaatgttcgaccagccctcctcaaaactgtccaggtcatcaaaacmaggaaacaaagggaactgccacagccaccaggagctaaggaggcctgacaagtaaaggtgacgtggaatcctgcata

SEQ ID NO: 32982 - DNA, 517 bp, Homo sapiens
tgccagtgggactggggtctgttatgttgtacagcaaaacgcaatgaagttaaggacctcgagaggagttgctgatcctgggctatccaatggagtcctaggtacagtcacatgtgtccccataagatgggcagagggaaatcagaagcaccacagaggacagacaagggtcttgaagacagaggcagagactgggggatgcagccacaaaccaaggaatctcagcagccaccaggagacaaagatagattctctccagggcctctggagggagtgggacctgctggcaccttgattccagacctcgggactcagagcagcaagaggagacatttctgttattctcagccacctggtttgtggtgatttgttacagccaccccaggaygcgaataccttccctcacatgcctaagctgagacggttggaaccacagggcaactggacacacaccccgactctctgcgctgcacttgggctgcctcccagcatggcagtcccaatggtcagacttcac

SEQ ID NO: 32983 - DNA, 516 bp, Homo sapiens
agtgacttagagaacatgggctttcctcacggtggaatttcatatgcacagggaggagaagataaatatgtgtgtgtataagagtccccagggtcctatcagaggcaatgaagcattcttgtgccaggttatggtggcggcttgagggcagcatttccatccagccaaagaaagggccatgacttttcataaatagttcccttcttgggaaaatgagataagctgtataagcagaaaagtgttaaccaagtagaccgatgaaagctgagttgcgtggagttgcaatgctgctgtgcattctgaggaggttactcaaggaaactccatgtcttcastttaactacctgtctgggtgtctatcttcaaatcattggttaatcaatattcaattcatcaacctattattggttatacttgttagcatcttgaaacatcttttggcttacataaacaaacacacaagttttattactgtaaaaagatttggaagatttttgtttgttttctttttttctc

SEQ ID NO: 32984 - DNA, 601 bp, Homo sapiens
tgtctcccctgtgcccaaatctcttccctactccatgcaagtgttcctaagagaattctccagtaaacctcctttatacaaatctctatctcagagtctgtatccaggtaaccaaacatccaaggayaacatccaagcagtaaccacagtaaatctgaagaaaggtgtgccattccttctaaatgcagtaacaaaggagatggaatataacattaaaagagctaatgctgacctctgttatgattcttaatgattaatttgcaaagttccccctcagagtagtgattctcaaccagaggtaaggtgggggtactttgttctcatggggaaatttggaaatgcctggagatatttttgatcatcatgactggaaggatgaggaattgctaccagcatctgctggagaggggctagggatgctgctagacatcctaaactgcacaggacaacctccacaacaaagaattaactgggccagaatgccagtagtgttcctgtggagaaaccctcccctagaaatatcaaatgcatgtggtatatcattcaagtgaattattccctgtcttgaagtcaggatatgtaatgtttaccaactggtcct

SEQ ID NO: 32985 - DNA, 1860 bp, Homo sapiens
aacattcatacaagtctttgygtggacctgtgttttccatgtagatggatcttaatctttaaaattcaaaattcccaggaatttgagaaaataagagaatgaaggaccaagcactgagatattctatttagagtttggatagaagagaagtctccaaggcagacttggaaagaaaggccagagaagtagaagcaaaccagttaagcatgatgtctctgaagccaagaaagaaaaggatttcaaatgtaggacttgacagctctgacaatgctgctgtgaagcaagataggaggtgaactgaagagtgtcaattatatttgataatgtccaagtgactgacaaccttagcaagatgaatttaggtgaagaagggtggtgaaaaccaaattggagttagcccaaaagcaaataaaaggtgaggaagtgaaataaatgtgtatacaagagttcttagaaaattgactgtgaaagaggtgattgaggggaaggtagagttaggaagaactgttttaaataagagatacaaaagcatgttggaatgatgatgggaaaaattcaatttgggcacagacacagggaaagtgccctatattaatccaatatgggcattttattatagaatgcatatgacaagggaactgagggtatctgcaagaaagatatttaaatgaacatgaaatgtaagtgaattgggaagaaaataaagataggagatgaagaggttgatggatggatgctcttaatgaagtaatgctgtagtggaagtggggaagaatagaagtagtggctgaataatggcaagtttgaggaagtgacttcagagcaaggcagtctctggcaatgacaattctagagtgtgaccatggaagtgaatggccaagtcaaagtgcaggaaaagtcatcatcactgtggaggtcaggcaactaagagacaaggtgcctactgtacaggttgtccacataggcattgaagttgccaagggctaagacaagagtgaggctagaaaacaacactgacaacaagcatactcatttctaggaaaaggtcagaccccctggtcaagatgaactcaacatgggaaggaagcattctaggggattggagtccatagcaaacaaatacaagctgtggggccactgcaggaggttttggagtctggcctcagattcaaaagttgtgaacatccatggggtgggggtggagggatgggggcacatgtctggcttttgtgggagctcttaattgcgtaaagctattttgtggcttaaggaaagaattctagagaaaaatctgtttctgctatttccagcagaagttgttcatatagtcaaagtgccagtcctatgagatacggccaccattattttatatttattactgtacttaatcttctaagaaaacaggattaactttcagattaaacaccatgtaaatgttgcactgtactttaattaaaatgaataagctaattaaaccagaaaaaaaagttcaaataagcccacgagagtaaagcattaaagcatataccctttgttaatgctttgtgatgtgagtaaagattatagcatattagagataaatattagttggcttttgttatattaaaggttcctggatcatatatcatactattaatggctagcttatattaattatgtctgcaaaccaaagcaatatttgacaatttatgatatatggtatatcataacatgactcaattctgaataggattgttagtatggattttaactctcattttgaatttagacttctgaaaggtggcaaatctttgtgtttatttaatgccattagaaataagcctttaatagaaaaaagactttgtaagactaaaagcagag

SEQ ID NO: 32986 - DNA, 1860 bp, Homo sapiens
aacattcatacaagtctttgcgtggacctgtgttttccatgtagatggatcttaatctttaaaattcaaaattcccaggaatttgagaaaataagagaatgaaggaccaagcactgagatattctatttagagtttggatagaagagaagtctccaaggcagacttggaaagaaaggccagagaagtagaagcaaaccagttaagcatgatgtctctgaagccaagaaagaaaaggatttcaaatgtaggacttgacagctctgacaatgctgctgtgaagcaagataggaggtgaactgaagagtgtcaattatatttgataatgtccaagtgactgacaaccttagcaagatgaatttaggtgaagaagggtggtgaaaaccaaattggagttagcccaaaagcaaataaaaggtgaggaagtgaaataaatgtgtatacaagagttcttagaaaattgactgtgaaagaggtgattgaggggaaggtagagttaggaagaactgttttaaataagagatacaaaagcatgttggaatgatgatgggaaaaattcaatttgggcacagacacagggaaagtgccctatattaatccaatatgggcattttattatagaatgcatatgacaagggaactgagggtatctgcaagaaagatatttaaatgaacatgaaatgtaagtgaattgggaagaaaataaagataggagatgaagaggttgatggatggatgctcttaatgaagtaatgctgtagtggaagtggggaagaatagaagtagtggctgaataatggcaagtttgaggaagtgacttcagagcaaggcartctctggcaatgacaattctagagtgtgaccatggaagtgaatggccaagtcaaagtgcaggaaaagtcatcatcactgtggaggtcaggcaactaagagacaaggtgcctactgtacaggttgtccacataggcattgaagttgccaagggctaagacaagagtgaggctagaaaacaacactgacaacaagcatactcatttctaggaaaaggtcagaccccctggtcaagatgaactcaacatgggaaggaagcattctaggggattggagtccatagcaaacaaatacaagctgtggggccactgcaggaggttttggagtctggcctcagattcaaaagttgtgaacatccatggggtgggggtggagggatgggggcacatgtctggcttttgtgggagctcttaattgcgtaaagctattttgtggcttaaggaaagaattctagagaaaaatctgtttctgctatttccagcagaagttgttcatatagtcaaagtgccagtcctatgagatacggccaccattattttatatttattactgtacttaatcttctaagaaaacaggattaactttcagattaaacaccatgtaaatgttgcactgtactttaattaaaatgaataagctaattaaaccagaaaaaaaagttcaaataagcccacgagagtaaagcattaaagcatataccctttgttaatgctttgtgatgtgagtaaagattatagcatattagagataaatattagttggcttttgttatattaaaggttcctggatcatatatcatactattaatggctagcttatattaattatgtctgcaaaccaaagcaatatttgacaatttatgatatatggtatatcataacatgactcaattctgaataggattgttagtatggattttaactctcattttgaatttagacttctgaaaggtggcaaatctttgtgtttatttaatgccattagaaataagcctttaatagaaaaaagactttgtaagactaaaagcagag

SEQ ID NO: 32987 - DNA, 1860 bp, Homo sapiens
aacattcatacaagtctttgcgtggacctgtgttttccatgtagatggatcttaatctttaaaattcaaaattcccaggaatttgagaaaataagagaatgaaggaccaagcactgagatattctatttagagtttggatagaagagaagtctccaaggcagacttggaaagaaaggccagagaagtagaagcaaaccagttaagcatgatgtctctgaagccaagaaagaaaaggatttcaaatgtaggacttgacagctctgacaatgctgctgtgaagcaagataggaggtgaactgaagagtgtcaattatatttgataatgtccaagtgactgacaaccttagcaagatgaatttaggtgaagaagggtggtgaaaaccaaattggagttagcccaaaagcaaataaaaggtgaggaagtgaaataaatgtgtatacaagagttcttagaaaattgactgtgaaagaggtgattgaggggaaggtagagttaggaagaactgttttaaataagagatacaaaagcatgttggaatgatgatgggaaaaattcaatttgggcacagacacagggaaagtgccctatattaatccaatatgggcattttattatagaatgcatatgacaagggaactgagggtatctgcaagaaagatatttaaatgaacatgaaatgtaagtgaattgggaagaaaataaagataggagatgaagaggttgatggatggatgctcttaatgaagtaatgctgtagtggaagtggggaagaatagaagtagtggctgaataatggcaagtttgaggaagtgacttcagagcaaggcagtctctggcaatgacaattctagagtgtgaccatggaagtgaatggccaagtcaaagtgcaggaaaagtcatcatcactgtggaggtcaggcaactaagagacaaggtgcctactgtacaggttgtccacataggcattgaagttgccaagggctaagacaagagtgaggctagaaaacaacactgacaacaagcatactcatttctaggaaaaggtcagacccccyggtcaagatgaactcaacatgggaaggaagcattctaggggattggagtccatagcaaacaaatacaagctgtggggccactgcaggaggttttggagtctggcctcagattcaaaagttgtgaacatccatggggtgggggtggagggatgggggcacatgtctggcttttgtgggagctcttaattgcgtaaagctattttgtggcttaaggaaagaattctagagaaaaatctgtttctgctatttccagcagaagttgttcatatagtcaaagtgccagtcctatgagatacggccaccattattttatatttattactgtacttaatcttctaagaaaacaggattaactttcagattaaacaccatgtaaatgttgcactgtactttaattaaaatgaataagctaattaaaccagaaaaaaaagttcaaataagcccacgagagtaaagcattaaagcatataccctttgttaatgctttgtgatgtgagtaaagattatagcatattagagataaatattagttggcttttgttatattaaaggttcctggatcatatatcatactattaatggctagcttatattaattatgtctgcaaaccaaagcaatatttgacaatttatgatatatggtatatcataacatgactcaattctgaataggattgttagtatggattttaactctcattttgaatttagacttctgaaaggtggcaaatctttgtgtttatttaatgccattagaaataagcctttaatagaaaaaagactttgtaagactaaaagcagag

SEQ ID NO: 32988 - DNA, 1860 bp, Homo sapiens
aacattcatacaagtctttgcgtggacctgtgttttccatgtagatggatcttaatctttaaaattcaaaattcccaggaatttgagaaaataagagaatgaaggaccaagcactgagatattctatttagagtttggatagaagagaagtctccaaggcagacttggaaagaaaggccagagaagtagaagcaaaccagttaagcatgatgtctctgaagccaagaaagaaaaggatttcaaatgtaggacttgacagctctgacaatgctgctgtgaagcaagataggaggtgaactgaagagtgtcaattatatttgataatgtccaagtgactgacaaccttagcaagatgaatttaggtgaagaagggtggtgaaaaccaaattggagttagcccaaaagcaaataaaaggtgaggaagtgaaataaatgtgtatacaagagttcttagaaaattgactgtgaaagaggtgattgaggggaaggtagagttaggaagaactgttttaaataagagatacaaaagcatgttggaatgatgatgggaaaaattcaatttgggcacagacacagggaaagtgccctatattaatccaatatgggcattttattatagaatgcatatgacaagggaactgagggtatctgcaagaaagatatttaaatgaacatgaaatgtaagtgaattgggaagaaaataaagataggagatgaagaggttgatggatggatgctcttaatgaagtaatgctgtagtggaagtggggaagaatagaagtagtggctgaataatggcaagtttgaggaagtgacttcagagcaaggcagtctctggcaatgacaattctagagtgtgaccatggaagtgaatggccaagtcaaagtgcaggaaaagtcatcatcactgtggaggtcaggcaactaagagacaaggtgcctactgtacaggttgtccacataggcattgaagttgccaagggctaagacaagagtgaggctagaaaacaacactgacaacaagcatactcatttctaggaaaaggtcagaccccctggtcaagatgaactcaacatgggaaggaagcattctaggggattggagtccatagcaaacaaatacaagctgtggggccactgcaggaggttttggagtctggcctcagattcaaaagttgtgaacatccatggggtgggggtggagggatgggggcacatgtctggcttttgtgggagctcttaattgsgtaaagctattttgtggcttaaggaaagaattctagagaaaaatctgtttctgctatttccagcagaagttgttcatatagtcaaagtgccagtcctatgagatacggccaccattattttatatttattactgtacttaatcttctaagaaaacaggattaactttcagattaaacaccatgtaaatgttgcactgtactttaattaaaatgaataagctaattaaaccagaaaaaaaagttcaaataagcccacgagagtaaagcattaaagcatataccctttgttaatgctttgtgatgtgagtaaagattatagcatattagagataaatattagttggcttttgttatattaaaggttcctggatcatatatcatactattaatggctagcttatattaattatgtctgcaaaccaaagcaatatttgacaatttatgatatatggtatatcataacatgactcaattctgaataggattgttagtatggattttaactctcattttgaatttagacttctgaaaggtggcaaatctttgtgtttatttaatgccattagaaataagcctttaatagaaaaaagactttgtaagactaaaagcagag

SEQ ID NO: 32989 - DNA, 556 bp, Homo sapiens
acctccagttttttttagttcttaggataaaccgatgtcattttttagcaattcttaaatatacaagcatcataactatttgaatcagagtctacataaaacatcttttaaatcagccttttttcccctcctttccagaatctaacacacaattaccactgttttatactagcatattatatcttgtttttaatttggaataacgtatctttcaaccctatttaytttatctaatttgttaagaacatcagtatcatcaaactaattatgagaggcaaatggcttaacataaaattaatgttcctaagcccccccaagttagttattatttaaagtcaccaattctttttcttcatgtgtaattacttttagatgtattaacggagatgattaacaataagtaaaagaataaatttatgaaattgattcatgtgttctacttttcagtatcattaaatatttctgagtctctccaaagctgaaaggaccattatgcagacaatgttctgacagatagcaaccaagacatcccaaggcgaaactgtcttcagactca

SEQ ID NO: 32990 - DNA, 556 bp, Homo sapiens
acctccagttttttttagttcttaggataaaccgatgtcattttttagcaattcttaaatatacaagcatcataactatttgaatcagagtctacataaaacatcttttaaatcagccttttttcccctcctttccagaatctaacacacaattaccactgttttatactagcatattatatcttgtttttaatttggaataacgtatctttcaaccctatttactttatctaatttgttaagaacatcagtatcatcaaactaattatgagaggcaaatggcttaacataaaattaatgttcctaagcccccccaagttagttattatttaaagtcaccaattctttttcttcatgtgtaattacttttrgatgtattaacggagatgattaacaataagtaaaagaataaatttatgaaattgattcatgtgttctacttttcagtatcattaaatatttctgagtctctccaaagctgaaaggaccattatgcagacaatgttctgacagatagcaaccaagacatcccaaggcgaaactgtcttcagactca

SEQ ID NO: 32991 - DNA, 704 bp, Homo sapiens
taaaaataataaaataattcaatcacataattgaaaagtctgaaggtacgtagctgtagccacaactgaatatttcatcattaaataatatgagccatctctctgtgcatgtgyatctctctctccatcattctcaccctgcttttattgatattgcctgatggcaacatggcagccagcagctacagatttacattgctcctcctctcaatttataatcccagaggaagagaaaccattttccccagtagttctggctacaatctaggggactctggttggcccagttttgatcatgagactacagttgaaccaatcactgaaaccagaaaagtggagtccatcaattgacaaggactgtgtcacatgtctacctctgagattattctagggtcagctcctctagaatcacaaggctaagtgctttgcagttcagattttcaagagattctgattggcccagcttcggtcagatgtctaccctcagttcaatcagctgtggccaggagagcaaggttatctggtacaaatatggttatcaagacccacttcttcaggatggattgtgaatggggtacagattcccttagggggttatgggtggtggggcaatatcgactgaaaaaatttaaatgtaccttcctcaggttgatacctttattttacttcattttacttttttttttgagacaggatctcgttct

SEQ ID NO: 32992 - DNA, 704 bp, Homo sapiens
taaaaataataaaataattcaatcacataattgaaaagtctgaaggtacgtagctgtagccacaactgaatatttcatcattaaataatatgagccatctctctgtgcatgtgcatctctctctccatcattctcaccctgcttttattgatattgcctgatggcaacatggcagccagcagctacagatttacattgctcctcctctcaatttataatcccagaggaagagaaaccattttccccagtagttctggctacaatctaggggactctggttggcccagttttgatcatgagactacagttgaaccaatcactgaaaccagaaaagtggagtccatcaattgacaaggactgtgtcacatgtctacctctgagattattctagggtcagctcctctagaatcacaaggctaagtgctttgcagttcarattttcaagagattctgattggcccagcttcggtcagatgtctaccctcagttcaatcagctgtggccaggagagcaaggttatctggtacaaatatggttatcaagacccacttcttcaggatggattgtgaatggggtacagattcccttagggggttatgggtggtggggcaatatcgactgaaaaaatttaaatgtaccttcctcaggttgatacctttattttacttcattttacttttttttttgagacaggatctcgttct

SEQ ID NO: 32993 - DNA, 543 bp, Homo sapiens
tggataatgctgattatgaaaattgctgaaaggttataaataaaatgttaaataatacagtacagctaattcttcaggtgttgattccattctcaagtaagaatctacatgaatcaagtaacagcacacaactttcctgggggtaaagatggggagctaggaagcccaaggtaaatgcgcatttttattcagattctcgaagaggtatgtgacccaaaaagggttaaaaactaatgttatctatattattttgtaaactgcatcttttagtcggtacatcttgtcatcttatcatgtcattgaatattcctctacaacatcttttcaagtagctagaagaattttawtgtatgcatgtgccgttatttgtttaactattctcctaaagttgaacatttagtttacttcccatttttgccagtatcaacttgtaactaaatctttgcatacatccttaattatttgctttaatacagtaaaggggttaaattacagggaccaggctgggcgcagtgtcatgcctgtaatcccaacactttagga

SEQ ID NO: 32994 - DNA, 607 bp, Homo sapiens
ttcccattttactcagtgtagagtggattgccaaaatgttagtacctctatttccaatacctgtaatctcttgatcacttgtgcctggcttctgtatattggaattaggactcaggactcagtcctgtgtgcctttcatggtctaatttttatgatagggatctgatgtccaaatttcctagttttatgtataagttagtgaactctgttcgtgaccagtctggccaacatagtgaaaccctgtctctattaaaagtaaaaaaaaatagccaagcgtggtggggggcgcctgtaatcttacctactsgggaggatgaggcaggagaattgcgtgaacctgggaggcagaggttgcaatgagtcgagatggcgccattgcactacagcccgggcaacagtgcgagactccatctcaataacaaaacaaaacaaaacaaaacaaacaaaaaagttagtgaaccctgaatatctcttgctgatactgctgtactgaatttcatgtatttacaagaaactgccttctcagaatctttactcagaggtatcattagctccttatcctcaaaatttcaaaaactaagcttgtgacccccttattctacaatat

SEQ ID NO: 32995 - DNA, 625 bp, Homo sapiens
attgctacctaaatagtaaagtaagcttcaaaagtttaatataaaataataataggaatgatayggtttggctctgcgtccccacccaaatctcatctcaaattgtaatctccacatattgagagagagacctggtgatgtcatgggctccttggggtgttatttcaccagccagaaacctctgtggctggcagtgcttctgcctgaatattgctcacgctcactgggattttcctgcccactcgactcagcaggctgcacttggctcacactgttggcccagctcccacgcctgccaacagcgagtcaggcatggagcagtgagggaagtgtgcatgagtaagcgcgggttcagccactatgcacagccaggcacactggttgctgtggtggggcgggcagctacaggccccagcacagatgccagctccatgcaaggctgtggctggaccagatgtactgcatgcggctttcactgtgggcactcgcatctggactaggggaacgtagtggaagcctagaagcttggagacacaagtaattgcagagcccaaagagggtgtcacaaccctggcttggggagtccctgtgcctggcctcccgaagggctgcagctattctctcc

SEQ ID NO: 32996 - DNA, 625 bp, Homo sapiens
attgctacctaaatagtaaagtaagcttcaaaagtttaatataaaataataataggaatgatatggtttggctctgcgtccccacccaaatctcatctcaaattgtaatctccacatattgagagrgagacctggtgatgtcatgggctccttggggtgttatttcaccagccagaaacctctgtggctggcagtgcttctgcctgaatattgctcacgctcactgggattttcctgcccactcgactcagcaggctgcacttggctcacactgttggcccagctcccacgcctgccaacagcgagtcaggcatggagcagtgagggaagtgtgcatgagtaagcgcgggttcagccactatgcacagccaggcacactggttgctgtggtggggcgggcagctacaggccccagcacagatgccagctccatgcaaggctgtggctggaccagatgtactgcatgcggctttcactgtgggcactcgcatctggactaggggaacgtagtggaagcctagaagcttggagacacaagtaattgcagagcccaaagagggtgtcacaaccctggcttggggagtccctgtgcctggcctcccgaagggctgcagctattctctcc

SEQ ID NO: 32997 - DNA, 625 bp, Homo sapiens
attgctacctaaatagtaaagtaagcttcaaaagtttaatataaaataataataggaatgatatggtttggctctgcgtccccacccaaatctcatctcaaattgtaatctccacatattgagagagagacctggtgatgtcatgggctccttggggtgttatttcaccagccagaaacctctgtggctggcagtgcttctgcctgaatattgctcacgctcactgggattttcctgcccactcgactcagcaggctgcacttggctcacactgttggcccagctcccacgcctgccaacagcgagtcaggcatggagcagtgagggaagtgtgcatgagtaagcgcgggttcagccactatgcacagccaggcacactggttgctgtggtggggygggcagctacaggccccagcacagatgccagctccatgcaaggctgtggctggaccagatgtactgcatgcggctttcactgtgggcactcgcatctggactaggggaacgtagtggaagcctagaagcttggagacacaagtaattgcagagcccaaagagggtgtcacaaccctggcttggggagtccctgtgcctggcctcccgaagggctgcagctattctctcc

SEQ ID NO: 32998 - DNA, 625 bp, Homo sapiens
attgctacctaaatagtaaagtaagcttcaaaagtttaatataaaataataataggaatgatatggtttggctctgcgtccccacccaaatctcatctcaaattgtaatctccacatattgagagagagacctggtgatgtcatgggctccttggggtgttatttcaccagccagaaacctctgtggctggcagtgcttctgcctgaatattgctcacgctcactgggattttcctgcccactcgactcagcaggctgcacttggctcacactgttggcccagctcccacgcctgccaacagcgagtcaggcatggagcagtgagggaagtgtgcatgagtaagcgcgggttcagccactatgcacagccaggcacactggttgctgtggtggggcgggcagctacagrccccagcacagatgccagctccatgcaaggctgtggctggaccagatgtactgcatgcggctttcactgtgggcactcgcatctggactaggggaacgtagtggaagcctagaagcttggagacacaagtaattgcagagcccaaagagggtgtcacaaccctggcttggggagtccctgtgcctggcctcccgaagggctgcagctattctctcc

SEQ ID NO: 32999 - DNA, 669 bp, Homo sapiens
tgagctcctaccgtggtcccccaaacttagcatatagtaagtactcaataaatgctaactgaaagaatgaattcattacaataaaatagatgaatcttaaagatcaatctgagggggctaaaaaagaccctaaaccattgttcattaagatgaattcaacttcaatttaatcttgctacattttatcacttagtctttggattacttcacatgccaacagaaaactattattttataacctctcttcagaacctgcctgtattaccactgaaggagagtgttcagatgcaacaacacttccactacttgacatattcattcactcttcagacatttactgggcagcaactataggcagtaggaccacaatcaaacttttccccacccaggtactgtcttcctattactttatcattataagaatctcccccaattttggagaaataagaaacagtggtacttttgacagattgctgaataacaaagttctcagaaaacgaacatatctgcagagcatactgacattaatattttatgctttttctttgtattgctgttttaaatataygtgtcttacatcctacactaaaagcatctgaaagtaatatttagtttatgtttcaaagaacctcataatgtggcttttccactgaaggcaatcattaaaca

SEQ ID NO: 33000 - DNA, 552 bp, Homo sapiens
ctatagggtatgctaccatgcccggctaatttttttactttttgtagagatggggacccactgtgttgcccaggcctgtcttgaaccactgggctcaagtgatcctccctccttagccttccgaagtactgggattgcaggtgtgaaccactgtgcccggctttagacttaartgttttatcaggcttgaaatcctagctctttaaagattttgttttaaatgccgggtgcaagagcctgggaacaatttcacttaggtgcctgtgaatatcaaagtttcaatttctggcaaatggtttaaaatagaaatccaatttgtccatgctatgcaaaccatctgaattagaatgtaatgagtaaagcttaaaccttaggtctgtatttaaccacattgtgttacttacttgcccccacatcctttcacacacgaagttgagaatagggtaaataaatgagcctgttcagctaatactcttggcttgaccctttcacacttaacagcaccagccaagaaacctgaatgtgagcccaaatagtgtctattttgatacc

SEQ ID NO: 33001 - DNA, 552 bp, Homo sapiens
ctatagggtatgctaccatgcccggctaatttttttactttttgtagagatggggacccactgtgttgcccaggcctgtcttgaaccactgggctcaagtgatcctccctccttagccttccgaagtactgggattgcaggtgtgaaccactgtgcccggctttagacttaaatgytttatcaggcttgaaatcctagctctttaaagattttgttttaaatgccgggtgcaagagcctgggaacaatttcacttaggtgcctgtgaatatcaaagtttcaatttctggcaaatggtttaaaatagaaatccaatttgtccatgctatgcaaaccatctgaattagaatgtaatgagtaaagcttaaaccttaggtctgtatttaaccacattgtgttacttacttgcccccacatcctttcacacacgaagttgagaatagggtaaataaatgagcctgttcagctaatactcttggcttgaccctttcacacttaacagcaccagccaagaaacctgaatgtgagcccaaatagtgtctattttgatacc

SEQ ID NO: 33002 - DNA, 552 bp, Homo sapiens
ctatagggtatgctaccatgcccggctaatttttttactttttgtagagatggggacccactgtgttgcccaggcctgtcttgaaccactgggctcaagtgatcctccctccttagccttccgaagtactgggattgcaggtgtgaaccactgtgcccggctttagacttaaatgttttatcaggcttgaaatcctagctctttaaagattttgttttaaatgccgggtgcaagagcctgggaacaatttcacttaggtgcctgtgaatatcaawgtttcaatttctggcaaatggtttaaaatagaaatccaatttgtccatgctatgcaaaccatctgaattagaatgtaatgagtaaagcttaaaccttaggtctgtatttaaccacattgtgttacttacttgcccccacatcctttcacacacgaagttgagaatagggtaaataaatgagcctgttcagctaatactcttggcttgaccctttcacacttaacagcaccagccaagaaacctgaatgtgagcccaaatagtgtctattttgatacc

SEQ ID NO: 33003 - DNA, 511 bp, Homo sapiens
ccatggttcccgcttagagcaaaagcagagcgcggcgagctccgaacacatgcgttgtgtgggccgccgccagacgtctctgggctgtgcttctggaaagcggctcstacacctcccgggagcaggaatcccttcgcgagcagcggaggccagcagaaccagaggcagttggctctacccgcccatccctctggcgccgtgcgcgcagggccctaccgtaccgggaatgcacgtcgggcggtcgtcgggggcgcgtggcaatgagatccggaatcggcggcagcggctgcagcactctgagctgggcgcgggaggggccttaagtggaacagctatgctgacgtcagcggggggggccggcggacgtgcgggaacccacgtgtgagtcgggctgggggtggatgccgagccaggcggggcactggagaggcccgggtggcgcgcgcagccagacaaccgaccggcagactgctccacgtgcgctgggagtctaagtaaggtgctgccctcc

SEQ ID NO: 33004 - DNA, 609 bp, Homo sapiens
tgaatacatgacatcacttataagggaataataatttttaaaaactttacagaaaatatatcatattgaactgtcactaacattaccctaaactgaattttgttattgcatattagctgtcacatccttcattccaaatggaaactgagttttttaatttctagtggaaaacacaatgcatgtttaagtccaggtataagaataacaccaaagacttcctggtacaaagagtaatttgttcaattttctgacttgtttcagcctaaagaacaagaacagcataggatgaaaaaaggtttccagcagaaagagatttayagtcagaatcacttttctctgttttcattcattctgaatgaatacaaagaataatcttgctgttaatacaaatgcagcaaactgagccattaaattgacagtgtgatctatcccacttcacactgctttataagcaaaatgtatcattcttgggagctttctcttggttaaataatcgtgagaaatatatctcttgccattacttttattgataaaacagagcatgtcatcttaattcatccttccactgctctatttcatcatctactgagtgattgggattctgatcac

SEQ ID NO: 33005 - DNA, 649 bp, Homo sapiens
gaaaaaatgaattaaaggaccattctatggattgctgaagtgcaattaggtatggtataggaaattattcttcctcgaggtaaaattgtagctgtttgaatatttttaatttggccaatcacaaagatagaaagctaagagrgataagggatctaaaccccttatctttcatttactttgttgtgcgatcttgaacaagttgcctaactctttgaacgtgagttcccttatctgtaaaaacatggaagaataaatttacctgtctcttaataaggaaaaccaagaatatgcctaacaatagtaagtaatcaaaaaacttttctaccttgaaaatctgaaatctcaatgtaaactgataacatcagtgatggcaccattgaaccattcaagaaatattgcttgctccctagtaactaggcagatttattctctgttctaaataccagaggcagaccacacactactggtagtctacatgtataccctctctactccctctcactctccaaccctgtatgatacctaatgaaatagttccaatagagctccctgtgcaaattgagaagaagaaaattgagagcacgacaatcgctggagtacatctggcaataaataagcaacagttgctcaactttgctcatagtaaaag

SEQ ID NO: 33006 - DNA, 582 bp, Homo sapiens
ttatgaaacttcatgaatatttcatctgaagacaggctatcagatttatcttaaggttaaagaacacataggtcataaatcaggcccaagatggagtcgcttgaggttcatagttggtaagaactgtttacatgttagtcaaggctatctgtgggtgtttattacttcagttacatgttagaatccagttaagataaataaaaaaagattaattttataatagaacactttaaaaaggatcagcaaaaattcctggaaagaattagaggtagtttttgaaacaaaatgggcttcattgaaattgttaagtattcagaactataatcaatatttaataaaaaggtatcacaaaactattactattataaaatagtataatgagcataagctcattgttaagctataaacagcatatataactataatttatattaaatctttaatatatcttcagtttcaaggcaatttctcatttggaatatttatggtgagcttaaaatttactacttatgttcttagataggttaytacttatattgttagataggcatattttatttcctccaataggaccccagaaaa

SEQ ID NO: 33007 - DNA, 865 bp, Homo sapiens
agacgcttatgttatgtgtattttaacacaattttaaaaattggaaaataaaacaaaacacctagagccatgatctctaaggccatgtgtgttctgcacctattactcctcactcactccattccagccccactggcctttttctggctcctcagacatgccaagcackccctgcctcagggcctttgcagtgtctgttgccctcatgtggaatgctcttcccacagatctctctatgactctccctctgtcacttgctctgctctaatgtctctttttcagtgaggcctttcctgatcaccctacagaaaagcacccagcaatattctctattccttttccttgccttgtcttggtaacacttgctccttgctgacatatagaaagaatatgtgtttatgcaatggtgaatgtgatgaccacagattttccccagccctgttctaggcagagactgggaaatgggtcattcctgtcccctattccaattctcaccttctataatggcttattttcctttttaatgttctaacctaatgtcgagcaatttcagttgattttttcataagctggaaggtccatgaaatctctttctatggccattattttctcaaacactgcagtgtcttttttcagtgttttccatatataatgatattcctaggaatatctccttggccttcctatctactttcacccaatgtggtgttcttcatatttcaagtaaattcaatattgccttcataattgttggcacctttaaacttttattgtccctgataggtaggtgctcatcttattggttaaatgaatgattttggcaatttcgctttttaaattatttttatttttattttgagacagg

SEQ ID NO: 33008 - DNA, 865 bp, Homo sapiens
agacgcttatgttatgtgtattttaacacaattttaaaaattggaaaataaaacaaaacacctagagccatgatctctaaggccatgtgtgttctgcacctattactcctcactcactccattccagccccactggcctttttctggctcctcagacatgccaagcactccctgcctcagggcctttgcagtgtctgttgccctcatgtggaatgctcttcccacagatctctctatgactctcyctctgtcacttgctctgctctaatgtctctttttcagtgaggcctttcctgatcaccctacagaaaagcacccagcaatattctctattccttttccttgccttgtcttggtaacacttgctccttgctgacatatagaaagaatatgtgtttatgcaatggtgaatgtgatgaccacagattttccccagccctgttctaggcagagactgggaaatgggtcattcctgtcccctattccaattctcaccttctataatggcttattttcctttttaatgttctaacctaatgtcgagcaatttcagttgattttttcataagctggaaggtccatgaaatctctttctatggccattattttctcaaacactgcagtgtcttttttcagtgttttccatatataatgatattcctaggaatatctccttggccttcctatctactttcacccaatgtggtgttcttcatatttcaagtaaattcaatattgccttcataattgttggcacctttaaacttttattgtccctgataggtaggtgctcatcttattggttaaatgaatgattttggcaatttcgctttttaaattatttttatttttattttgagacagg

SEQ ID NO: 33009 - DNA, 865 bp, Homo sapiens
agacgcttatgttatgtgtattttaacacaattttaaaaattggaaaataaaacaaaacacctagagccatgatctctaaggccatgtgtgttctgcacctattactcctcactcactccattccagccccactggcctttttctggctcctcagacatgccaagcactccctgcctcagggcctttgcagtgtctgttgccctcatgtggaatgctcttcccacagatctctctatgactctccctctgtcacttgctctgctctaatgtctctttttcagtgaggcctttcctgatcaccctacagaaaagcacccagcaatattctctattccttttccttgccttgtcttggtarcacttgctccttgctgacatatagaaagaatatgtgtttatgcaatggtgaatgtgatgaccacagattttccccagccctgttctaggcagagactgggaaatgggtcattcctgtcccctattccaattctcaccttctataatggcttattttcctttttaatgttctaacctaatgtcgagcaatttcagttgattttttcataagctggaaggtccatgaaatctctttctatggccattattttctcaaacactgcagtgtcttttttcagtgttttccatatataatgatattcctaggaatatctccttggccttcctatctactttcacccaatgtggtgttcttcatatttcaagtaaattcaatattgccttcataattgttggcacctttaaacttttattgtccctgataggtaggtgctcatcttattggttaaatgaatgattttggcaatttcgctttttaaattatttttatttttattttgagacagg

SEQ ID NO: 33010 - DNA, 865 bp, Homo sapiens
agacgcttatgttatgtgtattttaacacaattttaaaaattggaaaataaaacaaaacacctagagccatgatctctaaggccatgtgtgttctgcacctattactcctcactcactccattccagccccactggcctttttctggctcctcagacatgccaagcactccctgcctcagggcctttgcagtgtctgttgccctcatgtggaatgctcttcccacagatctctctatgactctccctctgtcacttgctctgctctaatgtctctttttcagtgaggcctttcctgatcaccctacagaaaagcacccagcaatattctctattccttttccttgccttgtcttggtaacacttgctccttgctgacatatagaaagaatatgtgtttatgcaatggtgaatgtgatgaccayagattttccccagccctgttctaggcagagactgggaaatgggtcattcctgtcccctattccaattctcaccttctataatggcttattttcctttttaatgttctaacctaatgtcgagcaatttcagttgattttttcataagctggaaggtccatgaaatctctttctatggccattattttctcaaacactgcagtgtcttttttcagtgttttccatatataatgatattcctaggaatatctccttggccttcctatctactttcacccaatgtggtgttcttcatatttcaagtaaattcaatattgccttcataattgttggcacctttaaacttttattgtccctgataggtaggtgctcatcttattggttaaatgaatgattttggcaatttcgctttttaaattatttttatttttattttgagacagg

SEQ ID NO: 33011 - DNA, 865 bp, Homo sapiens
agacgcttatgttatgtgtattttaacacaattttaaaaattggaaaataaaacaaaacacctagagccatgatctctaaggccatgtgtgttctgcacctattactcctcactcactccattccagccccactggcctttttctggctcctcagacatgccaagcactccctgcctcagggcctttgcagtgtctgttgccctcatgtggaatgctcttcccacagatctctctatgactctccctctgtcacttgctctgctctaatgtctctttttcagtgaggcctttcctgatcaccctacagaaaagcacccagcaatattctctattccttttccttgccttgtcttggtaacacttgctccttgctgacatatagaaagaatatgtgtttatgcaatggtgaatgtgatgaccacagattttccccagccctgttctaggcagagactgggaaatgggtcattcctgtcccctattccaattctcaccttctataatggcttattttcctttttaatgttctaacctaatgtcgagcaatttcagttgattttttcataagctggaaggtccatgaaatctctttctatggccattattttctcaaacactgcagtgtcttttttcagtgttttccatatataatgatattcctaggaatatctccttggccttcctatctactttcacccaatgtggtgttcttcatatttcaagtaaattcaataytgccttcataattgttggcacctttaaacttttattgtccctgataggtaggtgctcatcttattggttaaatgaatgattttggcaatttcgctttttaaattatttttatttttattttgagacagg

SEQ ID NO: 33012 - DNA, 865 bp, Homo sapiens
agacgcttatgttatgtgtattttaacacaattttaaaaattggaaaataaaacaaaacacctagagccatgatctctaaggccatgtgtgttctgcacctattactcctcactcactccattccagccccactggcctttttctggctcctcagacatgccaagcactccctgcctcagggcctttgcagtgtctgttgccctcatgtggaatgctcttcccacagatctctctatgactctccctctgtcacttgctctgctctaatgtctctttttcagtgaggcctttcctgatcaccctacagaaaagcacccagcaatattctctattccttttccttgccttgtcttggtaacacttgctccttgctgacatatagaaagaatatgtgtttatgcaatggtgaatgtgatgaccacagattttccccagccctgttctaggcagagactgggaaatgggtcattcctgtcccctattccaattctcaccttctataatggcttattttcctttttaatgttctaacctaatgtcgagcaatttcagttgattttttcataagctggaaggtccatgaaatctctttctatggccattattttctcaaacactgcagtgtcttttttcagtgttttccatatataatgatattcctaggaatatctccttggccttcctatctactttcacccaatgtggtgttcttcatatttcaagtaaattcaatattgccttcataattgktggcacctttaaacttttattgtccctgataggtaggtgctcatcttattggttaaatgaatgattttggcaatttcgctttttaaattatttttatttttattttgagacagg

SEQ ID NO: 33013 - DNA, 1424 bp, Homo sapiens
tcccattggggattagggtttcaatatggtgcattttggagggacatgattagtagtggttaggccttcaacatacaaattttgggaaactttgctatttagtcattagcaagggatgagggccacaagctaaaaatcatctctatttttaaaagatttctctgcttaagaataattccaggatcaaagcagaaaccaggacagaagccaagagatcaatcaggaggatgtggctatgatccagatgacatatgtcatgcatgagggtgaagaaagcaaaggcaggaaaatctgatccaatttgacaaatgtttgaggtcattcaagagacttgccaatgaattgtataagggggagataagagaaagaagagttcaaagtttccaaagtcttctgccaaaacacttctcaggggtggtggtgattccagtgaaggctttccagatggtttgggatgggttaacttggaagccctaatcatttatctgagctgagaagttgaggatacagttacatgcacgaatctgaagtagcgaaaagatgtcaaagccagagatgggaatttaggattttgagtggatgtgtcaagtcctggggctgagtgagatcccctggagagagaaggaagcttrtgtttgagccctagttcagcccagcatttagaagaacccctttgggaagaggagaagaacgagcaaaggctaaatgtgactccctgttttagaagaatctccttcagaagaagaatcaataaagcaaaggctgaactcaactttgtcttcttttctcccccagacataatttatgttcttttattgggagtttgtttcccactcaacctttcaggttagagctctgaagtcacgtttgatttttccctcaacatcaaagagacacaacagtttgcttctgtggtgactgtttttttgtttgtttttgtatttttgttttttgtttttgtgtgtgtgtttgtgttattttaatttgtttgcttgtttgagacaatgtctcactctgtcacctgggctggagtgcagtggcacaatctcagctcactgcaacctccacctcctgggcttaagtgatcctcccacctcagctcccctagtagctaggactacaggcacacaccaccactcctggctattttttctatttttaatagagatgggggtctcatcatgttgcccaggctggtcttgaattccagagctcaagtgatctgcctgtcttgacctctcaaagtgctgggattacaggtgtgagccatggtgtccagcctcactggtgactttgaatgccttctcacttcttccttcccactccatgctccaggttcaaagactccattaccaccatccatcccatgccagagtctccaggcttccatcttcagtgccatcccttctcatccatcctatgca

SEQ ID NO: 33014 - DNA, 1424 bp, Homo sapiens
tcccattggggattagggtttcaatatggtgcattttggagggacatgattagtagtggttaggccttcaacatacaaattttgggaaactttgctatttagtcattagcaagggatgagggccacaagctaaaaatcatctctatttttaaaagatttctctgcttaagaataattccaggatcaaagcagaaaccaggacagaagccaagagatcaatcaggaggatgtggctatgatccagatgacatatgtcatgcatgagggtgaagaaagcaaaggcaggaaaatctgatccaatttgacaaatgtttgaggtcattcaagagacttgccaatgaattgtataagggggagataagagaaagaagagttcaaagtttccaaagtcttctgccaaaacacttctcaggggtggtggtgattccagtgaaggctttccagatggtttgggatgggttaacttggaagccctaatcatttatctgagctgagaagttgaggatacagttacatgcacgaatctgaagtagcgaaaagatgtcaaagccagagatgggaatttaggattttgagtggatgtgtcaagtcctggggctgagtgagatcccctggagagagaaggaagcttatgtttgagccctagttcagcccagcatttagaagaacccctttgggaagaggagaagaacgagcaaaggctaaatgtgactccctgttttagaagaatctccttcagaagaagaatcaataaagcaaaggctgaactcaactttgtcttcttttctcccccagacataatttatgttcttttattgggagtttgtttcccactcaacctttcaggttagagctctgaagtcacgtttgatttttccctcaacatcaaagagacacaacagtttgcttctgtggtgactgtttttttgtttgtttttgtatttttgttttttgtttttgtgtgtgtgtttgtgttattttaatttgtttgyttgtttgagacaatgtctcactctgtcacctgggctggagtgcagtggcacaatctcagctcactgcaacctccacctcctgggcttaagtgatcctcccacctcagctcccctagtagctaggactacaggcacacaccaccactcctggctattttttctatttttaatagagatgggggtctcatcatgttgcccaggctggtcttgaattccagagctcaagtgatctgcctgtcttgacctctcaaagtgctgggattacaggtgtgagccatggtgtccagcctcactggtgactttgaatgccttctcacttcttccttcccactccatgctccaggttcaaagactccattaccaccatccatcccatgccagagtctccaggcttccatcttcagtgccatcccttctcatccatcctatgca

SEQ ID NO: 33015 - DNA, 541 bp, Homo sapiens
gctcacacctgtcatcccaacactttgggaggccaaggtgggcatatcacctggggtcaggagttcgagatgaggstgaccaacacggtgaaaacctgtctctactaaaaataccaaaattagccaggcatggtggtgggtgcctgtagtcacagctactcaggaggttaaggcataagaatcacctgaacctgggaagcagaggttgcagtgagccgagattgtgccactgcactccagcctgggagacagagcgagactccatctccaatacatacatacatatatacataaaattaaagttgttcagccatgttgtccccggtccccaaactcttaactttttgcatttcatagaaagtgctaggatttacaaggatgccactaccctcggcagcccactaagatgtaagtgagatgccacctgtgatggtcattggagcaccttgccaccctcctcaatgggcaccggtgaggagggtgacaggtgctcggagttcctgtgggttctgggattccaagctgtcacagcgataaccca

SEQ ID NO: 33016 - DNA, 541 bp, Homo sapiens
gctcacacctgtcatcccaacactttgggaggccaaggtgggcatatcacctggggtcaggagttcgagatgaggctgaccaacacggtgaaaacctgtctctactaaaaataccaaaattagccaggcatggtggtgggtgcctgtagtcacagctactcaggaggttaaggcataagaatcacctgaacctgggaagcagaggttgcagtgagccgagattgtgccactgcactccagcctgggagacagagcgagactccatctccaatacatacatacatatatacataaaattaaagttgttcagccatgttgtccccggtccccaaactcttaactttttgcatttcatagaaagtgctaggatttacaaggatgccactaccctcggcagcccactaagatgtaagtgagatgccacctgtgatggtcattggagcaccttgccaccctcctcaatgggcaccggtgaggagggtgacaggtgytcggagttcctgtgggttctgggattccaagctgtcacagcgataaccca

SEQ ID NO: 33017 - DNA, 1347 bp, Homo sapiens
gcctcccaaagggctgggattacaggcatgagccaccgcgcccggccccttacagtcctttttaactcacttctagaagaaaccatctcagccgcttttacacatctgcagctgagacaagtgtgggacacaggtttccctggtgacccagggaagggatcaaattgctgtgtccactttgcaacaccaacatctaccaggtgctgcgaggcagaagctcaaaaccatgcatgactttccttggctttttttttttttaataaacctctgttcaaaaataaacttaacacgtttttctgagcagcctgaacctgttcccaatttcttgtccacacaataaaaaatatacaagtgcattattttaagggtgacwctagctgagctttctggggggagaaaaacggcccctgcctggagccagaagcgtgttcggagcgtttgatggcatttgatgttaaggcagggccacctgggtcggcctgtcatcgaatgacgttttcacaccagtccccaaaacaggagatctggaaaatctgacatccaaggttttagatcttggcttagaaaaatagacattccaagatgcctgaagtgtttaagtggctattgctaattggatagtgttgactgtggaagtaatggatcccaaattgaaatgggagattagatgattagacgtattctccagatgcttacaaaaacaattatgtgtgtgcgtgtgtgtgtggagagagagagagagagagagaaaggtatatagacagactgggcgcggtggctcacgccgctaatcccagcactttgggaggccgaggcaggcagatcacctgaggtcaggagtttgagacaagcctggccaacatgatgaaaacccgtctctactaaaaatacaaaaattggctgggcgtggtggtctgtaaaaaattggctgggctgtagtcccagctactcgggaggctgaggcaagagaataacttgaacccgggaggtggaggttgcagtgagctgagatcgtgccacagcattccagcttgggtggcagaataagactgtctcaaaaaaagcaaaaaaggatatatagatagacaatagacatattctattacagatggaaagaaataaactaaataggttaaactagatagaaatagataactgttagaacgagatagatggtaggtatataattaatagaaaagacataaattaggacaattaaatgatagacctaggtaaatacataaatgatagatagataacagatatattaatacataggaataggtgagttagattacataaatgatagagataggtagataaatatatgacagatatatagagaga

SEQ ID NO: 33018 - DNA, 1347 bp, Homo sapiens
gcctcccaaagggctgggattacaggcatgagccaccgcgcccggccccttacagtcctttttaactcacttctagaagaaaccatctcagccgcttttacacatctgcagctgagacaagtgtgggacacaggtttccctggtgacccagggaagggatcaaattgctgtgtccactttgcaacaccaacatctaccaggtgctgcgaggcagaagctcaaaaccatgcatgactttccttggctttttttttttttaataaacctctgttcaaaaataaacttaacacgtttttctgagcagcctgaacctgttcccaatttcttgtccacacaataaaaaatatacaagtgcattattttaagggtgactctagctgagctttctggggggagaaaaacggcccctgcctggagccagaagygtgttcggagcgtttgatggcatttgatgttaaggcagggccacctgggtcggcctgtcatcgaatgacgttttcacaccagtccccaaaacaggagatctggaaaatctgacatccaaggttttagatcttggcttagaaaaatagacattccaagatgcctgaagtgtttaagtggctattgctaattggatagtgttgactgtggaagtaatggatcccaaattgaaatgggagattagatgattagacgtattctccagatgcttacaaaaacaattatgtgtgtgcgtgtgtgtgtggagagagagagagagagagagaaaggtatatagacagactgggcgcggtggctcacgccgctaatcccagcactttgggaggccgaggcaggcagatcacctgaggtcaggagtttgagacaagcctggccaacatgatgaaaacccgtctctactaaaaatacaaaaattggctgggcgtggtggtctgtaaaaaattggctgggctgtagtcccagctactcgggaggctgaggcaagagaataacttgaacccgggaggtggaggttgcagtgagctgagatcgtgccacagcattccagcttgggtggcagaataagactgtctcaaaaaaagcaaaaaaggatatatagatagacaatagacatattctattacagatggaaagaaataaactaaataggttaaactagatagaaatagataactgttagaacgagatagatggtaggtatataattaatagaaaagacataaattaggacaattaaatgatagacctaggtaaatacataaatgatagatagataacagatatattaatacataggaataggtgagttagattacataaatgatagagataggtagataaatatatgacagatatatagagaga

SEQ ID NO: 33019 - DNA, 1347 bp, Homo sapiens
gcctcccaaagggctgggattacaggcatgagccaccgcgcccggccccttacagtcctttttaactcacttctagaagaaaccatctcagccgcttttacacatctgcagctgagacaagtgtgggacacaggtttccctggtgacccagggaagggatcaaattgctgtgtccactttgcaacaccaacatctaccaggtgctgcgaggcagaagctcaaaaccatgcatgactttccttggctttttttttttttaataaacctctgttcaaaaataaacttaacacgtttttctgagcagcctgaacctgttcccaatttcttgtccacacaataaaaaatatacaagtgcattattttaagggtgactctagctgagctttctggggggagaaaaacggcccctgcctggagccagaagcgtgttcggagcgtttgatggcrtttgatgttaaggcagggccacctgggtcggcctgtcatcgaatgacgttttcacaccagtccccaaaacaggagatctggaaaatctgacatccaaggttttagatcttggcttagaaaaatagacattccaagatgcctgaagtgtttaagtggctattgctaattggatagtgttgactgtggaagtaatggatcccaaattgaaatgggagattagatgattagacgtattctccagatgcttacaaaaacaattatgtgtgtgcgtgtgtgtgtggagagagagagagagagagagaaaggtatatagacagactgggcgcggtggctcacgccgctaatcccagcactttgggaggccgaggcaggcagatcacctgaggtcaggagtttgagacaagcctggccaacatgatgaaaacccgtctctactaaaaatacaaaaattggctgggcgtggtggtctgtaaaaaattggctgggctgtagtcccagctactcgggaggctgaggcaagagaataacttgaacccgggaggtggaggttgcagtgagctgagatcgtgccacagcattccagcttgggtggcagaataagactgtctcaaaaaaagcaaaaaaggatatatagatagacaatagacatattctattacagatggaaagaaataaactaaataggttaaactagatagaaatagataactgttagaacgagatagatggtaggtatataattaatagaaaagacataaattaggacaattaaatgatagacctaggtaaatacataaatgatagatagataacagatatattaatacataggaataggtgagttagattacataaatgatagagataggtagataaatatatgacagatatatagagaga

SEQ ID NO: 33020 - DNA, 874 bp, Homo sapiens
aaacaggccttcctgggagcacctagacaaaggcctttgtaaagatatattacaaaggaatatttctagccccctcttttcttcaaaatcacagtcaagtaagttgggyatggtggctcccatctgcaatcccagcagtttgggaggccgagatgggcagatctcctgaggttaggagtttgagaccagcctgcccaacatggtgaaaccccatctctactaaaaatacaaaaaattagccgggtgtggtgacgcatgcctgtaatcccagctacttgggagcctacccaggaggcagaggttgcagtgagccgagattgtgccagttcacaccagcctgggtgacagagcaaaactctgtctcaggaaaaaaaaaaaaatcagtcaagtaaaaagaaatgcaactaaaagagctgtcagttaaatacattcctctctaatggcaggactagtctataagattttttttaatttagagtttttttaatttttaaaccttgtgaaacatcaaattatatgctgaagctgttactttctgtcaaaaaaagtgagtttttaatatgaaaattctgcttaggttaatttttttttaaagcaagttttatacatctgcgtgaattgtttcctttagcactagtcaaacagactccataaccttccaaagaagtgccttcatttctttatggggcttaggacaggaaaaaagctctggaaaagggaaatttcaaaatagggcttcagcaggggcccaggtggagtgagtagattttgataaggtctgggtgggactcacttccaggtggtgaggacagctctccctgatctctctatcagcctgccctgggccacagagactggccctgatgacttctca

SEQ ID NO: 33021 - DNA, 874 bp, Homo sapiens
aaacaggccttcctgggagcacctagacaaaggcctttgtaaagatatattacaaaggaatatttctagccccctcttttcttcaaaatcacagtcaagtaagttgggtatggtggctcccatctgcaatcccagcagtttgggaggccgagatgggcagatctcctgaggttaggagtttgagaccagcctgcccaacatggtgaaaccccatctctactaaaaatacaaaaaattagccgggtgtggtgacgcatgcctgtaatcccagctacttgggagcctacccaggaggcagaggttgcagtgagccgagattgtgccagttcacaccagcctgggtgacagagcaaaactctgtctcaggaaaaaaaaaaaaatcagtcaagtaaaaagaaatgcaactaaaagagctgtcagttaaatacattcctctctaatggyaggactagtctataagattttttttaatttagagtttttttaatttttaaaccttgtgaaacatcaaattatatgctgaagctgttactttctgtcaaaaaaagtgagtttttaatatgaaaattctgcttaggttaatttttttttaaagcaagttttatacatctgcgtgaattgtttcctttagcactagtcaaacagactccataaccttccaaagaagtgccttcatttctttatggggcttaggacaggaaaaaagctctggaaaagggaaatttcaaaatagggcttcagcaggggcccaggtggagtgagtagattttgataaggtctgggtgggactcacttccaggtggtgaggacagctctccctgatctctctatcagcctgccctgggccacagagactggccctgatgacttctca

SEQ ID NO: 33022 - DNA, 874 bp, Homo sapiens
aaacaggccttcctgggagcacctagacaaaggcctttgtaaagatatattacaaaggaatatttctagccccctcttttcttcaaaatcacagtcaagtaagttgggtatggtggctcccatctgcaatcccagcagtttgggaggccgagatgggcagatctcctgaggttaggagtttgagaccagcctgcccaacatggtgaaaccccatctctactaaaaatacaaaaaattagccgggtgtggtgacgcatgcctgtaatcccagctacttgggagcctacccaggaggcagaggttgcagtgagccgagattgtgccagttcacaccagcctgggtgacagagcaaaactctgtctcaggaaaaaaaaaaaaatcagtcaagtaaaaagaaatgcaactaaaagagctgtcagttaaatacattcctctctaatggcaggactagtctataagattttttttaatttagagtttttttaatttttaaaccttgtgaaacatcaaattatatgctgaagctgttactttctgtcaaaaaaagtgagtttttaatatgaaaattctgcttaggttaatttttttttaaagcaagttttatacatctgcgtgaattgtttcctttagcactagtcaaacagactccataaccttccaaagaagtgccttcatttmtttatggggcttaggacaggaaaaaagctctggaaaagggaaatttcaaaatagggcttcagcaggggcccaggtggagtgagtagattttgataaggtctgggtgggactcacttccaggtggtgaggacagctctccctgatctctctatcagcctgccctgggccacagagactggccctgatgacttctca

SEQ ID NO: 33023 - DNA, 892 bp, Homo sapiens
catttcagaccacattgggcaacatagaaacattctatcttcattttaaaaagctacaaaaatttaaaaaagtcatgtaggcagggctcggtcgggtcatgcctgtaatcccagcactcttgtgagagccgacggtggagtggatcacttgaaggtcaggacgtttgagaccaacctggccaacacggtgaaagcccgtctctagtaaaaatacaaaaattaccaggttggtggtgcacacctgtaaactcagctactcaggagactgagacaggagaatcacttgaacccagaaggtgaaakttgaagtgagccaggattgcgcatgtctttcatacaagacatcagaagggtttaaaccattatactacaaatattcatcatgctctttgacttgcctgacaaatgagcaggtgcacaatgacaataacactttagatgaatgtacacttcaaagctcctcagtggaagtgtcccgaattggtcagcttggatatctgtttggtgaatcctattatatggtattcattatttttcatacccatgtggtataataatgagcctacacttttgtattttctggtttaaccttcagaaagttttgtcagtcactcatgggaacaaggtataatatacaaacctaatcaaaatgtataaaaaattatcaaatttgatatacttacacgcaataaagtggctacaagcattagatatgaataaggttgttcatttggaaatcactccaatattcattaaaaataaatattttaggagtcaattaaagaatttaacattatttttgtttctaaaataagtctggtttgaaggatcatgttattctctaaagtattttcattaaattgctattttatccaaaagttagctctctgaa

SEQ ID NO: 33024 - DNA, 892 bp, Homo sapiens
catttcagaccacattgggcaacatagaaacattctatcttcattttaaaaagctacaaaaatttaaaaaagtcatgtaggcagggctcggtcgggtcatgcctgtaatcccagcactcttgtgagagccgacggtggagtggatcacttgaaggtcaggacgtttgagaccaacctggccaacacggtgaaagcccgtctctagtaaaaatacaaaaattaccaggttggtggtgcacacctgtaaactcagctactcaggagactgagacaggagaatcacttgaacccagaaggtgaaatttgaagtgagccaggattgmgcatgtctttcatacaagacatcagaagggtttaaaccattatactacaaatattcatcatgctctttgacttgcctgacaaatgagcaggtgcacaatgacaataacactttagatgaatgtacacttcaaagctcctcagtggaagtgtcccgaattggtcagcttggatatctgtttggtgaatcctattatatggtattcattatttttcatacccatgtggtataataatgagcctacacttttgtattttctggtttaaccttcagaaagttttgtcagtcactcatgggaacaaggtataatatacaaacctaatcaaaatgtataaaaaattatcaaatttgatatacttacacgcaataaagtggctacaagcattagatatgaataaggttgttcatttggaaatcactccaatattcattaaaaataaatattttaggagtcaattaaagaatttaacattatttttgtttctaaaataagtctggtttgaaggatcatgttattctctaaagtattttcattaaattgctattttatccaaaagttagctctctgaa

SEQ ID NO: 33025 - DNA, 892 bp, Homo sapiens
catttcagaccacattgggcaacatagaaacattctatcttcattttaaaaagctacaaaaatttaaaaaagtcatgtaggcagggctcggtcgggtcatgcctgtaatcccagcactcttgtgagagccgacggtggagtggatcacttgaaggtcaggacgtttgagaccaacctggccaacacggtgaaagcccgtctctagtaaaaatacaaaaattaccaggttggtggtgcacacctgtaaactcagctactcaggagactgagacaggagaatcacttgaacccagaaggtgaaatttgaagtgagccaggattgcgcatgtctttcatacaagacatcagaagggtttaaaccattatactacaaatattcatcatgctctttgacttgcctgacaaatgagcaggtgcacaatgacaataacactttagatgaatgtacacttcaaagctcctcagtggaagtgtcccgaattggtcagcttggatatctgtttggtgaatcctattatatggtattcattatttttcatacccatgtggtataataatgagcctacacttttgtattttctggtttaaccttcagaaagttttgtcagtcactcatgggaacaaggtataatatacaaacctaatmaaaatgtataaaaaattatcaaatttgatatacttacacgcaataaagtggctacaagcattagatatgaataaggttgttcatttggaaatcactccaatattcattaaaaataaatattttaggagtcaattaaagaatttaacattatttttgtttctaaaataagtctggtttgaaggatcatgttattctctaaagtattttcattaaattgctattttatccaaaagttagctctctgaa

SEQ ID NO: 33026 - DNA, 1055 bp, Homo sapiens
agtgtacagtgagccgagatcttgccactgcagtccagcctgggtgacagagtgagactctgtctcaaaaaaaaaaattaattaaaaataaaagtgagagctaaatgatgagaacctatggamaagagacactgatttttttttcctggtgttacccacatcacgaagaatattgttttttcacctcactgatgcttggaaccacctgtcaaccagttttctcatattgttttatttaaatagaaggaagaagggaagaccctgacctttcagggtacctggggaggtaagaagtaatctatgtaacaggaatggggaaagagagcaggtaggtagagagacgagtttttttttttttttttttttgagatggagtctcactctgtcacccaggctggagcgatctctgatcactgcaacctacacctcccgggttcaagcaattctcctgcctcagcctcccaagtagttgggattacaaacatacaaacacaacaaaaacaaaaaaacaaacaaacaaaaacacttttatttaggtccaggggtacatgtgtgggtttgttatataggtaaactcatgtcataggggtttgttgtacagattattttgtcacccaggtacaaagctttgtacacaataagttatttttttctgatcctttccctcctcccaacctgcacccttaaagaaaatgtgccacatatgcatggaatactatgcagccataaaaaaggatgacaaccatgcctggctaatttttgtatttttagtagagacagggtttcaccatgttggccaggctggtctcgatctcctgacctcgtgatccaccagccttggcctcccaaagtgctgggattacaggcatgagccactgcgcctggccagttgactgcttttgtaatcaagaaaccttgtgatatataaatagccactttccaaaaaaaaaaaatcaccagaatacctccagtattgacaagctgtggggtgttgagagaattcgagattgtcttagcagcctgggacctttcagtagtcctgaacagaacagtgg

SEQ ID NO: 33027 - DNA, 1055 bp, Homo sapiens
agtgtacagtgagccgagatcttgccactgcagtccagcctgggtgacagagtgagactctgtctcaaaaaaaaaaattaattaaaaataaaagtgagagctaaatgatgagaacctatggaaaagagacactgatttttttttcctggtgttacccacatcacgaagaatattgttttttcaccycactgatgcttggaaccacctgtcaaccagttttctcatattgttttatttaaatagaaggaagaagggaagaccctgacctttcagggtacctggggaggtaagaagtaatctatgtaacaggaatggggaaagagagcaggtaggtagagagacgagtttttttttttttttttttttgagatggagtctcactctgtcacccaggctggagcgatctctgatcactgcaacctacacctcccgggttcaagcaattctcctgcctcagcctcccaagtagttgggattacaaacatacaaacacaacaaaaacaaaaaaacaaacaaacaaaaacacttttatttaggtccaggggtacatgtgtgggtttgttatataggtaaactcatgtcataggggtttgttgtacagattattttgtcacccaggtacaaagctttgtacacaataagttatttttttctgatcctttccctcctcccaacctgcacccttaaagaaaatgtgccacatatgcatggaatactatgcagccataaaaaaggatgacaaccatgcctggctaatttttgtatttttagtagagacagggtttcaccatgttggccaggctggtctcgatctcctgacctcgtgatccaccagccttggcctcccaaagtgctgggattacaggcatgagccactgcgcctggccagttgactgcttttgtaatcaagaaaccttgtgatatataaatagccactttccaaaaaaaaaaaatcaccagaatacctccagtattgacaagctgtggggtgttgagagaattcgagattgtcttagcagcctgggacctttcagtagtcctgaacagaacagtgg

SEQ ID NO: 33028 - DNA, 1055 bp, Homo sapiens
agtgtacagtgagccgagatcttgccactgcagtccagcctgggtgacagagtgagactctgtctcaaaaaaaaaaattaattaaaaataaaagtgagagctaaatgatgagaacctatggaaaagagacactgatttttttttcctggtgttacccacatcacgaagaatattgttttttcacctcactgatgcttggaaccacctgtcaaccagttttctyatattgttttatttaaatagaaggaagaagggaagaccctgacctttcagggtacctggggaggtaagaagtaatctatgtaacaggaatggggaaagagagcaggtaggtagagagacgagtttttttttttttttttttttgagatggagtctcactctgtcacccaggctggagcgatctctgatcactgcaacctacacctcccgggttcaagcaattctcctgcctcagcctcccaagtagttgggattacaaacatacaaacacaacaaaaacaaaaaaacaaacaaacaaaaacacttttatttaggtccaggggtacatgtgtgggtttgttatataggtaaactcatgtcataggggtttgttgtacagattattttgtcacccaggtacaaagctttgtacacaataagttatttttttctgatcctttccctcctcccaacctgcacccttaaagaaaatgtgccacatatgcatggaatactatgcagccataaaaaaggatgacaaccatgcctggctaatttttgtatttttagtagagacagggtttcaccatgttggccaggctggtctcgatctcctgacctcgtgatccaccagccttggcctcccaaagtgctgggattacaggcatgagccactgcgcctggccagttgactgcttttgtaatcaagaaaccttgtgatatataaatagccactttccaaaaaaaaaaaatcaccagaatacctccagtattgacaagctgtggggtgttgagagaattcgagattgtcttagcagcctgggacctttcagtagtcctgaacagaacagtgg

SEQ ID NO: 33029 - DNA, 1055 bp, Homo sapiens
agtgtacagtgagccgagatcttgccactgcagtccagcctgggtgacagagtgagactctgtctcaaaaaaaaaaattaattaaaaataaaagtgagagctaaatgatgagaacctatggaaaagagacactgatttttttttcctggtgttacccacatcacgaagaatattgttttttcacctcactgatgcttggaaccacctgtcaaccagttttctcatattgttttatttaaatagaaggaagaagggaagaccctgacctttcagggtacctggggaggtaagaagtaatctatgtaacaggaatggggaaagagagcaggtaggtagagagacgagtttytttttttttttttttttgagatggagtctcactctgtcacccaggctggagcgatctctgatcactgcaacctacacctcccgggttcaagcaattctcctgcctcagcctcccaagtagttgggattacaaacatacaaacacaacaaaaacaaaaaaacaaacaaacaaaaacacttttatttaggtccaggggtacatgtgtgggtttgttatataggtaaactcatgtcataggggtttgttgtacagattattttgtcacccaggtacaaagctttgtacacaataagttatttttttctgatcctttccctcctcccaacctgcacccttaaagaaaatgtgccacatatgcatggaatactatgcagccataaaaaaggatgacaaccatgcctggctaatttttgtatttttagtagagacagggtttcaccatgttggccaggctggtctcgatctcctgacctcgtgatccaccagccttggcctcccaaagtgctgggattacaggcatgagccactgcgcctggccagttgactgcttttgtaatcaagaaaccttgtgatatataaatagccactttccaaaaaaaaaaaatcaccagaatacctccagtattgacaagctgtggggtgttgagagaattcgagattgtcttagcagcctgggacctttcagtagtcctgaacagaacagtgg

SEQ ID NO: 33030 - DNA, 1055 bp, Homo sapiens
agtgtacagtgagccgagatcttgccactgcagtccagcctgggtgacagagtgagactctgtctcaaaaaaaaaaattaattaaaaataaaagtgagagctaaatgatgagaacctatggaaaagagacactgatttttttttcctggtgttacccacatcacgaagaatattgttttttcacctcactgatgcttggaaccacctgtcaaccagttttctcatattgttttatttaaatagaaggaagaagggaagaccctgacctttcagggtacctggggaggtaagaagtaatctatgtaacaggaatggggaaagagagcaggtaggtagagagacgagtttttttttttttttttttttgagatggagtctcactctstcacccaggctggagcgatctctgatcactgcaacctacacctcccgggttcaagcaattctcctgcctcagcctcccaagtagttgggattacaaacatacaaacacaacaaaaacaaaaaaacaaacaaacaaaaacacttttatttaggtccaggggtacatgtgtgggtttgttatataggtaaactcatgtcataggggtttgttgtacagattattttgtcacccaggtacaaagctttgtacacaataagttatttttttctgatcctttccctcctcccaacctgcacccttaaagaaaatgtgccacatatgcatggaatactatgcagccataaaaaaggatgacaaccatgcctggctaatttttgtatttttagtagagacagggtttcaccatgttggccaggctggtctcgatctcctgacctcgtgatccaccagccttggcctcccaaagtgctgggattacaggcatgagccactgcgcctggccagttgactgcttttgtaatcaagaaaccttgtgatatataaatagccactttccaaaaaaaaaaaatcaccagaatacctccagtattgacaagctgtggggtgttgagagaattcgagattgtcttagcagcctgggacctttcagtagtcctgaacagaacagtgg

SEQ ID NO: 33031 - DNA, 1072 bp, Homo sapiens
agcctctagcctgatccacctagaagtcccttgagcacgccatgtccatacccttcccacagcatcctgctccccttctcagtgaagagcatctcccaccaaccccagctagaaacccagttctcctagacccctctgtttgactcattccccaaatccacacagaccaagtccttcatagtcattctccttggaaccactgacaactattccctctgctactgccttggttcaaggacctcttgcccaacattaatgcaagaactgctaatttatttckgggcccatatccagtgcattccccacatgaagacaagaatggctccaaaacacgtatctgatgatgttgctttccttctgaaaatccttcaaaggttgccccataaccttcaagttcaaactcctcagctagcacaatacagcctttcatgattttcactctgcttatcttcaaaggctaagcatcaggtccccataagcaacatgccacttcacacttccatgcctttaactaagctgttctctgcctggattgctaggccaccctactgcctttttttttttttttctttaatcttctcttttcttctactattttttgccaactccaattcatttttcaaatgcaactcggtcaccactttttctgggaacccttctcagattcacccagtatgacttatttgaccctcctctgggcccctaatgtctctgggattgccttgggcatagtccctactcaccacatcctactgtgctgtattgtaattacctgtaggcctcctctagcagacgctaagctcctgtagggcagcttaggctgtcttgtaagacttgaatgcctcatacatccaatgccttccattagtatcatttaatgaataaataaatgcctgtaggaataaacaaactgccttcaggaaaggaaaatcaaacttcacttgaaattaaaacctcatctacttgggttcttgggctccatgaattaatgataagttatttagcagctggtctaagtttatcttaatttaacaaaccccttcctctaaggatgtgccaattaacagcataa

SEQ ID NO: 33032 - DNA, 700 bp, Homo sapiens
tccccagctgctaaatgacataaccaggcctaagttgtcttctggcttcaaatccacggttctttccaccacatgctccaactctctgctcattgaggatgaatcctttgtttcactttcctggggtaattgtgtggcttttgtaaaagatccatcactctgaaggtgaattggaccatcaggtaaacatttaaggaaagtagaggagctaagctggaatgtaagtagatgcctggcattataactgatggcgtaattacttcccataacgtggagcaccaatcacagagtgggtttaatagacagaggctcttaagtatttacaagtatggataaagtgactgcccttcatcagttcaagcaggcrctggagtccgccttccactgttaactgggacagtatcagtgtgagtatttctggccccacctggcattcagatcctctgccacccctatgacctgcctttgtagccttttcccctaccacttccctttcctcagtttgtcatccagctaaacgggggtaccggtttttgttctccaaacagtagcccccctttttcttgtctctctgacttggcacacctccagtgacattcctttccagggtccagctcaaatgccaccccatgcccgtgaggctgtcctgcttttcccacgctggacctcggctccctccgccttataaatccaccagcac

SEQ ID NO: 33033 - DNA, 700 bp, Homo sapiens
tccccagctgctaaatgacataaccaggcctaagttgtcttctggcttcaaatccacggttctttccaccacatgctccaactctctgctcattgaggatgaatcctttgtttcactttcctggggtaattgtgtggcttttgtaaaagatccatcactctgaaggtgaattggaccatcaggtaaacatttaaggaaagtagaggagctaagctggaatgtaagtagatgcctggcattataactgatggcgtaattacttcccataacgtggagcaccaatcacagagtgggtttaatagacagaggctcttaagtatttacaagtatggataaagtgactgcccttcatcagttcaagcaggcactggagtcygccttccactgttaactgggacagtatcagtgtgagtatttctggccccacctggcattcagatcctctgccacccctatgacctgcctttgtagccttttcccctaccacttccctttcctcagtttgtcatccagctaaacgggggtaccggtttttgttctccaaacagtagcccccctttttcttgtctctctgacttggcacacctccagtgacattcctttccagggtccagctcaaatgccaccccatgcccgtgaggctgtcctgcttttcccacgctggacctcggctccctccgccttataaatccaccagcac

SEQ ID NO: 33034 - DNA, 1159 bp, Homo sapiens
tccttcttttctgtagaaacatggagcccagactgaaattagatactgaagctcaaataaattatttaaaaatgtgtgcctttattacccttgaactttctgccaataaagaacaatactaacaagcatatggatgtaaacactcctaaaaattttactatcagaagttgttcawgcctttattaaggaaaataacacagtttggaagcactaaattttttagggatgtcagaacaaataaagaaagttgacctagctagcctagggcactgctcttgaaattacatttactgtaactccttccctttggctaatttagtttttatctactctggatgataaactcacagcctgggttgtgcaatacaagcatgcttgacagaaggcaggcaattgcaagaataatgatgagccatttgaacactctggcttcttcccttccagaagaacttttacctattatagcactggctctctattgggattcttagcaagtgtattagcacttaactttccactttaatgaacgactgacatgtataattctatggagagcataggccaatattttattagtttctgatagtattacaatggtttgagtctattgaactgatatagaagatctatgggaagagaagagagagggctacatatattgggaagttgcccattaatttggtctgtatatgagtcagaattcattttttcttctatatttctatgtatccagagaagcctgttcatgattgagagacacatcaaaaacctcatgacctcattagcttttgtaatgtcgcctctggttttgggttgagctatggctcctcggcccctgagaaagtatttgagcacgttttcattatttggttcagaaagtagcagtatttgacaaaatgtttctgaaaagaggaaacaagatgcccaactaccagagcctcagattcctctccctcccagtaccttcaaaccagcttgaagttttaaactcaggccacctccacactgagaggtctggccagcccgtatgcaaggacatggttcctaggagtgtggtggaggcgtgtggtgaagatcctgctgaagaagacagaaggttctcaagatgtccaggactcttctgttatcaatgtacttctcttctacttaaagccacatg

SEQ ID NO: 33035 - DNA, 1159 bp, Homo sapiens
tccttcttttctgtagaaacatggagcccagactgaaattagatactgaagctcaaataaattatttaaaaatgtgtgcctttattacccttgaactttctgccaataaagaacaatactaacaagcatatggatgtaaacactcctaaaaattttactatcagaagttgttcatgcctttattaaggaaaataacacagtttggaagcaytaaattttttagggatgtcagaacaaataaagaaagttgacctagctagcctagggcactgctcttgaaattacatttactgtaactccttccctttggctaatttagtttttatctactctggatgataaactcacagcctgggttgtgcaatacaagcatgcttgacagaaggcaggcaattgcaagaataatgatgagccatttgaacactctggcttcttcccttccagaagaacttttacctattatagcactggctctctattgggattcttagcaagtgtattagcacttaactttccactttaatgaacgactgacatgtataattctatggagagcataggccaatattttattagtttctgatagtattacaatggtttgagtctattgaactgatatagaagatctatgggaagagaagagagagggctacatatattgggaagttgcccattaatttggtctgtatatgagtcagaattcattttttcttctatatttctatgtatccagagaagcctgttcatgattgagagacacatcaaaaacctcatgacctcattagcttttgtaatgtcgcctctggttttgggttgagctatggctcctcggcccctgagaaagtatttgagcacgttttcattatttggttcagaaagtagcagtatttgacaaaatgtttctgaaaagaggaaacaagatgcccaactaccagagcctcagattcctctccctcccagtaccttcaaaccagcttgaagttttaaactcaggccacctccacactgagaggtctggccagcccgtatgcaaggacatggttcctaggagtgtggtggaggcgtgtggtgaagatcctgctgaagaagacagaaggttctcaagatgtccaggactcttctgttatcaatgtacttctcttctacttaaagccacatg

SEQ ID NO: 33036 - DNA, 1159 bp, Homo sapiens
tccttcttttctgtagaaacatggagcccagactgaaattagatactgaagctcaaataaattatttaaaaatgtgtgcctttattacccttgaactttctgccaataaagaacaatactaacaagcatatggatgtaaacactcctaaaaattttactatcagaagttgttcatgcctttattaaggaaaataacacagtttggaagcactaaattttttagggatgtcagaacaaataaagaaagttgacctagctagcctagggcactgctcttgaaattacatttactgtaactccttccctttggctaatttagtttttatctactctggatgataaactcacagcctgggttgtgcaatacaagcatgcttgacagaaggcaggcaattgcaagaataatgatgagccatttgaacactctggcttcttcccttccagaagaacttttacctattatagcactggctctctattgggattcttagcaagtgtattagcacttaactttccactttaatgaacgactgacatgtataattctatggagagcataggccaatattttattagtttctgatagtattacaatggtttgagtctattgaactgatatagaagatctatgggaagagaagagagagggctacatatattgggaagttgcccattaatttggtctgtatatgagtcagarttcattttttcttctatatttctatgtatccagagaagcctgttcatgattgagagacacatcaaaaacctcatgacctcattagcttttgtaatgtcgcctctggttttgggttgagctatggctcctcggcccctgagaaagtatttgagcacgttttcattatttggttcagaaagtagcagtatttgacaaaatgtttctgaaaagaggaaacaagatgcccaactaccagagcctcagattcctctccctcccagtaccttcaaaccagcttgaagttttaaactcaggccacctccacactgagaggtctggccagcccgtatgcaaggacatggttcctaggagtgtggtggaggcgtgtggtgaagatcctgctgaagaagacagaaggttctcaagatgtccaggactcttctgttatcaatgtacttctcttctacttaaagccacatg

SEQ ID NO: 33037 - DNA, 1159 bp, Homo sapiens
tccttcttttctgtagaaacatggagcccagactgaaattagatactgaagctcaaataaattatttaaaaatgtgtgcctttattacccttgaactttctgccaataaagaacaatactaacaagcatatggatgtaaacactcctaaaaattttactatcagaagttgttcatgcctttattaaggaaaataacacagtttggaagcactaaattttttagggatgtcagaacaaataaagaaagttgacctagctagcctagggcactgctcttgaaattacatttactgtaactccttccctttggctaatttagtttttatctactctggatgataaactcacagcctgggttgtgcaatacaagcatgcttgacagaaggcaggcaattgcaagaataatgatgagccatttgaacactctggcttcttcccttccagaagaacttttacctattatagcactggctctctattgggattcttagcaagtgtattagcacttaactttccactttaatgaacgactgacatgtataattctatggagagcataggccaatattttattagtttctgatagtattacaatggtttgagtctattgaactgatatagaagatctatgggaagagaagagagagggctacatatattgggaagttgcccattaatttggtctgtatatgagtcagaattcattttttcttctatatttctatgtatccagagaagcctgttcatgattgagagacacatcaaaaacctcatgacctcattagcttttgtaatgtcgcctctggttttgggttgagctatggctcctcggcccctgagaaagtatttgagcacgttttcattatttggttcagaaagtagcagtatttgacaaaatgtttctgaaaagaggaaacaagatgcccaactaccagagccycagattcctctccctcccagtaccttcaaaccagcttgaagttttaaactcaggccacctccacactgagaggtctggccagcccgtatgcaaggacatggttcctaggagtgtggtggaggcgtgtggtgaagatcctgctgaagaagacagaaggttctcaagatgtccaggactcttctgttatcaatgtacttctcttctacttaaagccacatg

SEQ ID NO: 33038 - DNA, 1159 bp, Homo sapiens
tccttcttttctgtagaaacatggagcccagactgaaattagatactgaagctcaaataaattatttaaaaatgtgtgcctttattacccttgaactttctgccaataaagaacaatactaacaagcatatggatgtaaacactcctaaaaattttactatcagaagttgttcatgcctttattaaggaaaataacacagtttggaagcactaaattttttagggatgtcagaacaaataaagaaagttgacctagctagcctagggcactgctcttgaaattacatttactgtaactccttccctttggctaatttagtttttatctactctggatgataaactcacagcctgggttgtgcaatacaagcatgcttgacagaaggcaggcaattgcaagaataatgatgagccatttgaacactctggcttcttcccttccagaagaacttttacctattatagcactggctctctattgggattcttagcaagtgtattagcacttaactttccactttaatgaacgactgacatgtataattctatggagagcataggccaatattttattagtttctgatagtattacaatggtttgagtctattgaactgatatagaagatctatgggaagagaagagagagggctacatatattgggaagttgcccattaatttggtctgtatatgagtcagaattcattttttcttctatatttctatgtatccagagaagcctgttcatgattgagagacacatcaaaaacctcatgacctcattagcttttgtaatgtcgcctctggttttgggttgagctatggctcctcggcccctgagaaagtatttgagcacgttttcattatttggttcagaaagtagcagtatttgacaaaatgtttctgaaaagaggaaacaagatgcccaactaccagagcctcagattcctctccctcccagtaccttcaamccagcttgaagttttaaactcaggccacctccacactgagaggtctggccagcccgtatgcaaggacatggttcctaggagtgtggtggaggcgtgtggtgaagatcctgctgaagaagacagaaggttctcaagatgtccaggactcttctgttatcaatgtacttctcttctacttaaagccacatg

SEQ ID NO: 33039 - DNA, 517 bp, Homo sapiens
ggaaggtcttgaggagaggctcctggtaggttttttstgatcaatagtcccaagggtcaaaaatatcaacagtgacagtcagtgctgggatcattctccctcacagatctgaacccttgagtatgttgattttaatgacagggacgttctttatccagccttatgcctgaccaactctgattcatccttcaagtgaggagatatctcttcaccctcgaagctttccctgatgcacaccccccggccaggcctgccccagagctccccactgccaccatcacttccccagtgcaggcccttacccccgtctggcctgttgggcttattgactgaggcccccaccctccccagccagcagcatgcctgccccacaaagctatccagcaaatacagattgagacacaaatggatgaaagacatggaaggaatgtatggatggaatggagggatggagtggacacatggaatggatggatagatggagtggatggatggagtggatgggtagaatggatgg

SEQ ID NO: 33040 - DNA, 517 bp, Homo sapiens
ggaaggtcttgaggagaggctcctggtaggttttttctgatcaatagtcccaagggtcaaaaatatcaacagtgacagtcagtgctgggatcattctccctcacagatctgaacccttgagtatgttgattttaatgacagggacgttctttatccagccttatgcctgaccaactctgattcatccttcaagtgaggagatatctcttcaccctcgaagctttccctgatgcacaccccccggccaggcctgccccagagctccccactgccaccatcacttccccagtgcaggcccttacccccgtctggcctgttgggcttattgactgaggcccccaccctccccagccagcagcatgcctgccccacaaagctatccagcaaatacagattgagacacaaatggatgaaagacatggaaggaatgtatggatggaatggagggatggagtggacacatggaatggatggatagatggagtggatggatggartggatgggtagaatggatgg

SEQ ID NO: 33041 - DNA, 450 bp, Homo sapiens
gatttttgctctgttgtgccaaatgtttataggttttttttttttttttgtccsctcagtttgtcatgattttaccaggtaaaatgtgatctctttgtatatctattttaaaacataaaggccctggatttgacaaaacgatgacagcaatttctttagctcctccagcacctcatgaaccaccatccaatgcttccctggtctgggaggaaagaagtgagagcagagggtggtgctgcatctggaaatgtgatcaaaatggtgaaaggtgctcgtgaggcaggcaggcagctccattttctccctcctgccctctcacacaacttaccgaacgtgatcatgtgcagggcagtgtgtagtagttgttgggggaattcgtagctactgggggttttagacaaagaggaggccattctatccatccgctcgatctgtccatttcatccatcc

SEQ ID NO: 33042 - DNA, 552 bp, Homo sapiens
tcaaacaaccagatctcatgagaactcacatattatcaggagaacagcaccaagagggtggtgctaaaccgttcatagagctctgcttccatgatccyatcaactcccaccatgacctcattttggacactgggaattacaactcaacatgagatttgagcagggacacatatccaaaccatatcacataccattcttcctctgtctttcaagtccctaatattcattcctgcaccacctgccaccttaccacaaagccaatgctacatgtgttaggtttctgttatagcagcaccctgccttaagataccaatgtatgtattcgttagggttgtattcgctgctataacaaaaaatcagaggcttaatacaaataactttctttcccacataatagtaaaatgatttctagttggaaatcgtaagcaatatataaataggctgataaaaaaggtgtttgtactaatgtccaaaaataatagagtaaaagacattgtggttctatgctataactataaggctttgaaggaaggataagatgttaacctgtga

SEQ ID NO: 33043 - DNA, 552 bp, Homo sapiens
tcaaacaaccagatctcatgagaactcacatattatcaggagaacagcaccaagagggtggtgctaaaccgttcatagagctctgcttccatgatcccatcaactcccaccatgacctcattttggacactgggaattacaactcaacatgagatttgagcagggacacatatccraaccatatcacataccattcttcctctgtctttcaagtccctaatattcattcctgcaccacctgccaccttaccacaaagccaatgctacatgtgttaggtttctgttatagcagcaccctgccttaagataccaatgtatgtattcgttagggttgtattcgctgctataacaaaaaatcagaggcttaatacaaataactttctttcccacataatagtaaaatgatttctagttggaaatcgtaagcaatatataaataggctgataaaaaaggtgtttgtactaatgtccaaaaataatagagtaaaagacattgtggttctatgctataactataaggctttgaaggaaggataagatgttaacctgtga

SEQ ID NO: 33044 - DNA, 552 bp, Homo sapiens
tcaaacaaccagatctcatgagaactcacatattatcaggagaacagcaccaagagggtggtgctaaaccgttcatagagctctgcttccatgatcccatcaactcccaccatgacctcattttggacactgggaattacaactcaacatgagatttgagcagggacacatatccaaaccatatcacataccattcttcctctgtctttcaagtccctaatatycattcctgcaccacctgccaccttaccacaaagccaatgctacatgtgttaggtttctgttatagcagcaccctgccttaagataccaatgtatgtattcgttagggttgtattcgctgctataacaaaaaatcagaggcttaatacaaataactttctttcccacataatagtaaaatgatttctagttggaaatcgtaagcaatatataaataggctgataaaaaaggtgtttgtactaatgtccaaaaataatagagtaaaagacattgtggttctatgctataactataaggctttgaaggaaggataagatgttaacctgtga

SEQ ID NO: 33045 - DNA, 552 bp, Homo sapiens
tcaaacaaccagatctcatgagaactcacatattatcaggagaacagcaccaagagggtggtgctaaaccgttcatagagctctgcttccatgatcccatcaactcccaccatgacctcattttggacactgggaattacaactcaacatgagatttgagcagggacacatatccaaaccatatcacataccattcttcctctgtctttcaagtccctaatattcattcctgcaccacctgccaccttaccacaaagccaatgctacatgtgttaggtttctgttatagcagcaccctgccttaagataccaatgtatgtattcgttagggttgtattcgctgctataacaaaaaatcagaggcttaatacaaataactttctttcccacataatagtaaaatgatttytagttggaaatcgtaagcaatatataaataggctgataaaaaaggtgtttgtactaatgtccaaaaataatagagtaaaagacattgtggttctatgctataactataaggctttgaaggaaggataagatgttaacctgtga

SEQ ID NO: 33046 - DNA, 811 bp, Homo sapiens
gatcctcccgcctcagcctccaaaagtgctgggattgcaggcgtgagccactgtaccctgccaaagcaaacctttgatgatcctttgttgcaaaataaagagcaaactctttataatggctttacaaaattcctttacaattcagtttcttgatcccattccstatcttgctttccttcttttttttttttttttttttttttttgagacagggttctcccacctcaccctcccaaagtgctgggattacaggtgtgagccaccatgcctagccatgactggcttcttctgtacattaatcttgctgccctatgggatatttcagctgtagcatacacaacccactagcaacttcctcatgtctctcaattaaaaactcttgcaagacaatgcatcattttgaccaagtcccagaagttattggttttcttagccagttagataggcccaacttggttaggtagttaactccgttagctgtgaccaatatgagctatgtctgttggacatcatgggtttgcagagatttttctgagggaggagggcagaggatgggcagagcagacctacattattacagaaagatggaactaggattccaacccaggtcttctgacccccagtcaaatacttcttccacttgaagaagcaacctattaaaattaaaaaagttaacatgaagctcttttcactttttccattgaaaagctactagcaggctacacatatattacaatctgaattaatatactatgcatacatgtaaatattgactgatttctttagtaccaataagttggtattctagata

SEQ ID NO: 33047 - DNA, 590 bp, Homo sapiens
aaatattaaaaagttaatatagaaatgtccttctcagatctgtccaagtttaatttgctatgccttaagacataattattagttcatagtgtgaagtagattattataaatgttttctttttagtgtgaaagaaaatgtctttatttaaagcccgtgattggtggtctactattctgggagataaagaagaatttgatcaaggctgtttgtgtctggctaatgttgacaatagtggaaatggacaaggtaagcaacttacaaccatacatcttggatgaaagttttaaagagatcaaataagactgggcacggtggccgactgctgtaatctcagttcttttgggaggccgasgtgggcagatcacgaggtcaggagtacgagaccagcctggccaacatggtgaaacactgtctctactaaaaatacaaaattagctgggcttggtggtgggcatctgtaatcccagctacctgggaggctgaggcaggagaatcgcttgaacccagaaggcagaggttgcggtgagctgagatagtgccactacactccaacctgggcaacagagcaaggctccatctcaaaaaaaaa

SEQ ID NO: 33048 - DNA, 1240 bp, Homo sapiens
tgccttgccttggggaaaatcccagcctctggactatgatgagatgtgcctacactcgaacccctggagcctcctgcttccctaagctgcctcttttccctttggtgagtctctctttgaccagacttctgactttggtcaaatggtgttttatttggaatttggttgaagagagccttccccgctttttttccgagaggyatctttcctcctctgtttgggagctctcctgctgggaggggtcatcatcttcctgtcagtctcagctgggaggtttaggtgtagggatttccccttatttggagaaggcggcttattgtccttcttggtaagtatgtattttattttctgtctgtgtggctttggtgtattcagtccttgtgttttaatttgtttttgtgcatttggcaataaaatgaatcatctagatcaatttagttagaaatgggaagtcagagtttcacagcatgccaaaatattatctgggactccagctggtaacatgttgaaacattatgggatcattcagacagtctattattcttcaaactaaactaagacaccagcaataaaatcatacacttcaaataatacttatatctcaattgatatcttgaggctcaaaaaattctcatgactcaaagattgcctttttataaaacactggcacaaaactggcagagactttttttttcaggatctttttctacaattgcttctatccttctctaaactaaactgtttcttccaaaactcctcagctattgtgacatactatttaagtaacaacacaagaaaaccaacagattcaaaagaaaatcattttgacccttgtgctgtttcttaagaacaaaagatggaattcccatataaaggaagtcttccctatactaaaaggaatggcaacatttttttttttaaaacctcagactggcaacgggtggcacatctcacacacctgtgtgagcacgcaatcatcatgaactacaaaaaggttgaggaatggcagcattctcatcttcaaggacaaataatatgctgtgcagaccttgttagaataactcttatcttttgggcctctgacataatccagtcacagtttcacagctaatttttatttgtccaatctggtaattgacttaaactgctctacgcaaaatttggttctccaccttcatattattacctatttaaaaagtcttaaaggttagccttatctgattttttcagaaacatgatt

SEQ ID NO: 33049 - DNA, 566 bp, Homo sapiens
tgtggaatctatcaaaacgatttcaagatgtagagattaaatatattttaaaccacatacatacacaagcaatctttaggagaaacttttaaaaacttatgttataggtctaaaattttcattaattcatggaaaaaaaatgtattgacaaacttttcaccagagcagaaataacaacttatgtatttggtgacttcaagatgagagcctgcacagcttagtatctccctccagttgtctctctctctctcttttttttttttttttggyagagtttcactcctgttgcccaggctggagtgcagtggcgcgatctcggctcaccgcaacctccacctcctgggttcaagcaattctccagcctcagcctcctgagtagctaggatgacaagcatgcgccatcgtgctcggctaattttgtatttttagtcgagacggggtttctccattttggtagggctggtctagaactcctgacctcaggtgatccgccagcctccgcctctcaaagtgttgggattacaggcgtaacgaccgtgcccggcccagatctcttaaaaagtcat

SEQ ID NO: 33050 - DNA, 1638 bp, Homo sapiens
  misc_feature (1)...(1638): n = A,T,C or G
ccaggactggagcttagtcaccagggagtcactctgattgtcagggctttgtttccttgctgtgttgagcaggctggaattgaggggcagactcattcattcctgacactaaaactatttcttcctggtgaagaaagcatacagagaaatggaatatgaaataaagcctttatgtgctctacctaaattaataatttatttatttttttttgtatatttgctatgtcacctttagaaagtaagaggcagctctcacttgctgctgatgacctgcctcgccatgcacatgtcctgccagcaccccacagaaatgcttccattacccacagtctttcaccagatgagaccagtgtccaggctactggctcctcacctcacttgaagtgatggtaaagatgtaaaatttggtgctgatgtccgagccttaatgcttcaaagtgtagactttttgtcgaggctgtagccattacaatggggccaaagggaagaacagtaattattgaacatagctggggaagtccaaagtaacataagatggtgtgactgatgcaaagtcaattgacttaaaggataaatataaaagcattggagctaaacttgtccaagatgttgccaataacacagatgaagagactgggggatggcactatcactgctgctgtactggtatgctctatttccaaataagccttccagaaggttagcaaaggtgctaatccagtggaaatcaagagaggtgtgatgttagctgttgatgctgtaattgctgaacttaaaaagcagtctaaacctgtgaccaaacctgaagaaattgcacaggttgctacaatttctgcaaatggagacaaagaaattggtaacatcatctctgatgcaatgaaaaagtttggaagaaagggcatcatcacagtaaaggatggaaaaacactgactgatgaattagaaattattgaaggcatgaaaatttgatcgaggatatatttctccatactttattaatacatcaaaaggtgagaaatgtgaattccaggatgcctacgttctgttgcatgaaaagaaaatttctagtgtccagtccattgtamctgctcttgaaattgccaatgcttactgtaagcctttggtcataattgctggagacattgatggagaagctctaactacactcatcctgaataggctaaaggttggtcttcaggttgtggcagtcaaagctccagggtttggtgacaatagaaagaaccagcttaaagatacggttattgctactggtggtacagtgtttggagaagagggctgacactaaatcttgaagacgttcagcctcgtgacgtaggagaagttggagaggtcactgtgatcaaagattatgccatgctcttaaaaggaaaaggtaacaagtctcaaattgaaaaatgtgttcaagaaatcattgaccagtcagatgtcacaactagtgaatacgaaaaggaaaaactgagtggagaaactttcagatggagtagctgtgctgaaggttggtgggacaagtgatgttgaagtgaatgaagagaaagacagagttataggtgcacttaatgctacaagagctgctgttgaagaaggcattgtntagggagagggttgtgcctgcttcga

SEQ ID NO: 33051 - DNA, 1638 bp, Homo sapiens
  misc_feature (1)...(1638): n = A,T,C or G
ccaggactggagcttagtcaccagggagtcactctgattgtcagggctttgtttccttgctgtgttgagcaggctggaattgaggggcagactcattcattcctgacactaaaactatttcttcctggtgaagaaagcatacagagaaatggaatatgaaataaagcctttatgtgctctacctaaattaataatttatttatttttttttgtatatttgctatgtcacctttagaaagtaagaggcagctctcacttgctgctgatgacctgcctcgccatgcacatgtcctgccagcaccccacagaaatgcttccattacccacagtctttcaccagatgagaccagtgtccaggctactggctcctcacctcacttgaagtgatggtaaagatgtaaaatttggtgctgatgtccgagccttaatgcttcaaagtgtagactttttgtcgaggctgtagccattacaatggggccaaagggaagaacagtaattattgaacatagctggggaagtccaaagtaacataagatggtgtgactgatgcaaagtcaattgacttaaaggataaatataaaagcattggagctaaacttgtccaagatgttgccaataacacagatgaagagactgggggatggcactatcactgctgctgtactggtatgctctatttccaaataagccttccagaaggttagcaaaggtgctaatccagtggaaatcaagagaggtgtgatgttagctgttgatgctgtaattgctgaacttaaaaagcagtctaaacctgtgaccaaacctgaagaaattgcacaggttgctacaatttctgcaaatggagacaaagaaattggtaacatcatctctgatgcaatgaaaaagtttggaagaaagggcatcatcacagtaaaggatggaaaaacactgactgatgaattagaaattattgaaggcatgaaaatttgatcgaggatatatttctccatactttattaatacatcaaaaggtgagaaatgtgaattccaggatgcctacgttctgttgcatgaaaagaaaatttctagtgtccagtccattgtacctgctcttgaaattgccaatgcttactgtaagcctttggtcataattgctggagacattgatggagaagctctaactacactcatcctgaataggctaaaggttggtcttcaggttgtggcagtcaaagctccagggtttggtgacaatagaaagaaccagcttaaagatacggttattgctactggtggtacagtgtttggagaagagggctgacactaaatcttgaagacgttcagcctcgtgacgtaggagaagttggagaggtcactgtgatcaaagattatgccatgctcttaaaaggaaaaggtaacaagtctcaaattgaaaaatgtgttcaagaaatcattgaccagtcagatgtcacaactagtgaatacgaaaaggaaaaactgagtggagaaactttcagatggagtagctgtgctgaaggttggtgggacaagtgatgttgaagtgaatgaagagaaagacagagttataggtgcacttaatgctacaagagctgctgttraagaaggcattgtntagggagagggttgtgcctgcttcga

SEQ ID NO: 33052 - DNA, 584 bp, Homo sapiens
actcgaccctaaaacagattcttacttgattatttccacgttccaaggggaaatacaaaagtcagagttgagtgaaaataaaagtggagtaaggcttcagaaggctgtggtgggtgttggagaaacgttgctagggcataaagctaggatartaaaatctgagaaatcccagtgtttatctataggtggaaatcatattccacatgtggatagagtcagggatccctgtgttttaaaatcagtgagggaattgaatatctggacttgtgccaattaacatacaaaactccgtgcttttgatgttctcattcacaagatatctgtgttccttgtttattagcaaccatagtcataggcttcctaattttgaccacgggaaaagaggagaggcctctgcgtgtttgtgtctgttggttaggctgtggtgcggctggtgtcacacttcagtgaaagtctggcttttcatcacaggttgatctgaaaattgtgcacaagactggtgtctcacatgttctttctccaacctcagcttttcttagtgcctaaagtgtctgcaagtggaaatccagaggaagacagagaga

SEQ ID NO: 33053 - DNA, 584 bp, Homo sapiens
actcgaccctaaaacagattcttacttgattatttccacgttccaaggggaaatacaaaagtcagagttgagtgaaaataaaagtggagtaaggcttcagaaggctgtggtgggtgttggagaaacgttgctagggcataaagctaggataataaaatctgagaaatcccagtgtttatctataggtggaaatcatattccacatgtggatrgagtcagggatccctgtgttttaaaatcagtgagggaattgaatatctggacttgtgccaattaacatacaaaactccgtgcttttgatgttctcattcacaagatatctgtgttccttgtttattagcaaccatagtcataggcttcctaattttgaccacgggaaaagaggagaggcctctgcgtgtttgtgtctgttggttaggctgtggtgcggctggtgtcacacttcagtgaaagtctggcttttcatcacaggttgatctgaaaattgtgcacaagactggtgtctcacatgttctttctccaacctcagcttttcttagtgcctaaagtgtctgcaagtggaaatccagaggaagacagagaga

SEQ ID NO: 33054 - DNA, 551 bp, Homo sapiens
tatccttttataattaaatggaagagttttggggcacctagagaagctcataatatatgcctgggaactttatacagtgaacccttgccataagtgccccatgtggtctcttcactgttctccatcacaactttggctttcagatgactttagcttygctattcctttattttgtcctggcatgtattgaaagagaagttaaaaaaaaaaaaagacagggcactgaaagagagagagagagaaagaatggtaagaaaagacagaagggatggaaaaaggaagaaggaaagggagggggaaaggagagggaggaaagcagggagggaggaataaagaaaagggagggaaggaaggagagaggaaaggagggaacaaaggtgggaagggtaaagagggaagaagagagaaagggtcgtagatcgcatttccttgcttactcatagacaggacttgtattagcccatttcacacctctataaagaactgagtaatttattaaaaaaaaaaaaagataggtttaattgactcacagttctgcagggttggggagg

SEQ ID NO: 33055 - DNA, 389 bp, Homo sapiens
tttttgagaaaaactaaaacacatttttggtttgccattgcacagaayggcatgaggaactcatagcatgacttaaagaagatgcccagttttgagattgaattaatgggcaactgctcaaagatgtgatattcttaaatatactctgagatctgaagttaacaaagagaaaaaaaatagtgcattgattttataagcaaaggaactacaaacactaaagaacaacaattaacaacatgacaatagtaagtcattacctatcactttgcatgtaaatggattaaattttctactcaaaacatgtaacgtggttgaatgtatcccaacgccaggtccaactctatgctgtctacaagagcctccctttagctagacggactcacaccggc

SEQ ID NO: 33056 - DNA, 1169 bp, Homo sapiens
taatgaccaatgatgatgagctttttttcatgtttgttggctgcataaatgtctttttttgagaaatgtctgttcacatcctttgcccactttttgatggggttgaaactcttgtggtgatcctagttaaaacacaactctgygtggataggtattgggtagcaattgactcttcctaagatttttttttttttcctgagacaaacagtaggaggttgacactatagccatcaccaaataaacaggagacactggagctttgaaaggttgaattatttgcacaagatcactcagttgatgaatggcagagcaaaagttttgaaaccagggttatctgactttagagctcttttattcttaggtacaaaaaaaattgtctctatttttgcaaagaccacagcttacatcagagcttggctgatttctctgatgtctacatctcatcaacaatctaccttttggcttctcaacacatactgattattaatgtagggtgaccactgttagagaggtcgaaaggtatgcatccctgagtttcctccctgctttccttccttcttttcttccttccttcctgccttagtccatttgggatgctattaaaaagtaatataaacagggtggcttataaagagcagaagtttacttctcacagttctcgaggttggaagtccaagatcaagacaccggcataggtgtctggagagagctcgttcccttctctgtgttgttatgtggtgaaaggtacaaacgagctccttcaggcctcttttataagggcagcaatcccatcacaagggcttcactccacgacttaatcacctcctcaaagcccgcaccttgtaatatcatcaccaccttgggggttggcatttcaacagatgaatggggagacagaaatattcaaacattcgggccacagcacttccttacctccttcctccctccgtcaatttattcattcatgtactgattctttcattcaagtgtcatttgtttaaacaaatacgtgagtacctcgtctctgctaggtacttctcaggggctgaggaagtaaggtaaccagacagtgcttgttactttagaagctcacagtgtagagaaggagagagatgtagaaacaatataaagcaacacagatgtggaggggaaagagagaaggaggaatt

SEQ ID NO: 33057 - DNA, 1169 bp, Homo sapiens
taatgaccaatgatgatgagctttttttcatgtttgttggctgcataaatgtctttttttgagaaatgtctgttcacatcctttgcccactttttgatggggttgaaactcttgtggtgatcctagttaaaacacaactctgcgtggataggtattgggtagcaattgactcytcctaagatttttttttttttcctgagacaaacagtaggaggttgacactatagccatcaccaaataaacaggagacactggagctttgaaaggttgaattatttgcacaagatcactcagttgatgaatggcagagcaaaagttttgaaaccagggttatctgactttagagctcttttattcttaggtacaaaaaaaattgtctctatttttgcaaagaccacagcttacatcagagcttggctgatttctctgatgtctacatctcatcaacaatctaccttttggcttctcaacacatactgattattaatgtagggtgaccactgttagagaggtcgaaaggtatgcatccctgagtttcctccctgctttccttccttcttttcttccttccttcctgccttagtccatttgggatgctattaaaaagtaatataaacagggtggcttataaagagcagaagtttacttctcacagttctcgaggttggaagtccaagatcaagacaccggcataggtgtctggagagagctcgttcccttctctgtgttgttatgtggtgaaaggtacaaacgagctccttcaggcctcttttataagggcagcaatcccatcacaagggcttcactccacgacttaatcacctcctcaaagcccgcaccttgtaatatcatcaccaccttgggggttggcatttcaacagatgaatggggagacagaaatattcaaacattcgggccacagcacttccttacctccttcctccctccgtcaatttattcattcatgtactgattctttcattcaagtgtcatttgtttaaacaaatacgtgagtacctcgtctctgctaggtacttctcaggggctgaggaagtaaggtaaccagacagtgcttgttactttagaagctcacagtgtagagaaggagagagatgtagaaacaatataaagcaacacagatgtggaggggaaagagagaaggaggaatt

SEQ ID NO: 33058 - DNA, 579 bp, Homo sapiens
aagaagagagagaatttaacctctccttaatgattcatgtagcactttcatatcttgaaataaggtaatgtcagtcgtattaaatattggttaatttaatccatagatgtgtggaaagaggcagttgacagaaagtaatcttgcatgaattcaaaatgcaattttaatcaaaaygcaattttaaaatagctgcccttacatggtctggcattaaaaataaacttttttatagaatggaagaaataaaaaatgtttaaagggtggttttctttatatttccaaaaggaaagttgatagatgcagagacatgaaatgaataaggataaatgaataagtggatgaatcctcaatatcactattttataataatttattctggggaaaaaaaggcaccaaacctcagagccataagcagaaatgaaaatccaccagaaaatgcaaaattattgtgaagactttctatttgaataggaggagacttggatctgtaatcatgagtccatagatggaacattctcaggttacacccatgccataatttgaacatttgaatcaggaatgcaagctttttctctctag

SEQ ID NO: 33059 - DNA, 579 bp, Homo sapiens
aagaagagagagaatttaacctctccttaatgattcatgtagcactttcatatcttgaaataaggtaatgtcagtcgtattaaatattggttaatttaatccatagatgtgtggaaagaggcagttgacagaaagtaatcttgcatgaattcaaaatgcaattttaatcaaaatgcaattttaaaatagctgcccttacatggtctggcattaaaaataaacttttttatagaatggaagaaataaaaaatgtttaaagggtggttttctttatatttccaaaaggaaagttgatagatgcagagacatgaaatgaataaggataaatgaataartggatgaatcctcaatatcactattttataataatttattctggggaaaaaaaggcaccaaacctcagagccataagcagaaatgaaaatccaccagaaaatgcaaaattattgtgaagactttctatttgaataggaggagacttggatctgtaatcatgagtccatagatggaacattctcaggttacacccatgccataatttgaacatttgaatcaggaatgcaagctttttctctctag

SEQ ID NO: 33060 - DNA, 1015 bp, Homo sapiens
tctactctgctctggtcactttgctattaatcccatctattgtgatattgacttcacatattgtatcaagtacyagaattcaattatttaatatttttacataagacaggagagtctattcaaaaatgaaaagggtcagacatgtttcagatgccccagccttcttgggatatgggctttttcatgctaacatctgtctcttaatgaatccaaaatgaaggagtgtttgcttttaaaagaatacatttcagtgaaggtcttgatcaaagagagataattaaaaaaacactaaagaaacatcaaaaagatctaattgtagggtatctgggggatgataacacatccaggaaactttttctcagagacctgtgatagaaccttaaatgtacttttctttgttttgctctcatatgtgagcaacttagaagaaacatgtatttgtttgtattaatcctacatgactagggttgacagatttagcaaataaaagtataggacactcagttaaatgtgagttttagataaacaacatccagtttattgtggcattatctatctcatactatttgggattaaatacactaaaaagttcttcatggtttttctgaaagccaaattgaacttggcctcctatattcatctaataacactatgaatcactgaaaacattttttctttaaagatatttttcttggtgaaagtatttattacgtcactgaattttattttactaggtgtagtaggtgtaataacggcatcccaaagatgtccatgtccttatccctagaacctgggattatgttacactttacggcaaataagaactaagacagcagatagaatagttggctaatatgctgactttaaaaccgggagattaacttagatcatgtgaatgagaccaacgtaatccaagaatccttaaatgtggaaaagaaaggcagaacagtcagtgtctgggtgatgcgatgtgggaacgactcaacagccattgctggatttgaagatgaaggaa

SEQ ID NO: 33061 - DNA, 1015 bp, Homo sapiens
tctactctgctctggtcactttgctattaatcccatctattgtgatattgacttcacatattgtatcaagtactagaattcaattatttaatatttttacataagacaggagagtctattcaaaaatgaaaagggtcagayatgtttcagatgccccagccttcttgggatatgggctttttcatgctaacatctgtctcttaatgaatccaaaatgaaggagtgtttgcttttaaaagaatacatttcagtgaaggtcttgatcaaagagagataattaaaaaaacactaaagaaacatcaaaaagatctaattgtagggtatctgggggatgataacacatccaggaaactttttctcagagacctgtgatagaaccttaaatgtacttttctttgttttgctctcatatgtgagcaacttagaagaaacatgtatttgtttgtattaatcctacatgactagggttgacagatttagcaaataaaagtataggacactcagttaaatgtgagttttagataaacaacatccagtttattgtggcattatctatctcatactatttgggattaaatacactaaaaagttcttcatggtttttctgaaagccaaattgaacttggcctcctatattcatctaataacactatgaatcactgaaaacattttttctttaaagatatttttcttggtgaaagtatttattacgtcactgaattttattttactaggtgtagtaggtgtaataacggcatcccaaagatgtccatgtccttatccctagaacctgggattatgttacactttacggcaaataagaactaagacagcagatagaatagttggctaatatgctgactttaaaaccgggagattaacttagatcatgtgaatgagaccaacgtaatccaagaatccttaaatgtggaaaagaaaggcagaacagtcagtgtctgggtgatgcgatgtgggaacgactcaacagccattgctggatttgaagatgaaggaa

SEQ ID NO: 33062 - DNA, 1015 bp, Homo sapiens
tctactctgctctggtcactttgctattaatcccatctattgtgatattgacttcacatattgtatcaagtactagaattcaattatttaatatttttacataagacaggagagtctattcaaaaatgaaaagggtcagacatgtttcagatgccccagccttcttgggatatgggctttttcatgctaacatctgtctcttaatgaatccaaaatgaaggagtgtttgcttttaaaagaatacatttcagtgaaggtcttgatcaaagagagataattaaaaaaacactaaagaaacatcaaaaagatctaattgtagggtatctgggggatgataacacatccaggaaactttttctsagagacctgtgatagaaccttaaatgtacttttctttgttttgctctcatatgtgagcaacttagaagaaacatgtatttgtttgtattaatcctacatgactagggttgacagatttagcaaataaaagtataggacactcagttaaatgtgagttttagataaacaacatccagtttattgtggcattatctatctcatactatttgggattaaatacactaaaaagttcttcatggtttttctgaaagccaaattgaacttggcctcctatattcatctaataacactatgaatcactgaaaacattttttctttaaagatatttttcttggtgaaagtatttattacgtcactgaattttattttactaggtgtagtaggtgtaataacggcatcccaaagatgtccatgtccttatccctagaacctgggattatgttacactttacggcaaataagaactaagacagcagatagaatagttggctaatatgctgactttaaaaccgggagattaacttagatcatgtgaatgagaccaacgtaatccaagaatccttaaatgtggaaaagaaaggcagaacagtcagtgtctgggtgatgcgatgtgggaacgactcaacagccattgctggatttgaagatgaaggaa

SEQ ID NO: 33063 - DNA, 1015 bp, Homo sapiens
tctactctgctctggtcactttgctattaatcccatctattgtgatattgacttcacatattgtatcaagtactagaattcaattatttaatatttttacataagacaggagagtctattcaaaaatgaaaagggtcagacatgtttcagatgccccagccttcttgggatatgggctttttcatgctaacatctgtctcttaatgaatccaaaatgaaggagtgtttgcttttaaaagaatacatttcagtgaaggtcttgatcaaagagagataattaaaaaaacactaaagaaacatcaaaaagatctaattgtagggtatctgggggatgataacacatccaggaaactttttctcagagacctgtgatagaaccttaaatgtacttttctttgttttgctctcatatgtgagcaacttagaagaaacatgtatttgtttgtattaatcctacatgactagggttgacagatttagcaaataaaagtatargacactcagttaaatgtgagttttagataaacaacatccagtttattgtggcattatctatctcatactatttgggattaaatacactaaaaagttcttcatggtttttctgaaagccaaattgaacttggcctcctatattcatctaataacactatgaatcactgaaaacattttttctttaaagatatttttcttggtgaaagtatttattacgtcactgaattttattttactaggtgtagtaggtgtaataacggcatcccaaagatgtccatgtccttatccctagaacctgggattatgttacactttacggcaaataagaactaagacagcagatagaatagttggctaatatgctgactttaaaaccgggagattaacttagatcatgtgaatgagaccaacgtaatccaagaatccttaaatgtggaaaagaaaggcagaacagtcagtgtctgggtgatgcgatgtgggaacgactcaacagccattgctggatttgaagatgaaggaa

SEQ ID NO: 33064 - DNA, 1015 bp, Homo sapiens
tctactctgctctggtcactttgctattaatcccatctattgtgatattgacttcacatattgtatcaagtactagaattcaattatttaatatttttacataagacaggagagtctattcaaaaatgaaaagggtcagacatgtttcagatgccccagccttcttgggatatgggctttttcatgctaacatctgtctcttaatgaatccaaaatgaaggagtgtttgcttttaaaagaatacatttcagtgaaggtcttgatcaaagagagataattaaaaaaacactaaagaaacatcaaaaagatctaattgtagggtatctgggggatgataacacatccaggaaactttttctcagagacctgtgatagaaccttaaatgtacttttctttgttttgctctcatatgtgagcaacttagaagaaacatgtatttgtttgtattaatcctacatgactagggttgacagatttagcaaataaaagtataggacactcagttaaatgtgagttttagataaacaacatccagtttattgtggcattatctatctcatactatttgggattaaatacactaaaaagttcttcatggtttttctgaaagccaaattgaacttggcctcctatattcatctaataacactatgaatcactgaaaacattttttctttaaagatatttttcttggtgaaagtatttattacgtcactgaattttattttactrggtgtagtaggtgtaataacggcatcccaaagatgtccatgtccttatccctagaacctgggattatgttacactttacggcaaataagaactaagacagcagatagaatagttggctaatatgctgactttaaaaccgggagattaacttagatcatgtgaatgagaccaacgtaatccaagaatccttaaatgtggaaaagaaaggcagaacagtcagtgtctgggtgatgcgatgtgggaacgactcaacagccattgctggatttgaagatgaaggaa

SEQ ID NO: 33065 - DNA, 1015 bp, Homo sapiens
tctactctgctctggtcactttgctattaatcccatctattgtgatattgacttcacatattgtatcaagtactagaattcaattatttaatatttttacataagacaggagagtctattcaaaaatgaaaagggtcagacatgtttcagatgccccagccttcttgggatatgggctttttcatgctaacatctgtctcttaatgaatccaaaatgaaggagtgtttgcttttaaaagaatacatttcagtgaaggtcttgatcaaagagagataattaaaaaaacactaaagaaacatcaaaaagatctaattgtagggtatctgggggatgataacacatccaggaaactttttctcagagacctgtgatagaaccttaaatgtacttttctttgttttgctctcatatgtgagcaacttagaagaaacatgtatttgtttgtattaatcctacatgactagggttgacagatttagcaaataaaagtataggacactcagttaaatgtgagttttagataaacaacatccagtttattgtggcattatctatctcatactatttgggattaaatacactaaaaagttcttcatggtttttctgaaagccaaattgaacttggcctcctatattcatctaataacactatgaatcactgaaaacattttttctttaaagatatttttcttggtgaaagtatttattacgtcactgaattttattttactaggtgtagtaggtgtaataacggcatcccaaagatgtccatgtccttatccctagaacctgggattatgttacactttacggcaaataagaactaagacagcagatagaatagttggctratatgctgactttaaaaccgggagattaacttagatcatgtgaatgagaccaacgtaatccaagaatccttaaatgtggaaaagaaaggcagaacagtcagtgtctgggtgatgcgatgtgggaacgactcaacagccattgctggatttgaagatgaaggaa

SEQ ID NO: 33066 - DNA, 688 bp, Homo sapiens
actctcgataggttccttaaggggaaaaaggaaattactagaagtctcaggtgcacacccaggcttcaggcaggcaggaaacagattaggtctgcgtttcagggtcatgtagtcargccgccacgaggtggcagtaactgcgcgctcattccctcacctcctgcaaggccgggccaggctgtggactcaccgctcagctcaggagatgggagagggtgacagtagccgcgtggactctggccttaggcagagcgttactgtagctttggggttgtaggaggatgaagaggggaggttatcaggacaccatggtgattgtgtggtgctggttaggaacatgggctttgaagagagagggattttatttcaaattccatctctgccacttagtagtcagatgaccttgaacatgtcctctaacctttctaggccccaggacctgcctctgtaaacttgggtaataaccccctggcatgtttgcttctgaggattaaatgagataacttgtataaaaagtggcgcagcagggccggctgcaaaattcccaaggctcagtgcaaagtggaaatgcagggcgccttgttcaaagagcagcagaagaaagtgtcgtgaaaggcaggagggtattcagtttctcaagccagtatgtttcatcatttgaaaagtgtaatagggataatacttctag

SEQ ID NO: 33067 - DNA, 688 bp, Homo sapiens
actctcgataggttccttaaggggaaaaaggaaattactagaagtctcaggtgcacacccaggcttcaggcaggcaggaaacagattaggtctgcgtttcagggtcatgtagtcaagccgccacgaggtggcagtaactgcgcgctcattccctcacctcctgcaaggccgggccaggctgtggactcaccgctcagctcaggagatgggagagggtgacagtagccgcgtggactctggccttasgcagagcgttactgtagctttggggttgtaggaggatgaagaggggaggttatcaggacaccatggtgattgtgtggtgctggttaggaacatgggctttgaagagagagggattttatttcaaattccatctctgccacttagtagtcagatgaccttgaacatgtcctctaacctttctaggccccaggacctgcctctgtaaacttgggtaataaccccctggcatgtttgcttctgaggattaaatgagataacttgtataaaaagtggcgcagcagggccggctgcaaaattcccaaggctcagtgcaaagtggaaatgcagggcgccttgttcaaagagcagcagaagaaagtgtcgtgaaaggcaggagggtattcagtttctcaagccagtatgtttcatcatttgaaaagtgtaatagggataatacttctag

SEQ ID NO: 33068 - DNA, 688 bp, Homo sapiens
actctcgataggttccttaaggggaaaaaggaaattactagaagtctcaggtgcacacccaggcttcaggcaggcaggaaacagattaggtctgcgtttcagggtcatgtagtcaagccgccacgaggtggcagtaactgcgcgctcattccctcacctcctgcaaggccgggccaggctgtggactcaccgctcagctcaggagatgggagagggtgacagtagccgcgtggactctggccttaggcagagcgttactgtagctttggggttgtaggaggatgaagaggggaggttatcaggacaccatggtgattgtgtggtgctggttaggaacatgggctttgaagagagagggattttatttcaaattccatctctgccacttagtagtcagatgacmttgaacatgtcctctaacctttctaggccccaggacctgcctctgtaaacttgggtaataaccccctggcatgtttgcttctgaggattaaatgagataacttgtataaaaagtggcgcagcagggccggctgcaaaattcccaaggctcagtgcaaagtggaaatgcagggcgccttgttcaaagagcagcagaagaaagtgtcgtgaaaggcaggagggtattcagtttctcaagccagtatgtttcatcatttgaaaagtgtaatagggataatacttctag

SEQ ID NO: 33069 - DNA, 894 bp, Homo sapiens
ggagatgatcacacttatctcagaagaaagagctatgtgaaaagtatcaggatttgccaagaaaaacatcctgggcccccattggaccaggcctagtccttctgcccctgctggctggctggagctccggcccatcaccaggcaccctcctgcccctcttagggttggcagagggttcacgcacctctgagtgccagccagagaagcaacttgcgatgtcctgggtctcccagcacctcttcccagcttcccctgaccacaggctgaaggtgtcttagcaaggacaaggcagatgaatcctcaagttgaaaacagatctggacggagggcaggatggggtggacataatcactacttttatttgtcctcgcactgaggatcatactccggtctctcacatggatccctggggagccagtccacggagcacagccgagaggcagtccaggcttagtcagagccacagaccgtgggtgaggctcctgctcttcggctgcagagagctgcctcctggcctctgaagccgatccacctgggccaccctgcggtcacaactccagaagacaggaggcaggaagaggaagtctctactctccttatccacagcgttgtctgtgctgctggcctgtccctgttcccaaataagagcagatgcctgrcaatgcctcaataaatatccctgctgattcagtctgaacttaattcatttccgcacccccggcgtgaatggtaccctgtgcagggcagagacgaatgaggcactgtaatcagtgccaagagattcaggccagaagctttggtaaactgggccccctggctctcccctgcggtgaccccagctgctccgtgtcttagcgcagtgcccagcttcagaacaagtggctaaaaagaaaa

SEQ ID NO: 33070 - DNA, 943 bp, Homo sapiens
tgagcaaattaacttctctgtgccttagtttcctcatatttaaagtgaggttattgtgaagataaaatgtaaactgttytagtgagtactttataacgcttggttgtagtagcagtaatagtagttattatattttgtataatcagtggtaaatgtaccacattttggaacatgctgcatcaacttcttctgccctccagagtgtgaaaactctactaattcaatttgtttcctcatagcctaatgacatatggtttggctgtgtccccacccaaatctcatcttgaattatagctcccacaatccccaagtatcatgggagggacccagtaggaggtaattgaatcatgggggtggttacctccaggctgttcttgtgatactgagtgagttctcaggagatgtcatggttttacgggggcttttttcctttcactcattcttcttacctctgctgtcttgtgaagaaggacgtgtttgcttccccttccgccatgattgtaagtttcctgaggcctccccaggcatgccgaactgtgagtgaattaaacctctttcctttataaattatccagtctctggtatgtcttcatagtagcatgaaaatggactaatgcacctaacgagtcttctaatttagcataattaatccataaacacttaatgagtacagatcagggcaccctgcattttgatatagagtccacttactgccctcccatctttataataaatctgaacctagcttgcaggaattattagatcgaatcatatgaaatggctgatatttgacttctttgacctcaccaatatgccaatttcatgtggttcaatctaacataacctgatgttagtaccaatggctggatcaagtttctctaggtgtttgggccttgtctacaggccacctgttcaaacctggctgagataccccctctgctct

SEQ ID NO: 33071 - DNA, 943 bp, Homo sapiens
tgagcaaattaacttctctgtgccttagtttcctcatatttaaagtgaggttattgtgaagataaaatgtaaactgttctagtgagtactttataacgcttggttgtagtagcagtaatagtagttattatattttgtataatcagtggtaaatgtaccacattttggaacatgctgcatcaacttcttctgccctccagagtgtgaaaactctactaattcaatttgtttcctcatagcctaatgacatatggtttggctgtgtccccacccaaatctcatcttgaattatagctcccacaatccccaagtatcatgggagggacccagtaggaggtaattgaatcatgggggtggttacctccaggctgttcttgtgatactgagtgagttctcaggagatgtcatggttttacgggggcttttttcctttcactcattcttcttacctctgctgtcttgtgaagaaggacgtgtttgcttccccttccgccatgattgtaagtttcctgaggcctccccaggcatgccgaactgtgagtgaattaaacctctttcctttataaattatccagtctctggtatgtcttcatagtagcatgaaaatggactaatgcacctaacgagtcttctaatttagcataattaatccataaacacttaatgagtacagatcagggcaccctgcattttgmtatagagtccacttactgccctcccatctttataataaatctgaacctagcttgcaggaattattagatcgaatcatatgaaatggctgatatttgacttctttgacctcaccaatatgccaatttcatgtggttcaatctaacataacctgatgttagtaccaatggctggatcaagtttctctaggtgtttgggccttgtctacaggccacctgttcaaacctggctgagataccccctctgctct

SEQ ID NO: 33072 - DNA, 517 bp, Homo sapiens
ttttctccttctggcctggcctttcacaaggaacgtctagttcctaaaatttactagatcttccctttcacctccaggtctttctatcttggaatactctttgttctctcctttgccaagcaaaactctacttattttttaggtctcagcccaaatgtcatttccttcaatggtctcccagatgaggttgggtccctttggtccatagttacactgcactggctactctctctttctgagtaatcaccatgcttgtaaactaccygttgagaatatgtatctccctcatgcaaatgtccaataaacagcattgtccatcttatccattgctaacccccccagtgtctagcacatagtaggcactccataaacaggtatagaatgaaggactaatgtaaaatgaatgattatctggacagcacaaaggaagtggagaattttgaatgtctattacttcagtactacggtaaaatagctggctggtgagtaaaatctttataaattatttttgctggta

SEQ ID NO: 33073 - DNA, 594 bp, Homo sapiens
caaaataatatattaatattagtgtatactataatgttaatatatactaatatagtaaattaggacttatatgcagggatatttgtttcatagtttgtaataactaaaaattaggaacaacatgaatgttgatcaccgaaggagtgactgagtaaattattctacactacacygtggaatatagtgtaaccattgagcaggagggataatattgttgagtatggaatggcaaattatagattactgtgtataatgtaatccattttttaataaaaagggagaagccttatatatgttaaatgtgtgcatgagccgtgagaaatgtgtgggagtattgagttaagagggggtgggataggtgaagtgagaatatcatttttatttcatatgcttctgtagtgtttgatttattgtgaagagcatttatttttgtataaccacatttaatgaaggaaaaatgctaaataaattcaaagtatgagcatgtgggttccaaagatgctgcatttggccagccagagacatggaaaatgtaaaagtattatgctacaccttctattgtggagatatttgttataatttccatccacaact

SEQ ID NO: 33074 - DNA, 1098 bp, Homo sapiens
aagagagggagctaggaatgaagcaggtctttccagcttcaaagtcactctaccttctagtactctcagttaccccagaaatccagaccatagaactacttccataattgatcaactctccctgaaagggaaatacattgcacacctagccttctggggaaagaatccacacaacaaacacatgtttgaagcatccacaaatattttaatctaacagtatcttctatcaacagtttacaaacatgtatattatctctttaaatcatcatagcaactctgaacgtgaagtaggaattacattatccctattttataaataaaaaaaaaaactttgcagtctctggcatacagtaaaagggagaatatttattaaatgaataagattcaaataagctaagtgacgtgtccaaattaatggcagaacagaattcaaaccctaatctcctttaattctaaaaccaatggactatacgacaaaacacaactccctccataagcttttttcaaaataatataacaaatttatgtataacactaattaaaatacagttataaaacagagctaagctgataacttattcacttaacagtcacatttttaagctgtttttgttggcataatgacaatgtaattattaggataagaagaccacagaccacaaaggccggaagctggtcaagtgaactcattacatcagtgcacacaattttaataccattggacagacaacttgaaagtttcaaaaaaagggtatctatttagtcattcattcattcactcagtccctcatcttaacatttattgaacacctattatgtggcaaaaaccaggagagtttagtttcttataatgcactacagacacattcagtctcattagctgccccagaactaagcaggagaggtctttatctctatctgatatgtgagaaaatggaaactcagaaaggttaaataactttttgaagttacatggtcaagctaggagttatttccaagtggtagaatacatctamgcatgtggtatcttttctttctatatttctatgaaccagaagtctaccactctacatcaggattaaacaaaaagagcccaat

SEQ ID NO: 33075 - DNA, 604 bp, Homo sapiens
ttttagcaatgttttggctttaaagtctgttttttctaatattgccgcagcaggttttctttggagaggaggtgttagggttaaagtggtttatctttttcatcttcttacattgaaccattcttttctttatgttttagatacartcgcttaagttttttaaaattcagtctataaatctttatcctgtaactggaatatttatttcatttttatttaatgtaattatcgatatatttaggtttaaatctttcaccttattgtgtgctatttcttaaacatattttttaaatctccatatttactttcttttgtattgatcttgttttttttaatttatctaattttttcctttctagtttaggaactacatttgagccttctccaaggatttcatcaactgtggaacaaaaattttttttttttaaatggacagttgcggccgggcgcggtggcttacgcctgtaatcccagcactttgggaggctgaggtgggtggatcacctgaggtcaggagttcgagaccaacctggctaacatagtgaaaccccatctctactaaaatacaaaaaaattagatgggcgtggtggctgggcgcctgta

SEQ ID NO: 33076 - DNA, 1308 bp, Homo sapiens
tgcatgtatcaacacaccttttggtctctgcctctcaacgccagtgcactacattcatgccaaagaaaaataggaaactctcttgagcgctttatcccatgataccagcattctttaaaaaaaaaaaaaaaaaaggcttacctagagaataaacgtaatgcagcaactgaggagtcaagttgttgattgcagaggtaaattattttgtgaagattcactaagggtataatatcagcagaggttgttgaaaggggcaataagacggaaaygtgtaaggcaaactgcagctgaggccaacatgacactttcaagaaagattttaaagtgagaatttacctatttgagagtgagacgaaaatactgactggaactgaaaaataatttatgaattgcctttttttttgagacagagtctcactctgttatccaggctggagtgcagtggcgcaatctcagctccacctcctgggttcaagcgattctcctgcctcagcctcctaagtagctgggactacagacgtgcaccaccacacccggctaatttttgtgtttttagtagagacggggtttcaccatgttggccaggctggtcttaaactcctgacctcaagtgatccacccgccttggcctcccaaagtgctgagattacaagcgtgagccactgtgcccggcctgagttgcattttttaaaagattcacattttagccaagtacaaggcaagctagttgttactatgccatagccatataccagaaaattttatagaggcaatcacgacattccatgcaaggttaagaaatgccagaaaagactttatttcatgggcaatcaagatggtaacaattcttatgggaaaaatgtctaagcctagaataaaatatctgaaataaattgagtcaaatgaccagctttataaagactgaaagtgaaatcaacttaattcagagtgttcaacacctcaaaaatagaagtaagtttaatacaatttaagaaacttttggccaggaacagtgggtcatacctgtaatctcagcattatgggaggctgaggcaagagggattgcttggtgccaggaattcaagaaccagcccaggcaacaaagcaagaccctatctctacaaaaaataaaaaatacagccagttgtaagggtgtgcacctgtagtcctagcttctcaggaggctaaagtaggaggatcacttaagcccaggagttcaaggctgcagtgatctatgatgatgccactgcactccagcctgggcaacaggacaagactctgtctcagaaaagaaacattttaataata

SEQ ID NO: 33077 - DNA, 521 bp, Homo sapiens
aatcaatcaatgaccaaataacattacaaggtcaatgatactaattatatgaaaaatacaattataaatctaagcatgatgaattttgaggaattttcacataacacccagaattcagtcatcttgcagtgaaagttcaagcaaatagactccatcatattctcttaatattataggtgacaaaaagaccctggcagggttaggcactgtcaatgtttatatacctactctagatgcctagatgctaattttactgaaaccacctttgcaaaaattataacgagaaaattatgacagtgaaaaagatctgacctaacagactccatcttgccttaacctgcaaactgccsttgttcattcctaggcataagctgaactaactataggaggaatttagtttacagtttagttttgaaacaaagatggtagctcttaccagacacaaagggacgagacagcccttgtaaaagtaacaaattagccttggacaagactgtctttgtaaaactaacaaattaccc

SEQ ID NO: 33078 - DNA, 564 bp, Homo sapiens
cttgcagatttctctctagttttgacagtaggatatattcgctcctgttataacacctgtgatttcattttctgggagaatggatcacaaagaaagacaggggaaaagtggccagcatggtaggggatgtgtggaaggtaaaaattcacattctcacattacaaagcttttagtttattcccaaatcgtaattaatcacaaaaactggtatggattgtttgcagaagacagagtgggttaaaaaggcagagaaacattgctgtagcctcttttcagacagacagaaatgtatgcttttagtttcagtttataagaaaaccctaaactaattatcagccccttggaaagtattgtactcttggaaacattagtattttattgcaattgtataarttctttaagagaaagttcctcagtagtagccatgatagcctggctcagtgctgtaggacttagagaaaaattgacatactttcatggtaaccataaggtaattcatacaaccagaaaaagagactcacagtggcctgccatacttgggagtttactctagaagcatgttgt

SEQ ID NO: 33079 - DNA, 583 bp, Homo sapiens
agcagaaagagcatacgggagagatgaagcagtccactccaagaacattctcatcctacggattacgaggtttgcctgaaaccgtttgtatatgtgcataaatgtgattttatgtccagcatctttaagcatgtggtacagagggaaggtgggcagcccagaattcgtacctcggctttcaaatttgggcttcaattatagttctgacaccagtttcgtgatttttaaaactcatcacccatttggggaactttgttttcccatctatgaaatatggataattgtgccacataatatttatttgaagagtgacaggatatctgaaggtcattaatagtcaaacatcatttaagcaaaatttataacgttttttacaaaattgaatcaaaattggataaggatttataaagagtaagtcaaatttttaccaagacttcatacctgatatctgttttattaaaatgataggcatttttgaagattaaaaaaargcaactagacaaactatcagagatacaataacgttttccaagctaccagtgatttaacctaaatacagagttcaccattttctaagcaatta

SEQ ID NO: 33080 - DNA, 1118 bp, Homo sapiens
ctgacttacaaggcaggcctcgatgtagtttgtcaactcaaatgttaaacaatgaattagaggccttacgcaatacaataaaaagacaaaacagaaaagcctaaaaacaaatgaataattaaatggttttgcaaataaaataattttgtgtagaaaaaaacccaagataatgtacagaaataaaaacaatctgaaagcagacattgagctactgacattgttagctaccaaaggagttaagtaaggttgttgcgggcgtagcgtcaacaaaactcaatattctgtaaccaacaatgattaatatggcaacattaattaatgctaagattctgaggaataaatcaaataaatgaggttaaagaacactctagagaaaagtacaatatatttaaggatataaatgtcacttaactaaatggagaggtacattatgttccttgatagaaaaactatatatatatataaaagttaaattctttccactaaggtatttttcaatcataattttgaatgctttaaaaaactataattttatgarccagtttgagtatttttgtggatgaacaaactctagttaaaaagttttaaagaaagctaaagaagaaaaatttaacctaccaagtatcaagatggtaaaaatataagagcatgattttgatgaagaaacaaacaagtagaacaataaaactattgagctcagaaactagtatcaacataagaatttgaaatatgatagagaaaaattttgcaatatgcaggaaaattatgaactataaaaaattacaacaaaatatattaaaaacatacaaagaagtactaaagagtggagttcctcagtgttgcgttttatattagaaggattttgagaatgaatgtactaccttggatgttgttgagttggcaaattacattatttcttcagaagtttagagtatcacagaggatgaaatttccagcatgattaaacattgaaaaaaaatttgcacattgctcttttccgagagaatctaaatactgaagggatttcctaccttctgcaaatcatgtgcaagcatttctttgaaaatcagaaattttatgttgtgtctttttcctttaatatgactccattccattta

SEQ ID NO: 33081 - DNA, 1118 bp, Homo sapiens
ctgacttacaaggcaggcctcgatgtagtttgtcaactcaaatgttaaacaatgaattagaggccttacgcaatacaataaaaagacaaaacagaaaagcctaaaaacaaatgaataattaaatggttttgcaaataaaataattttgtgtagaaaaaaacccaagataatgtacagaaataaaaacaatctgaaagcagacattgagctactgacattgttagctaccaaaggagttaagtaaggttgttgcgggcgtagcgtcaacaaaactcaatattctgtaaccaacaatgattaatatggcaacattaattaatgctaagattctgaggaataaatcaaataaatgaggttaaagaacactctagagaaaagtacaatatatttaaggatataaatgtcacttaactaaatggagaggtacattatgttccttgatagaaaaactatatatatatataaaagttaaattctttccactaaggtatttttcaatcataattttgaatgctttaaaaaactataattttatgagccagtttgagtatttttgtggatgaacaaactctagttaaaaagttttaaagaaagctaaagaagaaaaatttaacctaccaagtatcaagatggtaaaaatataagagcatgattttgatgaagaaacaaacaagtagaacaataaaactattgagctcagaaactagtatcaacataagaatttgaaatatgatagagaaaaattttgcaatatgcaggaaaattatgaactataaaaaattacaacaaaatatattaaaaacatacaaagaagtactaaagagtggagttcctcagtgttgcgttttatattagaaggattttgagaatgaatgtactaccttggatgttgytgagttggcaaattacattatttcttcagaagtttagagtatcacagaggatgaaatttccagcatgattaaacattgaaaaaaaatttgcacattgctcttttccgagagaatctaaatactgaagggatttcctaccttctgcaaatcatgtgcaagcatttctttgaaaatcagaaattttatgttgtgtctttttcctttaatatgactccattccattta

SEQ ID NO: 33082 - DNA, 654 bp, Homo sapiens
  misc_feature (1)...(654): n = A,T,C or G
atgttcaatcgttgctatctatagagttgtaaatccctgcaaatgatgagattgatttatacaatacaacgaccacacaaaacataacaaacaaacaaaacacaacatcgttttgatttcatagcaatcttgttggaaataagtaaattcagtgaaagcagaaactccgatttggcagagaccacagcaatgtcaggtctattcgcagaaatcttgggaaggtgatggacttcacacaaaagacaggcagaaagtctagagccaattttgtttcattgcaaaagtcaggatgatataaatggatttataaattatatttagtaggaaatatgaattttagaaggcttattgcaaaatcaaattttgtgatttttaaactataaaaaaatcataatcctgggttttccagaaaatttctttatagtattttcttcacatttacccatcatttccaagatgtctcataaattttaatattttgtgacaatactccatcctttatcaacccagaaaagaaaagagtattgcttttgagacatttcaaaccnaatgattctttttttttttaattcagaaattttggwcattgatgctaaaagactccccggctattgggaaatgtaacccaaatgttgaagaaagatttttaaatta

SEQ ID NO: 33083 - DNA, 2873 bp, Homo sapiens
tcttcattgaccagccttccttttgttggaatttagtgatttacacagggtcagcactagtaaattttctctgcatgtagatatgataaactccacaagtaacatagtcaatgagcagatgtgaggttagctgcacaacttttgtaaaactaaaaggacattgctcattcatatttccatacaatccatcttaaatgaaattgaaagatgaaccaggctgtggagggattaaggccttagtcacaattttgtgaattctaaagaaaaaatcatcaagaatttacttctgcataactattcatgtgctactcttcgcaaacacttcattaaaaaatccaatactttcaagaaaggttgaacaaatcaaaccatttttacctatgacctccttcccttaaaaatcaccaaaacaaaaatacatcactgtgaatatttgtgtccttttcaaaattcatgttgcaacttaatccccaatgcaatggtattaaaagtgaggcctttagaaggtgattagcccatgaaggctctgcactcaggacaagagtagtgctcccataaaagggtgcgatggagcaagtttggcactttttgcactccagccttgtgaggacacaacattctctctttctgccaggtgatgatgcaggaacaaggcaccatctgtgaagcagggagctctcattggacaccagatccgctggcaccttgatcttgaacttctcagcctccagaattataagcaatagatttctattacttataatttacccaatctaaggaattttgttacagcggtatgaatcaactaagacactaatatatatatatatcttcaattaaataaggaaagagccaaaaaaagcacactgtaaataatgtacttgatagtgtaaactttggcctaaaataagggaggatgttaggagtcatcatagatctccctaaatatctaacaatatgaatatctctcccaaacttagttatatgatatgaatgagccaaatcagaatgtcatttatgaataaaagggaaacaaaagaatttaagcatgtcaacatagatctagatgtgcactacagaatatcagagacttgaacaatgacagatgcacattcagctattgagacaccctactttttccccctgaaactcagatattgttgttttattttgttttgtttcccacagaatcatcctgaaggtaaaaaaagaagcaggagagaacaaaatttagagttaattaggctatcactgaccagagtcagttagataaacacaaataagccttttctgaaaagaaagaattggcattccagcctgaattttaggtatgcaaacctttggagcaaaatatgctgtatgttaacatagagaatttccaaaaagcaaaggggaataagtccaacaatgggcatagattagagcaaattcatattaaatttcttttgaaatactgaagttcatttttgttccagttcattgtctcgaattcttaccaaatgattttggagagaattgaattgatagaattgattattagaaaaatgagttgaaaacaaactatttagaacctacctctgttttttatgcataaaaaacagtatcagaatataatgaatataaggctaatgaagaatgcatgtgtaagacttgcttcagcaaagctaaggaatgttaagacaaaatttctcctaccaagtctgaggagcaagagattaaaggatctgaggagcaagagattaaaggatctgaggtgcaagagattaaaggagagaatcccttctaggtcttttggctaagatcaagtgtagaatctgcttttatcagtttaatatctggtacttcctctatcccaggacaatatattaagtggatttttggagcagggagatggttgaaaataatatacatatgcttaatgttgaccgtttgatcctgctaatcagatgttctgcataaaactggtaattgggtaacaattttccataaattgaaatgagaaatgttagaaacacacaaccagttaacagtaagtggcacaacaaaaacagcaaaagcccacatctaagcagcaagctgccatgctggggtgtaacaagctttgcctatgagctccttttcacttaccaactaacacagctgttgccaggtgcttgtttgcaataacgtctctccacttactgctgtccttccttctggacagtttgctttagcatttgctctgcctttatgtaactcagtttataatactgggcaaaaacaaggactctgtcagaaagtcaaagtggaagcagttttaggactagtgcagtaaacagtagagaatggctcctaataagtgggcacagcaaagcctctcctagtgaaagtcactgtccaaaaacattttctatttgcctgcacttgrtgcacacatgtttttcagtatctaggtgagatcgtgatgttccgtgaatcatattcagaatatcaatgtaagttttctgacatttttgcttttagtttggtaaaacaacataaaatttagaatcctaaccattttcaagtgtacaattcagtgacaccaaacacactcacaatgctgcacaatcaccaccaccatccatctccagaacactttcacatcccaaacaaaagcccccaccaaggaatgataactcccctttcccctttcccttggcccctgcaacctccattctgcttctgtctctaggaattcacccaatctaggtgctgatagaaggcaaaccatacaaaacagacgcttttgtgcataacttattttacccagcacaatgttctcaaaattcatcagtattgtagcatgtatcagaacatcactacttttaaaaggaaaaagtattcattgcatg

SEQ ID NO: 33084 - DNA, 590 bp, Homo sapiens
attatgctgagtgaaaaaaaaaaaaagccaatctcaaaagattatatactgtttgatttcatttacataacatagttaaaatgagaaaactgtagaaaaacagaatagattagtggttagccttgttcagggagagataagggaagcaaagtggatgtggctaaaaaagagcaacatgaagaatctgtggggtgatgaaaatctttgtgtctttgttgtgttaatgtcaatatctaggttgcaatattatacaaaagtgtcgtaagatgtttccattgggggaaactgagtaaagggtacatggaagctctgtgtattattataacagcatgtgaatatataattataaaaaattcagctaagagaaaacacttgatcacaaattttaaaaatgcaatagaattataatcacccttcattatagatagtgggataatcagatatataatataaactataaatataaaatcatgttagaaaatatttaaaaattaaaaatgaattaaatattgaataataaaaatgagcatattgcrgaagtaaaaatttgaaaaagtacatatgtaaaaaataaaactactagaaatgtg

SEQ ID NO: 33085 - DNA, 1574 bp, Homo sapiens
atatcctataagttctgcttctttggagaaccctgacttatacaccaccactgtaggaacttcaccaggtgataatgaatattggatatttgatggctgatgttctaaagaagcataacagttagataaaataataattacaataataataatgaagccaagttagcaacagagccaaggctgagaaatccatacactttccatttacaaacaaatagtcgactttttttttcctttagctcttggtaaagtaatcaaaatgaccattcacaaaatgtatttgtctacccagctgtatttgaggaatttttttttttttttttggtcagagaatgaatttctctctttacacaggcctcttcccagttccaaccctcaaatctttgaaaagcatattgattacacagcaagcagctgcaagcccagatttccctgcccaccttgctgggggtccaatcctctcatgctgcactgcacctcagcctccccctcccgcatgctctggccatgtcagccacgttatgagttttgcgtgtgtctccctctgagaaacgaagggcagaatctgtgtttcttcatatttgtgcccctctggctctccacatgacaattattcctggtagattgctcgtgagcagtggatactgctgaaaacctgcaagaatggatgctgggtgaagagcagaggtgccccaataactaatcatgctaaacttagtgagtgaacaagtaaaagcctgaacacaagaagaaatytgtgagtaaaccaagatgatggaagtattattgtttaaatttaaaatttaagccaagggaatcacgatgggatcatgattataatcctgagctttagattagtctaagtgagaactttcaaaagttgcataaactctttcaacctcagtgtcctcaaatataaagttaaagtcataccagtgcttccctcatagaaatagtgtatgcgaggggaggtaaaacacataaatccctgggactagaatctgaccaaactttaaatattagcaagtgttattttattattttgtttattttttgtgacctgtaaattgctttgtaagcctcttctgagatacaaactttccttcatactctgatcaaggattaggttagaagtttaaagtagcaaaatttattgtcagaaggtgagactgtcttaatgaattcagaatatgttaacatctgtggtaggtgtgcctaggctttggaataaatctaaaattatcatagcaaaatatttttatagcttataatcccctctttcttcctatgggcaaaacattcagtattaggtggggatgtgaccgatgggaacttttgggatgactgtgaaaaatgcagttctcaacatatgctacagatgagttaataaatgttgttaaacctcatcaaatgtaaagacccccccacatcccacaaaacagggaacattaaacagcgtcactgcaagcatcattttgaaggtcttctccttggcatctgtgtatctccaagtcagtggacagaccatagggagtaaaggcctgggcatagcatggaacttcagcttccatgca

SEQ ID NO: 33086 - DNA, 1574 bp, Homo sapiens
atatcctataagttctgcttctttggagaaccctgacttatacaccaccactgtaggaacttcaccaggtgataatgaatattggatatttgatggctgatgttctaaagaagcataacagttagataaaataataattacaataataataatgaagccaagttagcaacagagccaaggctgagaaatccatacactttccatttacaaacaaatagtcgactttttttttcctttagctcttggtaaagtaatcaaaatgaccattcacaaaatgtatttgtctacccagctgtatttgaggaatttttttttttttttttggtcagagaatgaatttctctctttacacaggcctcttcccagttccaaccctcaaatctttgaaaagcatattgattacacagcaagcagctgcaagcccagatttccctgcccaccttgctgggggtccaatcctctcatgctgcactgcacctcagcctccccctcccgcatgctctggccatgtcagccacgttatgagttttgcgtgtgtctccctctgagaaacgaagggcagaatctgtgtttcttcatatttgtgcccctctggctctccacatgacaattattcctggtagattgctcgtgagcagtggatactgctgaaaacctgcaagaatggatgctgggtgaagagcagaggtgccccaataactaatcatgctaaacttagtgagtgaacaagtaaaagcctgaacacaagaagaaatctgtgagtaaaccaagatgatggaagtattattgtttaaatttaaaatttaagccaagggaatcacgatgggatcatgattataatcctgagctttagattagtctaagtgagaactttcaaaagttgcataaactctttcaacctcagtgtcctcaaatataaagttaaagtcataccagtgcttccctcatagaaatagtgtatgcgaggggaggtaaaacacataaatccctgggactagaatctgaccaaactttaaatattagcaagtgttattttattattttgtttattttttgtgacctgtaaattgctttgtaagcctcttctgagatacaaacyttccttcatactctgatcaaggattaggttagaagtttaaagtagcaaaatttattgtcagaaggtgagactgtcttaatgaattcagaatatgttaacatctgtggtaggtgtgcctaggctttggaataaatctaaaattatcatagcaaaatatttttatagcttataatcccctctttcttcctatgggcaaaacattcagtattaggtggggatgtgaccgatgggaacttttgggatgactgtgaaaaatgcagttctcaacatatgctacagatgagttaataaatgttgttaaacctcatcaaatgtaaagacccccccacatcccacaaaacagggaacattaaacagcgtcactgcaagcatcattttgaaggtcttctccttggcatctgtgtatctccaagtcagtggacagaccatagggagtaaaggcctgggcatagcatggaacttcagcttccatgca

SEQ ID NO: 33087 - DNA, 623 bp, Homo sapiens
tgtaaatacaattgtatataacaaaaatataattagaattcagaaggaaaagtgtaaggtttcctatgttgtatatatttacaaattaagcctttgggtttctagttcagcatttaaagagcttggaagtcaccattctttcttagcaacaagtaaaaagctgaaaaaactgaaaaatcaacagctcttcctagatctggcagagaaatgaggtcacaggacaaaatattgcttcccaaatgtaaragacagacatgtaaatacttctgataagttgagttaagaggattccagtttaccaaagcagaaaccatagagcatcgctccatgcaggagccagtctcaagggagaaaaacgtgactggtaattgatgaattcttactgtggacaactctgatagtcaaaaactctacagaaacccagtcatatagaggccctcacactttgtgagttttacctctaggagctctaccaggtcctcacaataaatatcaaagaaaaatcctctcatgccttcagcaccaaaaaaaaaaggggaaaaaattttggaatgtgtcagaacattctgttctacttaacaaggtctacccttattagaaactattttaccagggcccaaagt

SEQ ID NO: 33088 - DNA, 629 bp, Homo sapiens
ctcttcctaataagcctgggagcactatgggagactggagtatatttcatctctgcagcctcgaccataagagacaggtgcacctggcgggggggctgtttataagcctatacctccaggcgcacattctctttctcagggacgttccatgctgagaaaaagaattcagagatatytctcccatttgcttttggaagaagagaaatatggttctgttctgcccagctcaccggcggtcaagagtttaaggttatctctcttattccctgaacaattgctgttatcctgctcttttttcaaggtgctcagatttcatattgctcaaacacacatgctgtacaatttgtgcagttaacgcaattatcacatggtcctgaagcgaaatacatcctccttggctgacaggattaagagattaaagtaaagacaggcataggcaagcacaagggtattgactggggaagtgataagtgtccatgaaatcttcacaatccacgttcttctgccatggcttcagccggtccctccgtttggggtccctgacttcctgcaacaggagttagtcacaagattccagggaaaccacaaacaagaggtgggaagcaaattaatgacagagtgaagccctc

SEQ ID NO: 33089 - DNA, 629 bp, Homo sapiens
ctcttcctaataagcctgggagcactatgggagactggagtatatttcatctctgcagcctcgaccataagagacaggtgcacctggcgggggggctgtttataagcctatacctccaggcgcacattctctttctcagggacgttccatgctgagaaaaagaattcagagatatttctcccatttgcttttggaagaagagaaatatggttctgttctgcccagctcaccggcrgtcaagagtttaaggttatctctcttattccctgaacaattgctgttatcctgctcttttttcaaggtgctcagatttcatattgctcaaacacacatgctgtacaatttgtgcagttaacgcaattatcacatggtcctgaagcgaaatacatcctccttggctgacaggattaagagattaaagtaaagacaggcataggcaagcacaagggtattgactggggaagtgataagtgtccatgaaatcttcacaatccacgttcttctgccatggcttcagccggtccctccgtttggggtccctgacttcctgcaacaggagttagtcacaagattccagggaaaccacaaacaagaggtgggaagcaaattaatgacagagtgaagccctc

SEQ ID NO: 33090 - DNA, 586 bp, Homo sapiens
gaatcagattctctgggaagcaaagcgctcttcccagaggtaaggcgacttctcaggggcttccattatggagtaacaaaccgcagtagacatgagtctccctaataacgaaatagattactggattgcaaactatttacatttttcacttttatttgcaacaacaacagaaaaacaaaagctcttgagatgtttaaaggatccgtgacgtagttattgagtgtagacagtaattaagtatattagagaagactcccataagcacctggagaagaaagtactgaggacaatcgtgtcaatgacgtgaagaactgccaggtgaaatgagactttattgagaaagacgccatacacttttgctttctctgagtaacaccgccatcttgtgtcttttctccatacttccgataaaactaggcaaaycttttgctactttgagcacttctaaatgttttctaatagaaaacatttttggagctttgggattccaaagcatttaggagctttggaatgttctttcaaagctcaaacaggagaaaatacacataaactcttcttaaaaaactgcatggaggtgtagtttata

SEQ ID NO: 33091 - DNA, 586 bp, Homo sapiens
gaatcagattctctgggaagcaaagcgctcttcccagaggtaaggcgacttctcaggggcttccattatggagtaacaaaccgcagtagacatgagtctccctaataacgaaatagattactggattgcaaactatttacatttttcacttttatttgcaacaacaacagaaaaacaaaagctcttgagatgtttaaaggatccgtgacgtagttattgagtgtagacagtaattaagtatattagagaagactcccataagcacctggagaagaaagtactgaggacaatcgtgtcaatgacgtgaagaactgccaggtgaaatgagactttattgagaaagacgccatacacttttgctttctctgagtaacaccgccatcttgtgtcttttctccatacttccgataaaactaggcaaatcttttgctactttgagcacttctaaatgttttctaatagaaaacatttttggagctttgggattccaaagcatttrggagctttggaatgttctttcaaagctcaaacaggagaaaatacacataaactcttcttaaaaaactgcatggaggtgtagtttata

SEQ ID NO: 33092 - DNA, 578 bp, Homo sapiens
aattaaccagcatgtgataatatagagattagaaatgtagatttagaaacctaggaatctaaatctgagccacattacctttagaaaagtgaatgctgataggaggagaaacaattatccagtacttagggagtaagaaaatagtgtgacggtattccattacaaaaacatggatttaaaaaaagatacaaattgcaatgccaccccactcctgccccagaggatcccttagctaatacctggatctgttctacgaggaatgcagagagaaaaaaatcagtaaaatatatatgcctggtgttctattttctaaatatgaaaatgaacaaaaagcataaacaagatgcagttactaaaactacatcacaagtagaattaccaaagtaatcagagaacaaattgaagttaccttaatctcaatttagaaattgaagtgaacaactaaggaattatgtaagaaagaaatacataggcactatacatcagcaattacatccagaaaaatagtgaatatctagaagaaaccayacaaaagtaaattatatgaaaagacaaaggcataataaaaatccttaata

SEQ ID NO: 33093 - DNA, 1088 bp, Homo sapiens
tgtgcagagaaacttaacatttttaaaactatcaaatatcatgagactcattcactgtcttgagaacagcgtaggaaagatccacccccataattcaatcacctcccacccggttcctcccaggacatgtgggaattgtgggagttayaatttaagatgagatttgggtggggacacagccaaaccatatcagagaatattccttacataaagatatattgaaaaatgttacttcttgtttcagtcattacacaataatagagtccaacttctaagtcaatagttttaaacaaacaatttattttcaccacaaagattccaaaacactatgtgactgtgaattatcatcctaatcacattaattttttggtataattttagggttagtttggattatttatgtatgggttctgtgaaaattatgacagtaaaatatgcctgtagccattagcctataacaggagatctcattgtgagctcaaggaagaagtaaacacactgaaatttctatattggtgcaggatgatggtaattgcaagaaagggcttaaataaaacagtagaataaaattcaatctgatacaaaaaagtcagaggcaagacaaaaatagtttataaatataaaataaggaatcaaatctaagcttgtgcatgaataagataaaaaaattatcaaattcatgttcagtctggtaggagtgacctagacaaaacatgaggaagaaagagggactatctcagtaattttatgggattattatgacttttaaaaatatttgatcttttgaacatctcacaggataaaatattgaattaattagaatatttagttgactgaaacacccattttcctactcattttaaaaaactgaattttaatgtgtataagtatagattaatgaacgtatacataaacagagaaagagagagagggaaaaaaacattctctgcatattgtttcttcttgcaagaatgttaagaacaaaggtttttctttatgtctctctccaattaagttaaagatggtggagctgcatactagttgctattataatagcttttgcataacattttattcacagttgggaa

SEQ ID NO: 33094 - DNA, 1088 bp, Homo sapiens
tgtgcagagaaacttaacatttttaaaactatcaaatatcatgagactcattcactgtcttgagaacagcgtaggaaagatccacccccataattcaatcacctcccacccggttcctcccaggacatgtgggaattgtgggagttataatttaagatgagatttgggtggggacacagccaarccatatcagagaatattccttacataaagatatattgaaaaatgttacttcttgtttcagtcattacacaataatagagtccaacttctaagtcaatagttttaaacaaacaatttattttcaccacaaagattccaaaacactatgtgactgtgaattatcatcctaatcacattaattttttggtataattttagggttagtttggattatttatgtatgggttctgtgaaaattatgacagtaaaatatgcctgtagccattagcctataacaggagatctcattgtgagctcaaggaagaagtaaacacactgaaatttctatattggtgcaggatgatggtaattgcaagaaagggcttaaataaaacagtagaataaaattcaatctgatacaaaaaagtcagaggcaagacaaaaatagtttataaatataaaataaggaatcaaatctaagcttgtgcatgaataagataaaaaaattatcaaattcatgttcagtctggtaggagtgacctagacaaaacatgaggaagaaagagggactatctcagtaattttatgggattattatgacttttaaaaatatttgatcttttgaacatctcacaggataaaatattgaattaattagaatatttagttgactgaaacacccattttcctactcattttaaaaaactgaattttaatgtgtataagtatagattaatgaacgtatacataaacagagaaagagagagagggaaaaaaacattctctgcatattgtttcttcttgcaagaatgttaagaacaaaggtttttctttatgtctctctccaattaagttaaagatggtggagctgcatactagttgctattataatagcttttgcataacattttattcacagttgggaa

SEQ ID NO: 33095 - DNA, 1088 bp, Homo sapiens
tgtgcagagaaacttaacatttttaaaactatcaaatatcatgagactcattcactgtcttgagaacagcgtaggaaagatccacccccataattcaatcacctcccacccggttcctcccaggacatgtgggaattgtgggagttataatttaagatgagatttgggtggggacacagccaaaccatatcagagaatattccttayataaagatatattgaaaaatgttacttcttgtttcagtcattacacaataatagagtccaacttctaagtcaatagttttaaacaaacaatttattttcaccacaaagattccaaaacactatgtgactgtgaattatcatcctaatcacattaattttttggtataattttagggttagtttggattatttatgtatgggttctgtgaaaattatgacagtaaaatatgcctgtagccattagcctataacaggagatctcattgtgagctcaaggaagaagtaaacacactgaaatttctatattggtgcaggatgatggtaattgcaagaaagggcttaaataaaacagtagaataaaattcaatctgatacaaaaaagtcagaggcaagacaaaaatagtttataaatataaaataaggaatcaaatctaagcttgtgcatgaataagataaaaaaattatcaaattcatgttcagtctggtaggagtgacctagacaaaacatgaggaagaaagagggactatctcagtaattttatgggattattatgacttttaaaaatatttgatcttttgaacatctcacaggataaaatattgaattaattagaatatttagttgactgaaacacccattttcctactcattttaaaaaactgaattttaatgtgtataagtatagattaatgaacgtatacataaacagagaaagagagagagggaaaaaaacattctctgcatattgtttcttcttgcaagaatgttaagaacaaaggtttttctttatgtctctctccaattaagttaaagatggtggagctgcatactagttgctattataatagcttttgcataacattttattcacagttgggaa

SEQ ID NO: 33096 - DNA, 1088 bp, Homo sapiens
tgtgcagagaaacttaacatttttaaaactatcaaatatcatgagactcattcactgtcttgagaacagcgtaggaaagatccacccccataattcaatcacctcccacccggttcctcccaggacatgtgggaattgtgggagttataatttaagatgagatttgggtggggacacagccaaaccatatcagagaatattccttacataragatatattgaaaaatgttacttcttgtttcagtcattacacaataatagagtccaacttctaagtcaatagttttaaacaaacaatttattttcaccacaaagattccaaaacactatgtgactgtgaattatcatcctaatcacattaattttttggtataattttagggttagtttggattatttatgtatgggttctgtgaaaattatgacagtaaaatatgcctgtagccattagcctataacaggagatctcattgtgagctcaaggaagaagtaaacacactgaaatttctatattggtgcaggatgatggtaattgcaagaaagggcttaaataaaacagtagaataaaattcaatctgatacaaaaaagtcagaggcaagacaaaaatagtttataaatataaaataaggaatcaaatctaagcttgtgcatgaataagataaaaaaattatcaaattcatgttcagtctggtaggagtgacctagacaaaacatgaggaagaaagagggactatctcagtaattttatgggattattatgacttttaaaaatatttgatcttttgaacatctcacaggataaaatattgaattaattagaatatttagttgactgaaacacccattttcctactcattttaaaaaactgaattttaatgtgtataagtatagattaatgaacgtatacataaacagagaaagagagagagggaaaaaaacattctctgcatattgtttcttcttgcaagaatgttaagaacaaaggtttttctttatgtctctctccaattaagttaaagatggtggagctgcatactagttgctattataatagcttttgcataacattttattcacagttgggaa

SEQ ID NO: 33097 - DNA, 1088 bp, Homo sapiens
tgtgcagagaaacttaacatttttaaaactatcaaatatcatgagactcattcactgtcttgagaacagcgtaggaaagatccacccccataattcaatcacctcccacccggttcctcccaggacatgtgggaattgtgggagttataatttaagatgagatttgggtggggacacagccaaaccatatcagagaatattccttacataaagatatattgaaaaatgttacttcttgtttcagtcattacacaataatagagtccaacttctaagtcaatagttttaaacaaacaatttattttcaccacaaagattccaaaacactatgtgactgtgaattaycatcctaatcacattaattttttggtataattttagggttagtttggattatttatgtatgggttctgtgaaaattatgacagtaaaatatgcctgtagccattagcctataacaggagatctcattgtgagctcaaggaagaagtaaacacactgaaatttctatattggtgcaggatgatggtaattgcaagaaagggcttaaataaaacagtagaataaaattcaatctgatacaaaaaagtcagaggcaagacaaaaatagtttataaatataaaataaggaatcaaatctaagcttgtgcatgaataagataaaaaaattatcaaattcatgttcagtctggtaggagtgacctagacaaaacatgaggaagaaagagggactatctcagtaattttatgggattattatgacttttaaaaatatttgatcttttgaacatctcacaggataaaatattgaattaattagaatatttagttgactgaaacacccattttcctactcattttaaaaaactgaattttaatgtgtataagtatagattaatgaacgtatacataaacagagaaagagagagagggaaaaaaacattctctgcatattgtttcttcttgcaagaatgttaagaacaaaggtttttctttatgtctctctccaattaagttaaagatggtggagctgcatactagttgctattataatagcttttgcataacattttattcacagttgggaa

SEQ ID NO: 33098 - DNA, 588 bp, Homo sapiens
cttatgtgtcagaaagtctttttgattctgagaacagcacagacacagggttcctgctctcaggaggcttatactccagtgaagctccatagacattcaactagtaaacaaatgttgaacaattcaaactggggtgactgctactaaggaaaggaataggataggaaaggaaaggaataggctgatacaattagataagttagataagttataacttaaaacactgaggagactcrttattcaaacaagcatgattgtctatccttccataagtaggtaatttgttagtattatcaagaattctacatatttgatgcattttgctcagaagttaagtccctatataaccatactttttaattgttgaaaaattgtacatattaactgtgtacatgttttgaagtatatatgcattatgaaatagttaaatctagttaattaacaaatgcaatacctcacagaattattgtttttgtggtgagaacacttaacatccactctctgcctttttaaaattaactatacatatttttcatttaattgtagtaggaacacatgagatctgtcctcttaacaaaatgttaagtg

SEQ ID NO: 33099 - DNA, 782 bp, Homo sapiens
ttatcaaaaatatacataaaatgcagccttcctagtcaatactgtgatttatatccttcattctgttaacatgaacatcatacatttttaaatatatatataccttcctcagaaggaatatagtatagaataaatgttaggatttaaaacaattctctagtgcaacacttcccttaccagaataagtgtttaaaagagaggtgactatcttataatatttgaagggaaactaaatatgtagaaatcaaaaaattagaataaacaccaaggtttagtcaaaagtggagatgcatctgttgaaaaaatagaaaagagcatgcctgtggtttctagtaaatagaattcatcaagacccagcaaaaacaattcagattatgaaaactaattttttaaacagggataaggacactttctaatgggttagttagaaaagaagtggcttgcattgtttcactggctgatgggagactgataattttatagcagattaaggagcttgtattagtccatttccacactgctgataaagacatacctgagatggcacaatttacaaaagaaagaggtttaatggatttacagttccacatggctggggaggcctcacaattacggtggaaggcaaggaggagcaagcagtatcttacatggayggcagcaggcaaagacagcttgtgcagagaaactcccacttataaaaccatcagatctcatgagacttattctgtatcacaagaacagcacagaaaagacccatccccatgatacaattacttcccact

SEQ ID NO: 33100 - DNA, 1028 bp, Homo sapiens
  misc_feature (1)...(1028): n = A,T,C or G
tgcatcacccgttagattagttacaaaaatgactatggagtgtgaactgtaatcgtggactcaagatcaaacagtcaagattataaaatcttttgattctcctcaaatatattgttacatatggttagcattctttccactagaaaaaaaaaggtatttgctttgaaaatacatagtcatrtcaaagccacaatgagataccatctcacgccagttagaatggcgatcattgaaaagtcaagaaacaacagatgctggagaggatgtagacaaataggaacacttttacactgttggtgggagttgcaaattaactcaaccattgtggaagagtgtggcgattcctcaaggatatagaaccagaaataccatttgatccagcaatcccattactgggtatatgcccaaaggattataaatcattctactataaagacacatgcacacatatgtttatttgaggcaatgacttagaaccaacccaaatgcccattagtgatagactggataaagaaaatgtggcacatatataccatggaatactatgcagccataaaaaaggatgttcatgtcctttgcagggacatggatgaagctggaaaccatcattctcagcaaacttacaaaagaacagaaaaccaaacaccgcctattctcacccataagtgggagttgaacactgagaacacatgggcacagggtaggggaacgtcacacaccagggcctgtcagggagtggggggnnnnnnnnnnnnnnnnnnnnnnnnnnnnnnnnnnnnnnnnnnnnnnnnnnnnnnnnnnnnnnnnnnnnnnnnnnnnnnnnnnnnnnnnnnnnnnnnnnnntgtgtaatctataattagcaaaaaatttctacttatgccatttaattcacactctgttttctatgtcattcctattttaccagtcactacattgagggctccctaagaaaactttgtaataaatgtgccatctacgtttcctttaaaattattcaactgctgtgggcactaatgtggtcatctta

SEQ ID NO: 33101 - DNA, 1083 bp, Homo sapiens
tacagtaaaaatataatctgtgagaccaccatcatatatacagctatcaaagaccaaactgtcatgcagtgtatgactgtgttatgttgcacagatgcatcatttcattaatcagtcagctatcaatgaagattgaaggatgctactcctttctgataagtaattttcttttcactttttatttatcactagttaaagggaaaagaggcattttcatggtcacatagtcctataatttgctttcccatgcaacccaatcacaaaacagatcaaagcaggacctttgaggtgatttattttgagatcctgaaaactgggtagtgtttgttttcatgggtgacatataattgcatacactatgtaatcttgagctacttataactaattctaggctatagactctaggctagaattgtatccattccaatttaatgttctgtacagtctcaggaaatgattaccactaagtaaacaaggccaactaaataatagaagacattcaatctatgggcttggcacagaattacaaaacttcawtgtgatcaagtataccttctaaattctgagagtattttaacttcttcatgattggtagcaattaatctgttatgaaattgtgcccactgcatatctgcccaggaagccaggaagttcttggtgttgatgtggtagttctgttgcttggtggatattgttaagtttctgtctcctttaccaacccagcactgaagatgggcaaagtaaggatttaaagaaaagctagaaaggaatttgaagcaaaaaagacacctagaatataagaaaatatatgggtctagtgtgtaaatggaatccatgcatacagcaaagataacaaattgcacttgaaattttaatacaatgaaggcaatgaccatttcataagtgttagcaagtggatgggcatcaaggaatatggaatggcattagagacctcctgtgatttttaaaattgcaatttagaaaaagagtgctctggagtgaggtggtcagtgctgatatgaagaatgaataagctgttcaagaagagaaattgagtgggcattttagttgagggaaatttct

SEQ ID NO: 33102 - DNA, 684 bp, Homo sapiens
ggagcagttggcctacaaaagatcctgcaggttatgattttatgaaatgcttggtatgtatccctggatttatgattgagaacatgaaaccccaaaaaagttaattagcttagtcaaggttaagctgaattaacaagaagaaaacagattatttgaagatgattatttttcttctttcagttcataggttctacctgaaaagggaaaatgaaagaaataaaaagaagagaaagccaggatgatctaactgcattgcaatgagtcctacattcttagaaatgtaatgctatcgttttccttttttgctcagtcatagttcagtacaaatattcagcaagcgttggcttttggagtctctcctgggtcttttgttttatgcaagaagaatatgtagaattatggagtaggttttctgggtcacgacttctgcctacctgcaattagtcagaactcaatcatatgacgccaccttattacttacgatcttactgctagtgcatataacttagctgtatgcccaggagtactgtgtgagtgtgtgcgtgtgtgtgtgcacasgtgcacacacgtgcatacacgcaggcaggagaaaggaacaaagaaaagaatttatctatatgtactttcttttaaagcacttgttaagcatgagttttggcactaccagggtaaatactacaatgc

SEQ ID NO: 33103 - DNA, 589 bp, Homo sapiens
cagtggcctggcgcggtggctcacgcctgtaatcccagcactttgggaggccgaggcgggcggatcacgaggtcaggagatccagaccatcttggctaacacggtgaaaccccgtctctactaaaaatacaaaaaattagctggtcgcggtggtgggctcctgtaatcccagctactcaggaggctgaggcaggagaatggcgtgaacccgggaggcggagyttgcagtgagccgagatcgtgccactccactccagcctgggcgatagatagcaacattgcagtccggcctgggcgaaagagcgagactccgtctgaaaaaaaaaaaaaagtcagtatttgaagcaaacatctctggagaaaagcttcaatacagaacctagaaccgatatagaattagatgaagcaataaattcagggtcagagattattaaacactcaagaatcccatcaatatttagtgaagttctgaagaaacaatatgcaactgattttaatcctgtggattatttatattttgagcgtcaatcacagaatacagaatatctacataaaaaatctttaaaaaaacaatttatgcagtttctaa

SEQ ID NO: 33104 - DNA, 546 bp, Homo sapiens
tgggaggttcccttgagcccagggattgaagaacaacctagacaacatacagagaccctgtatctacaggttttttttgtttgttttcttttgttttyttttttgttttttcaattagctatgcattgtggtgtgcacctctgggcacagctacttgcaaagctgaggcaggcagatcgcttgagcctggaaggttaaggctgcagtaagccatgatagcgccactgcaccaacctggatgacagtgtgatactctgtctctagaaataaataaataaaaataaagtaaaactgcacactccttcacttctcaactcacctttacaatttatactgaagttactcaaagtaatattttaaaatctttattggcaaattgtctgtaattagaaaaaaaaggcctctctctataaagcaataatacatttaaaaataaattccattgtaccctatgaatatatacaattatttgttaattaaaaaggaaataaaatgatcataaaaattatgtatctataaaataatattaagcaatgaaatatatta

SEQ ID NO: 33105 - DNA, 546 bp, Homo sapiens
tgggaggttcccttgagcccagggattgaagaacaacctagacaacatacagagaccctgtatctacaggttttttttgtttgttttcttttgtttttttttttgttttttcaattagctatgcattgtggtgtgcacctctgggcacagctacttgcaaagctgaggcaggcagatcgcttgagcctggaaggttaaggctgcagtaagccatgatagcgccactgcaccarcctggatgacagtgtgatactctgtctctagaaataaataaataaaaataaagtaaaactgcacactccttcacttctcaactcacctttacaatttatactgaagttactcaaagtaatattttaaaatctttattggcaaattgtctgtaattagaaaaaaaaggcctctctctataaagcaataatacatttaaaaataaattccattgtaccctatgaatatatacaattatttgttaattaaaaaggaaataaaatgatcataaaaattatgtatctataaaataatattaagcaatgaaatatatta

SEQ ID NO: 33106 - DNA, 615 bp, Homo sapiens
tgcatacaaattggcaactattaatactccattggatctgatttttagaatataataaatatttacttttgtatagtttactaatataaaatactagstgattaagcaagtttatttgaggattctccttaaacaatgagtacttgaaaattatcaggtttctttcaggtaaaatttcaaactgccttctagggctcttacatgaactcatatatgtaggagttcattatatatatatgtgtatatgtatagttaagtttaacatttaatttgttataatatattgacctttcagttattcttaatgtcttgattaattacaaagagaaaactatgacagctatgtgttttatttgtctttaatcagtatagtttcaagatctagtgtctagagcagaccctttctctaattattgcatcttgatcatgttgtcaagactataaagggcctgagattttactctacttgcaaattaacaacttagtgtgccactatttcttagatggtgtaaaaagacatgacttttaggagcagcagacagtttattattcaaataaatagcagtagtcaaaatattcttattttcacatgctgattctggagctcaaattccc

SEQ ID NO: 33107 - DNA, 573 bp, Homo sapiens
tgcctggataatttttttgtgtttttagtagagacaggttttcaccgtgttarccaggatggtctcaatctcctgacctcgtttatatagcatacatttgctttggtacaggcagttgtgaatatcaatgtgttttaagaaaggaagttcaagggtgccctaagaatttttaaaaatcaattattttaaaggcaaattttaaaaattaactgtagaaatgacaaaataaaattaaaatcgtaaaaaacttacatgtaaaccacttcagatacaagtgtccctagatacacaaagattacagaaactaaaatttgtgtggttggtcactgttgtataacagatttcttcgtaatgatagtgtgattgtttatactgcgtgtaaatttttaaaccccaaactgtctctttaataaattcaacctgatgcatcttttgaagttgaaagatttactgctattttaattgactcaaaggcaatatagctttctctggaatcattgccaaaaacaaatgacatgccattggatctatgctttcaattcctggggcagcagtatcttcaaagggagaagc

SEQ ID NO: 33108 - DNA, 573 bp, Homo sapiens
tgcctggataatttttttgtgtttttagtagagacaggttttcaccgtgttaaccaggatggtctcaatctcctgayctcgtttatatagcatacatttgctttggtacaggcagttgtgaatatcaatgtgttttaagaaaggaagttcaagggtgccctaagaatttttaaaaatcaattattttaaaggcaaattttaaaaattaactgtagaaatgacaaaataaaattaaaatcgtaaaaaacttacatgtaaaccacttcagatacaagtgtccctagatacacaaagattacagaaactaaaatttgtgtggttggtcactgttgtataacagatttcttcgtaatgatagtgtgattgtttatactgcgtgtaaatttttaaaccccaaactgtctctttaataaattcaacctgatgcatcttttgaagttgaaagatttactgctattttaattgactcaaaggcaatatagctttctctggaatcattgccaaaaacaaatgacatgccattggatctatgctttcaattcctggggcagcagtatcttcaaagggagaagc

SEQ ID NO: 33109 - DNA, 573 bp, Homo sapiens
tgcctggataatttttttgtgtttttagtagagacaggttttcaccgtgttaaccaggatggtctcaatctcctgacctcgtttatatagcatacatttgctttggtacaggcagttgtgaatatcaatgtgttttaagaaaggaagttcaagggtgccctaagaatttttaaaaatcaattattttaaaggcaaattttaaaaattaactgtagaaatgacaaaataaaattaaaatcgtaaaaaacttacatgtaaaccacttcagatacaagtgtccctagatacacaaagattacagaaactaaaatttgtgtggttggtcrctgttgtataacagatttcttcgtaatgatagtgtgattgtttatactgcgtgtaaatttttaaaccccaaactgtctctttaataaattcaacctgatgcatcttttgaagttgaaagatttactgctattttaattgactcaaaggcaatatagctttctctggaatcattgccaaaaacaaatgacatgccattggatctatgctttcaattcctggggcagcagtatcttcaaagggagaagc

SEQ ID NO: 33110 - DNA, 740 bp, Homo sapiens
atttttttttcagtgaatatagtgcttgtcaattacacaaatcccttgaatattatattcccgtttaaattggtctgcttgattatctataattcaatcagtttagttccaagtctattccccagagtctgataaatccaaaactctaagaacaattttgtggacccacgagtttgactatagtctctgaataagcctcaattaaacaattctattctgggatgccctctggcatgaatcttgacttcccatagcaatgtattttrttttctaaaattcttctttcaaacagtttcaagttttaaaaattcaatttaagaaaagataattatgtgtttaacaagtacagttacattaaagacatttatactaacagctcttggattgagtaatggccttgattagtaagattatttattcaatcagtctatttactaaaagatctcatcaagccttagggtggaaaaataagaagatagaaaactgaagtgatactttaacttatcaaaagagttggtcatgtatacaaaatgggtaaaaaaatatttcctaattttggtctccataaaaacaaatattcagtgagcaattcagtcaagcacacattgacaggttaatgactagaagattccatcagaagagttaaactgatttgcatagacaccattaataattgaatgtctctagatttttaaaataaattgaacacgactcatctgaataaacagatttgacattac

SEQ ID NO: 33111 - DNA, 740 bp, Homo sapiens
atttttttttcagtgaatatagtgcttgtcaattacacaaatcccttgaatattatattcccgtttaaattggtctgcttgattatctataattcaatcagtttagttccaagtctattccccagagtctgataaatccaaaactctaagaacaattttgtggacccacgagtttgactatagtctctgaataagcctcaattaaacaattctattctgggatgccctctggcatgaatcttgacttcccatagcaatgtattttattttctaaaattcttctttcaaacagtttcaagttttaaaaattcaatttaagaaaagataattatgtgtttaacaagtacagttacattaaagacatttatactaacagctcttggattgagtaatggccttgattagtaagattatttattcaatcagtctatttactaaaagatctcatcaagccttagsgtggaaaaataagaagatagaaaactgaagtgatactttaacttatcaaaagagttggtcatgtatacaaaatgggtaaaaaaatatttcctaattttggtctccataaaaacaaatattcagtgagcaattcagtcaagcacacattgacaggttaatgactagaagattccatcagaagagttaaactgatttgcatagacaccattaataattgaatgtctctagatttttaaaataaattgaacacgactcatctgaataaacagatttgacattac

SEQ ID NO: 33112 - DNA, 740 bp, Homo sapiens
atttttttttcagtgaatatagtgcttgtcaattacacaaatcccttgaatattatattcccgtttaaattggtctgcttgattatctataattcaatcagtttagttccaagtctattccccagagtctgataaatccaaaactctaagaacaattttgtggacccacgagtttgactatagtctctgaataagcctcaattaaacaattctattctgggatgccctctggcatgaatcttgacttcccatagcaatgtattttattttctaaaattcttctttcaaacagtttcaagttttaaaaattcaatttaagaaaagataattatgtgtttaacaagtacagttacattaaagacatttatactaacagctcttggattgagtaatggccttgattagtaagattatttattcaatcagtctatttactaaaagatctcatcaagccttagggtggaaaaataagaagatagaaaaytgaagtgatactttaacttatcaaaagagttggtcatgtatacaaaatgggtaaaaaaatatttcctaattttggtctccataaaaacaaatattcagtgagcaattcagtcaagcacacattgacaggttaatgactagaagattccatcagaagagttaaactgatttgcatagacaccattaataattgaatgtctctagatttttaaaataaattgaacacgactcatctgaataaacagatttgacattac

SEQ ID NO: 33113 - DNA, 740 bp, Homo sapiens
atttttttttcagtgaatatagtgcttgtcaattacacaaatcccttgaatattatattcccgtttaaattggtctgcttgattatctataattcaatcagtttagttccaagtctattccccagagtctgataaatccaaaactctaagaacaattttgtggacccacgagtttgactatagtctctgaataagcctcaattaaacaattctattctgggatgccctctggcatgaatcttgacttcccatagcaatgtattttattttctaaaattcttctttcaaacagtttcaagttttaaaaattcaatttaagaaaagataattatgtgtttaacaagtacagttacattaaagacatttatactaacagctcttggattgagtaatggccttgattagtaagattatttattcaatcagtctatttactaaaagatctcatcaagccttagggtggaaaaataagaagatagaaaactgragtgatactttaacttatcaaaagagttggtcatgtatacaaaatgggtaaaaaaatatttcctaattttggtctccataaaaacaaatattcagtgagcaattcagtcaagcacacattgacaggttaatgactagaagattccatcagaagagttaaactgatttgcatagacaccattaataattgaatgtctctagatttttaaaataaattgaacacgactcatctgaataaacagatttgacattac

SEQ ID NO: 33114 - DNA, 632 bp, Homo sapiens
aaaaatactttattttctcacataagtatatttcggtagtaaaaagggatgttcataacagacatctctttcatctctttttcttttattttaatatgtttattttctcatacaggctttctcaagtgatrtaaaacctggctgcttgaagtagcacttacttatacatccttagatccacctgctttgaggatgcaatttaaaatattataaagaaagacttctgctttggtatgtctcaaattaactgataggatctaccactgggcccaaaggtgatgaatattatgattaaatcatgaaatataaggcccttttgatgcaagaccaaagagaaagatggaaaaggttgttgaagagtaattagccagttagctatatatattatgtgcctactacaaacattataaaaaataactagatcaaatcataactataggtaatatcacacactatagcacgaaaattataaattctttaaaaacaaactggggaagaaatttgcaggatctatataaagcgaattttttaatttactaaaaagtataatagaaattaggaaaaaagtaacattgatgtatttatttcactttagatttagaggaaatatgaagaaataataaaagagacaa

SEQ ID NO: 33115 - DNA, 570 bp, Homo sapiens
tttccaccgctccacacatttcgctttggatacattaattatatgttattttcttcccaacatccaaaataatactattgatttaatgctttatctgttttcaaaaacaaatttttataatctgatttaagtatctttccaaaatgcctgaagacatttcatgatgctgcacaaaaacccaagcaagatttctagcaacgaggtacactgatcgaatacatcgaaatatcagttataatattcctgtttccaatttccacaacagagttggctttgaactgaaacttcctaagaaaaaaccatttcctttattcacacttccaagttacattttgaatatttcaaatagctcggcacaaaaatctaaagtaatrgctaacaccgtaacaagactgagagaaaaagttccttttttaaatgtgttgcaaagtttgctctcacatcctggtaactggaaactgcaacgctgggtgactgaccagcctttttttttattatttaaaaattcaaacggctataaagggcttctaatgtgcgtcttatttttaaaaggtaaggtaaaaacccttt

SEQ ID NO: 33116 - DNA, 654 bp, Homo sapiens
atgctgctatatgaaaagaagagttatctcattctttgagattatctaacaacattttacgatataagtgtatttcatatattgaaccaattcctgttaggtggatatttaggttttttccaatttcgtttcattttctagagggatatttgtaaaagatattctttacttaagctagagtaatggttatttagacaaaacgtgaatctcctagggaattctgactgacaagaatttttaaaaattgagctctaaatgtcatattttaaaatatcagtcagcaactgtatagtatattggaaaggactataggtttatagccaagagaattgggtctttttgatccctgacacttattaattatataatattgtgcaaactatctaaattctctgggccttgttttcccatctacaaaatgatgagtatgamgtagatggtctttaaagggtctaaaaactctaaataaaagactctatactgcaattatacaaaaaaaaaaaacaaaaaaaaaacacaacaactatggactcatcactggctaggaaggatgagtattccagagaaaagaagcagtcaccagctattttaggttgctcactatgtggtagaaaaaactgatggaaatcatggtattgggtttgaaaaattgaa

SEQ ID NO: 33117 - DNA, 715 bp, Homo sapiens
actggaatgggagcaaaatgagagttaagccctattctattcatttttgtatacttagggtttagaatagttactgaaacatactgggcacttaataaaagtttattaagtgaatgactagaaatggacgtagataagaatctttagagctaaatgtgcagaatctccaatacaactgaatctggtttccctcaagtttgattaaataattagcaaatgagtcatattatttcttgcttaacatgataatgatcttctccttatatctcacctaatgacttatactgtggtttacatggatttcatgtgtcatgaactgggcactaggttgatgctttgcatgcactcctctagtcttcacatcagtccttctaaaatgaacattgttatccccatttcacrgagaaaacctaaagtctggaataattgggtaacttatccaaaataagatagctaaaaattggtagactcaacctccgactattctccagatgggtatagtataactctactgcacaagaaaatgtaccagggattatacaggtatgatgatttttcaatcttcaataacacaaaccactagcaagcctgggtgatttattcccagataacctattctcagactacagattttcccaagggcctgttcctacatccatgatggaagtatgtgaagaccttgaatctagaagcaggaagatcatctccctttaaa

SEQ ID NO: 33118 - DNA, 517 bp, Homo sapiens
attaaagacttccacaatggatttttccagtatagacttctcctgggaaaaaaacatatttatctccttcgaatatctatgcctgaaattcagtctctttcatctcaacctcctcaatcagtctcccttccctgctccttctcctgtgaccttctctacaaccctttctcttatatcattcactgctgaactactaccaaatcatgcagatgttattttaaaaatatttcttgatcctgatatcacctgaagaaaatcaaaagttctcctcctagaatatggcttcctgagggtaatgagtgttttaaattaaaagcccttagagatcaacaggcgttggaagagacttttcccccatctacataaagataggacccatsaaggagaacatttcttcttgttcccctccccacattatcttattatccattataggaaagaagaccaaaaaaatataactacacctgaacagaccctttttcaagataatgactgtcttcaaggaacatttaaattc

SEQ ID NO: 33119 - DNA, 1011 bp, Homo sapiens
  misc_feature (1)...(1011): n = A,T,C or G
aagaataactttttgtaatatcgaatagacatacaataattgaatttataaataataaacacatgtgtttgagaggcaagagtaaacaatatttacttattgttaaatgagagaatttgttttttccccctctcgacaagtattgctgcatccagagataacaatttactgatttttacatttacaattttgagattatataattgtttaagaactttaaaagaagatgctttaaaaaagcaaactttacamggttaaagtgagatttgcctaggaaactagaaacaaggttagtattatgagatgacttgatactttatgtgcttttgtattgtctgaatttttacaagatgtattcattacagtggaaagtatacttctattaaataaagtgttntacaattatattttaaagtctagttgcaagcaagtaacttgaatgtgacataaaataaacctgcttttttttaactntggctggcccaataagtactgaattgctgatatgattattttgtaacatgtaggttatttcagatacagctagtcaagtacagtgcaatcaaattatgagtagatggcccagtcgattttttgattgacctacatgcatgccattgatttcactgattatttagaatgaccgtagacattgatggataattttgttacagtatattaggtataagatacaaaatagtaagcacccacagaaaatataactgtaaacatttagttgaagcccttccaattagattgccacatcaaactaaaaacaccaattatttgcgtttccttagatacaaagaataatgtcaagatattccttcccctgtttgcaaaaaaaagtaaggttacatacacatttgttgaggatgggattgagaggtgacagcgtgctggcagtcctcacagccctcgctcgttctcggcgcctcctctgcctgggctcccactttggcggcacttgaggagcccttcagcccaccgctgcactgtgggagccccttt

SEQ ID NO: 33120 - DNA, 1140 bp, Homo sapiens
  misc_feature (1)...(1140): n = A,T,C or G
ctgatgaaaattcctaattagctctcgacctactcataactccattctgtttttcttgatccttattcagctcctagtttaaggggttgtttctttgtgttcacatcaatgtgcacaaaagaatcacctggaaagcttgcacaaatgtggattccaagactcattctcagatattctgmctcaggaggtgtgagtgaagcccagaaatttgctctttaacaagtaccccaggtgatgataccgcaagtggtccatggtccccactttgattcttcagattttcaccttctgcagtcctactagtttgatgtgacaaggaatttatttctctgattcttgactatccctttgttgagagttcctggtagatactttttttttaatggtagggcagagaaagagatcagtaaaactttcanaagagtaactttttgcaaaaactgtagcagattgcaggtgtaggaaaatgatgtggacgcgggggaatgaaaccccaagacattgcttctnttcactcaaagtgtctaacaaaaataatgcaaataattacaatgaagctttgtggaggcaataagatattaagtagaaagaatggggcaaagagagagggccatgccacagaggcagcataacttgaaaatgctagagagaagagagaatgattgaaagaacacaattttgaagcaagtgggatgaaacacaggcaagaagttttgtgatgcccacctcttcctcctaaatctcatttgttccacagacatgttggattccaatcaaaagtttcaagtatattttctacacatatagataaatgagtgtagttgtcattaatacctttgaccacgcaacatttctcttaccttcttttggaaacagtggcacttgcctcccttagggagctttcccttttcctccagttctgactctaagatatactccaaaaagaagctgccctgtttttacataatcctcttgtgcagcctatcacaggtgggtaccctaccacaagtgggtactcttcctaagatgagccattcaggatttctcttctggattttttttctaattaaactaaggagataacttcttttctgggacaaaacatgtaagataggaagccaagaggcataagaagccata

SEQ ID NO: 33121 - DNA, 1140 bp, Homo sapiens
  misc_feature (1)...(1140): n = A,T,C or G
ctgatgaaaattcctaattagctctcgacctactcataactccattctgtttttcttgatccttattcagctcctagtttaaggggttgtttctttgtgttcacatcaatgtgcacaaaagaatcacctggaaagcttgcacaaatgtggattccaagactcattctcagatattctgactcrggaggtgtgagtgaagcccagaaatttgctctttaacaagtaccccaggtgatgataccgcaagtggtccatggtccccactttgattcttcagattttcaccttctgcagtcctactagtttgatgtgacaaggaatttatttctctgattcttgactatccctttgttgagagttcctggtagatactttttttttaatggtagggcagagaaagagatcagtaaaactttcanaagagtaactttttgcaaaaactgtagcagattgcaggtgtaggaaaatgatgtggacgcgggggaatgaaaccccaagacattgcttctnttcactcaaagtgtctaacaaaaataatgcaaataattacaatgaagctttgtggaggcaataagatattaagtagaaagaatggggcaaagagagagggccatgccacagaggcagcataacttgaaaatgctagagagaagagagaatgattgaaagaacacaattttgaagcaagtgggatgaaacacaggcaagaagttttgtgatgcccacctcttcctcctaaatctcatttgttccacagacatgttggattccaatcaaaagtttcaagtatattttctacacatatagataaatgagtgtagttgtcattaatacctttgaccacgcaacatttctcttaccttcttttggaaacagtggcacttgcctcccttagggagctttcccttttcctccagttctgactctaagatatactccaaaaagaagctgccctgtttttacataatcctcttgtgcagcctatcacaggtgggtaccctaccacaagtgggtactcttcctaagatgagccattcaggatttctcttctggattttttttctaattaaactaaggagataacttcttttctgggacaaaacatgtaagataggaagccaagaggcataagaagccata

SEQ ID NO: 33122 - DNA, 1140 bp, Homo sapiens
  misc_feature (1)...(1140): n = A,T,C or G
ctgatgaaaattcctaattagctctcgacctactcataactccattctgtttttcttgatccttattcagctcctagtttaaggggttgtttctttgtgttcacatcaatgtgcacaaaagaatcacctggaaagcttgcacaaatgtggattccaagactcattctcagatattctgactcaggaggtgtgagtgargcccagaaatttgctctttaacaagtaccccaggtgatgataccgcaagtggtccatggtccccactttgattcttcagattttcaccttctgcagtcctactagtttgatgtgacaaggaatttatttctctgattcttgactatccctttgttgagagttcctggtagatactttttttttaatggtagggcagagaaagagatcagtaaaactttcanaagagtaactttttgcaaaaactgtagcagattgcaggtgtaggaaaatgatgtggacgcgggggaatgaaaccccaagacattgcttctnttcactcaaagtgtctaacaaaaataatgcaaataattacaatgaagctttgtggaggcaataagatattaagtagaaagaatggggcaaagagagagggccatgccacagaggcagcataacttgaaaatgctagagagaagagagaatgattgaaagaacacaattttgaagcaagtgggatgaaacacaggcaagaagttttgtgatgcccacctcttcctcctaaatctcatttgttccacagacatgttggattccaatcaaaagtttcaagtatattttctacacatatagataaatgagtgtagttgtcattaatacctttgaccacgcaacatttctcttaccttcttttggaaacagtggcacttgcctcccttagggagctttcccttttcctccagttctgactctaagatatactccaaaaagaagctgccctgtttttacataatcctcttgtgcagcctatcacaggtgggtaccctaccacaagtgggtactcttcctaagatgagccattcaggatttctcttctggattttttttctaattaaactaaggagataacttcttttctgggacaaaacatgtaagataggaagccaagaggcataagaagccata

SEQ ID NO: 33123 - DNA, 1140 bp, Homo sapiens
  misc_feature (1)...(1140): n = A,T,C or G
ctgatgaaaattcctaattagctctcgacctactcataactccattctgtttttcttgatccttattcagctcctagtttaaggggttgtttctttgtgttcacatcaatgtgcacaaaagaatcacctggaaagcttgcacaaatgtggattccaagactcattctcagatattctgactcaggaggtgtgagtgaagcccagaaatttgctctttaacaagtaccccaggtgatgatacygcaagtggtccatggtccccactttgattcttcagattttcaccttctgcagtcctactagtttgatgtgacaaggaatttatttctctgattcttgactatccctttgttgagagttcctggtagatactttttttttaatggtagggcagagaaagagatcagtaaaactttcanaagagtaactttttgcaaaaactgtagcagattgcaggtgtaggaaaatgatgtggacgcgggggaatgaaaccccaagacattgcttctnttcactcaaagtgtctaacaaaaataatgcaaataattacaatgaagctttgtggaggcaataagatattaagtagaaagaatggggcaaagagagagggccatgccacagaggcagcataacttgaaaatgctagagagaagagagaatgattgaaagaacacaattttgaagcaagtgggatgaaacacaggcaagaagttttgtgatgcccacctcttcctcctaaatctcatttgttccacagacatgttggattccaatcaaaagtttcaagtatattttctacacatatagataaatgagtgtagttgtcattaatacctttgaccacgcaacatttctcttaccttcttttggaaacagtggcacttgcctcccttagggagctttcccttttcctccagttctgactctaagatatactccaaaaagaagctgccctgtttttacataatcctcttgtgcagcctatcacaggtgggtaccctaccacaagtgggtactcttcctaagatgagccattcaggatttctcttctggattttttttctaattaaactaaggagataacttcttttctgggacaaaacatgtaagataggaagccaagaggcataagaagccata

SEQ ID NO: 33124 - DNA, 643 bp, Homo sapiens
catacattttaaacattttcaycaaaatttggtaagcttgtatcaaagtaaacaactgttatgtcatatgttaattaaacaaagttgtgagcatcttccatgtggcagacctttatccagggcctgaataagacagatgaatacagggatattatagggatgaataagatagatgtggtctctgttgtcatcaagctttcattatcacagggagatagacaaaaaccaagttgacaaatacatagataatatttcagataaatttaacaactatgaagaaaataaacgataaagtataacctccctatggaggggagctactttttaaattggatagttagaaaaacacctttgaaaaaaggtaaaatctcagaagccatgtaaatggaaagtattacagagaattgtattgaactatgcaaaataaaatgcaatattgagataattatataaattaattattttgactgggtattgatctatgagataatccattatttttgcctattttaatgaattgttcagacatttgttgccagtatccaaattcacaaatagttatgtgtggtgtttttctgccatcctctatgtagccctaagattttccttagccccaattatcgatgcttgaaacacattgctt

SEQ ID NO: 33125 - DNA, 643 bp, Homo sapiens
catacattttaaacattttcatcaaaatttggtaagcttgtatcaaagtaaacaactgttatgtcatatgttaattaaacaaagttgtgagcatcttccatgtggcagacctttatccagggccygaataagacagatgaatacagggatattatagggatgaataagatagatgtggtctctgttgtcatcaagctttcattatcacagggagatagacaaaaaccaagttgacaaatacatagataatatttcagataaatttaacaactatgaagaaaataaacgataaagtataacctccctatggaggggagctactttttaaattggatagttagaaaaacacctttgaaaaaaggtaaaatctcagaagccatgtaaatggaaagtattacagagaattgtattgaactatgcaaaataaaatgcaatattgagataattatataaattaattattttgactgggtattgatctatgagataatccattatttttgcctattttaatgaattgttcagacatttgttgccagtatccaaattcacaaatagttatgtgtggtgtttttctgccatcctctatgtagccctaagattttccttagccccaattatcgatgcttgaaacacattgctt

SEQ ID NO: 33126 - DNA, 643 bp, Homo sapiens
catacattttaaacattttcatcaaaatttggtaagcttgtatcaaagtaaacaactgttatgtcatatgttaattaaacaaagttgtgagcatcttccatgtggcagacctttatccagggcctgaataagacagatgaatacagggatattatagggatgaataagatagatgtggtctctgttgtcatcaagctttcattatcacagggagatagacaaaaaccaagttgacaaatacatagataatatttcagataaatttaacaactatgaagaaaataaacgataaagtataacctccctatggaggggagctactttttaaattgsatagttagaaaaacacctttgaaaaaaggtaaaatctcagaagccatgtaaatggaaagtattacagagaattgtattgaactatgcaaaataaaatgcaatattgagataattatataaattaattattttgactgggtattgatctatgagataatccattatttttgcctattttaatgaattgttcagacatttgttgccagtatccaaattcacaaatagttatgtgtggtgtttttctgccatcctctatgtagccctaagattttccttagccccaattatcgatgcttgaaacacattgctt

SEQ ID NO: 33127 - DNA, 575 bp, Homo sapiens
tattcagaaatatttttaaagctaagaagtttctaaaaattgctcagtattatcccagttctattacccttccatcactctaggcaagtggtgcagtcatgatacagtatgtttagtacttagaatagtcagtctagtgctttgcagaaaaataatgtctatcctctacatatcagtgtgctggatcctatcaggaaagttcttgaggtattaggaatatcaggtagcttttataaacaaaggtaccaagagaaaaccactattcaaatgaagtaaataaagcaaagcaaaataaaacaaatttatgtttatttacrggcttcatgccccgacattcttaatgaaatttgggagtgaaccagatattcacgtttctgtcagcatatatatgtgattttattcaacaaaaatcctccgagagattatatcatatgtaaatagagttacattcaggaaattgattctccttagtttgtgagatggtatacaatcttttattgcattttaattacatcttaatcatagaaagctaatgctttataaaatttcctctgtgccaggtcatgtttgagata

SEQ ID NO: 33128 - DNA, 1099 bp, Homo sapiens
tgtcacccggaatggcacccggtctcagtccttcccaagcacacagagggcggccacgatgggcgtctcagcatctgaaaccttctacccaatctagactcccgtrgggcctcatcctgctgcccagggcccctcctcccaggccactcctccagttctgcttaagtaggcaggcaggatatgggagcccgggagaagctgaatcctctgggacccctaggtgaagctagggccagcctcgcctggagagacctgcagaaagagctccgagtggcacaaacttggctggtccccaaggaattgtcccgggttcccctcttagcctcccctggccccgtgccggcaccgagccctccattcccgcctgtcctgctccggggagggccagacacagatgcaaagtcagcttccacagcgggccccttttctccccctccttcgtcaagacaaataattaacttcagactcccagatgccagggcagccgcactctctcccgccgccggctgcaggaaccgcccccctctcctgaaccccctgctttggccgtggtcttccccaccctgctcgctcccccgacggggaggacggagctggccagggaggcgcgcgaacctcaggcagggctaagagcagagcccccagcccctctcggccccctcaggccgggctgataggagggagggggcgcacctggccggaccccaagcctcccgcacctggactcaccttccgcgcccgcggccagcgccagggccccgaggtgcaggagaagggacagcgcagcggccccgaccccggccatgctagctccgcctcgctcggctcgccgtctgtcgtcgcggctcagcaggcgctggggaaggcggggtggggacacacaggccgctcccacccaggctttgttcagggagggctcaaaccccccaccgcgcgcgcctttcccatgcacacctccacccgccccgggcccggccggtcctgaccccagagagcagctccagctcgcaggaagcccaacgggggtgtaggccttgtctccgcttaagatccaggaggagaccctgaaaagaaaataaacccaagtccacccctctcg

SEQ ID NO: 33129 - DNA, 1099 bp, Homo sapiens
tgtcacccggaatggcacccggtctcagtccttcccaagcacacagagggcggccacgatgggcgtctcagcatctgaaaccttctacccaatctagactcccgtggggcctcatcctgctgcccagggcccctcctcccaggccactcctccagttctgcttaagtaggcaggcaggatatgggagcccgggagaagctgaatcctctgggacccctaggtgaagctagggccagcctcgcctggagagacctgcagaaagagctccgagtggcacaaacttggctggtccccaaggaattgtcccgggttcccctcttagcctcccctggccccgtgccggcaccgagccctccattcccgcctgtcctgctccggggagggccagacacagatgcaaagtcagcttccacagcgggccccttttctccccctccttcgtcaagacaaataattaacttcagactcccagatgccagggcagccgcactctctcccgccgccggctgcaggaaccgcccccctctcctgaaccccctgctttggccgtggtcttccccaccctgctcgctcccccgacggggaggacggagctggccagggaggcgcgcgaacctcaggcagggctaagagcagagcccccagcccctctcggccccctcaggccgggctgataggagggagggggcgcacctggccggaccccaagcctcccgcacctggactcaccttccgcgcccgcggccagcgccagggccccgaggtgcaggagaagggacagcgcagcggccccgaccccggccatgctagctccgcctcgctcggctcgccgtctgtcgtcgcggctcagcaggcgctggggaaggcggggtggggacacacaggccgctcccacccaggctttgttcagggagggctcaaaccccccaccgcgcgcgcctttcccatgcacacctccacccgccccgrgcccggccggtcctgaccccagagagcagctccagctcgcaggaagcccaacgggggtgtaggccttgtctccgcttaagatccaggaggagaccctgaaaagaaaataaacccaagtccacccctctcg

SEQ ID NO: 33130 - DNA, 561 bp, Homo sapiens
tcaaactgctggcttaagcaatcctcccacctcagccccccaattagctgggaccacaggcacacaccaccacgctcagctaatttttrtatttttggtagagacaaggtcttgctctactgaccaggctgggctcaaactactggcatcatgcaatcctcctcccacctaggcctcccaaagactgcatctcaatttagaaaacaaaaacaaacaaaaccaaataaaaacaatgacatgaggttttctatgggggtgagggctcacattatttctgacaagatttggagacaaagaaattccagtatctttatcacatacttcctgccatggaagatctctgggtccatttctataaaaaaggagttgtgcacaaaggtatcaggaattggagcatgtgtgtgagggggtgtgtgtgtgtgtgtgtatgtgttaagtaccagagctttagaaagtctacaaacctcagctgggcacagtggctcacacctataatcccagcactttggaaggctgaggcgggtggatcacgaggtcaggagttcgagaccagcctggcca

SEQ ID NO: 33131 - DNA, 561 bp, Homo sapiens
tcaaactgctggcttaagcaatcctcccacctcagccccccaattagctgggaccacaggcacacaccaccacgctcagctaatttttatatttttggtagagacaaggtcttgctctactgaccaggctgggctcaaactactggcatcatgcaatcctcctcccacctaggcctcccaaagactgcatctcaatttagaaaacaaaaacaaacaaaaccaaataaaaacaatgacatgaggttttctatgggggtgagggctcacattatttctgacaagatttggagacaaagaaattccagtatctttatcacatacttcctgccatggaagatctctgggtccatttctataaaaaaggagttgtgcacaaaggtatcaggaattggagcatgtgtgtgagggkgtgtgtgtgtgtgtgtgtatgtgttaagtaccagagctttagaaagtctacaaacctcagctgggcacagtggctcacacctataatcccagcactttggaaggctgaggcgggtggatcacgaggtcaggagttcgagaccagcctggcca

SEQ ID NO: 33132 - DNA, 561 bp, Homo sapiens
tcaaactgctggcttaagcaatcctcccacctcagccccccaattagctgggaccacaggcacacaccaccacgctcagctaatttttatatttttggtagagacaaggtcttgctctactgaccaggctgggctcaaactactggcatcatgcaatcctcctcccacctaggcctcccaaagactgcatctcaatttagaaaacaaaaacaaacaaaaccaaataaaaacaatgacatgaggttttctatgggggtgagggctcacattatttctgacaagatttggagacaaagaaattccagtatctttatcacatacttcctgccatggaagatctctgggtccatttctataaaaaaggagttgtgcacaaaggtatcaggaattggagcatgtgtgtgagggggtgtgtgtgtgtgtgtgtatgtgttaagtaccagagctttagaaagtctacaaacctcagctgggcacagtggctcacacctrtaatcccagcactttggaaggctgaggcgggtggatcacgaggtcaggagttcgagaccagcctggcca

SEQ ID NO: 33133 - DNA, 491 bp, Homo sapiens
cccagtaacatgacyactcaaatgtttttacattttaatttgttgggttcttattaaaagaagcaggggaaagaatatttttctaaccaccatcgatttttcattttcagtgtatacatcttcatttttgcaacttttgcaattttttccccctcccccttaagtttacattttaaaaagcttatctgtggttttcttggtaagacctacatatacccaaggtggaaagtaaacatttgttttaaggaagtcctgtcatagtgtgctcaagatagttcctctgcccttaccttccctgtgaagcagaaggaagaaattttctgattagcaagatttggagtgtgaacatagaagatacctatctgaaagcttctctagcagtttacaattctatgatatcattagttatttcctagattatcatgtaatctgagaagaaaatttgaaaatgggataatacagtagtagcatcacttaaagtacatatttca

SEQ ID NO: 33134 - DNA, 590 bp, Homo sapiens
gggcacaccgccctccaggaactgacatgtgttcagctatccagaagctctggtacatacattttgttattgcacctgaaaagttgtttgaaactagtttcatttatatgctacaacagacacttgtagacacagaagtaagccaaagtaaattatggatgagaaatatttgctgaaagataaatcatttttcttaggctagtctgtgatcttaaagttttcttctcatgctgcacaaggacatatattacaagataagagggaatatctgcttyctataaagtctgtataccctcttcctggaagagaacactaagacataaggagagatctttccataaacttctttaatatgggactttattaatttaatgtatttattaatacatttaataaatgtatatgcttcaactaaaagcatgccaatagccaaagtaaggaagaaataatcaggtaaggtttataatatgctttcatttttgcctcttatctcaaaattaatgaaaagtttttccttggctagagtgctcagttcaataagcatttatgtttctactatttaaagaaatgatctctgtaaggctttatgc

SEQ ID NO: 33135 - DNA, 618 bp, Homo sapiens
acatcactgtaagctcccatactgaatgctgcttttgacaatccctttatttctaagaaaacatccttcgtggttgagcaagagtaagttttcattcaaatatagaaaattaccaccacttacttttccttcctattgttatactgcatctcattcctggaagacttccctcatctgcttaggatactgctttgtgctttataggatgcagtacttcatccaatgtagcacttatttgcccattttataattgcctaaatattttttgtgttcctgatgtctttagtcttcttaaacactgagattttatcctttttaaccacagtatccccarggactagctaagtgccagaaacatggttgatactcaataaagatttagtaaatgaatgagtaccttgatatttgtgacttacaggtccaagatcctcttgcagagtactgggccaggcctggccaggactggaaagtgagtattaatcctaagatagggcatacgagctgaggaggtctaaaatggaaaaaacaagaggactgaattcaaagcaaagtcctcaaagagaatgaagtttaaaagtcaaggaaatatggtcaaagatcaaaaggggagtcttaaaa

SEQ ID NO: 33136 - DNA, 513 bp, Homo sapiens
tacatgattccacttatacgaggtatctagaacagtcaaactaatagaaagtagttgccagagctgggataaggggagatggggagccaattaaagggtatggagtctcggttttgcaagatgaaagtgtcctggacattgtttgtacaacaatgtaartattcttaacaatacggaacatgacagaagttactacccttttcctagaaatttctgcataaaccaccccttaacctgcaagcaattaaaagtaggtataaacatgactgcagaattcccctgagctgctactttcagcacactgcctatgaaataggcttgttctgcaggagcagtcaaggagctgtaacactgcaactttgataaagctgtttcttctaccatcagcttgcccttgaattctttcctgggggaagtaaagaaccctcccagactaagccccaatttgcggcttgcctgccctgcatcacttgattctaaaaaaccccaggatcccttccttttctttgagac

SEQ ID NO: 33137 - DNA, 794 bp, Homo sapiens
ctttccttccctccttgtcaagggtgcaacattgctgcccagggttaaaacatatattctcaactcatctaccaagcaagtcctgaaatttgcgaagcgctctgggtttttgggaaatgagatcattttttttttccccaagcaacaatcctatcagattaaaagattccgttttgggatattaaactaaggtttgttttattactttttacagctaatttcttggccagttttcattttaagtgtaccaacatcatttttttaaagaccaagcttgtaaggcaagaataatttctgttaaacagacygtggtcatggccgccagcgctgtagggatctggatgtcaatgatttccacgtgaccttcaggttcatttcagataaccctaggtccttcagtacctcctatgcaacttacctgaatgggacacttaagccagttaggttaatgagcagccccacatcttcgcctcttctatttttctccaaggctaatcaatacacattgcacatgctgagctatctttgcaattcaaaaaccacattccatttagcttactagggagagactgatttcaacagcaagaagagatggaaagaaaaaacttaacctaaaaatatactttcaaaataaatcaagaaatgatttagaacaggggctgctgatgtgcagcacacagaccaaatccagtctgctgcctgcttttggaaataatgtcttattggaatattgacacgctcattcactcaccgactatctgctatggactgaattgtgtccctcaaaatgcata

SEQ ID NO: 33138 - DNA, 1024 bp, Homo sapiens
catctcctgtgctttatgaggccttcagaattaggctcttcgtggtcactttgtttcttcaaaagttcaagctatagacaacatttgacacatttatcacagatcatagaaactctcttaactgagagatcaggaccaatattggttacttaatcaaataagtcatttaaagtagaaaaatattttttaaaaggttcttagtttatacgttttatttcagtgtaaaattacaaatggacactgacaatttaactttactatggagagtcaagactttttgaaaatgggtcctctggttagaatctctcaacatgtttcttacattaattatagccacaatccttttgcacagtttccagctttctttcctcaaagtggagtgagaaattaatatgtatgcaaagcaatctgaataagtgagttcttccaagctctgatgatttcccctgatctatcatacttgtcttacccactcatttgacagcaatttttttagcaaacttatttttattgtcttcatagaaaccacatctttactttcacattcatatttcatggctctatataatatttatttaaatgatgtaattacagcagcaactacactggtatgaaataggtctgggaaccaatcaagttaactgttggtaagtattcaactcaactggtgcgaggggatgtatgaggttatatttgagagaaacctactacctgggagtgttcagtgaggttagtgtttatgatttacaagagggaatggagaatcttgcttaattctgtatattgttcaagyggaggtcaacaaccattgtacagcattgcttaagaagaaaaatgtcatgcagagggaagaaaatcccttcccagcatgtgacagctaaaatggtcatataagagaataatggcgacttatggtcagtcactccataaatggtccattatgatagacacttcataaataatttgaggcctttcctctgggtcccagactagacgtgcactgcaactttccaattgttaatgt

SEQ ID NO: 33139 - DNA, 1024 bp, Homo sapiens
catctcctgtgctttatgaggccttcagaattaggctcttcgtggtcactttgtttcttcaaaagttcaagctatagacaacatttgacacatttatcacagatcatagaaactctcttaactgagagatcaggaccaatattggttacttaatcaaataagtcatttaaagtagaaaaatattttttaaaaggttcttagtttatacgttttatttcagtgtaaaattacaaatggacactgacaatttaactttactatggagagtcaagactttttgaaaatgggtcctctggttagaatctctcaacatgtttcttacattaattatagccacaatccttttgcacagtttccagctttctttcctcaaagtggagtgagaaattaatatgtatgcaaagcaatctgaataagtgagttcttccaagctctgatgatttcccctgatctatcatacttgtcttacccactcatttgacagcaatttttttagcaaacttatttttattgtcttcatagaaaccacatctttactttcacattcatatttcatggctctatataatatttatttaaatgatgtaattacagcagcaactacactggtatgaaataggtctgggaaccaatcaagttaactgttggtaagtattcaactcaactggtgcgaggggatgtatgaggttatatttgagagaaacctactacctgggagtgttcagtgaggttagtgtttatgatttacaagagggaatggagaatcttgcttaattctgtatattgttcaagtggaggtcaacaaccattgtacagcattgcttaagaakaaaaatgtcatgcagagggaagaaaatcccttcccagcatgtgacagctaaaatggtcatataagagaataatggcgacttatggtcagtcactccataaatggtccattatgatagacacttcataaataatttgaggcctttcctctgggtcccagactagacgtgcactgcaactttccaattgttaatgt

SEQ ID NO: 33140 - DNA, 1024 bp, Homo sapiens
catctcctgtgctttatgaggccttcagaattaggctcttcgtggtcactttgtttcttcaaaagttcaagctatagacaacatttgacacatttatcacagatcatagaaactctcttaactgagagatcaggaccaatattggttacttaatcaaataagtcatttaaagtagaaaaatattttttaaaaggttcttagtttatacgttttatttcagtgtaaaattacaaatggacactgacaatttaactttactatggagagtcaagactttttgaaaatgggtcctctggttagaatctctcaacatgtttcttacattaattatagccacaatccttttgcacagtttccagctttctttcctcaaagtggagtgagaaattaatatgtatgcaaagcaatctgaataagtgagttcttccaagctctgatgatttcccctgatctatcatacttgtcttacccactcatttgacagcaatttttttagcaaacttatttttattgtcttcatagaaaccacatctttactttcacattcatatttcatggctctatataatatttatttaaatgatgtaattacagcagcaactacactggtatgaaataggtctgggaaccaatcaagttaactgttggtaagtattcaactcaactggtgcgaggggatgtatgaggttatatttgagagaaacctactacctgggagtgttcagtgaggttagtgtttatgatttacaagagggaatggagaatcttgcttaattctgtatattgttcaagtggaggtcaacaaccattgtacagcattgcttaagaagaaaaatgtcatgcagagggaagaaaatcccttcccagcatgtgacagctaaaatggtcatataagagaataatggcgacttatggtcagtcactccataaatggtccattatgatagacacttcataaataatttgaggcctttcctctgggtyccagactagacgtgcactgcaactttccaattgttaatgt

SEQ ID NO: 33141 - DNA, 953 bp, Homo sapiens
gtttgccatcaaatcacttaagaaacatttgcaggctttcagagctttttgcgtttcagcattctgaatatgagattgtggatggtgttatatccttgaactcaagggtaagccagcaccagcagcattgaaaagtcacagaatcctgtaacgagcttaacatcttgatgatgttaaatttagattgttgacatttaaagggaagaacttgtgaatacgtagctttgagtgcttagcgcctagacggtgtgatgaaggcagcctggcttaaaacatgattttctatgtgatgacagtctgggatggtcatgttactccttaagatggactactaaataatcacgctgcatctctcacctatttttaactacaatactgtccaggtggctcaaattataaacattctttaaaaaaataaaggaatgaatatgtttacaatactacagtctggaggacttttcaaacataatgaaacccccaaaagtcatagagttaagagttgttaaattgcacaaacatcaaacatttctttagagcaaacattactatggaagtgtcaaagtgtcaacaagtatttgcaagatatactggataaacatcttggataaacatgccttaaagartgattttataaatcaaaaagtaaaagaccaccagcctaactgaaaaataggcagataagcaagccacagacaaaaagaattacaaatttctttgaaacatgaagagattctccaccttatttttagtttaataagattaaatgtgaaaaacaatcccctgtcaaattgctaaggattaagccatttggtaattctgtttttagaaattcaccctacaattatactcacataaatgaatgaagaggtacctgcaaggattttcactgcagtgttattttcaatagattaagaattagaaacaatctaattgtccttcagtagaaagattga

SEQ ID NO: 33142 - DNA, 1039 bp, Homo sapiens
gcattcccctatttaaattcctccaaactccccaggttaaattgcaagtgaggcctccctgggctggtctctgtcacgctctgcagcctcatccctcccctatccccacaaatgccttcttgtcctgcagcagccccaggagaggactgaacgcagcttgctgctctgygtctccccatcctaggcccaatctccctcaataacctaactcggctcctacctgtcctttcacaggtgtgacctctttcctgagcaagcagctcttgcttaccttcctccctggtaattctcactctaagaggcaagaactttcttagttgtctgcctttcccatcagatactgagccccacgatgagcaaactaagagcccttccttcatgctacacatatttattgaactgctatttagtgtaaatcaccatgctagatctttctgccctcattaccagtgtttagaagagtatttggcatgcagtggggaacttgatgaatgtttatcaaattaaattttaaatatttcagcttaattagcattaattaactgcctccaaagcacctgcgaagtatgagctgccgccattcataaggccttgaaatctagtgaagagaggagagaaagaagtaaaggattccaagtggcacctcaagggctggagaccagcagagcccaggccttaggaaacgggaaccgggagtccgggagtccggaaatccgggagtccgagagcagggccggctgctggaattcaaacatcaaatttgtgttttgtgtttataaaagctctcccttatgtcacttgggagacaaatctaaaatgcagctaaagtaaatgagagcttacattgaatataagggctcatcagcaggtcccgagcttggcctggggagaacatttttgattcccccaaattctgctcaggctctcaggcatagatattccgggggatagaaagaaggatcatttgctttgattttagaattgcctattttttaatatctattaatctctatatcccgacatcatcaaaattaccttg

SEQ ID NO: 33143 - DNA, 498 bp, Homo sapiens
tcgggcgccgggcactctgcgcttccaacgctggcggcccgcctccccttctcccgggccaggcacgcaggtggaggaaagtaaacaccagtcggaagcaaggtggaagcagtgagtctcgcgactctcaawaaaacaagtggaaaaaaaaaaaaaaacaatcctcgcacaaagcatctccgtgctcccacaagcagaggcgtggctgcttgtttccctttttaaaggttgtatttttagttcttatgaaaaatgtttttattgcttacttctaagtaaacatgtatctccattacgataacgtagagaaaagctcttttaagaagtaaaaagagaaaactgaagtcacgttcacattcccactactcactgaaacgtttgggggaacttactcaagtgtttgctaatgagttttaaagacgagttaggcccttaacgcgtaattggggtcgtgctgtgcatatgatttgggatcttgcagcttgtttaactcggccc

SEQ ID NO: 33144 - DNA, 475 bp, Homo sapiens
tttctgtttagaaatttgccataactaaccctaagtcttcagatgacaacccctaaattttcttcctgtgcttagcaaagcctgtacacgtttgatggtatttagtaattgattatatagtggtgtgttttgttttgttttgttttgttttgttttggtcaggctttgggaaaatctctaaggaaccagaggatttaaacatggcactgcagtaatactttctaataattattactgatagggttcacgggatgtgagcactgggtttcatcatggcactgcaagaatgagtgtcccttccagatgcaacagtatacatattgcaacasagaaaaagaagacataatgtttgcaacttcttttaagaagtctgtctagaaatccatgcttgattgctttttaaatgtttccatgagagagtaaaaacttgtccccataccttgacaagtaagaaatttgtgattagaagccaaag

SEQ ID NO: 33145 - DNA, 475 bp, Homo sapiens
tttctgtttagaaatttgccataactaaccctaagtcttcagatgacaacccctaaattttcttcctgtgcttagcaaagcctgtacacgtttgatggtatttagtaattgattatatagtggtgtgttttgttttgttttgttttgttttgttttggtcaggctttgggaaaatctctaaggaaccagaggatttaaacatggcactgcagtaatactttctaataattattactgatagggttcacgggatgtgagcactgggtttcatcatggcactgcaagaatgagtgtcccttccagatgcaacagtatacatattgcaacacagaaaaagaagacataatgtttgcaacttcttttaagaagtctgtctagaaatccatgcttgattgctttttaaatgttkccatgagagagtaaaaacttgtccccataccttgacaagtaagaaatttgtgattagaagccaaag

SEQ ID NO: 33146 - DNA, 855 bp, Homo sapiens
acagtatcatgtgaagcttgcttttattgccttcagccttttctttctaacaatttattttaatacatttggaattattatcccaaacattagccagctggcccgctggggtttcctttgctgggttccgggtctctctttttctaatcctctcttcatggataatccactctaatgcttcttggcctttgaaggggttttgttattactacctgttgattagaaattcactttgtcttgtgtaggtggttctaatcgtgcagtaatggacaccttatttgagtcagctgaggtcagagttacagtcatgagattttctttcttctttccagatttctggacgtttacttgtcttttcaatatggttgttttttttttttttttttcctcacaagctaccattcagccgggctttgaaaacagtctgtaagaccaaagaaagaaaaaagaacagtatgaaagaaaaagaaagatgtgtagccaggccagacaaagagaaagacttattttctcctacagctgtttgaccccaggtatttaacactattgtctttgccaactacagaccctcaggggtccttgccgaggcgcccmctggagagccagaatttgtccctgggacaggatgaggagtccaggagaagcagcagtagacaggctgtgctgggagtcatcaggggccaccaggatacaaggggtggggggagcccagctgccttgctgacttgcctttcaaccctgatgtctgctctcttggtagtaagccagaagtggggcgtgggacgatgtgacaggagcaccaacgtccccaccaagccatcacagcaacaggctttgtccaggatcttctggaaa

SEQ ID NO: 33147 - DNA, 855 bp, Homo sapiens
acagtatcatgtgaagcttgcttttattgccttcagccttttctttctaacaatttattttaatacatttggaattattatcccaaacattagccagctggcccgctggggtttcctttgctgggttccgggtctctctttttctaatcctctcttcatggataatccactctaatgcttcttggcctttgaaggggttttgttattactacctgttgattagaaattcactttgtcttgtgtaggtggttctaatcgtgcagtaatggacaccttatttgagtcagctgaggtcagagttacagtcatgagattttctttcttctttccagatttctggacgtttacttgtcttttcaatatggttgttttttttttttttttttcctcacaagctaccattcagccgggctttgaaaacagtctgtaagaccaaagaaagaaaaaagaacagtatgaaagaaaaagaaagatgtgtagccaggccagacaaagagaaagacttattttctcctacagctgtttgaccccaggtatttaacactattgtctttgccaactacagaccctcaggggtccttgccgaggcgcccactggagagccagaatttgtccctgggacaggatgaggagtccaggagaagcagcagtagacaggctgtgctgggagtcatcaggggccaccaggatacaaggrgtggggggagcccagctgccttgctgacttgcctttcaaccctgatgtctgctctcttggtagtaagccagaagtggggcgtgggacgatgtgacaggagcaccaacgtccccaccaagccatcacagcaacaggctttgtccaggatcttctggaaa

SEQ ID NO: 33148 - DNA, 855 bp, Homo sapiens
acagtatcatgtgaagcttgcttttattgccttcagccttttctttctaacaatttattttaatacatttggaattattatcccaaacattagccagctggcccgctggggtttcctttgctgggttccgggtctctctttttctaatcctctcttcatggataatccactctaatgcttcttggcctttgaaggggttttgttattactacctgttgattagaaattcactttgtcttgtgtaggtggttctaatcgtgcagtaatggacaccttatttgagtcagctgaggtcagagttacagtcatgagattttctttcttctttccagatttctggacgtttacttgtcttttcaatatggttgttttttttttttttttttcctcacaagctaccattcagccgggctttgaaaacagtctgtaagaccaaagaaagaaaaaagaacagtatgaaagaaaaagaaagatgtgtagccaggccagacaaagagaaagacttattttctcctacagctgtttgaccccaggtatttaacactattgtctttgccaactacagaccctcaggggtccttgccgaggcgcccactggagagccagaatttgtccctgggacaggatgaggagtccaggagaagcagcagtagacaggctgtgctgggagtcatcaggggccaccaggatacaaggggtggggggarcccagctgccttgctgacttgcctttcaaccctgatgtctgctctcttggtagtaagccagaagtggggcgtgggacgatgtgacaggagcaccaacgtccccaccaagccatcacagcaacaggctttgtccaggatcttctggaaa

SEQ ID NO: 33149 - DNA, 2476 bp, Homo sapiens
caatcagtagaggaactgtgtttattaataattagacttatatttagaaaccgtatgtcataataataaataaaaatttcttttgtaatgacacaatgaattaacagtaaaactgtcctttaaaaatttcgaacatcacatactcaattttggccaatctttatttgttgcttaaaaaataagcatttctacactgctttactcaaaaccaccacagagttgtgaaaagaattgctgtgcatttctyatgaaaatgtttggataccccaccacgcacatctgtacaattctcatatttataatcattcatattcagaatagtatgtgccttctaagtatgccagtgaaaaataaaatgattacttttcctcaaacgttcagcaggcagtctaaattagccagctggtctcttgtcatggctggaaatatatagctttttataaaaagtgacagtaaatatgtctatggcccagttactttatatgcaagtggaaattccatcagtgcaatgacttatgattggagaagagcaaaaaagtgtataaagaaagagaagcaatgagaatagtgtttcatgtgccttgcagtggctcacaaaaaaataactcatttttaggaagtgaaatcaccttgttttatggctaggcagtaatctcaaggtccacttgttaagtttttttttattattgaagattcagaagtcatttaaaaacatgacctgttagaacaattcaatgcaccaagtctatttggaaaaattgtgtggtaaatcatgattcattatgcaattgtgatcagcacacagtgttataaattcatctatcttgactgtatagtcctttccatgcagtttctttatacagtctattagtccacaccccacatttatttattcttctttgcttgttctattttgttatattatttttctgtgttttatgttttgctctattttaaactatttactttgtttaaactattactctatctgaaactttttattggtctgtcttttgtaatctaacttgtgtcaccaataccataaaatgtatgataggaacaaaatgccataataaataaaactatctgtatctgcaccaatactctgggctttgagtccctcacagatcatgaagtaataaacaaatgcattgccggatactggagttggggagatcttctactctagtccccatgttaaagatgagaaactgaaatccagagaggccaggcaacctgctcagatgacactgccagagagtaacagccccaaacttgcctttttcccagattggtgcattctcccctgtgccttagttttctttgtgattaaagcaactgagtaattcaaggtagtcatcatctccaaggctaaattattcgtgacaattgtctttttccttgagaatttattcaaccattattctatgaatattgattgagcaactaccatgtgccaggcactgttaaggttatggcagcaaacaaagacagaactctctgccttcctggagcttgtgttgcagtggagtgaaacagacaacaaacagcacaaatgagggaaacgtatagtgtgcaagatggcgataagtgctttgaagaaaaataaggcagagaaaggaaatagggaatacatttatattttgtgttggagaggaagggtgggaaaggatgagtaaaattttaagtagaaaagccggaaaagatgtcacagaaaaggtgacatttcaggaaagacctaagaaggtagagagccatgcaacccatttccttcatgactgtgggagatcttagcttcctccacagggaagaaagtcaagatttttttcagacatttttttcttcatcttctacaagtagtcaactctattaaatgaacatcctaatgggaagagttttttcttttacccaaaatatttgcagcgatcggaagggtttcttttatgttgcatatctagacatcactaattatagcaactgtaatcctgcctatgaataatgtaagtggatttagctggcatttgattgctgggcagggagaactgggtttccgtcagctgggcctgggcctgcttttttgtttactctcttcccatcaattacacttagtctgcagggctcaggtgaatcacagcttgaaaggtctctaccactttgaaccactttacactgagacctggaaagcagagaacagtagaaaagtcatttgtgtagttgaaaaggaagcagttttctgacaatgcccatatctttaaggacttttgaagaaaccacttctcaaaagtgctcaggaagtttaaccattaactaacttttactgtgggtagaggagagttaactttgtgattttctcatgctttatatgatgttaaaagaagaaaattttctgtgatttaaaaaaataatcaggaatctctgcatgtgtgcctagacaagaataaatgtgagacttgtcagccaaaaatacttttatgta

SEQ ID NO: 33150 - DNA, 546 bp, Homo sapiens
ccttgtggtgacagaaagttctgtatcttgactttatcaatggcaatacctgggtcgtgatactgtggtacatgtagtgttgtaagatgttaccactggggagaactgggtaaaggatatgcaagatttctctgtattatttcttatatctgtgagtctacaattacctgaaaataaaattataatttgaaaagttccactaactccacttgaaatgcagcctcatctacttgcattcaccatttagattttcagtattgtaatggtgagttttgtggaagactgaatatattttaaattctgtaattgccttctttaaaaacaaaatggtaaattagscaaagaggtttgctaatgactgcagggatttcttttgtattattgattggcttattagtaagccacggaaataacagaaaatcaaaatgaataggttcccaatttgttttctttttctttaatagttgtagtcttccttaatcaaatcaaatagaggttataggttatcctgtggttcttgctgccatagagaatcatccagttctc

SEQ ID NO: 33151 - DNA, 747 bp, Homo sapiens
ctaccacaagaacagtatgggggaaactttccctatgattcaattatctcccaccaggtccctttcacaacacgagggaattataggagctacaatccaaggtgagatttgggtgggaacacagccaaaccatgtcatatgaagtgacaaatatcaagttttcttataattgtgcattctctttagcatgtttcattgttcatgcataaatcccatcccttttttaagagtttagattccaatttctccacaggaaaagtgttgagaagtctaagcagggctgcatcatctcagctatgattttgtagacttgcattgcggattggaatgttaggttggctgtcttttctttttatgaatattttactttatagttttactaaatgtaaatcccaaggatgctgtattcattaagactgcataagtgatttttgcgacctagaattggatgaaatgtctgattatgaataagaatttgcagagtgttgtaaaaagggtaatgaggtgcagttgagtcatgaaacccattggcagggctaagtaaaggacagtcaatagataaatctgtgtgtagcaaagaatctgacacttttccctagactcatggtrtagctttgacaaagtgcttttcttcaggtgtaataaaagtgtattcattgtgtaagcagctgataactactttacaacgtagaaatagagagcagtggggggagcgtggtctgtctacacgcacccgttgcagcaggg

SEQ ID NO: 33152 - DNA, 2148 bp, Homo sapiens
catttctcagccaggccctgaggcttagcagcctcttccagcagcacagcctccaggagcgagagtctggtgttacataaagggtgccatctgcttggagcaactcgagagcagagtgaggaagtgtggcgttggcgttgcttttcaaaatatttgccatcttcagaaaccctgtcattcttcccatcagccacaaaagccagtgtttcttaaaatctggctctgagttcagcatggaggccctgggcctggcatggagtaccttggtttgttgcagagagagagagacggcaagggcagagagcacacaccacacatggctctgcatggctttccagaaaccaccctggctggatcaccctcagccactctgaattcgcaggcaagagaacctgtacttacccatgctttctgtaaaagtcatcttggctttaaggcagttgcaacatgaaaacattctaacacttcatgaatatcaagcagctggtttggtttttgacttgacgcttccattttgggtaatttggctatcagtgcactcaagcatgtgtgaaagactcacgcagagggttcagggttggggacagccccgctgctcctcaggaggctggccacatgacagtggtctgtctctgcactgggatgccatgtagctgtaaaaasagtccatgtggacccatctctagggctttttgttaggtgatcaaagcaaagtgcaggacaatataagtaatgtgctggctacatttttgtctaaagagggcaaaggaatttctctttttgttagcttataaatgcataaaaggagtctgaatggatgaaatttacagaggttactgtgggggtggggaggacaggagagagaattgccacctaggtcttaactctttcttaatatgtttgaactatatgaatgtgctatctattgaaaaataaaatttttaaatcaacttgagaaaaggatctgagtaatccctgtaatcctggctactagggaggctgaagtgggaggattacttgagcctaggagttcaagattatagtgagccacgattgcgccactgcactccagcctaggcaacagagcgagacctcgtctcttaaaaaaaaaaaaaacaataaaaattaaaaatttttaaaaattgaaaaaagggaggaaatgtaaatcttccagcacttcctcagtgtcagaccctgagctggacacttatgttgtacatgctcccaggggagacagcagcatcctccctcttacagaggaagcacagtgggaagtccagggtctcagctagtcagagactaagctgggatctgaaagcctcgcctctgtcattctcctacatcgcttctaacatgctacctgccttccttttaagtaaattgtgcaacattttattctccagaaatgttaataaggaagatctgcctttaaaattagcttaaaaatacaaaaattagctgggcgtggtggcgcatgcctggatcccagctactcaggaggctgaggcaggagaagcgcttgaacccgggaggcggaggttgcagtgagctgagattgtgccattgcactccaggctgggcaacagagtgaaattctgtctcaataaacaaataaagaaaaacaaaattagcttaaaagaggtttgtatcagtgtggaccatgttgacccagatctggccccaccattcaccagtgaccttgtgacagtgaggacagtgacagtgacctcgtcagcccagtgaggacacagttcttctttttttttttttttttcctgagacaaggtctcactctgtcacccagactggagtgcagtggcgcaatcttggttcactgtaatcttgaactcctgggctcaagtgatcctcccacttcagcctcctgagtagctgggattaccggtgcccaccaccacgcctggctaatttttgtatttttagtagagacggggtttcaccatcttggccaggctggtcttgaactcctaacctcaagtgatccgcccaccttggcctcccaaagtgctggaattacaggcgtgagccaccactcccgaccacagttgctcttctgaaggagtcatatgagaatgaagtgaaggcatctgaggaaagtgggtgacgcagggcctgactcaggaaaggcag

SEQ ID NO: 33153 - DNA, 2148 bp, Homo sapiens
catttctcagccaggccctgaggcttagcagcctcttccagcagcacagcctccaggagcgagagtctggtgttacataaagggtgccatctgcttggagcaactcgagagcagagtgaggaagtgtggcgttggcgttgcttttcaaaatatttgccatcttcagaaaccctgtcattcttcccatcagccacaaaagccagtgtttcttaaaatctggctctgagttcagcatggaggccctgggcctggcatggagtaccttggtttgttgcagagagagagagacggcaagggcagagagcacacaccacacatggctctgcatggctttccagaaaccaccctggctggatcaccctcagccactctgaattcgcaggcaagagaacctgtacttacccatgctttctgtaaaagtcatcttggctttaaggcagttgcaacatgaaaacattctaacacttcatgaatatcaagcagctggtttggtttttgacttgacgcttccattttgggtaatttggctatcagtgcactcaagcatgtgtgaaagactcacgcagagggttcagggttggggacagccccgctgctcctcaggaggctggccacatgacagtggtctgtctctgcactgggatgccatgtagctgtaaaaagagtccatgtggacccatctctagggctttttgttaggtgatcaaagcaaagtgcaggacaatataagtaatgtgctggctacatttttgtctaaagagggcaaaggaatttctctttttgttagcttataaatgcataaaaggagtctgaatggatgaaatttacagaggttactgtgggggtggggaggacargagagagaattgccacctaggtcttaactctttcttaatatgtttgaactatatgaatgtgctatctattgaaaaataaaatttttaaatcaacttgagaaaaggatctgagtaatccctgtaatcctggctactagggaggctgaagtgggaggattacttgagcctaggagttcaagattatagtgagccacgattgcgccactgcactccagcctaggcaacagagcgagacctcgtctcttaaaaaaaaaaaaaacaataaaaattaaaaatttttaaaaattgaaaaaagggaggaaatgtaaatcttccagcacttcctcagtgtcagaccctgagctggacacttatgttgtacatgctcccaggggagacagcagcatcctccctcttacagaggaagcacagtgggaagtccagggtctcagctagtcagagactaagctgggatctgaaagcctcgcctctgtcattctcctacatcgcttctaacatgctacctgccttccttttaagtaaattgtgcaacattttattctccagaaatgttaataaggaagatctgcctttaaaattagcttaaaaatacaaaaattagctgggcgtggtggcgcatgcctggatcccagctactcaggaggctgaggcaggagaagcgcttgaacccgggaggcggaggttgcagtgagctgagattgtgccattgcactccaggctgggcaacagagtgaaattctgtctcaataaacaaataaagaaaaacaaaattagcttaaaagaggtttgtatcagtgtggaccatgttgacccagatctggccccaccattcaccagtgaccttgtgacagtgaggacagtgacagtgacctcgtcagcccagtgaggacacagttcttctttttttttttttttttcctgagacaaggtctcactctgtcacccagactggagtgcagtggcgcaatcttggttcactgtaatcttgaactcctgggctcaagtgatcctcccacttcagcctcctgagtagctgggattaccggtgcccaccaccacgcctggctaatttttgtatttttagtagagacggggtttcaccatcttggccaggctggtcttgaactcctaacctcaagtgatccgcccaccttggcctcccaaagtgctggaattacaggcgtgagccaccactcccgaccacagttgctcttctgaaggagtcatatgagaatgaagtgaaggcatctgaggaaagtgggtgacgcagggcctgactcaggaaaggcag

SEQ ID NO: 33154 - DNA, 2148 bp, Homo sapiens
catttctcagccaggccctgaggcttagcagcctcttccagcagcacagcctccaggagcgagagtctggtgttacataaagggtgccatctgcttggagcaactcgagagcagagtgaggaagtgtggcgttggcgttgcttttcaaaatatttgccatcttcagaaaccctgtcattcttcccatcagccacaaaagccagtgtttcttaaaatctggctctgagttcagcatggaggccctgggcctggcatggagtaccttggtttgttgcagagagagagagacggcaagggcagagagcacacaccacacatggctctgcatggctttccagaaaccaccctggctggatcaccctcagccactctgaattcgcaggcaagagaacctgtacttacccatgctttctgtaaaagtcatcttggctttaaggcagttgcaacatgaaaacattctaacacttcatgaatatcaagcagctggtttggtttttgacttgacgcttccattttgggtaatttggctatcagtgcactcaagcatgtgtgaaagactcacgcagagggttcagggttggggacagccccgctgctcctcaggaggctggccacatgacagtggtctgtctctgcactgggatgccatgtagctgtaaaaagagtccatgtggacccatctctagggctttttgttaggtgatcaaagcaaagtgcaggacaatataagtaatgtgctggctacatttttgtctaaagagggcaaaggaatttctctttttgttagcttataaatgcataaaaggagtctgaatggatgaaatttacagaggttactgtgggggtggggaggacaggagagagaattgccacctaggtcttaactctttcttaatatgtttgaactatatgaatgtgctatctattgaaaaataaaatttttaaatcaacttgagaaaaggatctgagtaatccctgtaatcctggctactagggaggctgaagtgggaggattacttgagcctaggagttcaagattatagtgagccacgattgcgccactgcactccagcctaggcaacagagcgagacctcgtctcttaaaaaaaaaaaaaacaataaaaattaaaaatttttaaaaattgaaaaaagggaggaaatgtaaatcttccagcacttcctcagtgtcagaccctgagctggacacttatgttgtacatgctcccaggggagacagcagcatcctccctcttacagaggaagcacagtgggaagtccagggtctcagctagtcagagactaagctgggatctgaaagcctcgcctctgtcattctcctacatcgcttctaamatgctacctgccttccttttaagtaaattgtgcaacattttattctccagaaatgttaataaggaagatctgcctttaaaattagcttaaaaatacaaaaattagctgggcgtggtggcgcatgcctggatcccagctactcaggaggctgaggcaggagaagcgcttgaacccgggaggcggaggttgcagtgagctgagattgtgccattgcactccaggctgggcaacagagtgaaattctgtctcaataaacaaataaagaaaaacaaaattagcttaaaagaggtttgtatcagtgtggaccatgttgacccagatctggccccaccattcaccagtgaccttgtgacagtgaggacagtgacagtgacctcgtcagcccagtgaggacacagttcttctttttttttttttttttcctgagacaaggtctcactctgtcacccagactggagtgcagtggcgcaatcttggttcactgtaatcttgaactcctgggctcaagtgatcctcccacttcagcctcctgagtagctgggattaccggtgcccaccaccacgcctggctaatttttgtatttttagtagagacggggtttcaccatcttggccaggctggtcttgaactcctaacctcaagtgatccgcccaccttggcctcccaaagtgctggaattacaggcgtgagccaccactcccgaccacagttgctcttctgaaggagtcatatgagaatgaagtgaaggcatctgaggaaagtgggtgacgcagggcctgactcaggaaaggcag

SEQ ID NO: 33155 - DNA, 1083 bp, Homo sapiens
ccataagagggcaacagaagatcagacagacaaagatgccctaaggttggaagtagatctgaggatgaaggaaggaaccaaggaatgccaggaatgcagctccagaatctgaaaaaggtatagacatagattctttcctcaaccctctagagggagttcagacaccttggttttggctcagtgaaacccattttggatttctgacctyctaactgtgtaagaataaatgtgtgttgttgtcagccactaagactgttgtaatttgttgcagctacaatgggaaactaaaatgttcagcattgctccacctgcctatctctatacaagacagtttaggctcagccccccttgctaatgggttccttgtcttggtattccctggcttaaattgaaaagagagtgtcttagaactaatttattgtgtgtgtgtgtttgtgcatgtgtgtctgtcacgtagcatcagaggtggctcatcaccctaagagttggctcagcttgggtggaatgacagcacattttccatcagctgtggctgagaggatgaagccatgtgatcggaaacatgactgttgaaataattctctttcagcaggagctggaagtgaagtgcccttatgcagaaggaattgaggcaggcagagccttccatgataactcaattcttgttttaaaaaggaacctgttagccttgagtctccagtataaatgtctaactgattagtcttcatttaatttgaaaagaatgatgttcactgagaagtgatcccaagaagagacagattctgaagttcctgctccatctttaccctatagctccttccccttgtacaaagtctgaaaactgagagctcctatcagcctacaggttcagaatacgagttcacaattgtagttgtgagacagcctcagctctgagaggaagctggaagccatagagcccaagtgaattatcagctgtttctcaaataaaactgccataggagctgctcttctaggctaaatgccctcacgcagcagagaacactaggggcacctaacacgcagccccaccaggggagatacgaactatcgtttcatttattt

SEQ ID NO: 33156 - DNA, 541 bp, Homo sapiens
ggaatactctggccaaggtcttacaacatttacctgacagtgattttgataaacggattcatcactgggttggaaaagggccagaatgagatggctcttggaccaatttactgtggccatgtgtattggcagaagagtgtgggtctggtgtgaccttgtttacacagggtatttccacagctgtgctagctgaaagtctcaacttcaattgcttatctccattgaccaaactggctggtctaatcacctgttgatgktgttccacatcaaatagtcattttccaatttcaagagaggatacttaggaatttaaactggttatattgatgtgtaggtaaaataacaaagtggggatttagctctgataatcacattgcaatttaagtcaaagagcagatgattaaaactgctatttcaaggtggcctttatatgacctgtggatcaggtactatgcgtgataagggcaatttcaggagaggacgtaaattgtgattatttctgagtaaaatatgatgttttctttaccttttatactctcca

SEQ ID NO: 33157 - DNA, 976 bp, Homo sapiens
tgcatttataaatattggtttataggcatgtcattggggaaatggaaagatggtacaaatgagttaggttgtcatagctattctgtgactatgggaacaattaattctcaatatgcagatttttggtttctcttgactgacatcatcttcctgggtcatttcaaaccggctactgtgtattcagagaatatacatctgggttactaagaagaacacagtgtaagataaatctttatgaagtctgagaaaaatcagttgatcactcaaaagtaaaagaggagacattgtttaaatgtatgttctcagatcacttttccaaaatattagggagaagaatctgcaatcaaattttactggctctctctttaatccaagaatgaactgttaatattacagtgcactgcaacttttttccatgagtcctcattttggatttttctacatcttagtcaacactgatcagggatcacagagaggggtgatgagagttgaaaattaaatggctattagtaagaagctatattaaaaaaaagaaaaatatatttttatgacaaaatttgaatggatttaaaaagttacaatttgtgaattatctttgatatttgcttaccaccctacatattactgtaaaacatgtcagaaattcaccattgagtttcctaagaagaaaaagcatgttcttttcactgaatagtttaagatagaatctcagacaaaccatcatatttattatagttactatttctgaatatataatcagccctccatactcaaagagttgtgcatccatgaataaaatcaatcttagaccaaaagtattcaaaaagaaaaaaatattgcatctgtactgaacatgtacagatttttatttcttgccatgattccccaaacactacagtataataactatttacaaaacatttacattgtactaggtrttataagtaattagaaatatttaaagtatacaggggga

SEQ ID NO: 33158 - DNA, 526 bp, Homo sapiens
ctgacagacagcgcgtctgcggggctgccctgtgccccccggccttcctggggccctcgtcccgctcctggctctgctctctgtgttctctagacgcatatatgtagagagaggcgcggtctctgtcttctcgtcttccatatgtgtggtctgagaccgcccacggggtgcatatctctgtcgtgtccactatggccgcgcagaacgcaggggaccgcctgtctccaagggctcaggcacgacccctccccttctagtgcacgtgacaaggttgtggtgactggtgccrtgatgtttgacagtagagctgtgtgagagggagagcagctcccctcgccccgcccctgcagtgtgaatgtgtgaaacatcccctcaggctgaagccccccacccccaccagagacacactgggaaccgtcagagtcagctccttccccctcgcaatgcactgaaaggcccggccgactgctgctcgccgatccgtggggccccctgtgcccgccacacgcacgcacacactcttaca

SEQ ID NO: 33159 - DNA, 470 bp, Homo sapiens
acaaaacatgccaaaattataaaaaaatcaaaacaggtttggctggagagcgatgtgtggaaccacccaggcactgacactgcagtatccacagcartgacagtagacactgggcaagcacagcacacctgcctgcgtctgagtgctcagaaaaatatgggggcaggagaaaaagaataaaatatataagccggggggaaaaggtgaaatatttctattttcagggaatttaatcatatatgtcaaaagctgatgcctttgtagcagagagaagcagcattgaaaaactggtagtcctgagttccatcttgataaatgggtatatttagcatacacatagagatgcaatgaaaaggtctccatgttctaatagtcacattcaacaacattatgccatagaaataaaaatggagacagctgcttcacaagaattttaattaaacaattccaataaagaagtgatcaacagg

SEQ ID NO: 33160 - DNA, 1064 bp, Homo sapiens
aagagaacagaccacacagcgcttatgtctccccattccggtaagttcttgggagaagaactgtcttggaaccatttatccaccaaatggcaactgtctgaaccgacagtgagtctgtctctctctcaaccaacagaaggctggagtatttggattaatgaataatttagtgccaagcacaaataccatagacatttagcaataagaacagataaccaagttgttcatcaaattcaaaactgtttagaatggctaagcaaagctgaaatagagacaatccccagctgatgggaggtggggaaaagtgccaatccagaaagaagaacaaatgtgtcaccttatgtgacattcacttccaccattgtttttctttcttaaatttgtcaaggctaagggaatttcttcacttttatattacagaggcaatatagcatgctgggctaagaasatgcagtccgaacacagactctctagagctcagttatttcatccgtaagatagggatatatttgcagatctatcaaaagattgttgtgaggattaaatgagtcaatacaatcataaccacttagaacagatgcctggcatagagtaagtcttgataagtagttgccaatattcattttatatcatggacaggaactattgtttggactacaatagtgcctactatgtgccagattcagctacagcctttgtatgtacaggatcttgggagagctctgcagagttctgcaaggactcacggataaccttgacttctaggtgggttttaagttcattttcagttatacttgaggcctgatgggcacctactagaaaaaactcccccatgtaaccagcgtcgtcatcttaactatgccacgggcacagccatttccatttcacaaacgagacagactcatttctaagtcttgtctaaggaccataaatacaagcagccgtgcagaggctcaaacccaggtcttgagatgccaagtgcagtgtttttcccaccaaactacagctgcttctcatcttcacccatggtttatttatttctgtcagtccaataatatgcccca

SEQ ID NO: 33161 - DNA, 662 bp, Homo sapiens
agtggttcaaaccaacagaaatgttttataattgtggaggccggaagttgggaatatgtctcgtggggataaaatcaaggtatcagcagggctggtcctggagactccaggggagaatccattcattgccatttccagcttttggtggttgccagcatcccttggtttgtggccacatcattcgaatctctgccttgttgagcacatcaccttctcctctgtcctagttagtcaaatctccctctgcctccttcttataaagatacttgtgattccatctagggcccacccaggtaatccagrataatctcttcatctcagtgttcttaacctaatcatatctgcagggtcccttttgccatctaagggaacattcccaagttacagggattagggcatgttcttcttgggagccattattcagcctaccacactgggcttttgaccttttatttttaattatctatgcttttatttttctggttcacttccctatatagtaaaagagctagttttctacttagggtagtggtctaacatttttctaagtcactttttaaagtaaaaagggcaagttgttttcattgaaagaatgtgaagtgcacagctgcgcaggtggaactgatctgtccaacctggagaagggagtgtctggggcatcc

SEQ ID NO: 33162 - DNA, 662 bp, Homo sapiens
agtggttcaaaccaacagaaatgttttataattgtggaggccggaagttgggaatatgtctcgtggggataaaatcaaggtatcagcagggctggtcctggagactccaggggagaatccattcattgccatttccagcttttggtggttgccagcatcccttggtttgtggccacatcattcgaatctctgccttgttgagcacatcaccttctcctctgtcctagttagtcaaatctccctctgcctccttcttataaagatacttgtgattccatctagggcccacccaggtaatccagaataatctcttcatctcagtgttcttaacctaatcatatctgcagggtcccttttgccatctaagggaacattcccaagttacagggattagggcatgttcttcttgggagccattattcagcctaccacactgggcttttgaccttttatttttaattatctatgcttttatttttctggttcacttccctatatagtaaaagagctagttttctacttagggkagtggtctaacatttttctaagtcactttttaaagtaaaaagggcaagttgttttcattgaaagaatgtgaagtgcacagctgcgcaggtggaactgatctgtccaacctggagaagggagtgtctggggcatcc

SEQ ID NO: 33163 - DNA, 732 bp, Homo sapiens
tgcatgctctgtcctttcccttcctagacagacagaaagaaagaaggatatgaagccctctgctttgttgttcaccattgtactsaatgacatataatgcagtctagagtttatttcttttttgtttattgtctatgtattcccactagaatagaagctacctgagagtagagatttttgtatttttgttctctatgttcccatatacctagaatagtgcatacgttatggtagaaactctgtaaatatttgttgaatgaatgaatggataagcaattgttgctggagattcaatcttcataaaaatctatattagtttgatcgatgttcaactatcatcacccctctgctggttatacccctgccaatttctgctgcctcttcctgcagcaaatgtcctaccccactccactgtgtgctccagatctactctcagtcccccaagcttactgtgttcctttctgagtcctgctctagagtttttgttcattttcatccctctctgtcaggaagtatccctactaggctgcagtgccctgaggacataaactctgattttgctctctatagcattaccatcatacctgacacatggtaggttataggggaataatgctgccctctccaaagatgtccacattttatcctcgaaacctgtgaatatgttactttacatggcaaagaagctttgcagatgtgactaagtgaagcatgttgagttgaagagattat

SEQ ID NO: 33164 - DNA, 518 bp, Homo sapiens
aattgatatctagttagtcaataaataattattgaayacctaccatattccaggcacaatatatagtcaaatgtatttcacctttttagtcacttactagatcaataaatcaaatgaatgaatgaatgcctaaatatcattttttggttttttttgttgttgtttgtttttttaccatctttggactgaatctggaatttctggcttgcttaaatcttgcctactataatcggtatacttgaaagacactactatttctccacccacccccaccccatagtttctttcattctatgtgatacaaagaaaatctcatttaaatgcaaatggattaaattcatcaaaggattggaaaaagtgaaagaagatactaaaaataaaattaaatataacccagttgcaaacataacgttcaggcattgtgtatgttttaaatgatatatatgtacaagttagccatttaaaaatttggcaaattattttatgactaataaattatccaacatctccatgatttc

SEQ ID NO: 33165 - DNA, 1285 bp, Homo sapiens
ccaatgctttagattctcaataatgaagggacctccttttcccaagccctttatcaatgaactctattaagaagagaagtgtctgattcaccagaggagacagaaaagaacattggtacccagtgagtgttcctttatttagaaggcaagatcccttgggacatgattaaaatccaaacctgaggacacacattctaaaacaagtgagatgggaagaatattggatcctaagtacggtaattattctaaaaagaagaaagttgccagtgccagcctgggcagcatagagagaccccatctctacaaaaaattagctgggtatagtggcacactatgctactcgggagactgatgcaggagaattgcttgagcctgggacttcgagactgtattgagctatgatcacaccactgcactccagcctgggggacagagtaagaccctacctcgaaagcaaaacagaaagaaagctgcagctggtggagaatgctaactccaccctcatacaattagaatatatgagaagtcttttgctactaatagatggtgcattccaggagtgatttagagctatgaagtcatatcaagatttacttttttttttaagatgactaaaattttcagagcaagcttgtgatccaatgcatttatttccacaagatggtgctatagcttctgctaagtacaaaactcacatttcctttaggaactagaaatacaaaatatgtttctaatggagaaccaaatgtgcatacgctctggtgagtctgtcaaagaaacacattgtgcaaaaacgtcccggtggaggtggaggttgatttaggcctaaagggtgaagattgttccaggtaataatactttccgccacctccacacatacctgagttgatgtctcaaggcgtcatgcagccttcagcctcctctttgtccaaaatactgctcttcctactatcaggagtgggtgtgtgtgtgtttgkttgtgtgtgtgtgtgtgtgtgtgtgtgtgtcagacatgggattgaggagtggcccagagctcccaccaccatggaaatgcagctcccatggccacccacacttccacccaggggcagctcaaggctcgccccttcaatagagcctttccttgccactctgtcccacatgaatcacacctgcctaggggtacaaataataatgcaacagaatgttttagaataccatttttccatttccatctaagtgtgccaagtgttggcggggggggtgtggtgggcagagtccattttatagcccacagcaatga

SEQ ID NO: 33166 - DNA, 1285 bp, Homo sapiens
ccaatgctttagattctcaataatgaagggacctccttttcccaagccctttatcaatgaactctattaagaagagaagtgtctgattcaccagaggagacagaaaagaacattggtacccagtgagtgttcctttatttagaaggcaagatcccttgggacatgattaaaatccaaacctgaggacacacattctaaaacaagtgagatgggaagaatattggatcctaagtacggtaattattctaaaaagaagaaagttgccagtgccagcctgggcagcatagagagaccccatctctacaaaaaattagctgggtatagtggcacactatgctactcgggagactgatgcaggagaattgcttgagcctgggacttcgagactgtattgagctatgatcacaccactgcactccagcctgggggacagagtaagaccctacctcgaaagcaaaacagaaagaaagctgcagctggtggagaatgctaactccaccctcatacaattagaatatatgagaagtcttttgctactaatagatggtgcattccaggagtgatttagagctatgaagtcatatcaagatttacttttttttttaagatgactaaaattttcagagcaagcttgtgatccaatgcatttatttccacaagatggtgctatagcttctgctaagtacaaaactcacatttcctttaggaactagaaatacaaaatatgtttctaatggagaaccaaatgtgcatacgctctggtgagtctgtcaaagaaacacattgtgcaaaaacgtcccggtggaggtggaggttgatttaggcctaaagggtgaagattgttccaggtaataatactttccgccacctccacacatacctgagttgatgtctcaaggcgtcatgcagccttcagcctcctctttgtccaaaatactgctcttcctactatcaggagtgggtgtgtgtgtgtttgtktgtgtgtgtgtgtgtgtgtgtgtgtgtgtcagacatgggattgaggagtggcccagagctcccaccaccatggaaatgcagctcccatggccacccacacttccacccaggggcagctcaaggctcgccccttcaatagagcctttccttgccactctgtcccacatgaatcacacctgcctaggggtacaaataataatgcaacagaatgttttagaataccatttttccatttccatctaagtgtgccaagtgttggcggggggggtgtggtgggcagagtccattttatagcccacagcaatga

SEQ ID NO: 33167 - DNA, 1285 bp, Homo sapiens
ccaatgctttagattctcaataatgaagggacctccttttcccaagccctttatcaatgaactctattaagaagagaagtgtctgattcaccagaggagacagaaaagaacattggtacccagtgagtgttcctttatttagaaggcaagatcccttgggacatgattaaaatccaaacctgaggacacacattctaaaacaagtgagatgggaagaatattggatcctaagtacggtaattattctaaaaagaagaaagttgccagtgccagcctgggcagcatagagagaccccatctctacaaaaaattagctgggtatagtggcacactatgctactcgggagactgatgcaggagaattgcttgagcctgggacttcgagactgtattgagctatgatcacaccactgcactccagcctgggggacagagtaagaccctacctcgaaagcaaaacagaaagaaagctgcagctggtggagaatgctaactccaccctcatacaattagaatatatgagaagtcttttgctactaatagatggtgcattccaggagtgatttagagctatgaagtcatatcaagatttacttttttttttaagatgactaaaattttcagagcaagcttgtgatccaatgcatttatttccacaagatggtgctatagcttctgctaagtacaaaactcacatttcctttaggaactagaaatacaaaatatgtttctaatggagaaccaaatgtgcatacgctctggtgagtctgtcaaagaaacacattgtgcaaaaacgtcccggtggaggtggaggttgatttaggcctaaagggtgaagattgttccaggtaataatactttccgccacctccacacatacctgagttgatgtctcaaggcgtcatgcagccttcagcctcctctttgtccaaaatactgctcttcctactatcaggagtgggtgtgtgtgtgtttgtttgtgtgtgtgtgtgtgtgtgtgtgtgtgtcagacatgggattgaggagtggcccagagctcccaccaccatggaaatgcagctcccatggccacccacacttccacccaggggcagctcaaggctcrccccttcaatagagcctttccttgccactctgtcccacatgaatcacacctgcctaggggtacaaataataatgcaacagaatgttttagaataccatttttccatttccatctaagtgtgccaagtgttggcggggggggtgtggtgggcagagtccattttatagcccacagcaatga

SEQ ID NO: 33168 - DNA, 1285 bp, Homo sapiens
ccaatgctttagattctcaataatgaagggacctccttttcccaagccctttatcaatgaactctattaagaagagaagtgtctgattcaccagaggagacagaaaagaacattggtacccagtgagtgttcctttatttagaaggcaagatcccttgggacatgattaaaatccaaacctgaggacacacattctaaaacaagtgagatgggaagaatattggatcctaagtacggtaattattctaaaaagaagaaagttgccagtgccagcctgggcagcatagagagaccccatctctacaaaaaattagctgggtatagtggcacactatgctactcgggagactgatgcaggagaattgcttgagcctgggacttcgagactgtattgagctatgatcacaccactgcactccagcctgggggacagagtaagaccctacctcgaaagcaaaacagaaagaaagctgcagctggtggagaatgctaactccaccctcatacaattagaatatatgagaagtcttttgctactaatagatggtgcattccaggagtgatttagagctatgaagtcatatcaagatttacttttttttttaagatgactaaaattttcagagcaagcttgtgatccaatgcatttatttccacaagatggtgctatagcttctgctaagtacaaaactcacatttcctttaggaactagaaatacaaaatatgtttctaatggagaaccaaatgtgcatacgctctggtgagtctgtcaaagaaacacattgtgcaaaaacgtcccggtggaggtggaggttgatttaggcctaaagggtgaagattgttccaggtaataatactttccgccacctccacacatacctgagttgatgtctcaaggcgtcatgcagccttcagcctcctctttgtccaaaatactgctcttcctactatcaggagtgggtgtgtgtgtgtttgtttgtgtgtgtgtgtgtgtgtgtgtgtgtgtcagacatgggattgaggagtggcccagagctcccaccaccatggaaatgcagctcccatggccacccacacttccacccaggggcagctcaaggctcgccccttcaatagagcctttccttgccactctgtccyacatgaatcacacctgcctaggggtacaaataataatgcaacagaatgttttagaataccatttttccatttccatctaagtgtgccaagtgttggcggggggggtgtggtgggcagagtccattttatagcccacagcaatga

SEQ ID NO: 33169 - DNA, 517 bp, Homo sapiens
cagaaaacactaattacagtttcaatctcaatggaatctaggctggtccttagcatcagtctgagtgataaatcccttattccagaatacacttaggaagaactactaaggacatatttttacctatttcaaagaagaaaatgagaaaaggcattgattttaaaaaaaagaatacatgttacggtttgtacttactttttagcaagatcatattctttagcttcataatacagctttgcaaaatagaatcctttcattgacttctaaaaaaaaattaaaagttgttttaygtttcatacagaaatattttccaacattttttcaaaagtagttaaagcctgacaaatgcataattccatgttttataatttcctaccacaaaacaaaaaatagagctgggtgcagcagctcatgcctgtaatcccagcactttgggaggccgaagtgggcggatcacctgaggtcaggagtttgagaccagcctggctaacatggtgaaaccccgtctctacaaaaa

SEQ ID NO: 33170 - DNA, 1194 bp, Homo sapiens
gtgggatactaatgttgggatataaacgatgctttgtgaacacccccaaaatatttgagcaattttttttctcccttaataagttcayggtgaggtttcaaagagcaagagaacttagttaaagacatttcagtaactggaagatacttctatcatgctagggcagagcaaaagaacttggtacagtgtacggactcatgcttgaatcatgcgcattaacgtgagtctttttttaaagtgttcattttcatttgttctgtttcttttgtcactcagaaaacatgatattgaggctgggcacggtggctcactcctagaatgccagcactttgggaggttgaggtgggcagatcacttgagctcaggagttcgagaccagcctggccaacatggtgaaaccctgtttctactgaaaatacaaaaatgagccgggcatggtggtgcgtgcctataattagcagctactcaggaggttgaggcaggaggatcgcttgagcacaggagatggaggtagcagtgagctgaaatcatgccactgcactccagcctgactgagtgactgagtgagactttgtctccaaaaaaaacaaaaaacaaaaaaaaacatgatattgagatgttctcattttatgtgttgtatgtcagtcttgctcatgtattaaatgagcaaagaatgaaactacagggataaatgaatatgtaagacagtcagattggtggtataaattgagggattctggctttttatgttttaaaagcatattcattttgtttcctaaaatgttaaaaaatgaaatattctttattttctaggatttaattttagcctttttaaatctaatcccatggccttttggactagcaccccttcctcacagcctgagagcaaaggtatagaactagcattctcagtatgagataacagcagtttttagcagctgggtagcccttagcaaagtattaattactgtggctgtatgaaatgaagtacttaccactacaacatgcatgttaaagaatgccagtttaagcaaagtaccttttgactggtggcatgacacccttgttggtttgttttttaaaatgtagtgggatgctgatttgtaatgtacttcattgctctgctatttcaggtctgctcaatgaagacctatgttttatctaatgtttatctttagccactaacgtctgcca

SEQ ID NO: 33171 - DNA, 1194 bp, Homo sapiens
gtgggatactaatgttgggatataaacgatgctttgtgaacacccccaaaatatttgagcaattttttttctcccttaataagttcacggtgaggtttcaaagagcaagagaacttagttaaagacatttcagtaactggaagatacttctatcatgctagggcagagcaaaagaacttggtacagtgtacggactcatgcttgaatcatgcgcattaacgtgagtctttttttaaagtgttcattttcatttgttctgtttcttttgtcactcagaaaacatgatattgaggctgggcacggtggctcactcctagaatgccagcactttgggaggttgaggtgggcagatcacttgagctcaggagttcgagaccagcctggccaacatggtgaaaccctgtttctactgaaaatacaaaaatgagccgggcrtggtggtgcgtgcctataattagcagctactcaggaggttgaggcaggaggatcgcttgagcacaggagatggaggtagcagtgagctgaaatcatgccactgcactccagcctgactgagtgactgagtgagactttgtctccaaaaaaaacaaaaaacaaaaaaaaacatgatattgagatgttctcattttatgtgttgtatgtcagtcttgctcatgtattaaatgagcaaagaatgaaactacagggataaatgaatatgtaagacagtcagattggtggtataaattgagggattctggctttttatgttttaaaagcatattcattttgtttcctaaaatgttaaaaaatgaaatattctttattttctaggatttaattttagcctttttaaatctaatcccatggccttttggactagcaccccttcctcacagcctgagagcaaaggtatagaactagcattctcagtatgagataacagcagtttttagcagctgggtagcccttagcaaagtattaattactgtggctgtatgaaatgaagtacttaccactacaacatgcatgttaaagaatgccagtttaagcaaagtaccttttgactggtggcatgacacccttgttggtttgttttttaaaatgtagtgggatgctgatttgtaatgtacttcattgctctgctatttcaggtctgctcaatgaagacctatgttttatctaatgtttatctttagccactaacgtctgcca

SEQ ID NO: 33172 - DNA, 572 bp, Homo sapiens
ttattttatttttttttgagatggagtctcactctgtcgcccaggctggagcacagtggcacgacctcggctcactgcaagctccgcctcctgggttcacgccattctcctgcctcagcctcccgagtagctgggactacaggcacccaccaccacgcctggctaatttttttgtattttcagtagagatggggtttcaccgtgttagccaggatggtctcgatctcctgacctcatgatccgcccaccttggcctcccaaagtgctggcattacaggtgtgagccaccgcaccctgccaatagttcttatttttaatggaaactttaaaatttatctgtctgtgtgtctattagagtcttgctgtgtcacccaggctggagtgcagttgcgtaatcgtagctcaccgtaacattgaactgggctcgagcttcccagagtgctgggattataggtgtgagctrctgcgcacagcctaaaattttttgatatgtagttttgggaggcagagtctcactcttgctctggctggagtgcagtggcatgatcataactcactgcatcctcgaactc

SEQ ID NO: 33173 - DNA, 986 bp, Homo sapiens
gctgaggcgggcggatcgcttaaggtcaggagtttgagaccatcctgaccaacatggtcaaaccccatctctactaaaaatacaaaaattagccacgcatggtggcgggtgcctgtagtcccagctacttgagaggccgagacaggagaattgcttgaaaccaggaggcggaggttgcagtgagccgagatcgtgccactgcagcactccagcctggcgacagarcgagactccatctcaaaaaaaaaaaaaaggaaatagtgaattgagatgatttgattgagtggattcacaactaattaactggtcacagattcaactgttgaataattttgtaaaagaggccgggtttatgaattgaggtcagtttgaaaacaaaaagaatgatgtcaacattttgtttcttactttgtgtgctcttttcaacatatagatgacaaactttgacatgatgtttagaaaacttgtgagtaaaaggataggcgatacgaatatttctaaaattcaaaatcagaagcttttaggttcataaatcatatattttgaaaaatgagcatgtttggaaagaattatatatacatggtttaaaattctggcggctcttaagaatatgctatgaagactcctttctgttccctagttatttactttctccacccccaaagaaactaatgttattgctttcttgtgtgttcttcaggaaatgttttatgcatctccaagtaaacacacatatatcccctgtctttaaaagaaggaggaaaacatttgaacattgcatttactttatttccattaactgtatcttggagatgtttccatgtcagtatatataaagggcattctcattagtttggatgcttgcatattattccattgtatggatgtactgtagttttggagtttttaaaaccagggtcctaaaaccaggacattagcttgcttttacttttgttttaaatgctacttcaagtaatttagcaatg

SEQ ID NO: 33174 - DNA, 519 bp, Homo sapiens
acctcaagtgatcagcccaccttggcctcccagagtgttgggattacaggtgtgagccaccacgcctgtacctggcctatctttcataggttatataaattccttggttcccagtttttgcagtcttttccaattcagtttaattaatggttaactgtttattcattatcaaaaaaagtacagtgtaatagataagaccatgttactattagaagtatgggtatcatcaaattaagatttttgattctaaaattattaggttccaagaccaaagattaaattaagagaaggtaaagctggacaaaatctgctggaaatgatggcctgtgaccgactgagccaatcaggtaatagtaatattaaactaatttaatttaaaaagaaaaaggaatttctgttaaggcatatcttatgataaaatcttcatctgtycaggagataatttgtcaaaattatttctttttgccgtatcagttaagagcaataggtatggaagagatgcgaagaaatagcacattc

SEQ ID NO: 33175 - DNA, 659 bp, Homo sapiens
ctttcagactccaaagaattttgctcaggtgttccgttcatattcaaagattaaactctacttattgaaaaaaattaaaggaagtcacttacaaggattggttctcaaaagcagctatgccatgttctggggaaggaactaccttcaatgaaaggaacacaaataagagagtcctggtgttacccgctgagctgtcctctcctgcacgtagacatgcttctgcgaaaaayttagcaggctccaagtcaaactctgtcctgggctctacagtatgccgccgcacgtgatgatcactggtgctcaggcagaacggactttatccacatcactgtaacctgagtccagacttcatcctagacagtcacacagctagggccacaggtggcacaccatggtaaaaacgtgagaccatctgattatccatcaaaacagagggcctactgcacatagacatagatgtgagttggagtagtgtggtcttcccatttctgatgttgccatctatttcctcgagatgacagacagctcatatattttgctcaaagggttgctagagctgtatcctcctttaaggtgaatcttcatttctactcccacaacagaagtggtcctcaacctctttggcaccagggaccagttttgtagacgactttttttcc

SEQ ID NO: 33176 - DNA, 659 bp, Homo sapiens
ctttcagactccaaagaattttgctcaggtgttccgttcatattcaaagattaaactctacttattgaaaaaaattaaaggaagtcacttacaaggattggttctcaaaagcagctatgccatgttctggggaaggaactaccttcaatgaaaggaacacaaataagagagtcctggtgttacccgctgagctgtcctctcctgcacgtagacatgcttctgcgaaaaattyagcaggctccaagtcaaactctgtcctgggctctacagtatgccgccgcacgtgatgatcactggtgctcaggcagaacggactttatccacatcactgtaacctgagtccagacttcatcctagacagtcacacagctagggccacaggtggcacaccatggtaaaaacgtgagaccatctgattatccatcaaaacagagggcctactgcacatagacatagatgtgagttggagtagtgtggtcttcccatttctgatgttgccatctatttcctcgagatgacagacagctcatatattttgctcaaagggttgctagagctgtatcctcctttaaggtgaatcttcatttctactcccacaacagaagtggtcctcaacctctttggcaccagggaccagttttgtagacgactttttttcc

SEQ ID NO: 33177 - DNA, 811 bp, Homo sapiens
ttgatttgttttcctttgcagatttttttttaagtagacatagtctttttttttttttttttagtagacatagtctttttttctttctcattttacagcaaacattgcaaatatagaaatatttttttctgtacaatagaacgactacagtgtacatggtgggctgggctgggggacgtgcctcccagccttgtgccgtcctggcacgcccggccgtccacaggcacagcctccacccaccctgagtccagcagggctccaggacctgtcccggaggccacttggcgccagtgtcactctgcccctctgcagtggactccggaggcggcaatgaagagacggactggacagagaatccacagaaaaccacggaccgaggagatcacgtgaggggccccgaggtggcacgcggccaaccccccacggatggcattttatgtctttttaaaataacttgtcttttattatatttttttaaaaaaggaagaaagtaaagagatagagaggaaaagaaaaggcagagaagactcaaaagaggaaagataatgaaaaaaaaatccccacccccacccccsatccctaagacacagttttccgaagtccctcgtgtgtgtgtgtgtgtgtgtgtgtgtgtgtgtggacacgtgccacccggggcgacaagcgcatcccaggaccggccacaggagctcgggacgtgtccccttgtctgtccccactcgctcccccctcgcctctgcagggccccccgctgtcacagttgctgtggtggcgtgcgtgtgttgggtttggtgctgagtctctgggtgga

SEQ ID NO: 33178 - DNA, 811 bp, Homo sapiens
ttgatttgttttcctttgcagatttttttttaagtagacatagtctttttttttttttttttagtagacatagtctttttttctttctcattttacagcaaacattgcaaatatagaaatatttttttctgtacaatagaacgactacagtgtacatggtgggctgggctgggggacgtgcctcccagccttgtgccgtcctggcacgcccggccgtccacaggcacagcctccacccaccctgagtccagcagggctccaggacctgtcccggaggccacttggcgccagtgtcactctgcccctctgcagtggactccggaggcggcaatgaagagacggactggacagagaatccacagaaaaccacggaccgaggagatcacgtgaggggccccgaggtggcacgcggccaaccccccacggatggcattttatgtctttttaaaataacttgtcttttattatatttttttaaaaaaggaagaaagtaaagagatagagaggaaaagaaaaggcagagaagactcaaaagaggaaagataatgaaaaaaaaatccccacccccaccccccatccctaagacacagttttccgaagtccctcgtgtgtgtgtgtgtgtgtgtgtgtgtgtgtgtggacacgtgccacccggggcgacaagcgcatcccaggaccggccacaggagctcgggacgtgtccccttgtctgtccccactcgctcccccctygcctctgcagggccccccgctgtcacagttgctgtggtggcgtgcgtgtgttgggtttggtgctgagtctctgggtgga

SEQ ID NO: 33179 - DNA, 587 bp, Homo sapiens
cggggcacaggcagacagacagaccggggggcccctcctggccccactagggcctcctgaggctccctcagcctccaggggcgcggatgcgcagagcccagcaccaaccccccgcctctgcascaacctcgcgaacccctttgcacctagaacccccctttgtcttgcagacactacctcctctggtccctgcaccccaccagcaccccacagcacttcccctcctgccctccagatgcaaaagcatcattcatggggctgggctctgcaccacaccccagctgtgcgaccctggcaggacgacttcccttctcagcctcagtttccctatctgcaaaatggggatcaggtgccacctcgtggtgaaggaagcaagtacgctggtgaaatgagatgaggcctggagaatcctcagcaccagggctgggtgcgtaaagcttcctgggattgatccagtgggtggacgaatgacctgacctgtgggcggcatagttcactgaccagcccaaggtctgtcactcagcagaccagcacagagctgcgcttgggcctgaggcttctgcctcctgacttagtttccttctcag

SEQ ID NO: 33180 - DNA, 1233 bp, Homo sapiens
tgcatcaacactattcctggttgttactaaaattgcagacttctaggccctaccccagacttgctcagtcaaaacctattctgaatctcctttataaagtgcaacccaggcaattgtgatgcacttttaggttgagaactacttgacaaattggtgtcaaaatagcaggtgatggcatttgagcatttgtggwggtcaggtcagaattcctgtttccttttctttgtgaccctggagagatagcaggggggatagctgcataagccatggcagttggctctagaggagtggcctttaatggctttgtggttgccctctaaccttgggagaagcatgtttgttggtgatcagcgggaacaagccacaccacccaatctgctctctcaacccaacatggctcagaccgtcatttcctaatggcaaaacccaccttggtctgatagattagtgatgttttgttttgttttgttttgttttgtttaaatacacaaacacgaagtcaaaacagtcctaaaaaacatttctcttgcttatcgaatcctcatcttatctggtgagagatggttaaaggacgtcatgaaatatgtctccagtgttaattcagcagagctgatttctttcatggaaacttgaatgttgggtgacaaaaaactgggcaaaatttttttatcagattctctctactttgggacctaattgtctttttacccttcacttaaaaaattatttttattgttttatttcaataggtttttggggaacaggtggtgtttggttacataaacaagttatttagtggtgctttctgagattttgaaacacccatcaccggagaagtgtacactgtatccagtgtatactcttttatccctcaccctcctcccacccttttccccaaggccccaaagtccactgtatcattcttaggcctttgtgccctcctagcttagcccccacttatgagtgaggacacaacgatgtttgattttccattcctgagtcacttcacttagaataatggtcttcaactctatccaggttgctgcaaatgccattattttgttcctttttatgactgagtagtattccatggtgtgtgtgtgtgtgtgtgtgtgtgtgtgtgtgtgtgtatatatcacaatttctttatccactctttgattgatgggcagatgggcatttgggctggttccacatttttgcaattgcgaattgtgctgctataaacatgca

SEQ ID NO: 33181 - DNA, 1233 bp, Homo sapiens
tgcatcaacactattcctggttgttactaaaattgcagacttctaggccctaccccagacttgctcagtcaaaacctattctgaatctcctttataaagtgcaacccaggcaattgtgatgcacttttaggttgagaactacttgacaaattggtgtcaaaatagcaggtgatggcatttgagcatttgtggaggtcaggtcagaattcctgtttccttttctttgtgaccctggagagatagcaggggggatagctgcataagccatggcagttggctctagaggagtggcctttaatggctttgtggttgccctctaaccttgggagaagcatgtttgttggtgatcagcgggaacaagccacaccacccaatctgctctctcaacccaacatggctcagaccgtcatttcctaatggcaaaacccaccttggtctgatagattagtgatgttttgttttgttttgttttgttttgtttaaatacacaaacacgaagtcaaaacagtcctaaaaaacatttctcttgcttatcgaatcctcatcttatctggtgagagatggttaaaggacgtcatgaaatatgtctccagtgttaattcagcagagctgatttctttcatggaaacttgaatgttgggtgacaaaaaactgggcaaaatttttttatcagattctctctactttgggacctaattgtctttttacccttcacttaaaaaattatttttattgttttatttcaataggtttttggggaacaggtggtgtttggttacataaacaagttatttagtggtgctttctgagattttgaaacacccatcaccggagaagtgtacacygtatccagtgtatactcttttatccctcaccctcctcccacccttttccccaaggccccaaagtccactgtatcattcttaggcctttgtgccctcctagcttagcccccacttatgagtgaggacacaacgatgtttgattttccattcctgagtcacttcacttagaataatggtcttcaactctatccaggttgctgcaaatgccattattttgttcctttttatgactgagtagtattccatggtgtgtgtgtgtgtgtgtgtgtgtgtgtgtgtgtgtgtatatatcacaatttctttatccactctttgattgatgggcagatgggcatttgggctggttccacatttttgcaattgcgaattgtgctgctataaacatgca

SEQ ID NO: 33182 - DNA, 1233 bp, Homo sapiens
tgcatcaacactattcctggttgttactaaaattgcagacttctaggccctaccccagacttgctcagtcaaaacctattctgaatctcctttataaagtgcaacccaggcaattgtgatgcacttttaggttgagaactacttgacaaattggtgtcaaaatagcaggtgatggcatttgagcatttgtggaggtcaggtcagaattcctgtttccttttctttgtgaccctggagagatagcaggggggatagctgcataagccatggcagttggctctagaggagtggcctttaatggctttgtggttgccctctaaccttgggagaagcatgtttgttggtgatcagcgggaacaagccacaccacccaatctgctctctcaacccaacatggctcagaccgtcatttcctaatggcaaaacccaccttggtctgatagattagtgatgttttgttttgttttgttttgttttgtttaaatacacaaacacgaagtcaaaacagtcctaaaaaacatttctcttgcttatcgaatcctcatcttatctggtgagagatggttaaaggacgtcatgaaatatgtctccagtgttaattcagcagagctgatttctttcatggaaacttgaatgttgggtgacaaaaaactgggcaaaatttttttatcagattctctctactttgggacctaattgtctttttacccttcacttaaaaaattatttttattgttttatttcaataggtttttggggaacaggtggtgtttggttacataaacaagttatttagtggtgctttctgagattttgaaacacccatcaccggagaagtgtacactgtatccagtgtatactcttttatccctcaccctcctcccacccttttccccaaggccccaaagtccactgtatcattcttaggcctttgtgccctcctagcttagcccccacttatgagtgaggacacaacgatgtttgattttccattcctgagtcacttcacttagaataatggtcttcaactctatccaggttgctgcaaatgccattattttgttcctttttatgactgagtagtattccatggtgtgtgtgtgtgtgtgtgtgtgtgtgtgtgtgtgtgtrtatatcacaatttctttatccactctttgattgatgggcagatgggcatttgggctggttccacatttttgcaattgcgaattgtgctgctataaacatgca

SEQ ID NO: 33183 - DNA, 1169 bp, Homo sapiens
cctcaattcatctatgttaaaattgggataatagcaatacaaacattattggtctgtatgaagattaaacaatataaaatatgtaaaacagcataatgcctggtatgtggtaagctttcaataagtgttaccttcatttgttatatatatcatgacagttaatacaatgctgagcgaatatttgatgattgtctgaaataacttgaaaaagtttagtgaaaaaattgggggatggaggggttgggaactgggcacagacaattcagccatctaaggaagcagtggcactttcttcactgagccctattaaattgaaagattgtgttctagcaccagggaagagtagctatatgaatcatttcttatgatctaaagtccattagctactccatttagctgttaatgttgcgaggccattggcggaaataaatatgttatttggtaatggacttgttttcttaacaattataatatattctttccaaatgctgtaatttaattctgccattgtgctaattagtcagcygatcagccttcagcattgtttcaatatcccacccaccacatttttatattaaagctcatttaattggtgttgtgggttgaattctgttcctccccaaattcacacataccctaacccctagtacctcagaaggtgatcgtatttagagatatttcatcttgaaaagattaaaattaggccattaagctattagggtggggtctgcttcaatgtgacttatcagaagaagaaatttggacacacaaagggacactaggggcatgcagagggggaccaccttgtgaagagacagagaacaggcggccatctgcaagccacagaaagagacctcagaagaaatcagccctgccaacagtttgatcttcaacttgaagcctccaaactgtgagaaatacatttctgttgtttaagccaccctgtctgtgggattttgttacagcagctaagcaaactaatgtggttggcattgaggagcaaaatttagactggaatttctgatttattttattctgtatagcttataaagcacttatcacacacgccatttgaacttcacccaatcctataaagtaagtgttattattaactcccgttttacagatgaagccattgaggctctgagagtctacacaaacacatagct

SEQ ID NO: 33184 - DNA, 1767 bp, Homo sapiens
cactcgagatacattatatttggtcattgtgtttccttgggctcctcttggctatgacagcttctcaggcattccttgtttttcatgaccttgacaatttgaggagccctcgcaggtattctgcagatttgtctgatgtttgtctcatgattagattggtgttataggtttttggaaggaaggctacctatttcagagggtaaagtgccatttttatcacttccaggtgatatcacttccacatgctagcaacataacatcactgtgggtgttaacagtgatcacctggctgaggaagtgtttgtcagatttctccactgtaaagttattctttgttcatttcttaacaattcaaagatgaatttatgtttactaattctttcttttcctaagccacttctaatttaatcagagctggtgaagtatttcttgaaatgtgttagaacactgagctggaagagtgagatattaaactataaattctgtatgatctcaattttctaaaaatgacatatacatatatatagaaaaagactagaaagaaatagctcaaagttttattttttcctgtatacttttccaaaaatgttctgcagtgaacaattattttaaaatctggaagaagagttaagaaaaaaaaaaggaatgaagatctttctctgggacaagctcagaaaaaaatatcagagtcctcacagtacctgtaacactaatgtagcgctcagaatggtaacagccttctctgaaacctggtgtgtatgtgtgaagacaatattcccagctgcctttctttgcttacagaagactgtaaattgcctcttatggaaacttaactattttttcaaacaggaacacttaataactgagtataacagagactgagaaaaatggagggagggagggtgggaggggaaaaagggaggaagaaaggagggagagaggaacaacaaatttaggttttggggagtgagaaaatgttctgtcttgttgcttcccatcaaagtacccagcatcacaggatcctagctaatattatttatttgttaaaggtattcatcagttccagaccagtcagtttccagtcagtttccgaatatcaaaagcatgctttcctagaggaagtccaaaatattaccatgggtcagcataagcatatcttagacatattaatattaaccttaggggctgctcatccaaaatggcaacacatccctccctgccggctctccccatagtrccccatctcctccctcagtggtggggtcctcatggtttgtgcaactctctggggcccacttcggcctgtcctactcaggatattccctgccaaagaagtgatggatatatcatcgctaaggtgtcaataactggagttgcctagaagctgctgttatacctagtatgaagcatgtgcatttgggaaggggaaaatcagttatcctaaagggatgaatctctaaaagtagaatgcagccatcatgatccaggagagcaggggagatatgcacgcatgcacacatacattcaaaaggggttcagcccacacttcaggtcacatcacacagggaggaacagtctagttacaccaagtgagccctgtgccaaggaaagagcccagtgcccttatggaggagggagcaggcgcttgggcaagaatgtccgactccatgaaagggactgtgtgcagctggagcaaatgctcactcatacaccccacaagatgagttcagcaaggctgaggcaagcatcctgagtagtgtagaaaaa

SEQ ID NO: 33185 - DNA, 1104 bp, Homo sapiens
accctctttgcttacttttcccatgagctttggtrtcctttctttttcttcttttgatacagggtctcgctcttttgcccaggctggagtgcagtggcacaatcaaggctcactgtagccttgacctcctgggctcaagtgatccaccctcctcagcctcctgagtagctgggactacaggcatgcaccacactgcgcctggctaattttgtattttttgtagagatggggtttcaccatgttgcctaggctggtctcaaactcctgggctcaagagatccttccaaagtgctgggattacaggtgtgagccaccctgcttggcctggtgcctttcttatttgtgtcctaggaagcaccttacccagaagggcccattgtttcagtttagagagatgaagaaagtaagaaatgatcactttttaaatttgaaaaaaacctgaaccaattatttaagattaaaaattaaaaatcagttttacagtatactttgtcttcagataaccagtaaaactatccagaagtgctcccacctcagtgttgcattattttaaaaattccattatgtggcaaaagtgtgttctagatttgctcgtggtgcctgattcattaactttacttcttgttttttaaaggattacaagtaccacattggttaaagctcatttcagttttgttttagtgcagtcgttttgttcagttctttccagtcctacttgcagttctgaagaatatttctttgtttatgatgccattacaggaatttgtaagtgtctgggttcgagatcctaggattcagaaggaggacttctggcattcttacattgactatgagatatgtattcatgtaagtatgtagtcagtagaaatagtaattttgagggacttttatgggatacattttatgggataaagttgacacttgtaaaagtttttctcattcaaataactgaatttgaatgattacaactaatgcttttatcttacatgaactagtaagatggttcctaaagttgaaaaattacttatttgaatcccttattgttcctttgttaatattaacattttaatgtttattgccttcacatgtgaagatgtgcacgca

SEQ ID NO: 33186 - DNA, 1104 bp, Homo sapiens
accctctttgcttacttttcccatgagctttggtgtcctttctttttcttcttttgatacagggtctcgctcttttgcccaggctggagtgcagtggcacaatcaaggctcactgtagccttgacctcctgggctcaagtgatccaccctcctcagcctcctgagtagctgggactacaggcatgcaccacactgcgcctggctaattttgtattttttgtagagatggggtttcaccatgttgcctaggctggtctcaaactcctgggctcaagagatccttccaaagtgctgggattacaggtgtgagccaccctgcttggcctggtgcctttcttatttgtgtcctaggaagcaccttacccagaagggcccattgtttcagtttagagagatgaagaaagtaagaaatkatcactttttaaatttgaaaaaaacctgaaccaattatttaagattaaaaattaaaaatcagttttacagtatactttgtcttcagataaccagtaaaactatccagaagtgctcccacctcagtgttgcattattttaaaaattccattatgtggcaaaagtgtgttctagatttgctcgtggtgcctgattcattaactttacttcttgttttttaaaggattacaagtaccacattggttaaagctcatttcagttttgttttagtgcagtcgttttgttcagttctttccagtcctacttgcagttctgaagaatatttctttgtttatgatgccattacaggaatttgtaagtgtctgggttcgagatcctaggattcagaaggaggacttctggcattcttacattgactatgagatatgtattcatgtaagtatgtagtcagtagaaatagtaattttgagggacttttatgggatacattttatgggataaagttgacacttgtaaaagtttttctcattcaaataactgaatttgaatgattacaactaatgcttttatcttacatgaactagtaagatggttcctaaagttgaaaaattacttatttgaatcccttattgttcctttgttaatattaacattttaatgtttattgccttcacatgtgaagatgtgcacgca

SEQ ID NO: 33187 - DNA, 580 bp, Homo sapiens
cacatagaatatgctctgttcttcttgctccattattccttgcactctaatgacaaatccaaatgtctatacaggttttacttatgtacmtggctttgttgaactacccatccttatatccctgcattcttcagataattgaaacattgactttgaaactgattttgggggcggtggagtaaggagcatttttttaaatgtaaaagtatatcctgtttttaaaaaaaaaaaatggtagtttgaatattatttgaatctttcttcgtgaatcaggccatttttatgaatatcatatcctgaactgtgcagtacctttggggatcatcaattttcttatctgtgctctacccaagaattctggaaatctattatgcaaaatgctatttccttatgaaccactgcatttttaaacataaacataccagttaggttttttttttttattcataaggctataggtaatgcctattcatatgcagactatgactagataaaataatttgagccaatgatgaagtacctgggtgagatgaagtaccaaccaaatcaccaaatgttctctataatattaagggaaaaa

SEQ ID NO: 33188 - DNA, 580 bp, Homo sapiens
cacatagaatatgctctgttcttcttgctccattattccttgcactctaatgacaaatccaaatgtctatacaggttttacttatgtacctggctttgttgaactacccatccttatatccctgcattcttcagataattgaaacattgactttgaaaytgattttgggggcggtggagtaaggagcatttttttaaatgtaaaagtatatcctgtttttaaaaaaaaaaaatggtagtttgaatattatttgaatctttcttcgtgaatcaggccatttttatgaatatcatatcctgaactgtgcagtacctttggggatcatcaattttcttatctgtgctctacccaagaattctggaaatctattatgcaaaatgctatttccttatgaaccactgcatttttaaacataaacataccagttaggttttttttttttattcataaggctataggtaatgcctattcatatgcagactatgactagataaaataatttgagccaatgatgaagtacctgggtgagatgaagtaccaaccaaatcaccaaatgttctctataatattaagggaaaaa

SEQ ID NO: 33189 - DNA, 580 bp, Homo sapiens
cacatagaatatgctctgttcttcttgctccattattccttgcactctaatgacaaatccaaatgtctatacaggttttacttatgtacctggctttgttgaactacccatccttatatccctgcattcttcagataattgaaacattgactttgaaactgattttgggggcggtggagtaaggagcatttttttaaatgtaaaagtatatcctgtttttaaaaaaaaaaawtggtagtttgaatattatttgaatctttcttcgtgaatcaggccatttttatgaatatcatatcctgaactgtgcagtacctttggggatcatcaattttcttatctgtgctctacccaagaattctggaaatctattatgcaaaatgctatttccttatgaaccactgcatttttaaacataaacataccagttaggttttttttttttattcataaggctataggtaatgcctattcatatgcagactatgactagataaaataatttgagccaatgatgaagtacctgggtgagatgaagtaccaaccaaatcaccaaatgttctctataatattaagggaaaaa

SEQ ID NO: 33190 - DNA, 999 bp, Homo sapiens
tattctcactctgaatgatgaaccctgttggtttcacagattgctagggctgcttttaagaactccttttctctaaagcaggcacaaacagggaagataggtgggtctccttgttccttacttacctacccctgcccagggaatgggctcagggaagaccagayctgccttctgatcctacatgtccatgtctgccctgtatttgacttgccagtcaagctaagcagcctggaaatagacttgctgtcttcagcagaaatggttgacagttattttctatggggtggaataatagggacctgcctaatcctatgggaatatcatcttccctatgctgggggagaagaggtaatatccaatttgggaggcctggttcttggttacttagatcgaaacttctattccactttgcttggatggagagaaacagttctatttgtgaatccgattcccttcctgtgttttgtgaatacttccaataggtggttacaaagtttacttcctaagctccttgttctgtgatttctttcctttatacatacatttttaacttctatgaatggggaggtttgaggtaaattaagatctgattaaggcaaacttgaagtctgcagcccaaaaaaggtcattgtcaaatgagatccagtagaacagggatcagcaatctgtagcacatgtgtcaatttcagtatgcacacttttttcataaataaagttttgtagaaatactgtcatacctgtcgttgtccatagcttctttcaccatataatgtcagagctgaatagttgaaacagcgaccacatgatgtgcaccgcctactatctgattcctgatagaaaaagttagacaacccctgcatttggagcatatttttatttggccatctccaggaacctacataggaaacatatatagggttcaaaaaatccaaaggactattattctgaaatatgaactatgggccaaatagctaagtagtagaactttgttgctatgca

SEQ ID NO: 33191 - DNA, 792 bp, Homo sapiens
cagatttgcactcaggcatcccagccctagagcctgtggtcctaacttctgtataatgctgcttacgataatgcaaccaatataggtgatcaataagtatttggggttgtcagtagtgactctgaaaggagggaaaaaaacaaacaaagtctgagttgaagctcagccaaattgtgcataattatcagtaaactcctcctgctccactctcccatgatgtagagaatgttaccctttcttgagggctcctaaacacagctaagctctaagagtggcagctgccagtgaagagtcttggaagacatgtctgcagctctgtaaagaaagcccctccttcaatagctgcaggctggaaggccctgggaatatacctacagccaggaatggagcaccctctcagagccttccctaaggggacatgggtagaacaaatgacccctgggccagcctactcctccccccgaatgctcctcccacccccactcctcatctctctctctccaagatcctgtttctgagaagggcagggaacaagcaccctgactttcctagtgaccgaggtragggctagggtcgcctgaggaggaggagggaaagaaagaggcaccatcaagcttgggctagaaattatgactttgttcattagaccacttgattttttcctcctcagtatccagattatttccattttactttttctttctttttccgttaaaaggttttaaattctatacactattttaatctctctctttgttctttttaaccattgacatttgggaagtagaaaaa

SEQ ID NO: 33192 - DNA, 975 bp, Homo sapiens
ttatgcaatactgtacctattaatttgaatcaaattgatttaaactttaaaacaatagctgtatgactgtttctcttactcaccaaggtgggcttagatttcatgtgcaatcaaggtaaagtcttagtgtagaagttttttttttaataagaaatgagactgtttctgtagcttggaagtgaagatgctaatatttggtctcacaaaattggacataatttaaaacttcaacwtgctttcttgcttgttttatttgtaaatattgttcctggctttgagaacttcagagcttttcctattttttttttgtttgcttcacaactccttaggaatgtgaaaatggaaaggtaataaaggaaatcttttcaagttaaaacatgattcataaaggtgacagccatgccatatgtgaagagtgattaacagctgcagagtctgcaaacagctttttaaaaagttcttgataaagcagagtttcccattatttcacgttttggtggttgctcaagtgcatcgccctaattttcctaagcttcattttattctgtagcaatcgaatcactcttcaggtcccagcagtgctatattagggcatgcttaaatatttcatgtatatccctggttattctttcagtgatattttcaatttcatgacaatgatgtggtatattaaagccataatctcctctaaagctgcccattttatttctgcagcatgagtttggataggcagatatgagagcatttccaaggcttgcccatttggaactggtttgctttaatgtagagagttgtgatggtggtggaaatgtgcttaatgaagtgttacaagtttaaatggtctttcctagcagacacaggctgtagagctggtggacacagacagatagacataaagatgaggggtgctaggggaagaaagtccctacttcaaaattcagttgtcattttagcaaaataggttaattctagaaa

SEQ ID NO: 33193 - DNA, 975 bp, Homo sapiens
ttatgcaatactgtacctattaatttgaatcaaattgatttaaactttaaaacaatagctgtatgactgtttctcttactcaccaaggtgggcttagatttcatgtgcaatcaaggtaaagtcttagtgtagaagttttttttttaataagaaatgagactgtttctgtagcttggaagtgaagatgctaatatttggtctcacaaaattggacataatttaaaacttcaacttgctttcttgcttgttttatttgtaaatattgttcctggctttgagaacttcagagcttttcctattttttttttgtttgcttcacaactccttaggaatgtgaaaatggaaaggtaataaaggaaatcttttcaagttaaaacatgattcataaaggtgacagccatgccatatgtgaagagtgattaacagctgcagagtctgcaaacagctttttaaaaagttcttgataaagcagagtttcccattatttcacgttttggtggttgctcaagtgcatcgccctaattttyctaagcttcattttattctgtagcaatcgaatcactcttcaggtcccagcagtgctatattagggcatgcttaaatatttcatgtatatccctggttattctttcagtgatattttcaatttcatgacaatgatgtggtatattaaagccataatctcctctaaagctgcccattttatttctgcagcatgagtttggataggcagatatgagagcatttccaaggcttgcccatttggaactggtttgctttaatgtagagagttgtgatggtggtggaaatgtgcttaatgaagtgttacaagtttaaatggtctttcctagcagacacaggctgtagagctggtggacacagacagatagacataaagatgaggggtgctaggggaagaaagtccctacttcaaaattcagttgtcattttagcaaaataggttaattctagaaa

SEQ ID NO: 33194 - DNA, 967 bp, Homo sapiens
tatgttatttgaaatagtctatagtaaggcctcaattagtgttaaactcagtgaatatctcctaaacttgtgactgcataataaaaacatattatttgcctacatatactttcaggttttctttgtctgtactagaaactgcagttatgtgggagctttctgtttgctgtatgaactactaaatatatgtgatattttggatatattttctcctaaatcagcacatcctgggaagtcctttatttgtctgctgtattctttggaaaccctcttgggaaccatcagcttttagctcagtaaatattgagggttggaaggcaagtctcaaaaataagaaagtgataaggatgccttctttgggaaagtttattccagtcctattattttagtcatagggctggaaggggagcccatttaagctgatctgtgatggactcatctctaaactgtgatcagcaactttcaacagtgcaatatttacccaataaatgtgattgaatttgtacaaagtcattgtctgcagccatctcygttaatgtgcatgttctatgactctcagaactggaagagagcttggggatcatctgctgactctagcaatttaatttgacaaatgtggaaactaaagctcaaataagtgacttctcaaaatcaggagactcattcaacaacccttctgattactcccctcataaagaaactcaagttccctggagataattacagcagtggagccaatctctggcaccatgtgcactgctgatctttattaagtatgagttagggatgattgcggggggtgtctcccacctccattagagtgttaggaggagtaggcttgggacttattacattgctgtctcttggagccagtgcaatatttacccaataaatgtgattgaatttgtacaaagtcattgtctgcagccatctctgttaatgtgcatgttctgtaaaaaattgctca

SEQ ID NO: 33195 - DNA, 967 bp, Homo sapiens
tatgttatttgaaatagtctatagtaaggcctcaattagtgttaaactcagtgaatatctcctaaacttgtgactgcataataaaaacatattatttgcctacatatactttcaggttttctttgtctgtactagaaactgcagttatgtgggagctttctgtttgctgtatgaactactaaatatatgtgatattttggatatattttctcctaaatcagcacatcctgggaagtcctttatttgtctgctgtattctttggaaaccctcttgggaaccatcagcttttagctcagtaaatattgagggttggaaggcaagtctcaaaaataagaaagtgataaggatgccttctttgggaaagtttattccagtcctattattttagtcatagggctggaaggggagcccatttaagctgatctgtgatggactcatctctaaactgtgatcagcaactttcaacagtgcaatatttacccaataaatgtgattgaatttgtacaaagtcattgtctgcagccatctccgttaatgtgcatgttctatgactctcagaactggaagagagcttggggatcatctgctgactctagcaatttaatttgacaaatgtggaaactaaagctcaaataagtgacttctcaaaatcaggagactcattcaacaacccttctgattactcccctcataaagaaactcaagttccctggagataattacagcagtggmgccaatctctggcaccatgtgcactgctgatctttattaagtatgagttagggatgattgcggggggtgtctcccacctccattagagtgttaggaggagtaggcttgggacttattacattgctgtctcttggagccagtgcaatatttacccaataaatgtgattgaatttgtacaaagtcattgtctgcagccatctctgttaatgtgcatgttctgtaaaaaattgctca

SEQ ID NO: 33196 - DNA, 609 bp, Homo sapiens
ccgctaaggaaatttattgttgaaactcacgttgggacctggggcttgaaccacagaaagcatgggtgtttggctatatagctagagagagtcaagagaatattagacaatttttttctcattctctatcggtgtgttagggagcctcattatgttctcctgaggattgaactctaggctcctcacttggcctttgcttaagtggatagagtggggccacaggattttcttgtgacatttggctaaaatagaatgaatattacctaaatcttttctatcttgctaggctgtcattttcctggtccttttgctagagaggacagacttctgttaagactttttgtttgttgtttgctcctgttgatgtttccaggtatcacctcttcacatcccgaagttcctaatagctctgtcttcttttctctaccttttagagccttcctaatctgtgtgtatatatatatatatatatatatatatatatatatatatatatatatatatatatatawaacgacaagggttttcagctgcgcttagtgtaatgaataatgaaaattatgggtagtccatattgctggaagtggaaaaacacattccttttgagat

SEQ ID NO: 33197 - DNA, 633 bp, Homo sapiens
  misc_feature (1)...(633): n = A,T,C or G
acgaagagaaaatttcaggaatgtttattttctacaatatatgcaagtaatgtatgcttaacagaattgttttctacccactggtgacagaaacttgtgggcaaatgggaatatgcctttaaatgtgtactctgatggcaggagcaatcagtcagtggcttactctcattntctcyctgtactgtgtatgccgaatagaaaacaattgttaaaacctggaatatgaggctaaactgtaatgctttctttttcctgttcttgctgcatgattttctgcctttcaggctcatgctatttccttggatctctacattttttttaaaatttgttatttccaactttttattttgagttcaggtgtacatctgcaggatgtgcaggttgttacattggtaaatgtgtgccatggtggtttgttacacagattatcccatcacccaggtattaagcccagcatccattaacttttattcctgatcctctctcttctcccaccaccccccatactctcctacaggccccagtgtgtgttgttcccctccatgtgtccatgtgttttcatcatttagctcccagttataagtgagaacatgtggtatttggttttctgttcctgcattagtttgctgagga

SEQ ID NO: 33198 - DNA, 868 bp, Homo sapiens
aaattagtctaatttatagttatattcattttatccaaaaataaactacacagtttaggcatcttcctgttgtatctgtctgccatgtttttgcatgactttaaaaattggagtcctccaagaaaggcttgtcattattgagattattcataaaagctatcctaggctttgaaacattccaaaggaaaagttcaaaaaaatattttgagcatctggaactgttttgagaagtggaatactttataagcctcaaggcagtcattcttaacttcattagggctaccaatccttttgagaatttgatatctgttgaacatatggccctgycaaatgcacataccaacatttaaacacgctacatttatttaagggatttgtaggcttctggaagctcattcatgaactgtctatgggtccttggactccaggtaggaagcctggctttaaaggcatacctatcaagctctaaatccttgaatatagctgctgcatctgcttcattcttcaccacaggaaagtgcctcatatttaataaacattgcttgaaacaatgtctagtaacaaaaaagtcatattgttttataatcatattttgaacttcttactgtatatatattcatatagattaataaagtttgtattaagtatctgtcccatcatgttatgggataaaagatcccatttaccctgaggaaaggggactaacagaggaggactatttttgcctgatagagggctggggctatctggaggacttcccagagaaactgggggccgagagaggaaagccgaccatgcccacctgcattttatttaaatttacctccagggggtctttggatttattaaccgttcctggttttgcccc

SEQ ID NO: 33199 - DNA, 868 bp, Homo sapiens
aaattagtctaatttatagttatattcattttatccaaaaataaactacacagtttaggcatcttcctgttgtatctgtctgccatgtttttgcatgactttaaaaattggagtcctccaagaaaggcttgtcattattgagattattcataaaagctatcctaggctttgaaacattccaaaggaaaagttcaaaaaaatattttgagcatctggaactgttttgagaagtggaatactttataagcctcaaggcagtcattcttaacttcattagggctaccaatccttttgagaatttgatatctgttgaacatatggccctgtcaaatgcacataccaacatktaaacacgctacatttatttaagggatttgtaggcttctggaagctcattcatgaactgtctatgggtccttggactccaggtaggaagcctggctttaaaggcatacctatcaagctctaaatccttgaatatagctgctgcatctgcttcattcttcaccacaggaaagtgcctcatatttaataaacattgcttgaaacaatgtctagtaacaaaaaagtcatattgttttataatcatattttgaacttcttactgtatatatattcatatagattaataaagtttgtattaagtatctgtcccatcatgttatgggataaaagatcccatttaccctgaggaaaggggactaacagaggaggactatttttgcctgatagagggctggggctatctggaggacttcccagagaaactgggggccgagagaggaaagccgaccatgcccacctgcattttatttaaatttacctccagggggtctttggatttattaaccgttcctggttttgcccc

SEQ ID NO: 33200 - DNA, 868 bp, Homo sapiens
aaattagtctaatttatagttatattcattttatccaaaaataaactacacagtttaggcatcttcctgttgtatctgtctgccatgtttttgcatgactttaaaaattggagtcctccaagaaaggcttgtcattattgagattattcataaaagctatcctaggctttgaaacattccaaaggaaaagttcaaaaaaatattttgagcatctggaactgttttgagaagtggaatactttataagcctcaaggcagtcattcttaacttcattagggctaccaatccttttgagaatttgatatctgttgaacatatggccctgtcaaatgcacataccaacatttaaacacrctacatttatttaagggatttgtaggcttctggaagctcattcatgaactgtctatgggtccttggactccaggtaggaagcctggctttaaaggcatacctatcaagctctaaatccttgaatatagctgctgcatctgcttcattcttcaccacaggaaagtgcctcatatttaataaacattgcttgaaacaatgtctagtaacaaaaaagtcatattgttttataatcatattttgaacttcttactgtatatatattcatatagattaataaagtttgtattaagtatctgtcccatcatgttatgggataaaagatcccatttaccctgaggaaaggggactaacagaggaggactatttttgcctgatagagggctggggctatctggaggacttcccagagaaactgggggccgagagaggaaagccgaccatgcccacctgcattttatttaaatttacctccagggggtctttggatttattaaccgttcctggttttgcccc

SEQ ID NO: 33201 - DNA, 868 bp, Homo sapiens
aaattagtctaatttatagttatattcattttatccaaaaataaactacacagtttaggcatcttcctgttgtatctgtctgccatgtttttgcatgactttaaaaattggagtcctccaagaaaggcttgtcattattgagattattcataaaagctatcctaggctttgaaacattccaaaggaaaagttcaaaaaaatattttgagcatctggaactgttttgagaagtggaatactttataagcctcaaggcagtcattcttaacttcattagggctaccaatccttttgagaatttgatatctgttgaacatatggccctgtcaaatgcacataccaacatttaaacacgctacatttatttaagggatttgtaggcttctggaagctcattcatgractgtctatgggtccttggactccaggtaggaagcctggctttaaaggcatacctatcaagctctaaatccttgaatatagctgctgcatctgcttcattcttcaccacaggaaagtgcctcatatttaataaacattgcttgaaacaatgtctagtaacaaaaaagtcatattgttttataatcatattttgaacttcttactgtatatatattcatatagattaataaagtttgtattaagtatctgtcccatcatgttatgggataaaagatcccatttaccctgaggaaaggggactaacagaggaggactatttttgcctgatagagggctggggctatctggaggacttcccagagaaactgggggccgagagaggaaagccgaccatgcccacctgcattttatttaaatttacctccagggggtctttggatttattaaccgttcctggttttgcccc

SEQ ID NO: 33202 - DNA, 622 bp, Homo sapiens
accaatacttggaccaacacttacagaaaatggagttgctgatccatgtcatgttttcctaagtgttgggtcagctcaagaagaacaagctttggaaatgttatctcaatcctctttgtgcaagctgaggtcctcagaggttactatgaaaaagggcagagatataaagggaattgaaaactaatcttcaacttgaaaaaaaacatgagaatagtcatttagatcatagagagaaataatgattacctttgattcctagagaaagttaatttaaagtgtaatccaagttccactgtacagccaaaaaaaaaaatctgcaaagttgagatacatctttagtagatggaaacgagtcacaagggtcacctctcttgaatattgggaagatgctcattcacaatgattgggggaaagaaagattttggagattaactgaccttggtttaggatacacagtgttttttaaatacaaatgatatttggtatcatgataaagacaaaatctgtcctgaatgacagtctctaaggaaatgcactcaayagtcagaaaaccaccaatttgattgcttatgtttttgtgtttaccaaattagaatctataactatttaaagcaagtcctta

SEQ ID NO: 33203 - DNA, 629 bp, Homo sapiens
  misc_feature (1)...(629): n = A,T,C or G
ggataaagaaacggctcaggagaaaaaatgtanaactcccanaacaatttagcagagtcaagaagaaagaggtgactataaatgtcctaagtatgtcatggattgtccaatgtcttctgccattttaaaccaccaaaagcttgtaagcaaagaaaacaagcatacaactaagaatgttgtacacctgtaatcccaacacttcggaaggccaaggtggcaggattgcttgaggccaggagttcaagaacagcctgagcaacatggtaagaccctgtctctacaaaaaacaaaaacagaaattagctaggtatgctggtacatgcctatagtctcaactacttgagaggctggggtggggaggattgcttaagcctgagaggtaggggctacagtgygctgtgattgtgccactgcactaccagcctgggtgacagagtgagacctggccccactccaccctgccttccaaaaaaagagcgactttgacaaggtaactatttcaacccataaaaggtatctcaaacttcatgatatgtatttttatattaatctcatttctggccctgttttatatcctaacacacagacactatttttttgtccccatggaattcttattgactcttaca

SEQ ID NO: 33204 - DNA, 629 bp, Homo sapiens
  misc_feature (1)...(629): n = A,T,C or G
ggataaagaaacggctcaggagaaaaaatgtanaactcccanaacaatttagcagagtcaagaagaaagaggtgactataaatgtcctaagtatgtcatggattgtccaatgtcttctgccattttaaaccaccaaaagcttgtaagcaaagaaaacaagcatacaactaagaatgttgtacacctgtaatcccaacacttcggaaggccaaggtggcaggattgcttgaggccaggagttcaagaacagcctgagcaacatggtaagaccctgtctctacaaaaaacaaaaacagaaattagctaggtatgctggtacatgcctatagtctcaactacttgagaggctggggtggggaggattgcttaagcctgagaggtaggggctacagtgcgctgtgaytgtgccactgcactaccagcctgggtgacagagtgagacctggccccactccaccctgccttccaaaaaaagagcgactttgacaaggtaactatttcaacccataaaaggtatctcaaacttcatgatatgtatttttatattaatctcatttctggccctgttttatatcctaacacacagacactatttttttgtccccatggaattcttattgactcttaca

SEQ ID NO: 33205 - DNA, 629 bp, Homo sapiens
  misc_feature (1)...(629): n = A,T,C or G
ggataaagaaacggctcaggagaaaaaatgtanaactcccanaacaatttagcagagtcaagaagaaagaggtgactataaatgtcctaagtatgtcatggattgtccaatgtcttctgccattttaaaccaccaaaagcttgtaagcaaagaaaacaagcatacaactaagaatgttgtacacctgtaatcccaacacttcggaaggccaaggtggcaggattgcttgaggccaggagttcaagaacagcctgagcaacatggtaagaccctgtctctacaaaaaacaaaaacagaaattagctaggtatgctggtacatgcctatagtctcaactacttgagaggctggggtggggaggattgcttaagcctgagaggtaggggctacagtgcgctgtgattgtgccactgcactaccagcctgggtgacagagtgagacctggccccactccaccctgccttccaaaaaaagagcgactttgacaaggtaactatttcaacccataaaaggtatctcaaacttcatgatatgtatttttatattaatctcatttctggccctgttttatatcctaacacacagayactatttttttgtccccatggaattcttattgactcttaca

SEQ ID NO: 33206 - DNA, 734 bp, Homo sapiens
  misc_feature (1)...(734): n = A,T,C or G
aataatgtttctctttctatttagagtgggtgaaacaaacgtgtttcagacatctagacaattgagctgtagccacaatggaaattgtcatcagttgatagaatctcagaaatgaaaaaaaagtacaaaggaatggggtaaagaaaaagtgctgtaatcactggaagaagaaaatgagccctaacaaggattggcaagagcanaaattgtaatgggagaaagtcaagtagtcattctttttctcttttaacaaatatgtattaagcacatcctatattccagacactgtacatacattaaggtatggccaaacacygtggctcatgcctgtaattccagcactttggaaggctgaagtgaacagatcacttgaggccaggagttcgagaccaacctggcaaacatgacaaaaccccatctctactaaaagtccaaaaattagccaggcatggtgctgtacacctgtagtcccagctattcaggaggctagggcacgagaattgcttgaacccagtaggcagaggttgcagtgagcctggatcaccactgcactccagcctgggtgacagcaccagactctgtctcagaaaaaaaaggataataataatacagaagtgaactatacattcatttcgttgtcctcaaaatgagaaaaatttgtccactctcatcacttctattaaatatagtagtggccctagtcagagaaattaaggaagaaaaagagatanaag

SEQ ID NO: 33207 - DNA, 734 bp, Homo sapiens
  misc_feature (1)...(734): n = A,T,C or G
aataatgtttctctttctatttagagtgggtgaaacaaacgtgtttcagacatctagacaattgagctgtagccacaatggaaattgtcatcagttgatagaatctcagaaatgaaaaaaaagtacaaaggaatggggtaaagaaaaagtgctgtaatcactggaagaagaaaatgagccctaacaaggattggcaagagcanaaattgtaatgggagaaagtcaagtagtcattctttttctcttttaacaaatatgtattaagcacatcctatattccagacactgtacatacattaaggtatggccaaacaccgtggctcatgcctgtaattccagcactttggaaggctgaagtgaacagatcacttgaggccaggagttcgagaccaacctggcaaacatgacaaaaccccatctctactaaaagtccaaaaattagccaggcatggtgstgtacacctgtagtcccagctattcaggaggctagggcacgagaattgcttgaacccagtaggcagaggttgcagtgagcctggatcaccactgcactccagcctgggtgacagcaccagactctgtctcagaaaaaaaaggataataataatacagaagtgaactatacattcatttcgttgtcctcaaaatgagaaaaatttgtccactctcatcacttctattaaatatagtagtggccctagtcagagaaattaaggaagaaaaagagatanaag

SEQ ID NO: 33208 - DNA, 976 bp, Homo sapiens
  misc_feature (1)...(976): n = A,T,C or G
cannnnnnnnnnnnnnnnnnnnnnnnnnnnnnnnnnnnnnnnnnnnnnnnnnnnnnnnnnnnnnnnnnnnnnnnnnnnnnnnnnnnnnnnnnnnnnnnnnnnagattcctttcaacaatttcaatttcaagtgtgtctttgattttccatttagagaaaaaaccctgtctgctgaagagaggatgtctaaccaggactgcctcgccatacacctcctgaaagcccatttggtcacaatggagtgtgatgtgaatatgcagtgaacaacccaaggagccacatgtggagggctgaactttaccctactttctagaaacactcacggttgtaaggagtctgcagcattaaaaaaaaatttaaaaataggccgggcgckgtggctcacgcctgtaatcccagcactttgggaggccgaggcaggcagatcatgaggtcaggagatcgagatcatcctcactaacacagtgaaaccccgtctctactaaaactacaaaaatattagccgggcatggtggcgggcacagctaccatagtcccagctactcgggaggctgaggcaggagaatggcgtgaacctgggaggcggggcttgcagtgagccaagatcgcgccactgaactccagcctgggggacagagtgagactccatctcaaaagaacaaaaaaaaaaaagaaaaaaagaaaaaaaaaaaagaaaaaaatgtcttgtattatggcattaccagttagttttaaaagccaatagtatttctaggtttcccattaatgttggggcaaatgatatagttgaaaggacctacaaagtcctgtatgcccagacctcctttgccagccacatccccaccatgctcgctccacgcaccaggcttcgctcaggcccccgaatgtgctatgatccttcctgccataaggcatttgcatatactgtctcctcttcctggactctcttcctttccatctccttaactaaataatt

SEQ ID NO: 33209 - DNA, 1025 bp, Homo sapiens
aggtctcacctaatatcatcagaattctgtctttaactcttattctgtaaatgtgttttgtagagtgttgacttatgcttgggtgttgcagaacatgttggaccatgtaggagccatgtcaagacatgctgggtgtgctgtaccatgtcagggtgtatcattgctctatagtgttgttgcagcctagtccggtcccctttatgccccccaccctcctttcttcttctgcccatggcctccttcctgctatgctgggcttggagaaaagacgtccaaacctctggctgggagccaccctccatacccaaagtccctcctctattcctctccatggaccctgatggtcctcattcatgtcagatgccattacagacaaggacatagtcttctacaagaccctgaagccctggctgggtaagtaactgtaggtggacgggacggggaccaacttttgtggccaggggaagattctgcccttgcccacagcctttggctgccgtactaggggatgggctcttgttaagtgttggtgacaagtggagacaccaccgtcgcttgtgacgcctgccttccatttcaacatcctgaagccctatataaagattttcagcaagagtgcaaacatcatgcatgtgagtgccttgaactcagcatcccagctgcagccttggggtggagggatcacatacaattgggtctggaatgttggctctcctgggtgggtttggggccattgctcttcctctctgtgccttgatttccccatgaggctaataatcctcactaaaaggtggtaggagcatgtartggactcatgtctctgacacttagtaggtggtcagaaggagtcaatttccacatttttctcacagaagccctgtaaactcaagaaaggaatgatgacacgtgcatagtagtcattgctgagtacagatcacttcaaaactaattggtttagagcaataagggtttatatttgctaacaaatctgtgggactgttggccagcccttctgcatgtggata

SEQ ID NO: 33210 - DNA, 600 bp, Homo sapiens
taaattcatttaaacaaatagaaaaatcagcaatcctctcctgtgagcatgtgagtcamcctccactaatgtgatttcactggtttcttcagggaaccgtgtcaaaccaattaatacaggcaaacaatatgttcatctgggcaaacagatgcctaatcaggttaagagttttcttaattggaaaaatagcttgcttatgaagacaatagttttatcaataaaactcacctcaagaccttcggcacatcattgtaccaatcctaaactcgtatatcatgaactagagaaaatagctgagaactagagctagatagtgagttcttggacatgcacacaaaaagtgcagtctataaaagaaaaaaacgataaattagccttaaataaaattaaaacctttggcattgtagaaagaccttgttaatagaataaaaggcaacctatagacagagagaaaatgtttataaatcacacatcagacagaagtcttatatctacgatgaataaagagcacgcaaatctcaatgtaaaaaagaaacaaataaataatccaattagaaatagaatagatatttcaccaaagtagaaatatgggtgaaaaat

SEQ ID NO: 33211 - DNA, 600 bp, Homo sapiens
taaattcatttaaacaaatagaaaaatcagcaatcctctcctgtgagcatgtgagtcaacctccactaatgtgatttcactggtttcttcagggaaccgtgtcaaaccaattaatacaggcaaacaatatgttcatctgggcaaacagatgcctaatcaggttaagagttttcttaattggaaaaatagcttgcttatgaagacaatagttttatcaataaaactcacctcaagaccttcrgcacatcattgtaccaatcctaaactcgtatatcatgaactagagaaaatagctgagaactagagctagatagtgagttcttggacatgcacacaaaaagtgcagtctataaaagaaaaaaacgataaattagccttaaataaaattaaaacctttggcattgtagaaagaccttgttaatagaataaaaggcaacctatagacagagagaaaatgtttataaatcacacatcagacagaagtcttatatctacgatgaataaagagcacgcaaatctcaatgtaaaaaagaaacaaataaataatccaattagaaatagaatagatatttcaccaaagtagaaatatgggtgaaaaat

SEQ ID NO: 33212 - DNA, 1004 bp, Homo sapiens
cttgagcccgggagttcaagtccaacctgggcaatatagtgaaacctcttctgtcttaaaaaaaaaaaaaaaggtaattcaagtctttagtstttactataatggagaggagggatttgtcaggttttggatgttttcccttcctacaagttactaatcttgtttgattgaggctacagtaaatatatgaaactacttagagacaaaggattttgttactcatgacacagcaaacagcataaacattgttatattcacttcagtcgttctttcccttaaatctaaaaaagatgatatgtatgctgacgaatactttgtttgaagtggtactgtgtcataactgaggaactttgagctcggagaattcactgcttttatagtaaggagtaaaccaaattgctctttgtctcagagggaaacagtacctcacccctcaaggtttcttgctgcaagcataactctggaaattggtcaggtagagtggtcatggtcgtaaaccactggcatacctagcaagacatttatgagtataagagattaaggatggtctggttttcaacaatatccactccatattcttacattgtgttattttctagaaacttttctcatgagtgtgccactccagaagccgttctgatcaatttgacggacagagattccgagactaaatacattgaatttgcctcaaacaatgtttaaataaggctactatcagcagaccaatctgcaacattaacttcacccatttagtcagctgtgacaaagtcccaaagtatagataactaggatataatttcttatccattatacatggaagtttagattgatacgctaatctttgttttaattctcaaaaagagtccaaaaagtagccaccattcctaatggaaagatgttctgtcccacctattcccagacataagcataacccaacaggttaatccagtttggaatttattgttaaacttgatttggatcagcattacatcacttttgttgta

SEQ ID NO: 33213 - DNA, 1004 bp, Homo sapiens
cttgagcccgggagttcaagtccaacctgggcaatatagtgaaacctcttctgtcttaaaaaaaaaaaaaaaggtaattcaagtctttagtgtttactataatggagaggagggatttgtcaggttttggatgttttcccttcctacaagttactaatcttgtttgattgaggctacagtaaatatatgaaactacttagagacaaaggattttgttactcatgacacagcaaacagcataaacattgttatattcacttcagtcgttctttcccttaaatctaaaaaagatgatatgtatgctgacgaatactttgtttgaagtggtactgtgtcataactgaggaactttgagctyggagaattcactgcttttatagtaaggagtaaaccaaattgctctttgtctcagagggaaacagtacctcacccctcaaggtttcttgctgcaagcataactctggaaattggtcaggtagagtggtcatggtcgtaaaccactggcatacctagcaagacatttatgagtataagagattaaggatggtctggttttcaacaatatccactccatattcttacattgtgttattttctagaaacttttctcatgagtgtgccactccagaagccgttctgatcaatttgacggacagagattccgagactaaatacattgaatttgcctcaaacaatgtttaaataaggctactatcagcagaccaatctgcaacattaacttcacccatttagtcagctgtgacaaagtcccaaagtatagataactaggatataatttcttatccattatacatggaagtttagattgatacgctaatctttgttttaattctcaaaaagagtccaaaaagtagccaccattcctaatggaaagatgttctgtcccacctattcccagacataagcataacccaacaggttaatccagtttggaatttattgttaaacttgatttggatcagcattacatcacttttgttgta

SEQ ID NO: 33214 - DNA, 1190 bp, Homo sapiens
tggggaggggatgggtgtggctgtgtgaaggagtagcatgaggaaagctgtgattgtgaaaccattgtgagtcttgattgtggcaatggttacatgaatctatacatacgataaaattgcatagaaccatacacatacaaattagtgcatgtacaacttcagaaacctaaataagctctacagattataccaatgtgaatgtcttggtttagaaactgttctatagctacacaagttgttatcattggggatgctaagtgaagaatacgtgagacctctatatacattttttgaaattataatactataattatttcaaataaaaaataaaaatatttttaaaaattaaacaaaactttgcataaaactcacaattctaaatcaccttctgtggctctgttacccatctatcacacattcagcctaggttctcttagttcctgcactaataaatataaatataaattgtccctgcattataaataaccctgccccaatcttgcgtttatctttcgtctttttcgccttttttcttaggtacatatattcagaaacagagaaaaactgcctattgaaaatgatttgtaagagtcagagtttgctaatgtgggtaaaataaatcaaatcagtcaatgataaattatatgcaagctagtgtaatgatttgtagataactgagaaattatcttattctcaaaaaaagtcaatgaacaacgtgtttatactgttagtacagtatatgctcggtaacttttttttctgctgaatggaagaagggttggaggagcatcaaagttaatggggactaggagcagactsctattggcacaaatccaaagagaattcgtataagtgatagataattcaacgagatgagcacatatttaatggcaaaatttacctacaaaattattggcatatgataaacacatctcaattataaagtccagtggtgtgtcatagaatcaaactaattaggcaatactagttttgccatgatatcttagcctagtattgctaatttcaatgttcttggaaaaacagtttaggagttatgtcagaatattattgaggttaattttcattaggtacctactcttttaattcagcaactcttatttttatagtagtgggtattgtctaaattatgattaccttgaaatttttatacatttatttgaaactagaca

SEQ ID NO: 33215 - DNA, 582 bp, Homo sapiens
ctcccttcaacccttgtgcattagacccttagcttccctcccaagagacaattatggtttctagtgtatgaggttttctcctagagatatttttgcaagtataagcaaataggtatctattttcttccctaagatttccctacaaatactagcattccatatatatacagtcctatattttgccagaggatgttacatatcagtgcatgtaggaattccttgttcccttttttaaaaaattggtttttatttttgttaaaagtattcatgcagayggcttagagtcaagtaatttttgaaggcttattaagaaaaatagccatcctctgctacttctcaactcctttaattgattttttttttttttggtatttaccaccatatctctgaaaacaacacttgatcattgtgctgctatcttaattttgttttcaattttaggtatcatctattgactttcctccatgaaagatgaaatttagctcattcaccctctggatttgcccctatttcctcgttccaacacacatgcctcatatcagagtcccagtataattttatcttagttttgacaaactcagt

SEQ ID NO: 33216 - DNA, 582 bp, Homo sapiens
ctcccttcaacccttgtgcattagacccttagcttccctcccaagagacaattatggtttctagtgtatgaggttttctcctagagatatttttgcaagtataagcaaataggtatctattttcttccctaagatttccctacaaatactagcattccatatatatacagtcctatattttgccagaggatgttacatatcagtgcatgtaggaattccttgttcccttttttaaaaaattggtttttatttttgttaaaagtattcatgcagacggcttagagtcaagtaatttttgaaggcttattaagaaaaatagccatcctctgctacttctcaactcctttaattgattttttttttttttggtatttaccaccatatctctgaaaacaacacttgatcattgtgctgctatcttaattttgttttcaattttaggtatcatctattgactttcctccatgaaagatgaaatktagctcattcaccctctggatttgcccctatttcctcgttccaacacacatgcctcatatcagagtcccagtataattttatcttagttttgacaaactcagt

SEQ ID NO: 33217 - DNA, 582 bp, Homo sapiens
ctcccttcaacccttgtgcattagacccttagcttccctcccaagagacaattatggtttctagtgtatgaggttttctcctagagatatttttgcaagtataagcaaataggtatctattttcttccctaagatttccctacaaatactagcattccatatatatacagtcctatattttgccagaggatgttacatatcagtgcatgtaggaattccttgttcccttttttaaaaaattggtttttatttttgttaaaagtattcatgcagacggcttagagtcaagtaatttttgaaggcttattaagaaaaatagccatcctctgctacttctcaactcctttaattgattttttttttttttggtatttaccaccatatctctgaaaacaacacttgatcattgtgctgctatcttaattttgttttcaattttaggtatcatctattgactttcctccatgaaagatgaaatttagctcattcacccyctggatttgcccctatttcctcgttccaacacacatgcctcatatcagagtcccagtataattttatcttagttttgacaaactcagt

SEQ ID NO: 33218 - DNA, 613 bp, Homo sapiens
actccctaggcctggcacggtggctcatgcctataaccccagcactttgggaggctaaggcgggtggattacctgaggtcaggagtttgagaccagcctggccatcatggcgaaaccctgtctctaccaaaaaatacaaaaattagccaagcaaggtggcactgcctgtaatcccagatactcgggaggctgaggcactagtggtgcttgaacccaggaggcagaggttgcagtgagccgagatcactccactgcactccagcctgggtgacaaagtgagactccatctcaaaaaataacaataacttaaaaaaagagaaatagctctcaaatcccaatagatccctataacaaatatttgtttcttgcttctgagtcttcagrttggctgtgattacactgggtttggcttggctgagctcagctaggttctgctgagctcagcttggctccaaggtttgggttgagttcaggtctgctccacatgtcccttcacatgagaagcaattgccaagaggtcaagtcaaatcatgcagcacatttaaaacttctgctgggggaaaatgtgtctgctcacattccaatgaccaaagcccaaagttagaagggcaag

SEQ ID NO: 33219 - DNA, 598 bp, Homo sapiens
tgtgatgctggtgagtcagcttcagtcacatgaataaaaacaaactccaggagatgactaagcaataagacagaasgaacccaagtccctagacgagttcacagaaccaagctacctatccaaccctgggcccacctggattataacatgagaaaaacataagtcctaatcatatttttgaagcactgcattttagggcttctttgtgacagcagcctaccctctagtctaatcaatatacctcaccaagtctcctgctcctaagggagacaaagaagcaaaatgagtctcaaaacatcatccaaatggaatagatacagacctgtaatcccaacactgtgggtgcccaaggcgggtggatcacttgaggtcaggagtttgagaccaacctggccaacatggcaaaaccctgtctccactaaaaatacaaaaattagccggacgtggtgttgtgcacctgtaatcccacctacccacgaggctaagccgggagaattgcttgaacccaggagggggaggttgcagtgagccgagatcatgccactgcactccagcctgggtaacagagtgagactctgtctcaaaaaaataaataaaa

SEQ ID NO: 33220 - DNA, 598 bp, Homo sapiens
tgtgatgctggtgagtcagcttcagtcacatgaataaaaacaaactccaggagatgactaagcaataagacagaaggaacccaagtccctagacgagttcacagaaccaagctacctatccaaccctgggcccacctggattataacatgagaaaaacataagtcctaatcatatttttgaagcactgcattttagggcttctttgtgacagcagcctaccctctagtctaatcaatatacctcaccaagtctcctgctcctaagggagacaaagaagcaaaatgagtctcaaaacatcatccaaatggaatagatacagacctgtaatcccaacactgtgggtgcccaaggcrggtggatcacttgaggtcaggagtttgagaccaacctggccaacatggcaaaaccctgtctccactaaaaatacaaaaattagccggacgtggtgttgtgcacctgtaatcccacctacccacgaggctaagccgggagaattgcttgaacccaggagggggaggttgcagtgagccgagatcatgccactgcactccagcctgggtaacagagtgagactctgtctcaaaaaaataaataaaa

SEQ ID NO: 33221 - DNA, 537 bp, Homo sapiens
ccgttggggttttgtgaggattaaatgtaaagtgcttacgacgctgcctggcacgcagtaagtacccartaaatgtcagttctgttcttagtgtgccgttttcccagcaggtgtagagaataaggatgactacccagcacacttttgcccaagactattaataaagtaatcgtgataacatgtggggcactttaagctctttcaaagaaagatgctatatatagattagtattcttattaacaaaccattggttgtaccttgagaaaagactctttgaaagtcagagcataatatccagaaagcatgtgacctagaagggtgagatacggggggcagtgatatgtatgaaaagaattctttagaaatggttttccatgtttttctttccatcttttgaccctgctcaggcttactgcttttagggaaacatggctcattcaggtttttgtttttgcacttgccgctttcctttcacattctgcatgaagctctttcgcatcaaaatatttctgttattctgtgaactgattagcagt

SEQ ID NO: 33222 - DNA, 537 bp, Homo sapiens
ccgttggggttttgtgaggattaaatgtaaagtgcttacgacgctgcctggcacgcagtaagtacccaataaatgtcagttctgttcttagtgtgccgttttcccagcaggtgtagagaataaggatgactacccagcacacttttgcccaagactattaataaagtaatcgtgataacatgtggggcactttaagctctttcaaagaaagatgctatatatagattagtattcttattaacaaaccattggttgtaccttgagaaaagactctttgaaagtcagagcataatatccagaaagcatgtgacctagaagggtgagatacggggggcagtgatatgtatgaaaagaattctttagaaatggttttccatgtttttctttccatcttttgaccctgctcrggcttactgcttttagggaaacatggctcattcaggtttttgtttttgcacttgccgctttcctttcacattctgcatgaagctctttcgcatcaaaatatttctgttattctgtgaactgattagcagt

SEQ ID NO: 33223 - DNA, 1210 bp, Homo sapiens
tcttcacattgaagaaggggaggagtgcaccattggttttccatcctccagatgcactaagctcctacctaaactgtgccccctccttctttgaaacacatcccatccttaagccttggtaggaaggagagccatctggaagccctgaatcctatggaatgctgagtctcccttctccttaccccttagtgttggaattctcattccccaaagtcttggatttgaccttgcccgacactgactggagagaagcatcttcatattcacaggaatgagccttagatcagactttgctcctctcctgggagctccaggacactgaaaagccaagcttgttaccaatacttgcccttccttaagtacattaaatacatcccaaatagttaaacagattcctaaacagccaggccattctccctccttctaaccctcatctcctcggcctacgaaagcccagatgtgtgatccagggcttggcttcccctgtcttccccatcccagcatccttgcgggaaagggctgctctctctctctgctttcagaaggcaaatttccttatcacctatgagtcacaaacccagagagtggccaaacatagccaagctgatgcaagaccctgggaaggggaaagctgcaggtgtgtttgtgctgggaggagtgctgaccctcacctcasagacacctcctctccagatcctcaggaggtataaagacaggtcctccaccaccagtcaggcacactctaccaccatgaatccactcctgatccttgcctttgtgggagctgctggcgagtttcatgccatgcctcaggccccaaccaccccctttcctggcagacacttgccctgccattcttgccacctttcccattttgactgtgttctgatattctatttcctccatctctccttcccatcctccttcggctctctttaagcctcacctgtttcagcttctccatgatttcactcccaccactgtcattcatccatatctgagctgtggctggagaagctgggaagggagaccaggtggggcgggcccacaaaatgaagcagcagccttcaggcttggctccatagcaccagtatagcaccattatatctgctcttaacctcaaatgcacctggggaggttgaaaaattactcatatcagagactcagctttagaagttctaacttcattctctggggtgcaacctgtgta

SEQ ID NO: 33224 - DNA, 554 bp, Homo sapiens
atttttctttgttatctcttgtaggagtgttgctgcataagttatacaacagaactgcaaagggatctaaggaacaaattcctccagtatcagaattgcagccacctgcagcgaccctggcttagaataatatcttatgaacactgagatccttgtaactgattccgtctttggccaccaggatagaaagcttagatcaaactttcagatcactgctagcaactgcagagagctgtgggcttgcatttctgcttttctctaactcccagatttaccattttgctacccactttcccttttgctgtgatatgcttagttatttatagtttagtatttaatttttttaattacaacatttttcaaattagytttaaattgacatataataattgtacctatggggtacatagtgatgtttcaatatatgtaatgttatagagatcggatcagggtaattggcatttccatttagatagaaggggtaagttttagtgttctatcccattgtaggattccaactacagttaacagtaatacattatatagtctctaat

SEQ ID NO: 33225 - DNA, 618 bp, Homo sapiens
tactaaggtggccacggcgcattgctggagctgtgccccatgctccaactgtctctgcagccggctggggagggtgggaacatcaaggaaggctctctggaggaggtggtccctgagcttaacactgatgaatgagtaggagctacctccaatgcttttcacacatgaaggggtagatgaatcacttggagatctttcactaagcaggttcagattatcaggtcttgcagcaggagctgagaccccgggttgctcccaggtgatgcctacagcaggatgagatgtggaacagcaagaatccttcgataaatacagggcaggatccggggaagttgaaggracaggagcatttcctgcagacagtacagcccaggcaaagacacaagggcacagacagcctggtctgcgtgagctgcaccatgtgactggggttctgcagcccaacatcaggcaggaaggacaggaccatgagaaacagcgtgcaacatatgcagggtgtcttcccaattatcctcagaaacactcatctgcgtgggtgagtcttgtcctgaggataccacctgtcccagaaaagtgtgaggaaccgtaggctgaagctcccccttggagaagccacca

SEQ ID NO: 33226 - DNA, 618 bp, Homo sapiens
tactaaggtggccacggcgcattgctggagctgtgccccatgctccaactgtctctgcagccggctggggagggtgggaacatcaaggaaggctctctggaggaggtggtccctgagcttaacactgatgaatgagtaggagctacctccaatgcttttcacacatgaaggggtagatgaatcacttggagatctttcactaagcaggttcagattatcaggtcttgcagcaggagctgagaccccgggttgctcccaggtgatgcctacagcaggatgagatgtggaacagcaagaatccttcgataaatacagggcaggatccggggaagttgaagggacaggagcatttcctgcagacagtacagcccargcaaagacacaagggcacagacagcctggtctgcgtgagctgcaccatgtgactggggttctgcagcccaacatcaggcaggaaggacaggaccatgagaaacagcgtgcaacatatgcagggtgtcttcccaattatcctcagaaacactcatctgcgtgggtgagtcttgtcctgaggataccacctgtcccagaaaagtgtgaggaaccgtaggctgaagctcccccttggagaagccacca

SEQ ID NO: 33227 - DNA, 618 bp, Homo sapiens
tactaaggtggccacggcgcattgctggagctgtgccccatgctccaactgtctctgcagccggctggggagggtgggaacatcaaggaaggctctctggaggaggtggtccctgagcttaacactgatgaatgagtaggagctacctccaatgcttttcacacatgaaggggtagatgaatcacttggagatctttcactaagcaggttcagattatcaggtcttgcagcaggagctgagaccccgggttgctcccaggtgatgcctacagcaggatgagatgtggaacagcaagaatccttcgataaatacagggcaggatccggggaagttgaagggacaggagcatttcctgcagacagtacagcccaggcaaagacacaagggcacagacagcctggtctgcgtgagctgcaccatgtgactggggttctgcagcccaacatcaggcaggaaggacaggaccrtgagaaacagcgtgcaacatatgcagggtgtcttcccaattatcctcagaaacactcatctgcgtgggtgagtcttgtcctgaggataccacctgtcccagaaaagtgtgaggaaccgtaggctgaagctcccccttggagaagccacca

SEQ ID NO: 33228 - DNA, 618 bp, Homo sapiens
tactaaggtggccacggcgcattgctggagctgtgccccatgctccaactgtctctgcagccggctggggagggtgggaacatcaaggaaggctctctggaggaggtggtccctgagcttaacactgatgaatgagtaggagctacctccaatgcttttcacacatgaaggggtagatgaatcacttggagatctttcactaagcaggttcagattatcaggtcttgcagcaggagctgagaccccgggttgctcccaggtgatgcctacagcaggatgagatgtggaacagcaagaatccttcgataaatacagggcaggatccggggaagttgaagggacaggagcatttcctgcagacagtacagcccaggcaaagacacaagggcacagacagcctggtctgcgtgagctgcaccatgtgactggggttctgcagcccaacatcaggcaggaaggacaggaccatgagaamcagcgtgcaacatatgcagggtgtcttcccaattatcctcagaaacactcatctgcgtgggtgagtcttgtcctgaggataccacctgtcccagaaaagtgtgaggaaccgtaggctgaagctcccccttggagaagccacca

SEQ ID NO: 33229 - DNA, 405 bp, Homo sapiens
  misc_feature (1)...(405): n = A,T,C or G
tgtgtgtrtgtgtgtgtgtgtgtgtgtgtgtgtgttttaatataccatgttgtctctcagtcactgccagcttatccatacatatggtattctggttgatagaaccaagtaagtgcctggccctgccttctcctagaactgcagcatgtaaataccatatggacaaggtgtgacagtgtgcccacagatgatcttctacttgtaggctgtcttctttatttcagcttaaatacagctttccatattcatcatttctcctcccacagtcttttcatcctcctcaataaacactatctccatccctttggtgagagctcccttgatgagagatcactattactctactgttgcaatgcagtattctcttcntacatcatcttaactgcttttcataatgcaactctt

SEQ ID NO: 33230 - DNA, 529 bp, Homo sapiens
gctgctgaataacataaggactgaaacatgcccattttaggccaggcacggtggctcacttctgtaatcccagcactttgggaagctgaggtgggtggatcacctgaggtcagagttcgagaccaacatggtgccccatctctactaaaaatgcaaaaaaattagctaggcacagtggcgggtgcctgtaatcccagctacttgggaggctgaggcaggagaattgcttgaacccgcgaggtggaggttgtagtgagccaagatcactccagcctgggcaataagagtgaaactctgtctcaaaaaaaaaaaaaaaatgcccgttttatttttatttgagtcattggtaatctaatgagaagtttctctagatgctggaaacagaaaccagatttcgccacaggttgcagaatagattgaataggaagaggttgggcttggaaaacataagaaatagaaaacctcggtgttaagatttttwttcaatgcttggctttcataaagagaaggatttcaggttcaagataaa

SEQ ID NO: 33231 - DNA, 942 bp, Homo sapiens
tctcctgaagggctcatttgtggtcgctgccttcaccctccctcggggtctttctctcacttaagcttctgctcctctcacaagctcagggtcatgtgtttccagtacagggagatattttgaatgatttcagattttctctgcttgtttctacggcccaaactcagttcagaccccacatgcatgccgtgggtaggccagaaggccagggaacacgagtgagcaccgaaatccacagcgacatccaaaaggtsagcgtgcggctggagacggcgcagggcctgggcgtgcttgctggacctgggagatgtgtcattgcctgttcccaaatggcgttgttgcatcctggggtgaactttgagggaacacgagcgactccatgccacctaccaagtgaaaggcaggcctgatgccatgcctggggtggggtccacatctccagtggtagagatgactcaccacaccacgtgctcctccgccgcgcccttcccacagcactggcttaacctgggggactctgagtcctttatcaaggttgtcctgggagatgggagtttaaacacccagcccgcaaggccacggccattcccaggcttctctctccacacacctgggctttgtcagtgggtgcagtgatcgagggcataaccgggctccatcccaatgctgcctcatccctgcagtcaccccgcacaggtgacgcaggcttcagagggccccggacctcgcctgagggtgaagaaaatcacggcatcactgacaaggccgccatgaggatcgcgtgagcagaaacacgatgatcatggctcactgatggggcagctctgaggatcgcgtgagcagaaacacacagataatcacagaatcactgacggggcagctctgaggatcacgtgagcagaaacacacagataatcacagaatcactgacggggctgctgt

SEQ ID NO: 33232 - DNA, 965 bp, Homo sapiens
agagaaagcccaggggatgagccaacccagaatccaaacgcccgtggatcgggccagacccaggacggcgctatcttgcacacccrtcacaggcttggggacactagaactgcactgtcagatattcctgacttcatgtgtgtgtgtttgtgtgtgtgtagatcaggccatatgatttacttgctgcactctgagcgatgctgtgtagataaagctatattatctatttgctacactctgaataatgccttcctcagtgataatcataatcaagtgagctttggattgtcattatgaagtctcaaattaaaacaattggttgagatactgccagcaaggcaactagatcggggattgcagctgctgatgccagtctagtatttaggtaagaggatgcctccaccctcttagagcatgtggcttgcacatccattctttcagtgcaggaagggctggagtgtccactccctactcccaaccccatcagttgttgtatggtccaaaatgcaaagtaattttaatgtgatccaagatgcatataaaaacattttaaaaacagatatgttatgcattgcttagaatgatgcaccatccgcttcatgaacaagcaagaactaactctatcattgacttcatccacaaatactagaggtgatgaacttgaggtcaaagttccgaagtcagacagcatgggtttattcatcgcctgctatgtgcaaatcctagatgtcaccaggctctgctcacttggtgtcttggccactctgggtgatgtttacacaaggcttggtggctttgagatgggttgcaaacaagagatatcagttgttggacttttgcttatagcttggggttggacatcctctatccctcgatacctccttgcacccatcagccgttatctttgaaggaaactttttccttgagtctggttccttgtcttcaggttctaacctcatggtttt

SEQ ID NO: 33233 - DNA, 1361 bp, Homo sapiens
aaacaccagcttttcctgggtcttgagcctgcagcttttggactggaacctacactctgggctctcctggttctcaggcctttgaactcagatgggaactgtacccttagctctcctgggtgtccagcttgctgaccacagatcttggaacttctctgcctccataatcacgcaagccaattcgttgtaatacatctctatctgtctatgtcttctaggttaagtttcctggagaattctgaaggatatgcccccttcctctcctacagctcagagttgttctgtgcacttggatcagcctccacaacttccccccgggacagggcacccatcaccatctcctacctggacagcagcaaacactgcccccgtgacttcctggtgccatccttggctccattacgtccattctccagtggctggcagagtgagcttgaagaacgtgtgacatgcccttcagaatgttctacttcctgttccagaaggacagcccctcatgccttcccgcgggccacacgccacctcttcctcagtgccccagcctggcatcctcttcctgcattcagccttcttttccgaggtagcgctgataccagttgtcactaaatacaacatgcataactgttcagcttctctctagtagaatagatcataagcctcatgagaccccagagcctctgtcttcttcaataccccccagcacccaccccagggcagggccacaaagagttgtggagtgaccaaggggtagatgaacatggaatgcaaaggctgagggtgtgtccaccaggagcacggggggcaggaacttgtgcaacagcagcggcacagatgaagtggccgggctcctgggacaccagctagggaagcctggctaggggagctggagggaggcctgggggtggcaggagagagggtgtgtgtgtggtcgtggcctgggaggccagcaggccagagctgggagggcttcgcacatctctccggagcttgggtccatcctggaagccatggggaggagcaaggattgaaactgggagcggggtctggctgttggaggtaaagctactggtgccactgagccttaagactcaggatagtagccctggctgcgaggtcagggagccaatggagaccagggcctgatccgcgttgggttttctcaattatccccccaggaagaggctgcatcaggaatgagggcacagaagccggctaggatggcttgtgattccagtagggcccctcaggagccctgacagccagcctctaggtgtggctagttcaaaagartattcttattttatggatgtggggcaagctttccttatcttggaggtcagcaatggggatgcactatttta

SEQ ID NO: 33234 - DNA, 743 bp, Homo sapiens
tcctaccagcgctagtcctttccttctccatgcctcaacttcccctttcagtatgctgctcttccagttagattttccctcccatatctctctcctctctctctctctctcacacacacacacacaccacacttttcttgatgtgtatgccctgcttgctgtcttattgcactcagctacctctttgtccctcccctgcttcatgtttttaccccttttctatgcctttgatttcgtggatagaagttttagcacaagggaaacaaaacaaggaaaagaaggaaggaaggaaggaagttagttttcatgttrcctgagactgggtaatttataaagaagagatttaatggactcacagttccatgtggctggggaagcctcacaatcatggcggaaggtgacaggcacatcttatatggtggcaggcaagagaaaaatgagagccaagtgaatggggcaaccccttataaagccatcagaccttgtgagactcatccactaccatgagaacagtatgggggaaaccactgccatgattcaattacttcccactgggtccctcctacaacacatgggaattatgggagctacaattcaagaagagatttgggtggggacacagccaaactatattagaaggaaaataaaggaaagaatggagggaatgagagaaagagataaagagacaggaggaagggaaagaaggagggagaaggggaaggggggaaatgtggagaaaggtt

SEQ ID NO: 33235 - DNA, 586 bp, Homo sapiens
aagtcttcattctcatttgcaaaccgtatatattctgaatacctgctcatatcccatctcgattatctcatcaataatttccatccctctgatttacacctgtaaaagcaactcacttgcttttcccaacctaaagagtgctgtggagtccctggagtagagctactgcaatttcgtcactctctgacctgttggaaactcagtttcaccgcagcttwacaaggctgcagagtcttatatcttacatgcatattatagccaacactgttgactgattgctcaagaaatatcttggttttgttctgatggatatatactcagttttagggaatacattatgtttgctttaagtcaaatacaccaaaatcagtttcttctgccaggaattagtctaagtgggacccaacttcaatgagataaagacattttttaaaatctgttggtgacttctgggaaaggatttcctccttaataagggacaggcacaaaagaggtcagcccccccacctttttctctgctggccccacctgctgacctcagcactgttctctagggccatacttccccatttagttggtggcattc

SEQ ID NO: 33236 - DNA, 688 bp, Homo sapiens
agtattcatggagaaataaccatcaggccggatagatttgtttattagaattcaagactctggaaaacagcttagagcaattttaaaatagcaaccagtggaataaacacaccaatggcacagggtggtcagtgaatgtgtkgcaaacagccatttattaaagaaaatgaaaccctggtgacagttttaaaatcatcatcaaaacgctttttgtctaaaagcaatatttttatagcgtctatccctggctataaatgtggtgtttcttcttaaacagtcctttcagaaccccaggtccagcccaggagacaagctggtgacatcatcctgctctacaaaaaaggaattgttcagcctccaatgaaacagtgagatctgccttccccaaagacaaggtggggcaggggtcaccccaccctgttatctttgatgtgtgtgatttcttttttttttttttttttgatgtgattttttttttcaggtctctgccatcccacgtgcatttcctgataagatatgagggggagagcctcacctaaatgggaaggccatgtctgatgtccgtcagcatttgtgacagggagaaaaaccttcacgtgagaatgttctgaggtccatcactatccacagaccctcatcccacttcctcttctcctagccaatcctgtcagccatttagtttatttca

SEQ ID NO: 33237 - DNA, 542 bp, Homo sapiens
ccctgcctctgtgttcatgggtgggtcccsggtctgggaaactgggcagtaatataacgttgtattgggatgcctgccccgttcctcctgatctattttgtcattgatttcttttgataggtgaaagcatacccatgctggccgcccatctgttgtgcctcaggaacaccatgttttactgaccgtctccatagtttggggagggcgctctgggccggtgacccttgatgatgccccatcccatgatagcacccaccctgctgatggggaaatgccacccacaccagcctctccccactctcagttctgccatggcatctcccactgtcatccctgcctacaaggacagtcacttgcaatggttaactttatgtaacttggctaggccatggggtgcccagacgctgggtcaaacattgtcctggttgtgtctgaggctgtttgggatgaagttaacatttgagtggggaactggggaaagcagatgccttcctgaatgtggtgggccatatctgatcccttgaaggtgtgaatagaacgaa

SEQ ID NO: 33238 - DNA, 542 bp, Homo sapiens
ccctgcctctgtgttcatgggtgggtccccggtctgggaaactgggcagtaatataacgttgtattgggatgcctgccccgttcctcctgatctattttgtcattgatttcttttgataggtgaaagcatacccatgctggccgcccatctgttgtgcctcaggaacaccatgttttactgaccgtctccatagtttggggagggcgctctgggccggtgacccttgatgatgccccatcccatgatagcacccaccctgctgatggggaaatgccacccacaccagcctctccccactctcagttctgccatggcatctcccactgtcatccctgcctacaaggacagtcacttgcaatggttaactttatgtaacttggcyaggccatggggtgcccagacgctgggtcaaacattgtcctggttgtgtctgaggctgtttgggatgaagttaacatttgagtggggaactggggaaagcagatgccttcctgaatgtggtgggccatatctgatcccttgaaggtgtgaatagaacgaa

SEQ ID NO: 33239 - DNA, 1089 bp, Homo sapiens
caaaacaacagtcgcggttctgcaacagaaaaggctgcgctggccctgggacctgtctcggaaatactcctcatccatctagtttctcccaggacaactaggcccaaccccacgggaatatacagagaggcctcgggtcacagacttaaagctgtaaaagggaggaggcgacggtctggtcccagtcaccgaccagccaccgactactagggcccgaacccgggactgcagacgcacctccccgccctcccttcccagctccgcctggcggcgggcgttgctcctgaggggcggggcttccgcttccggcgggggattgttgacgcctgcggttgctgcggtggtgacggggctgttggggaggggccattgggggagggaaacggagcagtracaagtatcccagagggtgctgctgaggcgacgatggccgaggggcccgaggaagcccgaggccaccctcccgggcaggacgatggcgggggggaccacgagcccgtcccttccctgagaggccctcctaccaccgccgtcccatgcccccgcgacgacccccaggccgaaccccaggccccgggccggcccacagccccgggcctcgcggctgccgccgcagccgacaaattggagccgccgcgcgagctcaggaagcgcggggaggcggcctccggctccggtgcagagctgcaggagcaggcgggctgcgaggcgcccgaagccgcggcgccacgagagagaccagctcggctgagcgcccgcgagtactcccggcaagtgcacgagtggctgtggcagtcctactgcggctacctcacctggcacagcggcctggccgccttcccagcctactgcagcccccagccctccccgcaaagcttcccttcgggcggcgctgcagtcccccaggccgcggcgccgccgcccccgcagctgggctattacaaccccttctacttcctgagccccggggccgcggggcctgacccgcggacagctgccggcatcagcacccctgctccagtcgcgggcctgggaccccgggctcctcacgtgcaggcgtcggtccgggccactccagtgacgagggta

SEQ ID NO: 33240 - DNA, 1089 bp, Homo sapiens
caaaacaacagtcgcggttctgcaacagaaaaggctgcgctggccctgggacctgtctcggaaatactcctcatccatctagtttctcccaggacaactaggcccaaccccacgggaatatacagagaggcctcgggtcacagacttaaagctgtaaaagggaggaggcgacggtctggtcccagtcaccgaccagccaccgactactagggcccgaacccgggactgcagacgcacctccccgccctcccttcccagctccgcctggcggcgggcgttgctcctgaggggcggggcttccgcttccggcgggggattgttgacgcctgcggttgctgcggtggtgacggggctgttggggaggggccattgggggagggaaacggagcagtaacargtatcccagagggtgctgctgaggcgacgatggccgaggggcccgaggaagcccgaggccaccctcccgggcaggacgatggcgggggggaccacgagcccgtcccttccctgagaggccctcctaccaccgccgtcccatgcccccgcgacgacccccaggccgaaccccaggccccgggccggcccacagccccgggcctcgcggctgccgccgcagccgacaaattggagccgccgcgcgagctcaggaagcgcggggaggcggcctccggctccggtgcagagctgcaggagcaggcgggctgcgaggcgcccgaagccgcggcgccacgagagagaccagctcggctgagcgcccgcgagtactcccggcaagtgcacgagtggctgtggcagtcctactgcggctacctcacctggcacagcggcctggccgccttcccagcctactgcagcccccagccctccccgcaaagcttcccttcgggcggcgctgcagtcccccaggccgcggcgccgccgcccccgcagctgggctattacaaccccttctacttcctgagccccggggccgcggggcctgacccgcggacagctgccggcatcagcacccctgctccagtcgcgggcctgggaccccgggctcctcacgtgcaggcgtcggtccgggccactccagtgacgagggta

SEQ ID NO: 33241 - DNA, 1089 bp, Homo sapiens
caaaacaacagtcgcggttctgcaacagaaaaggctgcgctggccctgggacctgtctcggaaatactcctcatccatctagtttctcccaggacaactaggcccaaccccacgggaatatacagagaggcctcgggtcacagacttaaagctgtaaaagggaggaggcgacggtctggtcccagtcaccgaccagccaccgactactagggcccgaacccgggactgcagacgcacctccccgccctcccttcccagctccgcctggcggcgggcgttgctcctgaggggcggggcttccgcttccggcgggggattgttgacgcctgcggttgctgcggtggtgacggggctgttggggaggggccattgggggagggaaacggagcagtaacaagtatcccagagggtgctgctgaggcgacgatggccgaggggcccgaggaagcccgaggccaccctcccgggcaggacgatggcgggggggaccacgagcccgtcccttccctgagaggccctcctaccaccgccgtcccatgcccccgcgacgacccccaggccgaaccccaggccccgggccggcccacagccccgggcctcgcggctgccgccgcagccgacaaattggagccgccgcgcgagctcaggaagcgcggggaggcggcctccggctccggtgcagagctgcaggagcaggcgggctgcgaggcgcccgaagccgcggcgccacgagagagaccagctcggctgagcgcccgcgagtactcccggcaagtgcacgagtggctgtggcagtcctactgcggctacctcacctggcacagcggcctggccgccttcccagcctactgcagcccccagccctccccgcaragcttcccttcgggcggcgctgcagtcccccaggccgcggcgccgccgcccccgcagctgggctattacaaccccttctacttcctgagccccggggccgcggggcctgacccgcggacagctgccggcatcagcacccctgctccagtcgcgggcctgggaccccgggctcctcacgtgcaggcgtcggtccgggccactccagtgacgagggta

SEQ ID NO: 33242 - DNA, 595 bp, Homo sapiens
cgtccggttgtgggaaaggggacagtgggccagaggggaggggttgccatttgcagtttgactcaggatctgcattttgagctcctgttgaagatggaattgctcagggtcattacgcatgctctccaaatgttcacatctccctgttctgtattttctgggtcagggtcctcaggactgtcccctgcctgagggccctgagcagccctgggggcagacgcctcccagagagacacagagccaggttctgttcagaaacgccttgggcttccagttttgcataaagtttgctggtaagtgaggctggcagcacttctgaggctggagtcagctccgtggaggcagggccctcatcttattcatcccacctcccctcagaggctggcacagtgcttaayacacagaatgggccaaatacccctgtggagagtagccggctcttatgggttaagttgtgtcccccaaaagatgccaaagtcttaaccccccatatctgtgagtgtgaccttatttggaaacaggatctgtgtagatgattaagataagttgtgctaatccaatatggctgtgcccttttaaagaagggaaatttgga

SEQ ID NO: 33243 - DNA, 595 bp, Homo sapiens
cgtccggttgtgggaaaggggacagtgggccagaggggaggggttgccatttgcagtttgactcaggatctgcattttgagctcctgttgaagatggaattgctcagggtcattacgcatgctctccaaatgttcacatctccctgttctgtattttctgggtcagggtcctcaggactgtcccctgcctgagggccctgagcagccctgggggcagacgcctcccagagagacacagagccaggttctgttcagaaacgccttgggcttccagttttgcataaagtttgctggtaagtgaggctggcagcacttctgaggctggagtcagctccgtggaggcagggccctcatcttattcatcccacctcccctcagaggctggcacagtgcttaacacacagaatgggccaaatacccytgtggagagtagccggctcttatgggttaagttgtgtcccccaaaagatgccaaagtcttaaccccccatatctgtgagtgtgaccttatttggaaacaggatctgtgtagatgattaagataagttgtgctaatccaatatggctgtgcccttttaaagaagggaaatttgga

SEQ ID NO: 33244 - DNA, 649 bp, Homo sapiens
tagggctggcaaaattcagggtgactgaagcaaaagcttcataaccagaaagaccacatctgggggtagagcacaaaactctcaagagatgaatctttgtaagagtgaggcagaactatatagcagttttaggagatctgttggtgcccagcaagagctccaaacgggctatatgcagggatgcaggctgtagtctcaggagaggaggttcacaaaagtcattcagtccaagacctcaaactgtgttctctactaaaaggaatcaaggttccctagagaaayggctgactccatgtatggtgcagtatattgatcctggaacatctgttttgccagaaagcaaggaagccatcaaagtccaacaggatcacgtcaaaaagacatgaaagtcaacttgaagagataattattaacctagatgagacaatgtaagcatccaaaacaataaagactgcaatggcctgaaatacatcaaatgcaaacaataatctatgagttcataatggtattcagaaaaaaaaactactggtcattagagggaaggttactaggtcactaacttactactctgaaaagtgacttaagatgagaggtagggtggagaattagctatttattcagtctttcctgtacaaacataaatttttag

SEQ ID NO: 33245 - DNA, 722 bp, Homo sapiens
atttaagctgagacatgaaggagccagtcacatagagggggagtggggagaaaagggttctgggcagaggaacagcatcaggaaaggtggaaggaatgttggaaagcagatgtcacgtgtgtgtggctgagggctgtgcatgagcctgagtggcagggacggagggcagggaggaacagagctcatgccacagagggagaaggtgatgtcacccttcctgggcttccctggggacagtagagcatctgggtacttccagggagtagaatccagtggttacgagcccagactggaggcagatctcctgcggttgattcctagctgtgcccttaactaactgtgtgaccttggtcatgtgatgcctcaatttctaaatctgtaaaataggaacaatcacaattttacaactgtaaaatagagctgttgagaggactgaatgaagtaacgtgttggctgtgattaggacagatgatggggatgacggtgatgctgaccatgtcctttggcataaggcacatcartgattgcccccaggttgttgatggatacttctgatgctacccacccagctcataggtagcatgggaagtcacccaaagagatgagtctccgacagcctgtgtaaagtatgtgaccttgccacctggtttccataaaccaaggtgaacagttgcccaaggcttggtcaatcagattattagaattttgatgaccaagagata

SEQ ID NO: 33246 - DNA, 470 bp, Homo sapiens
ggcaaaataggtgaattattgccaccttgaattgaaatccaaaatgtaacaaatgttcaaaaccatcgaaacttgactaaaggacggtggtggctaactcagttcattagcttccttataaaaygaccagtgtctcatgttaaataccctgccattaagttagcttctgtgtgtttatcgaaaaatacagaatcaaactgtatctctaatcccagtgagtcattcggaaataaatgcgtaaaaaagacagagcgagagagtgtgaataaaccatcacagacacatactcctcctaaaaaaacaaacgcaaggcgtaaaaaaacttcacagtgcgtgctccatttcctttcacccaggacgtactcaataaacgcttgttaaagagttttattttggtactgggttaaaaatacacccgtctggggcatgtataagtctgtgtgttaagcaagcctgacaatcagttgaaa

SEQ ID NO: 33247 - DNA, 459 bp, Homo sapiens
aacatggcaaaaccctgtctctactaaaaatacaaaaaaaattagccggttgtggtggtgggcacctgtaattccagctacttgggaggctgagacatgagaatcgcttaaacccaggagacggaggttgcagtgagccaagatcaygccactgccctccagcctgggtgacagagcaagactgtttcaaaaaaaagaaatacctatagcagaatgcttaaccatattatctacttagaaaaaaaaattcaatctctccaatgttatgcccccaaattccacataaatttaaataaaaaatatatcgcaaaactcccagaagaaaacatgaaagaataacattatgatctgagaatgaggagggtattgtgtaaaatccgaaagtcgtaaaacagtaagtgtggcaacaaaaacattttcatgagtctgtacaggaagacactgaaaacaaagtcaaaa

SEQ ID NO: 33248 - DNA, 1059 bp, Homo sapiens
gcctggggctctcccacagggggctttcgtgagccaggcagcgagggccgcccccgcgctgcagcccagccaggccgcgacggcagagggggtctcccaacctgccccggcgcgcggggatttcgcctacgccgccccggctcctccggacggggcgctctcccaccctcaggctcctcggtggcctccgcacccgggcaaaagccgggaggaccgggacccgcagcgcgacggcctgccgggcccctgcgcggtggcacagcctgggcccgctcaagcggggccgcagggccaaggggtgcttgcgccacccacgtcccaggggagtccgtggtggggctggggccgggtccccaggtcgccggggcggcgtgggaaccccaagccggggcaagcttccacctccccagcccgcgcccccggacgcctccgcctccgcgcggcaggggcagatgcaaggcatcccggcgccctcccaggcgctccaggagccggcgccctggtctgcactcccctgcggcctgctgctggatgagctcctggcgagcccggagtttctgcagcaggcgcaacctctcctagaaacggaggccccgggggagctggaggcctcggaagaggccgcctcgctggaagcacccctcagcgaggaagaataccgggctctgctggaggagctttaggacgcggggttgggacggggtcgggtggttcggggcagggcggtggcctctctttcgcggggaacrcctggctggctacggaggggcgtgtctccgccccgccccctccaccgggctgaccggcctgggattcctgccttctaggtctaggcccggtgagagactccacaccgcggagaactgccattctttcctgggcatcccggggatcccagagccggcccaggtaccagcaggtgggccgcctactgcgcacgcgcgggtttgcgggcagccgcctgggctgtgggagcagcccgggcagagctctcctgcctctccaccagcccaccccgccgcctgaccgccccctccccaccccccaccccccaccccc

SEQ ID NO: 33249 - DNA, 1979 bp, Homo sapiens
ccaagagagatttacatgtctctgaacttggagtttgcaacacaaggtcaaccatgtcttatacaagccgtttaataaggtaaaccactcttaggcagggctctgagctcgttagccaacttgaacacaagatgagggtttcattcaattaaagtgtgctttagcctgaggaggaaaatcatagcaaatagaaactaataaatagagacaggggtatcttctgtttgctggggtgatgagcatttaaaacagaggctttaaggwttgaaaacagtacaaaaatgctccatgaaacatggaaattaatagccaatttaataatgtaagattcggcaacattgaggagggacagttcaaaaccacagcagaaatattttaatagaagaggcagttggccctaaaactgcggacactaaagacctaatggaagtgaattagcctttctttcggccagattccaagcctgaaaattcaccctgtttcctttaattcttcctgcagttttactggaaacagttaccttgtgttttgtcctaaaacagttaaattgcctttcaacagacttttcagaaaatcttgtgttcctcagcaggagtggaaacaagaattggcttttaagcagacatgtaaaagtagagaagaaaatttttctcatctagatctgtgcttgggtcaagcctgagggcacctctaaggagtcattgaaagctaataattaagaatctgtttatatagcactaatcacatgattatctggaagaattctccagcaagaccattagtgaccagagggaagtgaaaatgatcctttaaattttcccaagtgcacctgattcctcacctcaattcaattcacacccatatcttgcatttcaaaatagtgacctaatcttggtccataattttacccactgactcttgcaatcaagggggataaaagactattttacaggtgaagagcccactggaacctaattgaaaaattgctaatacttctcagttaaatattaacatacttatgtaaaaggattcagtttaaaggaaattgggtaataattaagggcatctggctctagctcatggatgcagctttggcctctgggttcagtaagaaggttaggttggatttcaaagtcatcctcaactttccagctgaccatattctcccatatggtgaccacttaccatcacaggatccctaaagccgttatttcatttgctgttcttctctctggcttctcttacccagccatcaatatttatgtgtcccaggtctgcttctgtcaactgggttaaatgttaatctcatagtgaggatcagctgactaatcttactgtccagcacaccagttcttagcttcagtgtcatattatactgctaggtcataagcaactgtgaggtttgtcacaatcaacttgacacctttacagagattcctctggtaaagggctttcaacttcagtgctttcatagatataaatgaagcttcactgcaaaagtatattaacatttttgtctccaacaaatgggatcagtgatcctgcagataagtgttaagaaagatcaggatttgccatcccaacatttgctactttggcacaagtattattctgaactgaaggcaattgagaatcaacagatgcaggaagagttctctgccctccccttatctacctaaaaacagggcatacatttccctttgtgaaggtacccccatcttaccagaaagtgaagaccaactcttatcattggagatggaacatttatgcagagatgagtttctataaacaaactgaactaaaataacccttatctttcattagttccacaagatatttcctagttactttcccatgacttattgtcctttgaagcccaaatctcctttcctttgttaaagtggtatataacccctgagtttaactgcttctttgagtttcacttattttctatgactctagtatacacataaatgtta

SEQ ID NO: 33250 - DNA, 1979 bp, Homo sapiens
ccaagagagatttacatgtctctgaacttggagtttgcaacacaaggtcaaccatgtcttatacaagccgtttaataaggtaaaccactcttaggcagggctctgagctcgttagccaacttgaacacaagatgagggtttcattcaattaaagtgtgctttagcctgaggaggaaaatcatagcaaatagaaactaataaatagagacaggggtatcttctgtttgctggggtgatgagcatttaaaacagaggctttaaggattgaaaacagtacaaaaatgctccatgaaacatggaaattaatagccaatttaataatgtaagattcggcaacattgaggagggacagttcaaaaccacagcagaaatattttaatagaagaggcagttggccctaaaactgcggacactaaagacctaatggaagtgaattagcctttctttcggccagattccaagcctgaaaattcaccctgtttcctttaattcttcctgcagttttactggaaacagttaccttgtgttttgtcctaaaacagttaaattgcctttcaacagacttttcagaaaatcttgtgttcctcagcaggagtggaaacaagaattggcttttaagcagacatgtaaaagtagagaagaaaatttttctcatctagatctgtgcttgggtcaagcctgagggcacctctaaggagtcattgaaagctaataattaagaatctgtttatatarcactaatcacatgattatctggaagaattctccagcaagaccattagtgaccagagggaagtgaaaatgatcctttaaattttcccaagtgcacctgattcctcacctcaattcaattcacacccatatcttgcatttcaaaatagtgacctaatcttggtccataattttacccactgactcttgcaatcaagggggataaaagactattttacaggtgaagagcccactggaacctaattgaaaaattgctaatacttctcagttaaatattaacatacttatgtaaaaggattcagtttaaaggaaattgggtaataattaagggcatctggctctagctcatggatgcagctttggcctctgggttcagtaagaaggttaggttggatttcaaagtcatcctcaactttccagctgaccatattctcccatatggtgaccacttaccatcacaggatccctaaagccgttatttcatttgctgttcttctctctggcttctcttacccagccatcaatatttatgtgtcccaggtctgcttctgtcaactgggttaaatgttaatctcatagtgaggatcagctgactaatcttactgtccagcacaccagttcttagcttcagtgtcatattatactgctaggtcataagcaactgtgaggtttgtcacaatcaacttgacacctttacagagattcctctggtaaagggctttcaacttcagtgctttcatagatataaatgaagcttcactgcaaaagtatattaacatttttgtctccaacaaatgggatcagtgatcctgcagataagtgttaagaaagatcaggatttgccatcccaacatttgctactttggcacaagtattattctgaactgaaggcaattgagaatcaacagatgcaggaagagttctctgccctccccttatctacctaaaaacagggcatacatttccctttgtgaaggtacccccatcttaccagaaagtgaagaccaactcttatcattggagatggaacatttatgcagagatgagtttctataaacaaactgaactaaaataacccttatctttcattagttccacaagatatttcctagttactttcccatgacttattgtcctttgaagcccaaatctcctttcctttgttaaagtggtatataacccctgagtttaactgcttctttgagtttcacttattttctatgactctagtatacacataaatgtta

SEQ ID NO: 33251 - DNA, 1979 bp, Homo sapiens
ccaagagagatttacatgtctctgaacttggagtttgcaacacaaggtcaaccatgtcttatacaagccgtttaataaggtaaaccactcttaggcagggctctgagctcgttagccaacttgaacacaagatgagggtttcattcaattaaagtgtgctttagcctgaggaggaaaatcatagcaaatagaaactaataaatagagacaggggtatcttctgtttgctggggtgatgagcatttaaaacagaggctttaaggattgaaaacagtacaaaaatgctccatgaaacatggaaattaatagccaatttaataatgtaagattcggcaacattgaggagggacagttcaaaaccacagcagaaatattttaatagaagaggcagttggccctaaaactgcggacactaaagacctaatggaagtgaattagcctttctttcggccagattccaagcctgaaaattcaccctgtttcctttaattcttcctgcagttttactggaaacagttaccttgtgttttgtcctaaaacagttaaattgcctttcaacagacttttcagaaaatcttgtgttcctcagcaggagtggaaacaagaattggcttttaagcagacatgtaaaagtagagaagaaaatttttctcatctagatctgtgcttgggtcaagcctgagggcacctctaaggagtcattgaaagctaataattaagaatctgtttatatagcactaatcacatgattatctggaagaattctccagcaagaccattagtgaccagagggaagtgaaaatgatcctttaaattttcccaagtgcacctgattcctcacctcaattcaattcacacccatatcttgcatttcaaaatagtgacctaatcttggtccataattttacccactractcttgcaatcaagggggataaaagactattttacaggtgaagagcccactggaacctaattgaaaaattgctaatacttctcagttaaatattaacatacttatgtaaaaggattcagtttaaaggaaattgggtaataattaagggcatctggctctagctcatggatgcagctttggcctctgggttcagtaagaaggttaggttggatttcaaagtcatcctcaactttccagctgaccatattctcccatatggtgaccacttaccatcacaggatccctaaagccgttatttcatttgctgttcttctctctggcttctcttacccagccatcaatatttatgtgtcccaggtctgcttctgtcaactgggttaaatgttaatctcatagtgaggatcagctgactaatcttactgtccagcacaccagttcttagcttcagtgtcatattatactgctaggtcataagcaactgtgaggtttgtcacaatcaacttgacacctttacagagattcctctggtaaagggctttcaacttcagtgctttcatagatataaatgaagcttcactgcaaaagtatattaacatttttgtctccaacaaatgggatcagtgatcctgcagataagtgttaagaaagatcaggatttgccatcccaacatttgctactttggcacaagtattattctgaactgaaggcaattgagaatcaacagatgcaggaagagttctctgccctccccttatctacctaaaaacagggcatacatttccctttgtgaaggtacccccatcttaccagaaagtgaagaccaactcttatcattggagatggaacatttatgcagagatgagtttctataaacaaactgaactaaaataacccttatctttcattagttccacaagatatttcctagttactttcccatgacttattgtcctttgaagcccaaatctcctttcctttgttaaagtggtatataacccctgagtttaactgcttctttgagtttcacttattttctatgactctagtatacacataaatgtta

SEQ ID NO: 33252 - DNA, 1979 bp, Homo sapiens
ccaagagagatttacatgtctctgaacttggagtttgcaacacaaggtcaaccatgtcttatacaagccgtttaataaggtaaaccactcttaggcagggctctgagctcgttagccaacttgaacacaagatgagggtttcattcaattaaagtgtgctttagcctgaggaggaaaatcatagcaaatagaaactaataaatagagacaggggtatcttctgtttgctggggtgatgagcatttaaaacagaggctttaaggattgaaaacagtacaaaaatgctccatgaaacatggaaattaatagccaatttaataatgtaagattcggcaacattgaggagggacagttcaaaaccacagcagaaatattttaatagaagaggcagttggccctaaaactgcggacactaaagacctaatggaagtgaattagcctttctttcggccagattccaagcctgaaaattcaccctgtttcctttaattcttcctgcagttttactggaaacagttaccttgtgttttgtcctaaaacagttaaattgcctttcaacagacttttcagaaaatcttgtgttcctcagcaggagtggaaacaagaattggcttttaagcagacatgtaaaagtagagaagaaaatttttctcatctagatctgtgcttgggtcaagcctgagggcacctctaaggagtcattgaaagctaataattaagaatctgtttatatagcactaatcacatgattatctggaagaattctccagcaagaccattagtgaccagagggaagtgaaaatgatcctttaaattttcccaagtgcacctgattcctcacctcaattcaattcacacccatatcttgcatttcaaaatagtgacctaatcttggtccataattttacccactgactcttgcaatcaagggggataaaagactattttacaggtgaagagcccactggaacctaattgaaaaattgctaatacttctcagttaaatattaacatacttatgtaaaaggattcagtttaaargaaattgggtaataattaagggcatctggctctagctcatggatgcagctttggcctctgggttcagtaagaaggttaggttggatttcaaagtcatcctcaactttccagctgaccatattctcccatatggtgaccacttaccatcacaggatccctaaagccgttatttcatttgctgttcttctctctggcttctcttacccagccatcaatatttatgtgtcccaggtctgcttctgtcaactgggttaaatgttaatctcatagtgaggatcagctgactaatcttactgtccagcacaccagttcttagcttcagtgtcatattatactgctaggtcataagcaactgtgaggtttgtcacaatcaacttgacacctttacagagattcctctggtaaagggctttcaacttcagtgctttcatagatataaatgaagcttcactgcaaaagtatattaacatttttgtctccaacaaatgggatcagtgatcctgcagataagtgttaagaaagatcaggatttgccatcccaacatttgctactttggcacaagtattattctgaactgaaggcaattgagaatcaacagatgcaggaagagttctctgccctccccttatctacctaaaaacagggcatacatttccctttgtgaaggtacccccatcttaccagaaagtgaagaccaactcttatcattggagatggaacatttatgcagagatgagtttctataaacaaactgaactaaaataacccttatctttcattagttccacaagatatttcctagttactttcccatgacttattgtcctttgaagcccaaatctcctttcctttgttaaagtggtatataacccctgagtttaactgcttctttgagtttcacttattttctatgactctagtatacacataaatgtta

SEQ ID NO: 33253 - DNA, 560 bp, Homo sapiens
taaaagttcaatgcagcatgctggggagacttattaaaagactgtattcaaccaaccctagaaattcacactgcttgacagtgattaagaaaatcggtaaaaaccaatttttgtattatttcatatgaataaaaatcatgaatattcagctaataaagttacatctgtattatagtaaaagaaggtggccaattcactataatcttaacaaatacattattttattgcatgtatttatgcatccttccttcatctgtttctatcccaagcaagacagctggcaaaagtttttgagaaggaaaacacaagatacagaggaggtataaggtcgaatattaagaaggatgccttggatatagatcaagaagactatgttcaccactgacattagtcaaattggctggcatatccatatgtgrtctatgaggtatgctatggcctgaatgttgtgtctccccaaaattcataaattgaaaccatatttgcaatgtgagggtaatttggaggtggggcctttggtgagtgattagatcatgagggcaatgccctcatgaacagga

SEQ ID NO: 33254 - DNA, 538 bp, Homo sapiens
gggaaacatgcaaaatgatagattagaagtatgtgaaattcatgtgtacttgaggctgagcaatgctgccacagagcataggaaaactcttgctatggttttttgctatttttatatggtataataatatggctatttatttattgtttgtaaacacttatttttcaaaaaaaaattcaacagtaatagcttcagaattctcacttttaatgtataataaagtatttttcaaggaagttgataataaataggttacttgcacaaartgtatgttaatattttccacataacatgaaaccatagtgacatcagtgacatgaaattattagaatcatcttcaaaagttactagccagtcacatcaggaagatggaagaattagaagttccaaccctcatgccccacaaagaaaagccaattttggcaataactcagataagaatacttctgtgagagccccaaagtctaaatgaaagttccagaactccagtggagcacaaaacctgagtgaacccaatcagaagggtaaaaagaacagt

SEQ ID NO: 33255 - DNA, 607 bp, Homo sapiens
aatggcaggccccatcacgatgaagagtaacccacaggaggccatagaaacactcaccccagaaccaaaggggtcatacctggacaccccatgtgggggtgacaggatgtagctccatctcattcctgttttcagatctcggggaggtgaggaacttgttctccgaggatgactcaggtcaacacaggggcccccatctggtggatagacagagtggtcccaggatctgtcagtagttccggtgaggaacatgagggacgattgagggcacccttgggccagaacacagatgaggacctcacggaaatctgccctgcccctgctgtcactccagagagcatgggcagggctgtctgctgcagtcccccccacttaccctgggatcattggtgtcagkgatggggaggtctttgtcgaggggtctgcactcaggtcagtagagggagcgtcttaggccctgccaggagacaaggtaagaacgaagcaggttcctcacccaggacacatgaattccaatgcatttcagcatctcttcctgtccttcccaagaggacctgggcacgtgtggccagatgtgagtctcctcatgtcctgttccctatcaggg

SEQ ID NO: 33256 - DNA, 880 bp, Homo sapiens
cattatatgctttgttaaagtatttatgccctgattcaatgtgattgtctcaatttttatttcattctgtcctacctcttgcaacctgcatttcttcattattattgatgaatccaactgcaaagttcaccttatctgactaaggattattcattaatttttacttgtttatctgacctttattaattttgtttatttgttagtcactctgagccatggtcatgatgacttaggattctggatctcttatgactaacaaatttatccttaataaagtctctatactaaagaagaatctaatgaaaaatatcacttgacaaaatgagtgcagtacatgaacaaagttctgactggatcataaacccaaaagtgattaatcagtttattaattagggactaacaatgaaatcaatgatatgtcttcatatactttgaattggcaaaaattcatatttatcataggtaaagcaccaaataactggcaactccagtgctggtttgttgggagtatgaatagagtggtgataagtgaagggcacacataggcccagcacaagaagaatccctctaaccaagtccaagctagcaactacagaaatcaaaaatccaacctactagtatagcaattcttattatacatttgaacattaggcaagtgaccaccagtggaactgtgaactcagtgggcaactctaagctcacctttgtcaaaacctctatatgcccccactttcaaaaacgttattttcaaaagaaagtcctgcctcctactcacccgaactttaccaagattcagtgcccaagggtacaatttttagaataataacaaatgagaaatttgaaattttatgcctcacyagtgttcaatttattgtccctt

SEQ ID NO: 33257 - DNA, 800 bp, Homo sapiens
atttttagtagagatggggtttcaccatgttggccaggttggtcttgaactcctgacctcaagtaatccacccgcctcggcctcccaaagtgctaggattgcaggcatgagccactgtgcctggccgcatggaagaaactttgactgcagcagattccaagctctcgagctccccagcagagagccatctcttggggcagcagggcagagctggggagatgcgcgggggtgccagacacagaatgctatggccttctcatctagaattaccatagcaacaggagcatcacagagggcctgcctcggtgcccttctaggccctgcctcagctgggcaggaagaaggagacccagcttggctgggggcagtaggcagggggccccggggtaagtcagccaggcctggatgctgcctccaggctttatgtgggacacctgccagcccacacccctctcttgggccagtcacagaacaaatagggcagaggccaagaaagaaaaggagggggcytggcatagctggacaggggtgctgggggacactgccagtccagggcccggaagccagacagacaacagcacctccaccctgagctcaggcagccctgatccctgaaggacggagtaaactcaacattcaaagagatagaaacataagccctgggcaccacagaaagacgacagaaaccaggagaggctgggatacacctaggtccaacttcatcaaacccagtcctgcccatgacaacggaatagcatggaatagaccagagctggaccaactagagacacaaggcaaga

SEQ ID NO: 33258 - DNA, 800 bp, Homo sapiens
atttttagtagagatggggtttcaccatgttggccaggttggtcttgaactcctgacctcaagtaatccacccgcctcggcctcccaaagtgctaggattgcaggcatgagccactgtgcctggccgcatggaagaaactttgactgcagcagattccaagctctcgagctccccagcagagagccatctcttggggcagcagggcagagctggggagatgcgcgggggtgccagacacagaatgctatggccttctcatctagaattaccatagcaacaggagcatcacagagggcctgcctcggtgcccttctaggccctgcctcagctgggcaggaagaaggagacccagcttggctgggggcagtaggcagggggccccggggtaagtcagccaggcctggatgctgcctccaggctttatgtgggacacctgccagcccacacccctctcttgggccagtcacagaacaaatagggcagaggccaagaaagaaaaggagggggcttggcatagctggacaggggtgctgggggacactgccagtccagggcccggaagccagacagacaacagcacctccaccctgagctcaggcagccstgatccctgaaggacggagtaaactcaacattcaaagagatagaaacataagccctgggcaccacagaaagacgacagaaaccaggagaggctgggatacacctaggtccaacttcatcaaacccagtcctgcccatgacaacggaatagcatggaatagaccagagctggaccaactagagacacaaggcaaga

SEQ ID NO: 33259 - DNA, 719 bp, Homo sapiens
gcggaggcgtccgggggcgcgggctggggaggtggarctgccccggcttggggttcccacgccgccccggcgacctggggaccccggccccagccccaccacggactcccctgggacgtgggtggcgcaagcaccccttggccctgcggccccgcttgagcgggcccaggctgtgccaccgcgcaggggcccggcaggccgtcgcgctgcgcgtcccggtcctcccggcttttgcccgggtgcggaggccaccgaggagcctgagggtgggagagcgccccgtccggaggagccggggcggcgtaggcgaaatccccgcgcgccggggcaggttgggagaccccctctgccggcgcggcctggctgggctgcagcgcgggggcggccctcgctgcctggctcacgaaagccccctgtgggagagccccaggcgcgcagggcacgtggggtgcgggaagccccgttccccacgcgccggtgtgggcgaaggcgacccacgagggagcagggtgacccccgccaggggccgcgctgcacaggccgcctgcctgcgcgggcgccctgccaccctgtcccgggtgcctggcccttcgattctgaaaccagatctgaatcctggactccgggaggcccgtctctctggccagctcctcccgggcggcgatgcctggaaagcgatccttctcaaaggctcggaggagcagggcggtctgggatcc

SEQ ID NO: 33260 - DNA, 719 bp, Homo sapiens
gcggaggcgtccgggggcgcgggctggggaggtggagctgccccggcttggggttcccacgccgccccggcgacctgggraccccggccccagccccaccacggactcccctgggacgtgggtggcgcaagcaccccttggccctgcggccccgcttgagcgggcccaggctgtgccaccgcgcaggggcccggcaggccgtcgcgctgcgcgtcccggtcctcccggcttttgcccgggtgcggaggccaccgaggagcctgagggtgggagagcgccccgtccggaggagccggggcggcgtaggcgaaatccccgcgcgccggggcaggttgggagaccccctctgccggcgcggcctggctgggctgcagcgcgggggcggccctcgctgcctggctcacgaaagccccctgtgggagagccccaggcgcgcagggcacgtggggtgcgggaagccccgttccccacgcgccggtgtgggcgaaggcgacccacgagggagcagggtgacccccgccaggggccgcgctgcacaggccgcctgcctgcgcgggcgccctgccaccctgtcccgggtgcctggcccttcgattctgaaaccagatctgaatcctggactccgggaggcccgtctctctggccagctcctcccgggcggcgatgcctggaaagcgatccttctcaaaggctcggaggagcagggcggtctgggatcc

SEQ ID NO: 33261 - DNA, 719 bp, Homo sapiens
gcggaggcgtccgggggcgcgggctggggaggtggagctgccccggcttggggttcccacgccgccccggcgacctggggaccccggccccagccccaccacggactcccctgggacgtgggtggcgcaagcaccccttggccctgcggccccgcttgagcgggcccaggctgtgccaccgcgcaggggcccggcaggccgtcgcgctgcgcgtcccggtcctcccggcttttgcccgggtgcggaggccaccgaggagcctgagggtgggagagcgccccgtccggaggagccggggcggcgtaggcgaaatccccgcgcgccggggcaggttgggagaycccctctgccggcgcggcctggctgggctgcagcgcgggggcggccctcgctgcctggctcacgaaagccccctgtgggagagccccaggcgcgcagggcacgtggggtgcgggaagccccgttccccacgcgccggtgtgggcgaaggcgacccacgagggagcagggtgacccccgccaggggccgcgctgcacaggccgcctgcctgcgcgggcgccctgccaccctgtcccgggtgcctggcccttcgattctgaaaccagatctgaatcctggactccgggaggcccgtctctctggccagctcctcccgggcggcgatgcctggaaagcgatccttctcaaaggctcggaggagcagggcggtctgggatcc

SEQ ID NO: 33262 - DNA, 719 bp, Homo sapiens
gcggaggcgtccgggggcgcgggctggggaggtggagctgccccggcttggggttcccacgccgccccggcgacctggggaccccggccccagccccaccacggactcccctgggacgtgggtggcgcaagcaccccttggccctgcggccccgcttgagcgggcccaggctgtgccaccgcgcaggggcccggcaggccgtcgcgctgcgcgtcccggtcctcccggcttttgcccgggtgcggaggccaccgaggagcctgagggtgggagagcgccccgtccggaggagccggggcggcgtaggcgaaatccccgcgcgccggggcaggttgggagaccccctctgccggcgcggcctggctgggctgcagcgcgggggcggccctcgctgcctggctcacgaaagccccctgtgggagagccccaggcgcgcagggcacgtggggtgcgggmagccccgttccccacgcgccggtgtgggcgaaggcgacccacgagggagcagggtgacccccgccaggggccgcgctgcacaggccgcctgcctgcgcgggcgccctgccaccctgtcccgggtgcctggcccttcgattctgaaaccagatctgaatcctggactccgggaggcccgtctctctggccagctcctcccgggcggcgatgcctggaaagcgatccttctcaaaggctcggaggagcagggcggtctgggatcc

SEQ ID NO: 33263 - DNA, 544 bp, Homo sapiens
tgataaaattcaccattttaaaacgtacaattcagtggctttattatattcacaatgttgcacaaccatcaccactaagtccacaacgttttcattaccctaaaagaacctgtatccattaggaatcattccccattccttccttgtcccagtccctggcaaccactaatctactttctatctctattcagagcstgttgcatagcaaatattttctatcccgctttagaatggctaaatgaaattttgagatcatataacctatctattcatataagttttagctatgcttactatgcacctattatcattctgtgcatcccacttaatacagtttgtgcattcccccatgtcactagctatgcctctacagtatcgctttcaatggctgaaggaattccatcaaatagatattgcatagtgcatctaactaatccggtatagttggaatttacatttgaatactgagttttaaaaaatcttggaaccaagtttaaacatttgtgttttgcatttcaagaagtgatttcaaaaagaagccaca

SEQ ID NO: 33264 - DNA, 544 bp, Homo sapiens
tgataaaattcaccattttaaaacgtacaattcagtggctttattatattcacaatgttgcacaaccatcaccactaagtccacaacgttttcattaccctaaaagaacctgtatccattaggaatcattccccattccttccttgtcccagtccctggcaaccactaatctactttctatctctattcagagcctgttgcatagcaaatattttctatcccgctttagaatggctaaatgaaattttgagatcatataacctatctattcatayaagttttagctatgcttactatgcacctattatcattctgtgcatcccacttaatacagtttgtgcattcccccatgtcactagctatgcctctacagtatcgctttcaatggctgaaggaattccatcaaatagatattgcatagtgcatctaactaatccggtatagttggaatttacatttgaatactgagttttaaaaaatcttggaaccaagtttaaacatttgtgttttgcatttcaagaagtgatttcaaaaagaagccaca

SEQ ID NO: 33265 - DNA, 544 bp, Homo sapiens
tgataaaattcaccattttaaaacgtacaattcagtggctttattatattcacaatgttgcacaaccatcaccactaagtccacaacgttttcattaccctaaaagaacctgtatccattaggaatcattccccattccttccttgtcccagtccctggcaaccactaatctactttctatctctattcagagcctgttgcatagcaaatattttctatcccgctttagaatggctaaatgaaattttgagatcatataacctatctattcatataagttttagctatgcttactatgcacctattatcattctgtgcatcccacttaatacagtttgtgcattcccccatgtcactagctatgcctctacagtatcgctttcaatggctgaaggaattccatcaaatagatattgcatagtgcatctaactaatccggtatagttggaatttacatttgaatactgagttttaaaaaatctkggaaccaagtttaaacatttgtgttttgcatttcaagaagtgatttcaaaaagaagccaca

SEQ ID NO: 33266 - DNA, 791 bp, Homo sapiens
gggctgaattcagggaggatctcggtgatgaggatggctcagtccagaagagccaagcagactgtgtccctggaatagggtgagcggcagagactggcccacccacacccacaccgcactgcggggccctgctgtgcaacgggtccacacatcatcagccaggtgcccggcctgcctttgctcttcaacctcgctgccacagccactgagcttatacgagattttggattttgtgctttttgtcatttttatgaatcaacatctgtcaagcatcctggccttgaatgtttaggcgtgtgtgtgtgtgtgtgtgtgtgtgtgtctcactctgtcgcccagactagagtgcaatggggcaatctctgytcactgcaacctccacctcccaggttcaagcgattctcctccctcagcctcccaagtagctgggattacaggcgcccgccaccatgcgtggctaatgtttgtatttttagtagagacagggaacgtttaggctttaagtgatttggagctggttggtcttctaggcctaaacacctagagatcagctggccgctggcagcagcatgtgtagttggacacatgagctgatgctattttccactcccatcctgccccatccccatgcttcccctccctctggctgggcatccccactccctggcacccaggggtggcccatacatccctcccatagcctctattcccatcgggtctccacctaagggctttttcctctgtctacccttgcacaagtcctatcaccactcagatgctacttcccctca

SEQ ID NO: 33267 - DNA, 588 bp, Homo sapiens
cctctcggaaggccgggcgtggtggctcacgcctgtaatcccaccactttgggaggccgaagcgggtggatcacctgaggtcagaagatcgagaccagcctggccaacatggcgaaaccccatctctacgaaaaatacaaaaaattagccgggtatggttgtgggcacctgtaatcccaactactcaggaggctgaggcaggagaatcacttgaaccctgggggcggagattgcagtgagccaagatcatgccactgcattccagactggcaacagagtgagattccatctcaaaacatatataataataggaaaccactgcagtctaatgagccagatcctcacggtacctgcaatatgggtggagtattatccagggagcacagaagctggggaccaggggagacagctgggttcagtaaggatatcatcctgctccccatcactgcagcaggatttaagagtctcaggaagcactgggtgyggtggctcacacctgtaatcccagcactttgggaggccaaggtgggtggatcacttgaggctgggagtttgagaccaggctgaccaacatggtgaaaccccgtc

SEQ ID NO: 33268 - DNA, 613 bp, Homo sapiens
ccctgtctcctttgacaaggcctgtgagtttgctggcttccaatgccagatccagtttgggccccacaatgagcagaagcacaaggctggcttccttgagtgagtgacccacatcctataccctgtcagggcccaggactccctgccattgtgaccccagtgggcctgtctccattccaagcctgccccccactatttcttcttccgaggtaccagggtttgaccaacatagctacccttttagttgccatcatccattgtctcttctctgcctctggaatatgaatgtagttcagtatctctgcccctacccccatctctgaagcaagcatgtcrctcttttttgagattatctgaagaattttgctgcagtagccagagggaaaccgggtaaaattttccctatagggaacatgggttaaaagtctcacaagcctcatctgctggtgtttcttggaatgcagagtttggcgtggctttctcagcttcctaagtgcatgttcatccttctagaaagctctttctcctcttggttccctgaaatggtgctctagacccactttccctcagggactgagcctctaacttaattttcctcagtccctttccctac

SEQ ID NO: 33269 - DNA, 1699 bp, Homo sapiens
gttaccctttctcatagcattctattttctttcaaatcagtcattataattatttcarattattcatatacagtatattatttcagtattcagtttgtttaatttctctacctgaactagactgtaagctctgtacacaggaaccatgttggttttccacactactgtattttcaagtcctagtgcagtgatacttagcattcaataaagactttgagtaagtgagtgaatgaatgaatgaatggtgactgcttttagtatttttagaagtgcaggatgctatcaattaagcagcctttgtctagtgtgaggatgaggaaatgtttcttagaggacttgaaaatgagtaagaagggggtatggtattcagtatccaattttccttagagggcaagtaggatgaatatagaaaattttcctttgaatttagaaatgtgggagtcattcatgaccgtaacggggtcaattttaatagagtgaaggaatgcaattcagattccatttgcttgtgaaatgaattagcgagaaaacagagcaaggagcttttcccagaaaagtagatctcagacacttattgctggcttatttgtttgttcataggggagtatgataaaatgaactattaactatgctttaaatattttcactgtaacacaaaaaacaaaagtgcacaaaaacagtactgtagtagaggctaccagaaggacctggttagttgtcatctgtgagtttagctgccatatttatctttcacattgaaatattaaatgtgtaagaaagggtgaaaatgtactttagattggtttacagcttccacctaaatcatcagtcctcttattttgcaagaaattagagtactgaggaaatcatggtagattattcacagtgcaccagaaaccctggctgcctcttttccatgtcctttttgtaaagcatcttaatttctgtgaattttgtctcttatttatttttttttaactttcaggtgttggtaaatcatgcttattgctacagtttacagacaagaggtttcagccagtgcatgaccttactattggtaagttttataaaagggatgagaagcactaaaagttttggatagtttaaatggaaaatgctagaaggtccattctactagtgatgatgctaaaatcagtgaaactggatttgttgttacgctgtttaatctctgtcacttttttaaaaatatgtgtagtaaaaataaatattacctaactttgtagaagtggttaaagaagctactgctgaaagacagtagtttttaagatttcaattgtaattagcgatgaaacaatttaagagacagtatccaagcatggtaagagcagaaactttgactcagcttgctggaagttaaatcaagtctctgctactaacttgctgtgcaagccatttccccgtttcatgtctcagtttctctttctgttcaatgagagtagtagtaccaatcacatgaagttactgtgagcagtgagttagtaaatgtaaaccattcaagtgcctggcaatgtggaaagtgctctagactttctcataattattaactgagaaaaaataccactgggcattttgtattttcctcagttgtaaagagtaaatgaaatagttactggtaagaaatagtcaacaaatattagctgttattatttaaaatagtgattttccattgtattaatat

SEQ ID NO: 33270 - DNA, 1699 bp, Homo sapiens
gttaccctttctcatagcattctattttctttcaaatcagtcattataattatttcagattattcatatacagtatattatttcagtattcagtttgtttaatttctctacctgaactagactgtaagctctgtacacaggaaccatgttggttttccacactactgtattttcaagtcctagtgcagtgatacttagcattcaataaagactttgagtaagtgagtgaatgaatgaatgaatggtgactgcttttagtatttttagaagtgcaggatgctatcaattaagcagcctttgtctagtgtgaggatgaggaaatgtttcttagaggacttgaaaatgagtaagaagggggtatggtattcagtatccaattttccttagagggcaagtaggatgaatatagaaaattttcctttgaatttagaaatgtgggagtcattcatgaccgtaacggggtcaattttaatagagtgaaggaatgcaattcagattccatttgcttgtgaaatgaattagcgagaaaacagagcaaggagcttttcccagaaaagtagatctcagacacttattgctggcttatttgtttgttcataggggagtatgataaaatgaactattaactatgctttaaatattttcactgtaacacaaaaaacaaaagtgcacaaaaacagtactgtagtagaggctaccagaaggacctggttagttgtcatctgtgagtttagctgccatatttatctttcacattgaaatattaaatgtgtaagaaagggtgaaaatgtactttagattggtttacagcttccacctaaatcatcagtcctcttattttgcaagaaattagagtactgaggaaatcatggtagattattcacagtgcacyagaaaccctggctgcctcttttccatgtcctttttgtaaagcatcttaatttctgtgaattttgtctcttatttatttttttttaactttcaggtgttggtaaatcatgcttattgctacagtttacagacaagaggtttcagccagtgcatgaccttactattggtaagttttataaaagggatgagaagcactaaaagttttggatagtttaaatggaaaatgctagaaggtccattctactagtgatgatgctaaaatcagtgaaactggatttgttgttacgctgtttaatctctgtcacttttttaaaaatatgtgtagtaaaaataaatattacctaactttgtagaagtggttaaagaagctactgctgaaagacagtagtttttaagatttcaattgtaattagcgatgaaacaatttaagagacagtatccaagcatggtaagagcagaaactttgactcagcttgctggaagttaaatcaagtctctgctactaacttgctgtgcaagccatttccccgtttcatgtctcagtttctctttctgttcaatgagagtagtagtaccaatcacatgaagttactgtgagcagtgagttagtaaatgtaaaccattcaagtgcctggcaatgtggaaagtgctctagactttctcataattattaactgagaaaaaataccactgggcattttgtattttcctcagttgtaaagagtaaatgaaatagttactggtaagaaatagtcaacaaatattagctgttattatttaaaatagtgattttccattgtattaatat

SEQ ID NO: 33271 - DNA, 1699 bp, Homo sapiens
gttaccctttctcatagcattctattttctttcaaatcagtcattataattatttcagattattcatatacagtatattatttcagtattcagtttgtttaatttctctacctgaactagactgtaagctctgtacacaggaaccatgttggttttccacactactgtattttcaagtcctagtgcagtgatacttagcattcaataaagactttgagtaagtgagtgaatgaatgaatgaatggtgactgcttttagtatttttagaagtgcaggatgctatcaattaagcagcctttgtctagtgtgaggatgaggaaatgtttcttagaggacttgaaaatgagtaagaagggggtatggtattcagtatccaattttccttagagggcaagtaggatgaatatagaaaattttcctttgaatttagaaatgtgggagtcattcatgaccgtaacggggtcaattttaatagagtgaaggaatgcaattcagattccatttgcttgtgaaatgaattagcgagaaaacagagcaaggagcttttcccagaaaagtagatctcagacacttattgctggcttatttgtttgttcataggggagtatgataaaatgaactattaactatgctttaaatattttcactgtaacacaaaaaacaaaagtgcacaaaaacagtactgtagtagaggctaccagaaggacctggttagttgtcatctgtgagtttagctgccatatttatctttcacattgaaatattaaatgtgtaagaaagggtgaaaatgtactttagattggtttacagcttccacctaaatcatcagtcctcttattttgcaagaaattagagtactgaggaaatcatggtagattattcacagtgcaccagaaaccctggctgcctcttttccatgtcctttttgtaaagcatcttaatttctgtgaattttgtctcttatttatttttttttaaytttcaggtgttggtaaatcatgcttattgctacagtttacagacaagaggtttcagccagtgcatgaccttactattggtaagttttataaaagggatgagaagcactaaaagttttggatagtttaaatggaaaatgctagaaggtccattctactagtgatgatgctaaaatcagtgaaactggatttgttgttacgctgtttaatctctgtcacttttttaaaaatatgtgtagtaaaaataaatattacctaactttgtagaagtggttaaagaagctactgctgaaagacagtagtttttaagatttcaattgtaattagcgatgaaacaatttaagagacagtatccaagcatggtaagagcagaaactttgactcagcttgctggaagttaaatcaagtctctgctactaacttgctgtgcaagccatttccccgtttcatgtctcagtttctctttctgttcaatgagagtagtagtaccaatcacatgaagttactgtgagcagtgagttagtaaatgtaaaccattcaagtgcctggcaatgtggaaagtgctctagactttctcataattattaactgagaaaaaataccactgggcattttgtattttcctcagttgtaaagagtaaatgaaatagttactggtaagaaatagtcaacaaatattagctgttattatttaaaatagtgattttccattgtattaatat

SEQ ID NO: 33272 - DNA, 1073 bp, Homo sapiens
taaaatccgaatcgatgctggacgttaaaccagaccctccaatgctcctaaaagggcctaggtttgcccttaacaggtggaaggacagatgctggggggtccaggccctggggaagcagctggcttgagttggggaaggtctggagctacaggaaggggccctatcagctgctggccagtgctggatgggttggtctgtgcagtctcctgcacstctgcagctggaaagctgtgggggccactgtacgtccccggcactcagcacacgcagggcctggacctgccctgcctgtgttgaggtgtggcctccagggacggtgggcgtggcttccagagagcaccactcaccaaagttggactcgccgcccagctccttcccgtggcggatcatgcactcgcccagaagcccctccgactgcgggtagccggggttcttcacctggccccggatcttggacaccgtgttgagcatggtcagcttagcccgcgaggctgggataggatggcccaggtgggtgtgggctgtgaggcctgcactcctctgccctggcagactgcagcccccacatctcctccccacccttgcttcctgtgcctgtggacagcctaggccacacaaagcacagtggaatccccagagggtcccttccctgctcctgctagcctcaaaggagctggcagcgggtggagaggtgaccaagctcctcagggggcaaaacctcctccttccaagggctgctcctcttggaacgtggctatgacccctcatctggggggtgccagggaggaggcgcagcagtgatgtgcagcggggggtggttgaggccaaggctcccggggtgggtgatgagctgtgtcccttccgctgcccgcttgggtctgctcctggcagggcctgagtggacactgctgggtgtgcgtctgccccctgtccgtggcctcctatggagccagcatttgggttttccttggggaaaagcccgtctctcagccagggagacccagtcccaagcccaagaggtgaagtccaggccaggggcactggggaggggcggccaatacaaatggatccc

SEQ ID NO: 33273 - DNA, 447 bp, Homo sapiens
gggagggctgtgccccggttcacggtgctggcggcaccgagctgggcggtaaccccacgatgctggctcaccgccccaggtcctctgtgctgagctccaggcaggctcagggctcactcctcatcccccacgtgcccttggtcgccagattttcagcccacgtgacagtcctccggaaattcagaaacagccctaaaccacttcacacatgctgagatgctgtgcagcacactttcccatagccaaaaacactggaaaccacgtgcctgtcgatcataaggggatggggcaagagtgcaggagcgctcttctgtggaccaggatgcagtgagtgaagagagggggagagcggtaggcatcggtatgagatggttctgctacatgctaagtgaaracactgacataacaaacaatgcctatgacagaagcctgttgtgctttttattc

SEQ ID NO: 33274 - DNA, 577 bp, Homo sapiens
tatcactcactcctgccatgcctggactccaccacaccctgagcaggcctggagggcaccaccacgacagtcgtggccatgtcctccctgccttccccagatgggcttccccacttggtcaccagccagggcccagaacctcgaggttggaaacacctttggtggtcaactgggaggccaccccaacccaggtgtggggctcttctgcctctggggagacagatgggaggctgctgtcctgaagagctctccatagcttggggcgggagaccatttcgtttcttgccttttggaattaatgagcacagcaccagccactgctttagagggcaaggaactgtggtttggagaatgccatggctgacccaggccagggagtctgtgcattcatttaatcaagaatgctagcgagcacctactctatgcaggcatgcaccgggggcggggctgcaraggtgagggaatcacgcaggcccagtgtgggcgttctggtgggagacaggcgatgccaacacatccatgtgtcgtatgacaggtggtgccagctgctcgggagaggggagtgtcaagagggtgt

SEQ ID NO: 33275 - DNA, 548 bp, Homo sapiens
ttcctgccagatcagtttctctgagtctcgtgggatttaaytgaagttgacacagaatgactttaaaaccttccaagccaatggctaatgatgaaaatacatatgaaaattaatttgggggatcctgtgcagaggaaaacaaaatagttctattcaaccctcaaaggaaatgtccagaagtgaagatgaagttatctttcagagttccaatactcctaccccactacctgtttaaaatggacttttatgttacataatcctgaaaatgttaggagtcaaaattcctctagataaatgtggtacacatataccatggaatactatgcagccataaaaagaaaacaaaattgtatcctttgcaccaacgtgcataggaaatcttatcctttgcaccaacatggataggacatcttatcctttgcaacaaggtgctttcagaagcaggatgagcactgcaattgaaggctaagaggaaatggctcttggccaatttaactgatcagtctgtaagaaattaaaaggaacataaccagagagagatagggtat

SEQ ID NO: 33276 - DNA, 548 bp, Homo sapiens
ttcctgccagatcagtttctctgagtctcgtgggatttaattgaagttgacacagaatgactttaaaaccttccaagccaatggctaatgatgaaaatacatatgaaaattaatttgggggatcctgtgcagaggaaaacaaaatagttctattcaaccctcaaaggaaatgtccagaagtgaagatgaagttatctttcagagttmcaatactcctaccccactacctgtttaaaatggacttttatgttacataatcctgaaaatgttaggagtcaaaattcctctagataaatgtggtacacatataccatggaatactatgcagccataaaaagaaaacaaaattgtatcctttgcaccaacgtgcataggaaatcttatcctttgcaccaacatggataggacatcttatcctttgcaacaaggtgctttcagaagcaggatgagcactgcaattgaaggctaagaggaaatggctcttggccaatttaactgatcagtctgtaagaaattaaaaggaacataaccagagagagatagggtat

SEQ ID NO: 33277 - DNA, 548 bp, Homo sapiens
ttcctgccagatcagtttctctgagtctcgtgggatttaattgaagttgacacagaatgactttaaaaccttccaagccaatggctaatgatgaaaatacatatgaaaattaatttgggggatcctgtgcagaggaaaacaaaatagttctattcaaccctcaaaggaaatgtccagaagtgaagatgaagttatctttcagagttccaatactcctaccccactacctgtttaaaatggacttttatgttacataatcctgaaaatgttaggagtcaaaattcctctagataaatgtggtacacatataccatggaatactatgcagccataaaaagaaaacaaaattgtatcstttgcaccaacgtgcataggaaatcttatcctttgcaccaacatggataggacatcttatcctttgcaacaaggtgctttcagaagcaggatgagcactgcaattgaaggctaagaggaaatggctcttggccaatttaactgatcagtctgtaagaaattaaaaggaacataaccagagagagatagggtat

SEQ ID NO: 33278 - DNA, 1339 bp, Homo sapiens
cttttaaaattcactattagaagcatacattatttcattgagggtctcctaattctttcgggctcaaatattttaaggagctgtacaagttatgccattttttaagggtatggcgctttcattgagaccttaatgttctctttatatttttgtgttttttttagaatgttgtgttcagtagctctgtaattaatttctcttaatgaatggggaggacattcaaagaggcttaagtttctatcaaataaccagaaaaattagagaattttctgacccaaacagtcttttaaaagcactttccagagagttttttkttttttttttttttctgagatggagtcttgctctgtctcccaggctggagtgcagtcacactatctcgtctcactgcaacttccacctcccggcttcaggcaattctcctacctcagccttccgagtacctaggattacaggcacatgccacccagctaatttttgcattgttagtagtaacggggatttcgccatgttggccaggctggtcttgaagtcctgacctcaggtgatccacccacctcagcctcccaaggtgctggaattacaggcatgagccaccatgcctggcccagagagtttcaaatgcattgaaatatcagatttttaccacttatcttcactcttaggagaccactgaggggcagggagaaaggtagggaagggcagggagagagagagaaagagaggtactgtggggagagggttagagagaattgattctaagttggattttgtttcctgtgatagggtgtacatagtataccatccagaccacataatctctcttcttatcatctgtttctaatctttacctatcatctatttaagtttttacctgccttaatagagttgtctgttattaaactgtttataaacttggggatagtaaggaactttaaataacattaagtaagttcattataattctgttttagggctactcgtgggttttgaagctgtgtctccctgtagaattcttttttgagggggaggaagtagctcttttttccaccctacccctaaaactaacctttttgcataaacgacttaggcgttcatgccatgtgagcccctgaaatactgtagtctcatagctgccaactttcttattttctgtcacatttatcctatttccttgcagccaggttctatgccaatttcacgtttgtttattgctaccaagagtcgttatcaacctcagactcactccacatgtattgttgctagcttgctctttagttcttacctctggggcaggtcacattctctcctaatactagacagagcattttcaactttg

SEQ ID NO: 33279 - DNA, 1527 bp, Homo sapiens
aacatgaggatttcacagatttaaggtgcgaaaagtcactgggttctctaagaagtctgggattcttctgcaggaaaaataagtttgttgagaaaaaatgagttggaggaggctgttattgaagtgaagcagaattgtttttaccaatctgcttattacccactctgtagtgtggaaacaaattattcatgcacaaggtcctcttactgttcctggaatgcagtggaaagagaacagattagtttttctccctcagaacacaaccactagaaacatcctacctcagatgagatattgcctacttattttcaaaagacagtgaaaaaatgatggatgtaaatgtttgctacaaaatraatacatgctagaaacagaagcatttgggtcacagctatattagagctacctgtgttcccttgtcactgagattaaaacaaaaatgtccaatacaatcattcacagcatgggagaggggaagttgaaggatggaaaggccagtcataaaaggatttcagaatttcagtccataaggaagtggctttgtgcattgtctgttgctgtgtgcaagataagtctggagaaagaaaatatgcagtaacaagggctcctttgtccatctcacctctctagataccaagtttcagacatgttgcattttaattgaaaggttgatataattttttaaaaaagaaaacttgtggtgtttgaagtgacaaaggctgctgggacaaaaaagcagggaaagggaatttttttaaaaaaagcaaacaacaacaaaaacccacaaaaaacaaacaaaaaacagaggaagaagtcgaaacaccctgggttgtgactacttccaggaaggggctacaagaggcagttggaaattctatttgctttgcaactgtgagtttcccagcctgctccctttttacagtatattactttggttttggttcatgaagttatccctttctgttttctggaacagctatgtattttctttatctatcatctatctatctacctgcctatcatctatctatttactagtattttttctacctttctctatcaagaccttgggtgaagcaggatagaattccagtgtatgttcactctaccatttaaaacaagagctcttgtaggcattctctaacacatcataaacctgagctttctaaaacagggtgtggtaaactaccatgcatgggccatgtctgacacagtctgcgtttgtaagtaaagttgtaatgtgacacagccacatacatgtgttaatataatgtctctggctactttcatggtataatggaagagctgagcattgaagagggaccacatggcttggaaaacttaaaatatttaacatttagccctttgcagaaaatatttgctgactctgttttaaaagatctctgtttagaatgctacctattgccttctgcatagaatcacaactctaccacaatcgacacagcttcagccctgcttctatatccagcatcatctattatttctgctcctcctccttattttcct

SEQ ID NO: 33280 - DNA, 565 bp, Homo sapiens
cttctggaaaaataattttatgcactatagtttgttctttgtatttgaacgttttrctcctaataaaattgattttcttcttagatgtatcaccaccatccagattaagcatttgattccatttgtaagcctacccacatttatcccttgtccatccacaaagagagagacatgagaagtgagtatagagttagcgtcacctataactagctctcctaatatatcccagacagcttactaaccatagaataggtcaaattcttcctatagataatcttggatattgaccctcctgtcaatggacaagcggctgctcaacagcacctggaggtctatgaaatcctcttaggaacatgtggcttgttctgacacagcaaacagatctatgcaaggactcataaaatctgactgatttatcctaggcaaacactaggatattgccccctctggtccattctatgtggtgggggcacataacaggctattcttgcttttcatcagcgatgttcatggaaattgtcatgacttatttcattgtcaaaaggattgatttttcccataggaa

SEQ ID NO: 33281 - DNA, 660 bp, Homo sapiens
aacccactgccacattccttatgctaataaggctagccagcccttaatgtgtgtgcagatgagatcttactcaaactcattcacacagaagtacaggcatgtgtcacctaacaaccaggatacgacagggatacttccaagagatgtgttgtcaggcaatttcatcattgtgcagacatcatagagagcacggacgtaaatctaagtggcagaacctacagcacacctaggctatgtgggagagcctgggctcctgggctacaaacctgtgcagcatgtagcaactgcgacaccgtggaattatgtgtgtagctaatyatagaaagggtacagtaaaaatacggtataaaagatgttttaaaatgacacaggtgtatagagcacttcccgtgaatggagcttgcgggactggagtcgctgtgggagagtcagtgtgtggtgagtgtgagggcccagggcattactgtccactcgtatgtgactggcagtgtaataggtgtgttcacaccagcgtcaccacaaacgagtgataacgtgttgcactgtgacattacacgccgcaacctcactaggcaacgggaattttcagctgctttgtagtcttatgggaccaccgctggatatacagcctgtcattgacaaacttcgttatacaatgca

SEQ ID NO: 33282 - DNA, 489 bp, Homo sapiens
ccatcccaccccagacgtctgcggtgtctcccacacccaggtgctttgtgcctgtggattgcactacggtgatctcagcgcccccatcccaccccaaacgtctgcggtgtctcccacacccaggtgccttgtgcctgtggattgcactacggtgaatctcagcgcccccatcccaccccagacgtctgcggtgtctcccacacccaggtgccttgtgcctgtggattgcactacggtgatctcagcgcccccatcccaccccagacgtctgcggtgtctcccacacccaggtgccttgtgcctgtggattgcactacggtgatctcagcgcccccatcccaccccaracgtctgcggtgtctcccacacccaggtgccttgtgcctgtggattgcactacggtgatctcagcgcccccatcccaccccagacgtctgcggtgtctcccacacccaggtgccttgtgcctgtggattgcactacggtgat

SEQ ID NO: 33283 - DNA, 489 bp, Homo sapiens
ccatcccaccccagacgtctgcggtgtctcccacacccaggtgctttgtgcctgtggattgcactacggtgatctcagcgcccccatcccaccccaaacgtctgcggtgtctcccacacccaggtgccttgtgcctgtggattgcactacggtgaatctcagcgcccccatcccaccccagacgtctgcggtgtctcccacacccaggtgccttgtgcctgtggattgcactacggtgatctcagcgcccccatcccaccccagacgtctgcggtgtctcccacacccaggtgccttgtgcctgtggattgcactacggtgatctcagcgcccccatcccaccccagacgtctgcggtgtctcccacacccaggtgccttgtgcctgtggattgcactacggtgatctcagcgcccccatcccaccccaracgtctgcggtgtctcccacacccaggtgccttgtgcctgtggattgcactacggtgat

SEQ ID NO: 33284 - DNA, 489 bp, Homo sapiens
ccatcccaccccagacgtctgcggtgtctcccacacccaggtgctttgtgcctgtggattgcactacggtgatctcagcgcccccatcccaccccaaacgtctgcggtgtctcccacacccaggtgccttgtgcctgtggattgcactacggtgaatctcagcgcccccatcccaccccagacgtctgcggtgtctcccacacccaggtgccttgtgcctgtggattgcactacggtgatctcagcgcccccatcccaccccagacgtctgcggtgtctcccacacccaggtgccttgtgcctgtggattgcactacggtgatctcagcgcccccatcccaccccagacgtctgcggtgtctcccacacccaggtgccttgtgcctgtggattgcactacggtgatctcagcgcccccatcccaccccagacgtctgcggtgtctccsacacccaggtgccttgtgcctgtggattgcactacggtgat

SEQ ID NO: 33285 - DNA, 1215 bp, Homo sapiens
ggatccacagcccccagcccagagtgctggacaccacgcttcaggggaattggcgtgctgagctcacaccagagaggtcctgctagctgccagcctggggctcccccgcctgctgcccaccccttcaacaccgatagagggactcacaggcacgacggtgggaccttccactgcagacacaaagcacaccaccacctgaggtccagggttatgatttgaatcctaccaagtgcccatcaggcctttcccaggttgcggggaaaacaggaccccagcccccacacagtccctggccacctgctgctcctggagacttgtctccctgcctttaggaagggtttttgtgtgaaggtttttgcatgcactggtctgaacgcatgttcacagccctgcaaggtgggtttgattctcatccccatcttgcaggtgaaacaggttcccagagtctgagtagtttgccaaggccacacagccaggaaggggtgaaccaggactcaaacccaggtcctctgactgccrctttctctctctggaggtcggtacccccagtcccttccctcttggtctgtcggagactcagcagagacaccaggtgaaggctcagtaagctcaggtgcatgatggagacctggggtcttgtcactgtcctgccacctcatccgctggctttgaaaccatccgtgctacttcaggcttccccagaggtgtctaacctggccccaaaactcagccaccccaccctagcctctgggggctgaggcaagggctcctcttttctccacacagaatgggcaccctctgggggcctaaggtaagaggtggtctatttctaaaaggcctggtgtctagttaagctctgggtatcttcttagctttgcttttttgggggtctcattcagagaggagatttgacagcctctctgaagacacagaagtgaatggcaaagcgagaagaggctgtaccccccacctaccatgacttccttattaggcacatggggaatgtgaggcccagtgggtgaaaggggcctgaaggggcacagctgggacaagaacccagaactccagccccccagtccagggccctctactgcccaggctgtgcaaatggggctgggaccgaaagatggggacagtcaggctgggaggcgggcttactggccagccagcccaggggcagcacaggcactcgggcaggaactccccaggaagttt

SEQ ID NO: 33286 - DNA, 1215 bp, Homo sapiens
ggatccacagcccccagcccagagtgctggacaccacgcttcaggggaattggcgtgctgagctcacaccagagaggtcctgctagctgccagcctggggctcccccgcctgctgcccaccccttcaacaccgatagagggactcacaggcacgacggtgggaccttccactgcagacacaaagcacaccaccacctgaggtccagggttatgatttgaatcctaccaagtgcccatcaggcctttcccaggttgcggggaaaacaggaccccagcccccacacagtccctggccacctgctgctcctggagacttgtctccctgcctttaggaagggtttttgtgtgaaggtttttgcatgcactggtctgaacgcatgttcacagccctgcaaggtgggtttgattctcatccccatcttgcaggtgaaacaggttcccagagtctgagtagtttgccaaggccacacagccaggaaggggtgaaccaggactcaaacccaggtcctctgactgccactttctctctctggrggtcggtacccccagtcccttccctcttggtctgtcggagactcagcagagacaccaggtgaaggctcagtaagctcaggtgcatgatggagacctggggtcttgtcactgtcctgccacctcatccgctggctttgaaaccatccgtgctacttcaggcttccccagaggtgtctaacctggccccaaaactcagccaccccaccctagcctctgggggctgaggcaagggctcctcttttctccacacagaatgggcaccctctgggggcctaaggtaagaggtggtctatttctaaaaggcctggtgtctagttaagctctgggtatcttcttagctttgcttttttgggggtctcattcagagaggagatttgacagcctctctgaagacacagaagtgaatggcaaagcgagaagaggctgtaccccccacctaccatgacttccttattaggcacatggggaatgtgaggcccagtgggtgaaaggggcctgaaggggcacagctgggacaagaacccagaactccagccccccagtccagggccctctactgcccaggctgtgcaaatggggctgggaccgaaagatggggacagtcaggctgggaggcgggcttactggccagccagcccaggggcagcacaggcactcgggcaggaactccccaggaagttt

SEQ ID NO: 33287 - DNA, 559 bp, Homo sapiens
gaagaccaagatccttgttacattgaacgactcctaaatgagcagagatttccacctattcgaaacaatcacataaaatcccatcctggaaaaagcctgggggatggcactaaggctagggatagggtgggatgaagattatagttacagtaaggggtttagggttagggatcaacgttggttaggagtyagggatacagtagggtcaccggtaagggttaggggttaggggttagggttagggttaggggttagggttagggttagggttagggttaggggttagggttagggttaggttttggggtggcgtattttggtcttatacgctgtgttccactggcaatgaaaagagttcttgtttttccttcagcaatttgtcatttttaaaagagtttagcaattctaacagatatagaccagctgtgctatctcattgtggttttcaattgtaaccacattgtggtttcaatgtgtttacttgccatctgtagatcttctttggtgaggtgtctgttcagatgtgtgtgcatttttagttgggctgtttaacttattg

SEQ ID NO: 33288 - DNA, 580 bp, Homo sapiens
agccttcccaatatccatgtcctcttgtgtaaaatggaaatgtaaaagaagattggccccataaggcttctgtgaggatcaaaagagcctaagaatggaggtaaatggctatacacatggagccagcacctgaatagagacattgatcattgtgtttttttttctatgagaaaaggcttgagataacactcacagttcctgatgaggcttccttggcaaccagatatatttactgggaaaatcgatgtactcagatttccagtggccacaaaccagaacaaagcaaggtggtgccccaggccttgttccyttggcctggggcccagacccaaggtcatgcacagctgacagaagaacgagaggcttcagggacccaggctcatctcctgacatgctcaactcactctcacagttgatgtttttggaagtttgctgctcagcactgttgtcaaatacttagcagcccaacttggggcaagacagcagctggctcaccctacctgtggacagaggcagagcgggttctggagtgggcagggggatttgtcagcatctggattgtgactggtccagcatgccc

SEQ ID NO: 33289 - DNA, 568 bp, Homo sapiens
tttttctaatcyggctttgttaaaatcatcccattaacccccaaggctcagggtaaatccctatggaggaaaggtaagggctcacatcattcattttatgccaatattgggctatcctcagaacagttctaatcctctgacgctaaccaaggctccttgaaccaagttttcaaagctcagttctttcccatcttcagtcgagtgacttgcaaacatacccttgacaggtctagtctcagtcctgtagatgtttctgaatcccagggtaaaatgtcatttgggctgctcaggtagggatcctagaaatactcagatatattcataaatatagaaacagatgaacaggggtatgttcaaatttcatatcagcaagttttcaagatagttcagggttcccccccttaaatcctaaaactttaatattttaatctttggggtagaaggcttcctttatagaatattcttttctgattacaaatgtaatatatgatcatttagaaatgttcagaaatagaggaaatataaaatagagaaaataaaatcacctataacctccttcccagaggca

SEQ ID NO: 33290 - DNA, 568 bp, Homo sapiens
tttttctaatctggctttgttaaaatcatcccattaacccccaaggctcagggtaaatccctatggaggaaaggtaagggctcacatcattcattttatgccaatattgggctatcctcagaacagttctaatcctctgacgctaaccaaggctccttgaaccaagttttcaaagctcagttctttcccatcttcagtcgagtgacttgcaaacatacccttgacaggtctagtctcagtcctgtagatgtttctgaatcccagggtaaaatgtcatttgggctgctcaggtagggatcctagaaatactcagatatattcataaatatagaaacagatgaacaggggtatgttcaaatttcatatcagcaagttttcaagatagttcagggttcccccccttaaatcctaaaactttaatattttaatctttggggtagaaggcttcctttatagaatattcttttctgattayaaatgtaatatatgatcatttagaaatgttcagaaatagaggaaatataaaatagagaaaataaaatcacctataacctccttcccagaggca

SEQ ID NO: 33291 - DNA, 1314 bp, Homo sapiens
cacaccaaatgactccaaatagctgggattgggcacaggcattcataattgttttaaaacaccaggtgatgcaaatgagcacccagcatcgagaatcagtgtgccaagacccctttataacagacaccttgctcaacctgtcccttctttcacctgcacctatattccacccttgtatgcccacatacctttttgttatagttgacaatttccttaaacaggttctcctcttcctcatatttttgtcctgttcatacagttaccttattgacctgagaccacatataactggatagaggtaataattactcctgtaacaactgaccttagcaggcttttcccaagccttattgactctgtttttcactctttcacaaatatgtatccttaacatcatcatccacgattgagttaacctgtgatagtgttgctgtttttgactagtctcttagcaatcaagctaaatctcccactgaatctgtgtgttcctctacaaaccatatctgggtggaatgtaygtttttattgtgatataattaatatatcataaaagtcatcctcttaaagtatacaactcagtggtttttagtaattcacagtattgtgcaaccatcatcactatgtaattctagaacattctcattactctaaaaagaagccgcttacccattaaaagtcacctcattcctgcctcccactcgctgcaaccactaatctcttttgtctctatggatttgtctattttggatatttcctatacatgaatcattcaatatgtggtcttttgtgtctggcgtctttcgcttagcatattttcaaggttcatccacgttgcagcatttaccagtagtacttcattcttttttgtggccgaataattttccgttgtatggaggcaccgaattttggtcatccactcatcagctgacggatatttgagttgtttccaatttttggctattgtgaataatgccgctataaacattcatgtatatggttttgtgtgggcatatattttcatttctcttgggtaaatacccaggaatggagttgctagatcatatgcaaactctgttcaactttttgaggaactccaaattggttgtgaacattattttttgacctcaatgcagctttcctttacaggagggaggtggactgtacttgttagcgcgctgcaaatgattctcaggcatattaaacatttttctgtattctgttaaacattgtatgcgcagcaagaatgacgcctcatacagacctttcttgtcatttcgttttattatttcaaaatgtaagacaaatctgaaaaat

SEQ ID NO: 33292 - DNA, 1548 bp, Homo sapiens
acttgaacctgggaggtggaggttgcggtgagccgagattgcaccactgcactccagcctaggcgacagagcaagactctggcacacacacaaacagacacacacacacacacacacacaatattgtttagaatgttatagtttatagaacaactcatattccactcatgtctctccttgatctctttaggctgtcatcattgtatttctagaatgtaatctctttcaatgatgacctccactcttgccttgcacacatcaccaccaatagggaggcagataggtgaggaacccatgsacagatagagtagagcagtatcatttgggtaaggaatgtccatctttgtcctgcatagcttgagaccagtccaaaagagcacgatgttacattgattggaggcaagaaaggacatcaattaggagggtctattcacattatggagcaatagtctaggaagcccttggaggagataggcatgctcacccctgggggaccagtgatgtgaagcccaaggaggaggtggggtgaccattctgtgtgccagctgtgggaggcacacagcacaaatgtagcattgtagttcaggacaaggatagatgataaccgacatgtggctggcactcatggcacatggcttgcactcaagccctttggcaatgaaccgttgttaacccagagtcctgaaatcacccagtgtcctatgtaaatgagagttagtcacagtcagtgtgtcagcaccattctggcagcccagtctctgtgatcctgcaaaagaaatactgtgctggcccacagaaagcatcagctcaccagactgccctctggaaccagtcccagggcaatcctatagacaagagcctcagattttctcagaggatccgatcaacccctctcaggggattgagggaagatgtcaatcattggagagtgacccaacgaggtaaaatagggaccagggctcttataggtcctcatctggactcaggaagctccatctaggtagaaagcactgccagccctggtcccaaacactgaaaggagacatagaaaatattgaggtaggtgcttccaatgaccaggacccatatgggaccaggctggggagaggggaggccatgcccagatggtcctgtgggctagttcaagcctcaaaggggtatttagaagaatttttaggaaggaattccaaaatacagagcccttttgggcacaaagattggaacaagggtcctgcttgcctgggtctaaggcccacactggctttgattactaaccagttctcttgttgagaaatctaatgactaggctctaagtgagatttttactacattgctaaagtatctcccaaagtttgggaatcaggtgtctatgacagttcagttcctaggccatccacaggcccaatgctgtgtggacaggcactgggctgctaaatggatgcaccatctagaacagaattgtttcttgcacattccttagggaagtacatgcaagaccaatggtcaaaagaaattctcccaaagggtacatctctgaataagttgtgc

SEQ ID NO: 33293 - DNA, 1548 bp, Homo sapiens
acttgaacctgggaggtggaggttgcggtgagccgagattgcaccactgcactccagcctaggcgacagagcaagactctggcacacacacaaacagacacacacacacacacacacacaatattgtttagaatgttatagtttatagaacaactcatattccactcatgtctctccttgatctctttaggctgtcatcattgtatttctagaatgtaatctctttcaatgatgacctccactcttgccttgcacacatcaccaccaatagggaggcagataggtgaggaacccatggacagatagagtagagcagtatcatttgggtaaggaatgtccatctttgtcctgcatagcttgagaccagtccaaaagagcacgatgttacattgattggaggcaagaaaggacatcaattaggagggtctattcacattatggagcaatagtctaggaagcccttggaggagataggcatgctcacccctgggggaccagtgatgtgaagcccaaggagsaggtggggtgaccattctgtgtgccagctgtgggaggcacacagcacaaatgtagcattgtagttcaggacaaggatagatgataaccgacatgtggctggcactcatggcacatggcttgcactcaagccctttggcaatgaaccgttgttaacccagagtcctgaaatcacccagtgtcctatgtaaatgagagttagtcacagtcagtgtgtcagcaccattctggcagcccagtctctgtgatcctgcaaaagaaatactgtgctggcccacagaaagcatcagctcaccagactgccctctggaaccagtcccagggcaatcctatagacaagagcctcagattttctcagaggatccgatcaacccctctcaggggattgagggaagatgtcaatcattggagagtgacccaacgaggtaaaatagggaccagggctcttataggtcctcatctggactcaggaagctccatctaggtagaaagcactgccagccctggtcccaaacactgaaaggagacatagaaaatattgaggtaggtgcttccaatgaccaggacccatatgggaccaggctggggagaggggaggccatgcccagatggtcctgtgggctagttcaagcctcaaaggggtatttagaagaatttttaggaaggaattccaaaatacagagcccttttgggcacaaagattggaacaagggtcctgcttgcctgggtctaaggcccacactggctttgattactaaccagttctcttgttgagaaatctaatgactaggctctaagtgagatttttactacattgctaaagtatctcccaaagtttgggaatcaggtgtctatgacagttcagttcctaggccatccacaggcccaatgctgtgtggacaggcactgggctgctaaatggatgcaccatctagaacagaattgtttcttgcacattccttagggaagtacatgcaagaccaatggtcaaaagaaattctcccaaagggtacatctctgaataagttgtgc

SEQ ID NO: 33294 - DNA, 878 bp, Homo sapiens
ccaggtttcaaagtctgtatccctttatggttataaatccccaacattttagttccaaaacccataatgggctaaaaattaaaacctgtttgggctgagtgcggtggcttatgcctgtaatctcagcactttgggaggccgaagtgggcagatcacctgaggtcaggagttcgagaccagcctggccaacatggtgaaaccccatctccactaaaaatacaaaaaaaaaaaaaaattatctaggcatgttgatgcacacctgtaatcctaactactcgggaggctgaggcacaagatttgcttgaacctgggaggtggaggttgcagtgagccgaaatcatgccactgcactccaccctgggcgacagagtgagactctgtctcaaaaaccaaaacaaaaagaaacctgtctgaagcgttggcagaaaatttaaattgttcttcatacttttgaaagtaggggagaaaaagaattaggtctcagcaacatctatatcttgaaaatagccttaacatgtaacatcagaagcaagcaaaagaagaatttgatctacaaaacctggttttggtaatccattcaagtcagcattttaatggggctatgtacattttccgaaatgcttgcccacttctggccatgcttcactaatacccaagtcaccaagcagacagcactatctaaccaacaactggggccctctggtaaccagtgtccctgtaccagtaacacatgctgccaaagttctagggcttcaatcatgataataaaawttaataaaaaattgagcatcccagagcaacacagatagttttatgagggagacacagggctaatttaataagatggaacttattaaattccaggatgtaaaaaccct

SEQ ID NO: 33295 - DNA, 878 bp, Homo sapiens
ccaggtttcaaagtctgtatccctttatggttataaatccccaacattttagttccaaaacccataatgggctaaaaattaaaacctgtttgggctgagtgcggtggcttatgcctgtaatctcagcactttgggaggccgaagtgggcagatcacctgaggtcaggagttcgagaccagcctggccaacatggtgaaaccccatctccactaaaaatacaaaaaaaaaaaaaaattatctaggcatgttgatgcacacctgtaatcctaactactcgggaggctgaggcacaagatttgcttgaacctgggaggtggaggttgcagtgagccgaaatcatgccactgcactccaccctgggcgacagagtgagactctgtctcaaaaaccaaaacaaaaagaaacctgtctgaagcgttggcagaaaatttaaattgttcttcatacttttgaaagtaggggagaaaaagaattaggtctcagcaacatctatatcttgaaaatagccttaacatgtaacatcagaagcaagcaaaagaagaatttgatctacaaaacctggttttggtaatccattcaagtcagcattttaatggggctatgtacattttccgaaatgcttgcccacttctggccatgcttcactaatacccaagtcaccaagcagacagcactatctaaccaacaactggggccctctggtaaccagtgtccctgtaccagtaacacatgctgccaaagttctagggcttcaatcatgataataaaaattaayaaaaaattgagcatcccagagcaacacagatagttttatgagggagacacagggctaatttaataagatggaacttattaaattccaggatgtaaaaaccct

SEQ ID NO: 33296 - DNA, 580 bp, Homo sapiens
tgagatcccaggcagggccactatattttgggstggagaactcaaggccctgaagggcctctcagggggtgccaccctgtctctgtgcccctctgtaaggcagcccaggctccctgtgtgggcttggtgtctggtctctggttccccgggggcggggcatgttggtggctccttcctgagcccgctttctcccccatgtctttcagtgagctcttctgcccaggtggggcccatggccttacacgacataggtgagtgtatcctgttggggtcatgggccatgaatgaggcagcatggggccatttagggtcagccttcgggccactagagttttctcagggtgcgaccggggagggaacatttctccagtagggtcacttccttggaaatctgatcctaggagcacgcatttcttgaagtcctgcaaaggtgatggtggtccagacaggagagggttccttcagcccaacatagcgcagctcccagctgaaactcggaaggctggtcaggcctcgaggactgcccaggccacatgaggtgggcaacaggggctctggggcaacctgggggtcacgctgg

SEQ ID NO: 33297 - DNA, 1544 bp, Homo sapiens
acgcaagatgaggacccaccagagaaagcacgtggctctggaggcccccagggtttgatttctggtgtgtgcttggagagggcaccaggttgggcacccaccacgcccagggcaggctctgcgactgccaggtctgcattggctcctggtgtcagggccagactcattggttggccatgagcaggttggttgccctgacccatccccatggtcccagtgtggccctggggtttttcaggggagccggctcaagcagtggaggtgcgcttagggcctgcagtagggaacagcccaggcatcttgcctgagcccagtaacctgcttgccttgtctttccagggtttggtggccgggagggccaatgatgctctgcgtctgtgttggatcagtgttcttcatggattccatcacgtgggtatcccctacccaccttccccttgctcatacgtgaggccctggttggacacatgtccttctcctgtcaccccagatggtgagccttgaggaagacttgtattgggcccccacaggccccaggccagtgtccgtcagcctggtgctcacccccagtgygctgaagctcagaccctccgtggcaccctggtctcctgcactgagctgtggtgagcacattcaggttccgctggatgcatgcatggagaggggcttgcccttggttgggtcagtgatgagaaccttctattgtcctgaagagaggtgatgacttaaaaatcatgctcaataggattacgctgaggcccaacctaggtgagtatgttggaagaagacactgggatcccgagatctccaacagggcactgtattttgggttggagacctggaggccctgaagggcatctggaaggaggcccaaccctgtctctgtgctcttccttggggcagcccaggctacctctgcgggcttggtgttggtgctccagttccctggggccagggaacattgctggctccttcctgagcccccattcctcccttgtgtctttcagtgaacttttcctcccagatgggccccctggcattgactggcataggtgagtgcatcctgctggggtcatgggccatcagccaggccatgtggggtcgctgaggttcagcctttgggccacaagggttttctcaggcagccgacctgaattcccacctgggagagacgggttctccaggagggcagcttttttgggaattagacccaaggaggatacctgaagccctgcaggggtgacggtggtccaggcaggaaagggttccatcagcccgggcaaggcagctcctagctgacactcggtgttcgggtcagtccttgaggactgcctgaacacgagggggtccagaggggctctgggtgccacgggggtcacatgggagctctcagtccctagagtgtggtgtgtgaatggacccttagggttaggtcttggagataaaaggattgtgctccacccatggcctggaatgtgaccgtccctgttgagtaatgggccattccagtgggtctcctggagcctgatgggaggtggcgttgt

SEQ ID NO: 33298 - DNA, 807 bp, Homo sapiens
ccattacgtgggtccatagaggatgagcatgcgtgagccagcgcccccttcccacttcttctcatggagctgtgaggccctgtgtggacagctgtcttcctcttgtcccaccaggtggtgagcccggaggaggacttgcgttcggcccgctggtcccagtgtgtccggaattggtgggttcttggtctyactgacttcaagaatgaagctgcggaccctcgctgtgagtgttacagctcttaaggtggcatgtctggagtttgttccttctgatgttcggatgtgttcggagtttcttccttctggtgggtttgtggtctcgctggcttcaggagtgaagctgcagaccttcgcggtgagtgttacagctcataaaagcagtgtggacccaaagagtgagcagtagcaagatttattgcaaagagtgaaagaacaaagcttccacagtttggaaggggacccaagtgggttgccactgctggctggggcagcctgcttttattctcttatctggccccacacacatcctgctgattggtagagctgagtgatctgttttgacagggcgctgattggtgcgtttacaatccctgagctagacacaaaggttctccatgtccccactagattagctagatacagagtgttgacacaaaggttctccaagtccccaccggagtagctagatacagagtgtctattggtgcattcacaaaccctgagcttgacacagagtgctgattggtgtgtttgcaaaccttgagccagatacagagcgcggattgttgtatttacagtccctgagct

SEQ ID NO: 33299 - DNA, 807 bp, Homo sapiens
ccattacgtgggtccatagaggatgagcatgcgtgagccagcgcccccttcccacttcttctcatggagctgtgaggccctgtgtggacagctgtcttcctcttgtcccaccaggtggtgagcccggaggaggacttgcgttcggcccgctggtcccagtgtgtccggaattggtgggttcttggtctcactgacttcaagaatgaagctgcggaccctcgckgtgagtgttacagctcttaaggtggcatgtctggagtttgttccttctgatgttcggatgtgttcggagtttcttccttctggtgggtttgtggtctcgctggcttcaggagtgaagctgcagaccttcgcggtgagtgttacagctcataaaagcagtgtggacccaaagagtgagcagtagcaagatttattgcaaagagtgaaagaacaaagcttccacagtttggaaggggacccaagtgggttgccactgctggctggggcagcctgcttttattctcttatctggccccacacacatcctgctgattggtagagctgagtgatctgttttgacagggcgctgattggtgcgtttacaatccctgagctagacacaaaggttctccatgtccccactagattagctagatacagagtgttgacacaaaggttctccaagtccccaccggagtagctagatacagagtgtctattggtgcattcacaaaccctgagcttgacacagagtgctgattggtgtgtttgcaaaccttgagccagatacagagcgcggattgttgtatttacagtccctgagct

SEQ ID NO: 33300 - DNA, 807 bp, Homo sapiens
ccattacgtgggtccatagaggatgagcatgcgtgagccagcgcccccttcccacttcttctcatggagctgtgaggccctgtgtggacagctgtcttcctcttgtcccaccaggtggtgagcccggaggaggacttgcgttcggcccgctggtcccagtgtgtccggaattggtgggttcttggtctcactgacttcaagaatgaagctgcggaccctcgctgtgagtgttacagctcttaaggtggcatgtctggagtttgttccttctgatgttcggatgtgttyggagtttcttccttctggtgggtttgtggtctcgctggcttcaggagtgaagctgcagaccttcgcggtgagtgttacagctcataaaagcagtgtggacccaaagagtgagcagtagcaagatttattgcaaagagtgaaagaacaaagcttccacagtttggaaggggacccaagtgggttgccactgctggctggggcagcctgcttttattctcttatctggccccacacacatcctgctgattggtagagctgagtgatctgttttgacagggcgctgattggtgcgtttacaatccctgagctagacacaaaggttctccatgtccccactagattagctagatacagagtgttgacacaaaggttctccaagtccccaccggagtagctagatacagagtgtctattggtgcattcacaaaccctgagcttgacacagagtgctgattggtgtgtttgcaaaccttgagccagatacagagcgcggattgttgtatttacagtccctgagct

SEQ ID NO: 33301 - DNA, 913 bp, Homo sapiens
atcaacagcaaagttgatcaagcataagaaaaaaaaaatctgtgaaactgaagactggctatttgaaattattcatcagaggattaaaaaaaaagaatgaaaagaaataaagaaagcctacaggatgtataaaacaccatcaagagaactaatataaggattattggagtcataaaggagaagagagaaaagggtagaaaacttatttaagaaataatggctgaaaactctccaaatctaggaaaagatatgagcatccaggtatatgaagctcaaagatccccgtacaggatacattccaaaaagacttcaccaaaacacatgataatcaaactgtcaaaagcaaaatcaagacgatgaataaaccaccaatcactaagagggagacaggattcttatgttgtcattattatttacatataatttcagtaaatgttattggaaaatttataatgttttaaaaaaagaaatttgaaagcaccgaaagaaaagagactcatcacatacagggaacccttttaaggcattcaagagatttctcagtagaaaccttacaaaataggagagagtgggatgaactatacaagtgctgcaaggaaaaaaatgccaaccaacgctttacctggcaaatctgttcctcagaaatgaaggagagagaagaactttcctagacaaacaaaagctgaggcagttcatcaccactagacctgccttacaagacatactaaggggagttcttcaagctgaaatgatatggcaatagttagtaatatgaaatgataaacctcactggtaaaggaaagtacayagtcaaatttagaacactttgatactataatgatggtgtataaataattttactgtgctatgaaggttaaaagacaaaagtattaaaaaaaacccatagctgcaa

SEQ ID NO: 33302 - DNA, 414 bp, Homo sapiens
gaaatgtatttcctatggataagcacaggactactttataccacttaatccaagacccttttgctggtgaggaatccagcatttaaatttatgtatgtatatgataaagctagactttttccagatctgagactcaaagctctttgtattttcatttatactccagctcttttgaggagctttaaagtctagttacaaagacaggaaaaacaagaacggacatagtggctcacgcctgtaatcccagcactttgggaggctgaggccgagaccagcytggtgaatatagtgaaaccccgttatcaactaaaaatacaaaaattagcccggtgtggtggtgtgtgcctgtaatcccagctactcaggaggctgaggtaggagaattgcttgaacctgggaggcagaggttgcagt

SEQ ID NO: 33303 - DNA, 414 bp, Homo sapiens
gaaatgtatttcctatggataagcacaggactactttataccacttaatccaagacccttttgctggtgaggaatccagcatttaaatttatgtatgtatatgataaagctagactttttccagatctgagactcaaagctctttgtattttcatttatactccagctcttttgaggagctttaaagtctagttacaaagacaggaaaaacaagaacggacatagtggctcacgcctgtaatcccagcactttgggaggctgaggccgagaccagcttggtgaatatagtgaaaccccgttatcaactaaaaatacaaaaattagcccggtgtggtggtgtgtgcctgtaatcccagctactcaggaggctgaggtaggagaattgcttgaacctgggaggcagagrttgcagt

SEQ ID NO: 33304 - DNA, 1041 bp, Homo sapiens
catcccctttctctcggttcagtcctgagtgcctcgcgtcgggaggtcctggtggatcacgtggtggagttcagtacagcctggctgcagggcaagttccaaggcagaccgcagcacacacaggtctaccagaaagaacagtgccctgctggccaccaggtcatgaaggaggcgtttgggcccgaagatgggttacagaggctcacctggtggtgcccgcagtgccagccccagttgtcagaggagccagagcagtgccagttctcctaaggagctggtggtgctcctcayggaaccttgccgcttggggaacctgacgtctaagtgtccagaaaggaggatgtgggcagggacggggtacagaggatagtgtgggtcagaggtgccagtagtataatattcatctccctggagttatgttgaaggcagagttttcatagggttagattttttttatccttttctagttcagttaattcatcctgttgaattgcaccatcgtgaaagatgggaaaaatcgtgatgatgggtaaggggaaaacttcccggaaggcaatggggcaaggaaaaagaaagcctatgggaaatggctgtgctcccaacatagctttgcagatgatgtgggttttttttttttttttggttgtttgttttgagagagagtcttgctctgtctccctggctagggtgtggtggtgtgatcttggctcacggcagccttgccctccctggctcaagcagtcttcatctcagcctccagagtagctgggactacaggcatgtgatatgatgctcggctgatttttgtttactttttagagagatggggtcttgccatatttgccaggctggtttgaactcctacaactcaagcattcctcccaccttggtctcccaaaatgttgggaccacgggtgtgagccaccgcgcccagctagctcctgtgttttgtttttgttttgtaactttggttgatgttaaggccctccattttggaaagcaggaaaacaggatttttttttttttatcttgttccctgga

SEQ ID NO: 33305 - DNA, 527 bp, Homo sapiens
gaacctttaattaggggaaataaattggaaaaatacatttcccttcacttaacattatcttagtttctcttttttttttttttttttttwtagagatggagtcttgctctgttacccaggctggagtgcagtggtggcgggacctcagctagatgcagcctccgcctcctgggttcaagcaattctcctgcctcagcctgctgagtagctgggattacaggcacctgccactacgcccggctgattttttggtatttttagtagagacggggtttcaccatgttggcgaggctggttttgaactcttgacctcaagtgatctgctcgccttggtctcccaaagtgctaggattacaggcgtgagccactgcacccggcctttttttttttttttttgagggggggggtctcactccatcgtccaggctagaatgctgtggcctgaacatgactcactccagttttgacttccttggctgaagccatcctcccacctcggcttcctgatcctgagtagctgggactcc

SEQ ID NO: 33306 - DNA, 527 bp, Homo sapiens
gaacctttaattaggggaaataaattggaaaaatacatttcccttcacttaacattatcttagtttctcttttttttttttttttttttatwgagatggagtcttgctctgttacccaggctggagtgcagtggtggcgggacctcagctagatgcagcctccgcctcctgggttcaagcaattctcctgcctcagcctgctgagtagctgggattacaggcacctgccactacgcccggctgattttttggtatttttagtagagacggggtttcaccatgttggcgaggctggttttgaactcttgacctcaagtgatctgctcgccttggtctcccaaagtgctaggattacaggcgtgagccactgcacccggcctttttttttttttttttgagggggggggtctcactccatcgtccaggctagaatgctgtggcctgaacatgactcactccagttttgacttccttggctgaagccatcctcccacctcggcttcctgatcctgagtagctgggactcc

SEQ ID NO: 33307 - DNA, 632 bp, Homo sapiens
ctcttagaatgttagctactgctgttattatcagtattggaagtccagtgtttcttcctgtgggaagacgcagtcaaattttagtgttgtgaaagattctcaggctagctcacaaaagcctgccgactgtatgatgcagcctacctgtaacactgctggcctcttgactacccggagcctggtagcatgggactgctgctcacgatgggcagcagcctggcatgggggcggtgtctgttggcagctagggcgagcctctgccacttcacctgtgatcctgggcaagttccttatctgctttgtgtctccgtctcctcgtttgtaaagttagagctgagaggattaatttcgcacatataaagtacttagtgcctggtacagggtaagtattctgtaagtattagctatttggtctattttgttggagtaaagtgggttatagttaaaatcctaagatttttaaagtccctcaagttcaygtggacatctgcctaggtcctactatcctagaattcgcatgtcttatcacacaaataactgattcttccatatcttataaataaaggtttgatttagcaaagtcacatgttgtgtaatagctcgaagaagccctttttgtccacagttgccag

SEQ ID NO: 33308 - DNA, 1821 bp, Homo sapiens
ctctcatcatttctcatatcatccccattgtgcagaaggcagtgtcgtgcaacttaactaccccatcctcacgtgggaagtggcatcatctcagctcaccgcaacctctgcctcccgggttcatgcgattctctagcctcagcctcccgagtagctgggattacaggcgcccgccaccacgcctggcaaagttttttatttttagtagagacggggtttcatcatgttggtcagactggtctcgaactcctgacctcaggtgatccgcttgccttggcatcccaaagtgctgggattacaggcgtgagccaccatacttggcctcatctggcttttcttagatttcccttaaattactcaagattgagtctgcccacatagtggggacccagaccttgtctgtcacatctgcggctgagacaccttggagaagcacaatagaaaacactgggggtggctcatgccggtaatcccagcactctgggatgccgagttgggcagatgacttgctgaggccaagagttcgagacgagcctggccagtatggcgaaacccagtctctactaaaaatacaaatattagccgtgcacggtggtgcaagcctgtggccccagctactcaggaggctgtggcatgagaatcgcttgaacccgggagacagagtttgcagtgagccaagatcgtgccactgcactccagcctgggtgacagagtgagactctctcaaaaaccaaaaaaaagcaccagcatcttctctactaataacttgagaaggaaaaaataaaataaaaaaagaaagtaatacaaaaatgaaaagaaacaagtactgtacctcaagcggtgtcggcagccctgggcagcatgagccctgcggacgccagagaggccttcactctcccacttcccactgccccaaaccaacgcctgccactcacattacagcggtgcagaggagcaggcactcacctctggggtggcttgggcccacccaggaaggtaccacatagcctcttcaagtagctcatgtccacgttgtagaagttgtgcccggcctggaagagagtcacccactgactgaagggtctcccgggatggcggtggatgggcacgctgcccacacacgaagcccaacccagggaaaaccagaggccctacccaattcaagggcccaagggttggggggcactggggaacagcccagagtgacacacgggcaaagtgggtgtctcccctgatctgctcccatttgctgacaatcagagaccctctccagccctcaacatggctcactcctcattcttggttctcagtccgagggtcagggctgggcagagacaaagggaatcaggggcgggactgataaactgccactgtgccacggcgggcgtcacaggggctagctggttttgaacacttccgaagctcacttactcccccacacacctccacgtgcacacaaccatatattcatacacaagcacacacactcatgcacacacgtggggtatgggacaaaggagggaggcgtggtccagagccgacatgactcarggtcagggccatttttcaacagtccaggacaatgttctgtgggccacagtgagggctggcttcccattcctggagtcagtgtgcacagaccgacctgggaggggacatacataggacgcagccccacagcctacctgccacgtggtattccgtttgttgacatagttgaccagctcatccgacaggggatggaaagagggcctgctccgggcattggccaacaccagcaggcagcagagggaggcccagagctgccacatgttggaagcc

SEQ ID NO: 33309 - DNA, 1212 bp, Homo sapiens
tgccctagagcttggtctcctctgtctgaggtcaggttccccagaggtggggctccagagggaaattcttgtgcaagcagtttctcaggggccatgtgctgaggggaatggggagcaggaacagcctagaagctgagtgaggatgtggtctcagctggagaggaggctgatcgcatgggagctctgcagcagggatggcaatgccggggaggyggtcccgcctgaggccaggcccagctctttgcagccccatattaactacattggctgctggggagcctgagtgacgggggaagggggcagccagggagggtgcctaggccctgtggagggcttggtaaggcagaggctggggaggctgtgtgcctcaacattcacatatgggcttcggctgggcgtggtggcacatgcttgtagtcccagctactcaggaggctaaggcaggaggattgcttgagtcagggaggttgagactgcaatgagctgtgttcacaccactgcactgcggcctgggtgacaaagtgagaccctgtcacacacacagaaaaagagaatgtgggcttcaaagctgaattcaagtaagtcagggttcttccacttgtaatgaacaacttccttaacctcattgtctcaggttcctcgcctgagaaatgcgaggagaacggcgcctgctggtggcgtgggcttgccgatgaaatgagccattcacccatgcctctcagcacaggacctgccttgggccgcatagtgtgcattgtcagctgctgtcggtgctgggctagcggccgcgttgagacccagcagtcctcgggggttggcgagcttctgggaggaatgggtggaacgtgactgtcaggtacagagctacagagcaccccagcatgatggtgtatggtggcaggggagaacgactcaacagagatggagaaagactaagcccaaaggtgatcaacaacaagagtgaaggaggaagtggtcagctgtggctggggcaaaacaagcccagtaagttacattggcctgtgtttggtcatccagggacaaagtgacctttttagtgcctgtaggcccagcgcgttggggaagaatttagaatgcagtggggataggtgtgagaggagcgggggaagtgaagattgagttgagaccactggctggagaacttgaccgggaagggagggcagagagcagcatggggtgaggggagggaat

SEQ ID NO: 33310 - DNA, 494 bp, Homo sapiens
ttgcctgtaaattgcatcaccataaagctataaaaacagggtacatacagtctgggtggatcccaagatgtcttcagatggtggcctttgagagtcatgaggggctagggttggagctgaagcctaaagcatgacttttagctggtgcaggagtggcttccttctgtctcccactacaattcagaggatactcagggaaagatctggacatcctgtatgtggaaaggcggttgcgcacagtggaatggactcctaagtggcaggcaggtgacaaccgttgtctacttcacccaaggraagatttctccatggagcgtgttttataggttctgtctctccgagtcccctttgagaatataatgggatacattgcatccatgctgaattcctaagccccaggacctcagaatatgcccttatttggaaacagggtctttatggaggtacttaaggtacaatgaggtcactggggtggatcctacttcttttttttt

SEQ ID NO: 33311 - DNA, 890 bp, Homo sapiens
agctactcaggaggctaaggcaggaggattgcttgagtcagggaggttgagactgcaatgagctgtgttcacaccactgcactgcggcctgggtgacaaagtgagaccctgtcacacacacagaaaaagagaatgtgggcttcaaagttgaattcaagtaagtcagggttcttccacttgtaatgaacaacttccttaacctcattgtctcaggttcctcccctgagaaatgcgaggagaacggcgcctgctggtggcgkgggcttgccgatgaaatgagccattcacccatgcctctcagcacagggcctgccctgggccgcatactgtgcattgtcagctgctgtcggagctgggctagtggccgccttgagagccagcagtccacgggggttggcgagcttctgggaggaaagggtggaacgtgactgtcaggtacagagctacagagaaccccagcatgaaggagtaggtggcaggggagaaggactcaacagagatggagaaagactaagcccaaaggtgatcaacaacaagagtgaaggaggaagtggtcagctatggctggggcaaaacaagcccagtaagttacattggcctgtgtttggtcatccagggacaaagtgacctttttagtgccggtaggcccagtgggttggggaagaatttaggcggcagtgggcttaggcatgagaggagcggaggaagagaagattgagttgagaccactggctggagaacttgaccaggaagggagggcagagagcggcgtggagtcgggggagggaataggtccaatgagcgtcttaggatgaaggagttgtgagcactcagcacaggataagctgatacaaagaaagggatggaggatggatagactgacagatgca

SEQ ID NO: 33312 - DNA, 517 bp, Homo sapiens
ttgaaagttagggctgagggccgggcgcggtggctcacacctgtaatcccagcattttgggaggctgaggcgggggggtcacctgaggtcaggagttcgagaccagcctggccaacatggtgaaatcccgtccctactaaaaatrcaaaaattagctgggtgtgttggtggggcgcctgtaatcccagatactcaggaggctgaggcaggagaatcacttgaacctgggaggcagaggttgcagtgagctgagatcacgccattgcactccagcctgggtgacagaggaagacaccgtctcaaaaaaaaaaaaaaaaagagacagaaaagaaagttgggggccggggctggatgaaacttgaggggctgtgggcctggcatggggctgaggggagtgtgcaggagctgcctgccaaagcctggggcaaggatgataggaggtgctggggcccctgtggactgccctctgagaatctcgtgaggctgggtctgcacagctgtggttgtgtaacttccc

SEQ ID NO: 33313 - DNA, 517 bp, Homo sapiens
ttgaaagttagggctgagggccgggcgcggtggctcacacctgtaatcccagcattttgggaggctgaggcgggggggtcacctgaggtcaggagttcgagaccagcctggccaacatggtgaaatcccgtccctactaaaaatgcaaaaattagctgggtgtgttggtggggcgcctgtaatcccagatactcaggaggctgaggcaggagaatcacttgaacctgggaggcagaggttgcagtgagctgagatcacgccattgcactccagcctgggtgacagaggaagacaccgtctcaaaaaaaaaaaaaaaaagagacagaaaagaaagttgggggccggggctggatgaarcttgaggggctgtgggcctggcatggggctgaggggagtgtgcaggagctgcctgccaaagcctggggcaaggatgataggaggtgctggggcccctgtggactgccctctgagaatctcgtgaggctgggtctgcacagctgtggttgtgtaacttccc

SEQ ID NO: 33314 - DNA, 398 bp, Homo sapiens
aaaaatttcctgtcatgatgaaatgaatcaattaattacttattaattgtacttctattatgtggtgagcactttactaaaaagtcgtttttttgttgtttttttttttttkagaaaggggttgtaccaaagtaaaattagaaaaataaaaacaaggaaagcacatttctttgtctcaataaatcatgctcacaagtagattcttagaatttcagagctaaaaaggacctaaagcttcattgattctgaccttttttattttggatgagaactggactccacagggaagtgaggatccctggctcgcgatgatgtggcctgccagagtccttatgggaatgtctctctagatgcctcctcatagctgtgtatccatgagactcagtggaactttcact

SEQ ID NO: 33315 - DNA, 398 bp, Homo sapiens
aaaaatttcctgtcatgatgaaatgaatcaattaattacttattaattgtacttctattatgtggtgagcactttactaaaaagtcgtttttttgttgtttttttttttttgwgaaaggggttgtaccaaagtaaaattagaaaaataaaaacaaggaaagcacatttctttgtctcaataaatcatgctcacaagtagattcttagaatttcagagctaaaaaggacctaaagcttcattgattctgaccttttttattttggatgagaactggactccacagggaagtgaggatccctggctcgcgatgatgtggcctgccagagtccttatgggaatgtctctctagatgcctcctcatagctgtgtatccatgagactcagtggaactttcact

SEQ ID NO: 33316 - DNA, 454 bp, Homo sapiens
cctggttttggggctactgtggcccttagggatgggagcttggtctccttacaaatcccatccatgcgtcactacaaacagctctaataattcctgccctgcagtacctgtgcactttaccatatccacaccccccagcatcccaccccactggcaggggctgacagctctggtgctcttgcactctcgggcacatggccgcacacccagacccactcgctcatctcagactcataccacactcaggaaggcccctaactggtctaattcccagcagtggccttccccgcacccgcccctcgcccctccccgctctagcttcccgactttcgtggggaaggggcaccggaacgcagggcagctgagaaggaccgggcagaggagagcgacggsccctcccggtgtcagcttcctcgccgcagtcccattaatcacagtgccgcagtccagttgg

SEQ ID NO: 33317 - DNA, 903 bp, Homo sapiens
ctacagaaagcaccctatttctgaagcatccacctgctgggctctgattgagaggaatgggcaggggaggagaagaaaactccgtacccctacacaaggtgacagctaagtgtggcctacagcagggacatgtctgtctcctgtctgtctgtcctttatccattcagggtctctccactgatgggaaaatgtgtgcctgtccattggtgttggagaggtcctccatatcttatgtaagaattgggtasggggacagggggctggccttggaacaacccccccaaccccgaggactcattgagctgagtcacttggcctactcactccccccacctcctcagtctaggctcctagagaccctcctccccaacccagggctcctggagttacagtgccctttactgggtctctaagtccctaagtcaccaggtgatcctgcctctcccacagcagggaaagttttctgccccttttctgagacaaatgggaaggtagagggaacacttttggtactaggaatgcagaccccattggccccgccatggatcgcatcatgtcacacatccccttacatatttctcagccccctttccctactatatatccattgggtataccctgtgtccccctccccacgaccacaggcccatacacagccacttctctgacaattccatcggaataaaagacactcctcccatggtacacaccatctgcagcacgcagtcgtagcagagggatgccctcatcccatcacaggcactcactacagaggaacagttgtaaacacatactcatcttgttgcagaaaacacattcacttgcattctcactgacacatacatcctcacatgacaaaatccagttgtataaaatacccagactcccttcttttcctccaac

SEQ ID NO: 33318 - DNA, 1107 bp, Homo sapiens
aagactctcctcctctttttcctccgtagctcatgtttttcattgttctgcccccaacataaggtagaagattatgacacaatcttatctagcttttcaggttgccgttttctaaaaatgtttgtattatggtaactctagattccgtaagctcgacctcagtgagcgctgggcagacctacatgacctaaatgtgttaggaaattgatagcagagtaaagttatctgtgtgcagaattccctgctgccatgggtggtgcctggagcagacgacttccaaaccgcttgtaagaaagcatgaagaataagtcacctgcacttcagaggccaaattttaaacctgaaaagatytaaatatagaagtatatagaagttttaaaatagtgacaggcaggttttttagagcagaagctgtaaaccagcagcctgagggctaggtgggggcctgcagacaaattattttgtttggcctgtagggcttgttttctttctttctccctaccaccccccacacttttagccagtatttacaaactggagaatttaggaaaaaaatcattattggctgagtagaggcaatttctggaacctggcaatctttagagtttctctctctcacccgggctggaatgcagtagcacgatcacagctcacttcagccttgaactcctgggtccaagcaatgcccacttttccatcctgagtagctaggactgcaggcacatggcagcatgcttggctgatttatttttattttttgtagagacaaggtcttggggtgttgcccaggctgaacctggcaatcttatgaagaaacactttaaactctgaaggaaactttttaagtaatatagacacaatatttttgaaaagctcttaaattgctaaaaattaatgcaaagaatagaattgcttatagtagcccaagaggaaagcataaaattgaaactggaagaactttttgggtggtattaattggagttgtttttactttgtgcatttcactttctattccttctcggaaatgccagaagtacatttggtaccaggatgagaaattcctgttcctccttgttttcacacttgagatgtttgtggatggttatt

SEQ ID NO: 33319 - DNA, 1107 bp, Homo sapiens
aagactctcctcctctttttcctccgtagctcatgtttttcattgttctgcccccaacataaggtagaagattatgacacaatcttatctagcttttcaggttgccgttttctaaaaatgtttgtattatggtaactctagattccgtaagctcgacctcagtgagcgctgggcagacctacatgacctaaatgtgttaggaaattgatagcagagtaaagttatctgtgtgcagaattccctgctgccatgggtggtgcctggagcagacgacttccaaaccgcttgtaagaaagcatgaagaataagtcacctgcacttcagaggccaaattttaaacctgaaaagatttaaatatagaagtatatagaagttttaaaatagtgacaggcaggttttttagagcagaagctgtaaaccagcagcctgagggctaggtkggggcctgcagacaaattattttgtttggcctgtagggcttgttttctttctttctccctaccaccccccacacttttagccagtatttacaaactggagaatttaggaaaaaaatcattattggctgagtagaggcaatttctggaacctggcaatctttagagtttctctctctcacccgggctggaatgcagtagcacgatcacagctcacttcagccttgaactcctgggtccaagcaatgcccacttttccatcctgagtagctaggactgcaggcacatggcagcatgcttggctgatttatttttattttttgtagagacaaggtcttggggtgttgcccaggctgaacctggcaatcttatgaagaaacactttaaactctgaaggaaactttttaagtaatatagacacaatatttttgaaaagctcttaaattgctaaaaattaatgcaaagaatagaattgcttatagtagcccaagaggaaagcataaaattgaaactggaagaactttttgggtggtattaattggagttgtttttactttgtgcatttcactttctattccttctcggaaatgccagaagtacatttggtaccaggatgagaaattcctgttcctccttgttttcacacttgagatgtttgtggatggttatt

SEQ ID NO: 33320 - DNA, 1107 bp, Homo sapiens
aagactctcctcctctttttcctccgtagctcatgtttttcattgttctgcccccaacataaggtagaagattatgacacaatcttatctagcttttcaggttgccgttttctaaaaatgtttgtattatggtaactctagattccgtaagctcgacctcagtgagcgctgggcagacctacatgacctaaatgtgttaggaaattgatagcagagtaaagttatctgtgtgcagaattccctgctgccatgggtggtgcctggagcagacgacttccaaaccgcttgtaagaaagcatgaagaataagtcacctgcacttcagaggccaaattttaaacctgaaaagatttaaatatagaagtatatagaagttttaaaatagtgacaggcaggttttttagagcagaagctgtaaaccagcagcctgagggctaggtgggggcctgcagacaaattattttgtttggcctgtagggcttgttttctttctttctccctaccrccccccacacttttagccagtatttacaaactggagaatttaggaaaaaaatcattattggctgagtagaggcaatttctggaacctggcaatctttagagtttctctctctcacccgggctggaatgcagtagcacgatcacagctcacttcagccttgaactcctgggtccaagcaatgcccacttttccatcctgagtagctaggactgcaggcacatggcagcatgcttggctgatttatttttattttttgtagagacaaggtcttggggtgttgcccaggctgaacctggcaatcttatgaagaaacactttaaactctgaaggaaactttttaagtaatatagacacaatatttttgaaaagctcttaaattgctaaaaattaatgcaaagaatagaattgcttatagtagcccaagaggaaagcataaaattgaaactggaagaactttttgggtggtattaattggagttgtttttactttgtgcatttcactttctattccttctcggaaatgccagaagtacatttggtaccaggatgagaaattcctgttcctccttgttttcacacttgagatgtttgtggatggttatt

SEQ ID NO: 33321 - DNA, 1107 bp, Homo sapiens
aagactctcctcctctttttcctccgtagctcatgtttttcattgttctgcccccaacataaggtagaagattatgacacaatcttatctagcttttcaggttgccgttttctaaaaatgtttgtattatggtaactctagattccgtaagctcgacctcagtgagcgctgggcagacctacatgacctaaatgtgttaggaaattgatagcagagtaaagttatctgtgtgcagaattccctgctgccatgggtggtgcctggagcagacgacttccaaaccgcttgtaagaaagcatgaagaataagtcacctgcacttcagaggccaaattttaaacctgaaaagatttaaatatagaagtatatagaagttttaaaatagtgacaggcaggttttttagagcagaagctgtaaaccagcagcctgagggctaggtgggggcctgcagacaaattattttgtttggcctgtagggcttgttttctttctttctccctaccaccccccacacttttagccagtatttacaaactggagaatttaggaaaaaaatcattattggctgagtagaggcaatttctggaacctggcaatctttagagtttctctctctcacccgggctggaatgcagtagcacgatcacagctcacttcagccttgaactcctgggtccaagcartgcccacttttccatcctgagtagctaggactgcaggcacatggcagcatgcttggctgatttatttttattttttgtagagacaaggtcttggggtgttgcccaggctgaacctggcaatcttatgaagaaacactttaaactctgaaggaaactttttaagtaatatagacacaatatttttgaaaagctcttaaattgctaaaaattaatgcaaagaatagaattgcttatagtagcccaagaggaaagcataaaattgaaactggaagaactttttgggtggtattaattggagttgtttttactttgtgcatttcactttctattccttctcggaaatgccagaagtacatttggtaccaggatgagaaattcctgttcctccttgttttcacacttgagatgtttgtggatggttatt

SEQ ID NO: 33322 - DNA, 447 bp, Homo sapiens
tctctaaaagtgaacaggcagagcatgtctggttagttttggaaggggcgtgactaacaggtgatggagtgttgttcttactgttgaaagattttcttaaggggcaagtgttttattttctggtattcatgggacattgtaggggttaggatattttcagcttcatatgaaagaaacccactcaagttggcttaaacagcaaggacaaatacagtagttcccccttatccacaaagtatacatttcaagaccctaatgaatatctgaaattgcagatagtgttttttcctattcatacatacctatgacaaactttatttcataaattagatggtaagaaattaacaatgataataaaatagaacaattataaaaatatgctataataaaagttatgtaaatgtggtctgcctttgtytctcaaaacatcttattgtactgtagatc

SEQ ID NO: 33323 - DNA, 1677 bp, Homo sapiens
tcctgttccaagtggtcagaaaagatccttatctatgggctcagaacaagccctgggggtctccctaatcctatggggacctcatccctgccatctctggtactctgccagtcagatcccagataggaccatgctcctgaataagggaggggtctgggcctgccatctggagctgagcagctccatcctctgtgtacccaactggggagtggggcatccattcccatcacatccactggggtcacaggtgcttccccaaaagttgagcatccatagacctgggcagagtaggttatcagtgctactttcacgktgatgaagcctagtctgtggtcatatgcaaaggtgactgcctgcctaggtgacttagttcattaggaagtaccctgagtgtggaacttaccttagattcttgacctcatgatagggatggatgaagggttcttgtgttcccctgtaggatctgaatccagtttggccctgaggctggtgaatggaggcgacaggtgtcgaggccgagtggaggtcctataccgaggctcctggggcaccgtgtgtgatgactactgggacaccaatgatgccaatgtggtctgcaggcagctgggctgtggctgggccatgtcagccccaggaaatgcccagtttggccagggctcaggacccattgtcctggatgatgtgcgctgctcaggacacgagtcctacctgtggagctgcccccacaatggctggctcacccacaactgtggccatagtgaagacgctggtgtcatctgctcaggtgggccttcaagaacttgggctcactctcttggggtggagtttgctccaaaagaaactcctaattacattctgatctcctcactcaaagcttctatgttttctatgtttctgaagacttgtcagctctctgctaagaatccatatgtactcactgcctagtgttcctgtggtcacttaggacaggggatcaaactaaaacaacccagagtttttccccttcctgaggcaaggcaaggaagaggcagaagagaaaagtgccggctccccagggctccatttctcccctgctgagtagcacggtgtgagggtataatggatgcagcacagacagcaaggcaggggagggatcccctcactgcgaggaactctgaactaaagatgcttggctaaaagtgggttctcagctgagacccagtgaggaggtctggaaatagaggctcaagggttaggagtgcaaatgggtgtctgtttgtatcaggcctgggttgcgtggggttggagttcttgacctcagctcttctcagaacgctgctgagcattgcctgtgttctaggtctggtgaggggagggcagtccccatgaggccagccagacatggccttgtcattgcctgtgattggggcttgaagatcgcacaagggattttggctggagtggcttcctcagccttgctgactcaggaacacctaagatgtgcaagggagtgggttggtttaggtcaaccgggttaccctgggcagacacaatttgatcacctcagagctggcaatagtggacaggatctgcctcgaccccttacacggtgcatctctgtggggatgtgcatggcaatgtccctccctgtgtgataggaactaggatggactgagtgtcagactcgctcatttcttt

SEQ ID NO: 33324 - DNA, 1677 bp, Homo sapiens
tcctgttccaagtggtcagaaaagatccttatctatgggctcagaacaagccctgggggtctccctaatcctatggggacctcatccctgccatctctggtactctgccagtcagatcccagataggaccatgctcctgaataagggaggggtctgggcctgccatctggagctgagcagctccatcctctgtgtacccaactggggagtggggcatccattcccatcacatccactggggtcacaggtgcttccccaaaagttgagcatccatagacctgggcagagtaggttatcagtgctactttcacggtgatgaagcctagtctgtggtcatatgcaaaggtgactgcctgcctaggtgacttagttcattaggaagtaccctgagtgtggaacttaccttagattcttgacctcatgatagggatggatgaagggttcttgtgwtcccctgtaggatctgaatccagtttggccctgaggctggtgaatggaggcgacaggtgtcgaggccgagtggaggtcctataccgaggctcctggggcaccgtgtgtgatgactactgggacaccaatgatgccaatgtggtctgcaggcagctgggctgtggctgggccatgtcagccccaggaaatgcccagtttggccagggctcaggacccattgtcctggatgatgtgcgctgctcaggacacgagtcctacctgtggagctgcccccacaatggctggctcacccacaactgtggccatagtgaagacgctggtgtcatctgctcaggtgggccttcaagaacttgggctcactctcttggggtggagtttgctccaaaagaaactcctaattacattctgatctcctcactcaaagcttctatgttttctatgtttctgaagacttgtcagctctctgctaagaatccatatgtactcactgcctagtgttcctgtggtcacttaggacaggggatcaaactaaaacaacccagagtttttccccttcctgaggcaaggcaaggaagaggcagaagagaaaagtgccggctccccagggctccatttctcccctgctgagtagcacggtgtgagggtataatggatgcagcacagacagcaaggcaggggagggatcccctcactgcgaggaactctgaactaaagatgcttggctaaaagtgggttctcagctgagacccagtgaggaggtctggaaatagaggctcaagggttaggagtgcaaatgggtgtctgtttgtatcaggcctgggttgcgtggggttggagttcttgacctcagctcttctcagaacgctgctgagcattgcctgtgttctaggtctggtgaggggagggcagtccccatgaggccagccagacatggccttgtcattgcctgtgattggggcttgaagatcgcacaagggattttggctggagtggcttcctcagccttgctgactcaggaacacctaagatgtgcaagggagtgggttggtttaggtcaaccgggttaccctgggcagacacaatttgatcacctcagagctggcaatagtggacaggatctgcctcgaccccttacacggtgcatctctgtggggatgtgcatggcaatgtccctccctgtgtgataggaactaggatggactgagtgtcagactcgctcatttcttt

SEQ ID NO: 33325 - DNA, 1677 bp, Homo sapiens
tcctgttccaagtggtcagaaaagatccttatctatgggctcagaacaagccctgggggtctccctaatcctatggggacctcatccctgccatctctggtactctgccagtcagatcccagataggaccatgctcctgaataagggaggggtctgggcctgccatctggagctgagcagctccatcctctgtgtacccaactggggagtggggcatccattcccatcacatccactggggtcacaggtgcttccccaaaagttgagcatccatagacctgggcagagtaggttatcagtgctactttcacggtgatgaagcctagtctgtggtcatatgcaaaggtgactgcctgcctaggtgacttagttcattaggaagtaccctgagtgtggaacttaccttagattcttgacctcatgatagggatggatgaagggttcttgtgttcccctgtaggatctgaatccagtttggccctgaggctggtgaatggaggcgacaggtgtcgaggccgagtggaggtcctataccgaggctcctggggcaccgtgtgtgatgactactgggacaccaatgatgccaatgtggtctgcaggcagctgggctgtggctgggccatgtcagccccaggaaatgcccagtttggccagggctcaggacccattgtcctggatgatgtgcgctgctcaggacacgagtcctacctgtggagctgcccccacaatggctggctcacccacractgtggccatagtgaagacgctggtgtcatctgctcaggtgggccttcaagaacttgggctcactctcttggggtggagtttgctccaaaagaaactcctaattacattctgatctcctcactcaaagcttctatgttttctatgtttctgaagacttgtcagctctctgctaagaatccatatgtactcactgcctagtgttcctgtggtcacttaggacaggggatcaaactaaaacaacccagagtttttccccttcctgaggcaaggcaaggaagaggcagaagagaaaagtgccggctccccagggctccatttctcccctgctgagtagcacggtgtgagggtataatggatgcagcacagacagcaaggcaggggagggatcccctcactgcgaggaactctgaactaaagatgcttggctaaaagtgggttctcagctgagacccagtgaggaggtctggaaatagaggctcaagggttaggagtgcaaatgggtgtctgtttgtatcaggcctgggttgcgtggggttggagttcttgacctcagctcttctcagaacgctgctgagcattgcctgtgttctaggtctggtgaggggagggcagtccccatgaggccagccagacatggccttgtcattgcctgtgattggggcttgaagatcgcacaagggattttggctggagtggcttcctcagccttgctgactcaggaacacctaagatgtgcaagggagtgggttggtttaggtcaaccgggttaccctgggcagacacaatttgatcacctcagagctggcaatagtggacaggatctgcctcgaccccttacacggtgcatctctgtggggatgtgcatggcaatgtccctccctgtgtgataggaactaggatggactgagtgtcagactcgctcatttcttt

SEQ ID NO: 33326 - DNA, 1677 bp, Homo sapiens
tcctgttccaagtggtcagaaaagatccttatctatgggctcagaacaagccctgggggtctccctaatcctatggggacctcatccctgccatctctggtactctgccagtcagatcccagataggaccatgctcctgaataagggaggggtctgggcctgccatctggagctgagcagctccatcctctgtgtacccaactggggagtggggcatccattcccatcacatccactggggtcacaggtgcttccccaaaagttgagcatccatagacctgggcagagtaggttatcagtgctactttcacggtgatgaagcctagtctgtggtcatatgcaaaggtgactgcctgcctaggtgacttagttcattaggaagtaccctgagtgtggaacttaccttagattcttgacctcatgatagggatggatgaagggttcttgtgttcccctgtaggatctgaatccagtttggccctgaggctggtgaatggaggcgacaggtgtcgaggccgagtggaggtcctataccgaggctcctggggcaccgtgtgtgatgactactgggacaccaatgatgccaatgtggtctgcaggcagctgggctgtggctgggccatgtcagccccaggaaatgcccagtttggccagggctcaggacccattgtcctggatgatgtgcgctgctcaggacacgagtcctacctgtggagctgcccccacaatggctggctcacccacaactgtggccatagtgaagacgctggtgtcatctgctcaggtgggccttcaagaacttgggmtcactctcttggggtggagtttgctccaaaagaaactcctaattacattctgatctcctcactcaaagcttctatgttttctatgtttctgaagacttgtcagctctctgctaagaatccatatgtactcactgcctagtgttcctgtggtcacttaggacaggggatcaaactaaaacaacccagagtttttccccttcctgaggcaaggcaaggaagaggcagaagagaaaagtgccggctccccagggctccatttctcccctgctgagtagcacggtgtgagggtataatggatgcagcacagacagcaaggcaggggagggatcccctcactgcgaggaactctgaactaaagatgcttggctaaaagtgggttctcagctgagacccagtgaggaggtctggaaatagaggctcaagggttaggagtgcaaatgggtgtctgtttgtatcaggcctgggttgcgtggggttggagttcttgacctcagctcttctcagaacgctgctgagcattgcctgtgttctaggtctggtgaggggagggcagtccccatgaggccagccagacatggccttgtcattgcctgtgattggggcttgaagatcgcacaagggattttggctggagtggcttcctcagccttgctgactcaggaacacctaagatgtgcaagggagtgggttggtttaggtcaaccgggttaccctgggcagacacaatttgatcacctcagagctggcaatagtggacaggatctgcctcgaccccttacacggtgcatctctgtggggatgtgcatggcaatgtccctccctgtgtgataggaactaggatggactgagtgtcagactcgctcatttcttt

SEQ ID NO: 33327 - DNA, 550 bp, Homo sapiens
cgcgcggatcgtccatgcgctcctcgcgggcagaatgctgggcagcagcgtcaagagcgtgcagcccgaggtggagctgagcagcggcggcggcgacgagggcgcggacgaaccgcggggcgccggcaggaaggcggcagcggcggacggcagaggcatgctgcccaagcgcgccaaggcgcccggcggcggcggcggcatggccaaggccagcgcggctgagctgaaggtcttcaagtccggcagcgtggacagccgtgtccccggcgggccgcccgcctccaacctgcgcaagcagaagtcactcaccaacctctcttttctcacggactccgagaaaaagctgcagctttatgagcccgaatggagcgacgatatggccaaggcgcccaaaggcttaggcaaggtggggtccaagggccgtgaagctccgctgatgtccaagacgctgtccaagtcggagcactcgctcttccaggccaagggcagcccggcgggcggygccaagacccccctggctccgctcgcgcccaacctgggaaagccgagc

SEQ ID NO: 33328 - DNA, 972 bp, Homo sapiens
tttttttttttttccttccccctgatcctgtcttctgcttctctcccatgcctttgtgttgcccctagggtgtttctctactttccaccttccctctccatcctctctgctcctttagaccttggcagccaatcctgtacctccagcatctcgttgcctagcaaccggcttcctacctgccccaytgtgttagaatctccatgacaacaagtattgccaaaagagagaaaaaaaagttaggtggtagcaggaggtgatgagaccctttattttaggacatttgtgcagttttgccagcaataatttgctcactctcaggattccccagagggtgtcacaaatggactgaacccagacctcatgagataacaagtcacgagactgacagtctgtctgtgtgtggggatataaactctagcatagaggcattcatgtgaggggcaagaatgagagccacgggcattttttgtttagacagatgggactgggtcacatgatcccctttctgtgggtcagttcaggaaggcagcctgaatgagggaggattttttaatagttgcacaagtaaggtaaaggagaatactttccaataagccataggtgtgggtgcatctgaattgggccatgcctggccagctgcatctaggggagggctaaggagagggggaatgggagataccataaacaagatttggggcaacacagtctcctgcctaagcactgtgggggggtgtgagccccgtgagatccctgctctgtccatctccaggctgtggttggcctcagcagcctctgcatcccttctgctttgcctagagggagactgcagggaaaaagagggaaagaggaagtgggaaagaagtccagaccatgttagatttccaggtgcgtgggcttgtgttcacaatggggaccctggctctttcattcacagcctctgaaggcctgacatatattcaccacatggctatg

SEQ ID NO: 33329 - DNA, 701 bp, Homo sapiens
tgcctcagcctccccagtagctgggactacaggttcccgccaccacacccggctaattttttgtatttttagtagagacggggtttcacagtgtgttagccaggatggtctcgatctcctgacctcgtgatccacccgccttggcctcccaaagtgctgggattacaggtgtgagccaccatgcccagcctgtctgactttgtttatgtgaaattcaagaaagggctaaactatastgacagagtgagatgaatggttgcctcagacaagggatgtgatgttgtgggattgactgtaaatgtatagaaggaatgtaactcttgactctggtgatggttacagatatgtatgtcaaaattcataactgcatacctaaaatgaattttattttatgtaaattctatctcaatagtgttgattgtcaaaataagttaataaaggcagaaagtggctatcttcattactggatttaataatatgagggtctttgttaaccttcagaagataagttttggtgaaatggtaggtacaaagttgtgattgtattcaagagagaatggaggaaaaaggaatggatatactaagcacagacaattctttcaatactttctgtagaaaggaagatgaaaatgacatgatagcttaacagaataataagataaagggaagccttctaaagacatttgacaagcttgcatgca

SEQ ID NO: 33330 - DNA, 817 bp, Homo sapiens
aggaatatctctgcatttatttacgttttgtttcttttaactgtgtttctagtttttatgaatgcatatgtgtacctttttaaaaaatttatacttaagaactttaattttgaggcctgctgttgtaaatgatattgatttttttaaatactgtattccagctttcaaattccagttttatccatacataattgctgatacgtaggacatcaattgacttttgtccgttgaccatctactttgctttttatctctatccattttggtcaaggcaagggatggtaggctctctttcagttttaatttccaaaatcatggcatggaattatcagaacaatggattttcagagattcacggggaccgcagaccgcagcctatgggcaccactaaatcgtgagcgcctgagcatcctgtactgcccccaacggcctgtaggggcatgcaaacccacctttttggaccctcatgaggcccccatgttcyctgcgtagacatccggcacctccacagtgaggaccaagctttgttctcaggtttcacccaggaggtgctgctgtggctacaggacagctgggggccatgcccagggaggacccaaatctccttctcctcaggacccacctgggagaccctctgtggctaaggaacacctgggggtcgtgcccagggaggacccaagcctccttctgctcaggagggacctggggaagcaccctggcttcaggacacctgaaggtgaggaataaggttcctgtccatgccctgagtgcagaggagggaacgctgccatatgttttactttcctcatgttgttag

SEQ ID NO: 33331 - DNA, 543 bp, Homo sapiens
aaaataagaataaatgtgtttattcggccgggtgcagtggctcatgcctgtaatcccagcactttgggaggccaaggccggcagatcatgaggtcaggagttcgagaccagtctggacaacatggtgaaaccctgtctctactgaaaatacaaaaattagctgggcgtggtggctcacacctgtaatgccagctactcgggagactgaggaaggaatattgcttgaacccaggagacrgaggttgcagtgagccgagatcgtgccactgcactccagcctggatgacacagcaagactccatctcaaaaaaaaaaaaaagcgtttatccttattaagtgccttaaatgatttgggccaactatggtgttttttggtttttgtttttttttcaaaatgagattgtgaatggacaaacaatattaagtgagattatagaacctttttttctaggcaaatttagaaacagcttactcatttacctttaaattgaaagctttaaatgagcttttctttagtgtagtttgttgactagaagtaaaatc

SEQ ID NO: 33332 - DNA, 543 bp, Homo sapiens
aaaataagaataaatgtgtttattcggccgggtgcagtggctcatgcctgtaatcccagcactttgggaggccaaggccggcagatcatgaggtcaggagttcgagaccagtctggacaacatggtgaaaccctgtctctactgaaaatacaaaaattagctgggcgtggtggctcacacctgtaatgccagctactcgggagactgaggaaggaatattgcttgaacccaggagacggaggttgcagtgagccgagatcgtgccactgcactccagcctggatgacacagcaagactccatctcaaaaaaaaaaaaaagcgtttatccttattwagtgccttaaatgatttgggccaactatggtgttttttggtttttgtttttttttcaaaatgagattgtgaatggacaaacaatattaagtgagattatagaacctttttttctaggcaaatttagaaacagcttactcatttacctttaaattgaaagctttaaatgagcttttctttagtgtagtttgttgactagaagtaaaatc

SEQ ID NO: 33333 - DNA, 543 bp, Homo sapiens
aaaataagaataaatgtgtttattcggccgggtgcagtggctcatgcctgtaatcccagcactttgggaggccaaggccggcagatcatgaggtcaggagttcgagaccagtctggacaacatggtgaaaccctgtctctactgaaaatacaaaaattagctgggcgtggtggctcacacctgtaatgccagctactcgggagactgaggaaggaatattgcttgaacccaggagacggaggttgcagtgagccgagatcgtgccactgcactccagcctggatgacacagcaagactccatctcaaaaaaaaaaaaaagcgtttatccttattaagtgccttaaatgatttgggccaactatggtgttttttgktttttgtttttttttcaaaatgagattgtgaatggacaaacaatattaagtgagattatagaacctttttttctaggcaaatttagaaacagcttactcatttacctttaaattgaaagctttaaatgagcttttctttagtgtagtttgttgactagaagtaaaatc

SEQ ID NO: 33334 - DNA, 537 bp, Homo sapiens
gtattataagcttataggaccaccatcatatgtgtagtctgtcgttgaccaaagcattgttacatggcacatggctgtactttgtttctccaaccagtttacaccttaacattttcttctctagtcctcctcagtacctaacayagagccttgtgcagagcagctcctcagtgaatcaactgagtaaatgaaaggaactttccagtatagaccacgtactagcactgcaaaaagaacacagtctagggtaatttggaatgtatcgttttgaagaaacacagcttaaaagtcatttcatgtgtattgtcttcccagtgtctctgtgaggtcataggttgataggtatcctgtcattgttgaaaacagtctcataattgcccttggccacaaagtcagatcatacagccaagccatggtagagctagccttggaatacggctggtccagagtccagtgatctttccattccattgcattatccatatgacctttttttctcttaccagattgctctcgcgttagtcctcagacatgcca

SEQ ID NO: 33335 - DNA, 537 bp, Homo sapiens
gtattataagcttataggaccaccatcatatgtgtagtctgtcgttgaccaaagcattgttacatggcacatggctgtactttgtttctccaaccagtttacaccttaacattttcttctctagtcctcctcagtacctaacacagagccttgtgcagagcagctcctcagtgaatcaactgagtaaatgaaaggaactttccagtatagaccacgtactagcactgcaaaaagaacacagtctagggtaatttggaatgtatcgttttgaagaaacacagcttaaaagtcatttcatgtrtattgtcttcccagtgtctctgtgaggtcataggttgataggtatcctgtcattgttgaaaacagtctcataattgcccttggccacaaagtcagatcatacagccaagccatggtagagctagccttggaatacggctggtccagagtccagtgatctttccattccattgcattatccatatgacctttttttctcttaccagattgctctcgcgttagtcctcagacatgcca

SEQ ID NO: 33336 - DNA, 537 bp, Homo sapiens
gtattataagcttataggaccaccatcatatgtgtagtctgtcgttgaccaaagcattgttacatggcacatggctgtactttgtttctccaaccagtttacaccttaacattttcttctctagtcctcctcagtacctaacacagagccttgtgcagagcagctcctcagtgaatcaactgagtaaatgaaaggaactttccagtatagaccacgtactagcactgcaaaaagaacacagtctagggtaatttggaatgtatcgttttgaagaaacacagcttaaaagtcatttcatgtgtattgtcttcccagtgtctctgtgaggtcataggttgataggtatcctgtcattgttgaaaacagtctcataattgcccttggccacaaagtcagatcatacagccaagccatggtagagctagccttggaatacggctggtccagagtccagtgatctttccattycattgcattatccatatgacctttttttctcttaccagattgctctcgcgttagtcctcagacatgcca

SEQ ID NO: 33337 - DNA, 537 bp, Homo sapiens
gtattataagcttataggaccaccatcatatgtgtagtctgtcgttgaccaaagcattgttacatggcacatggctgtactttgtttctccaaccagtttacaccttaacattttcttctctagtcctcctcagtacctaacacagagccttgtgcagagcagctcctcagtgaatcaactgagtaaatgaaaggaactttccagtatagaccacgtactagcactgcaaaaagaacacagtctagggtaatttggaatgtatcgttttgaagaaacacagcttaaaagtcatttcatgtgtattgtcttcccagtgtctctgtgaggtcataggttgataggtatcctgtcattgttgaaaacagtctcataattgcccttggccacaaagtcagatcatacagccaagccatggtagagctagccttggaatacggctggtccagagtccagtgatctttccattccattgcattatccatatgacctttttttctcttaccagattgctctcgcrttagtcctcagacatgcca

SEQ ID NO: 33338 - DNA, 578 bp, Homo sapiens
aaatgtttttaatttcctagaattaaaaagtgccttggttcttgttatttgcttgacgtttttttgagackgagtctcactctgtcgcccaggctggaatgcaatggcatgatcttggctcactgccgcctccatctcctgggttcaggcaattctcctgccttagccttagcggggattacaggcatgcgccaccacacctggctaatttttgtatttttagtagagacagggtttcactgtgtcggccaggctggactcaaacttctcacctcaaacgatcttcccgcttccacctcctaaagtgctgggattacaggtgtgagccaccgcgcccagccgagaaaaacttttaattgcttataatggagatagttttttttctgtgtgtgcgtttgacttttgtgctcttataaacagctgactttataataaatactttattgctgactgaaatgtacctattaagttgtacctccaaagttgtatgtggaaacaagtgtgacttttcagttcattgatttttgtccaaataattttcattttaaaggtcttacaggtgaggagagtttaaatgc

SEQ ID NO: 33339 - DNA, 578 bp, Homo sapiens
aaatgtttttaatttcctagaattaaaaagtgccttggttcttgttatttgcttgacgtttttttgagacggagtctcactctgtcgcccaggctggaatgcaatggcatgatcttggctcactgccgcctccatctcctgggttcaggcaattctcctgccttagccttagcggggattacaggcatgcgccaccacacctggctaatttttgtatttttagtagagacagggtttcactgtgtcggccaggctggactcaaacttctcacctcaaacgatctkcccgcttccacctcctaaagtgctgggattacaggtgtgagccaccgcgcccagccgagaaaaacttttaattgcttataatggagatagttttttttctgtgtgtgcgtttgacttttgtgctcttataaacagctgactttataataaatactttattgctgactgaaatgtacctattaagttgtacctccaaagttgtatgtggaaacaagtgtgacttttcagttcattgatttttgtccaaataattttcattttaaaggtcttacaggtgaggagagtttaaatgc

SEQ ID NO: 33340 - DNA, 611 bp, Homo sapiens
gctctatcaatagtgcatttaagttaaggaatgttgcttttcttagaacaaatcatgcaaattgatgtagtcaaagtaactattgaaatcgaactaaatttctgtttctgttggtgagctttttgtatgtgatttttctttctttcctttcttttaaagtcaagaaagatgttcctccttcagctgtcacaagaccaatatttggtatactgggcacaatccatctggtggcaggtaagagaaaataagctaagatgggcaaagaaggtaattagcaaggtagttaaattgttaatattagagtgagtatacgatgaagtaatactttgtatcatgctttaagcagtaaatctcttggttaagtatttrtcattaatttttaaaagaaatactccccaaatggtaaaatttatcagcgtgagcttctattatttaaaaaaaagttttgtattttgttgtgtttcagttagagttgaaatccttagctagataattttcacaaatggagtatgtaaataaaatttttttttttttttttttttttgagttggagttttattcttgttgcccaggctggagtgcaatggcatgatctcagctcactgcaccct

SEQ ID NO: 33341 - DNA, 1027 bp, Homo sapiens
aggtgatgggacagaaggggccagggcagccactgttgttcactgctggaagtgtgccaggggactggaaggtgaacagcaatcccacctgtctcctagagactctgtcctccgtgtgtaggggaaagtaggggatgggcacacagggaggaatccagccctggggcttccttgaagccaagtgagcagccttctgtatttgttttcccacaaacagtctttgaaactggggcaagtgttgaaggcagaacagagtaaaagaagcagcttcatgaggccaaacccagtctctccaggtctaggtagtccagcacaggttctgggagtaaatgccagctttaccacttgatttctttggtacgaccttaactttttgccatcctttcactagtatttattgagaaccctctgcatattagggcatcaatgctaagcaaaaaatgggttcagtcaccttcctggaggttccaatcagtggaggagacaaatattaatccaacaaccagtacccccctacccctacccccacagaaagtgtcaaatgcccaagagatagatagtatataattagagagacttcactctctctggaaggtcagagaaggctttcctaaagaaatgataatggagctgaggtctggaagaagcataggagtttcctgaagagggtaggagggggcactgcacacagagggaacaggacagtcaaargcaggccatttggcaacaggtgactggaaggaactggaagaaggcccatgaggctgaagtacagagtgaatatgcagggtctaggcagaccatgcaagaatgtgggtttctcctaagagcaataggaagccttttgaggtgctcttagcagggaagtgagatgatcacacttatcgtttgagaagattactctggcagcacagtgaacaacgtattggaatggaaccaaggagcattcaggaggccagacagaaggtatcaggtatttgcctgtaaaatgggggtgatgagaatactatcttacaagctgttgcca

SEQ ID NO: 33342 - DNA, 542 bp, Homo sapiens
caatctgtgcggtggtcgtggttccgcttaattgcactgcaatgagaggattcaatccccatccccgactgtcgggatctctgcagcttccagagctggcaggggctgggagtgctgcctaggtaggtccctggagaagggagtggcaagaggattcggagtyaccgtgttcggagattggaagaaacctggacgaagttgagaaggcatcacttgtctgtatcgtagaagtaacaagaaaatttcagaaattggcaaccggcggatgtgcatcttcctttacctgcactgactggcattttgagttcttgaaaggagtggttggaagaagagaatgcagaatcttggacatggctctcatcctggaacagacctggagttcagaatttctcttactgtccgtgtgacggggcttactttgtttcctttttttcgatactcatttacattatggggtgaagaaggttgttgattgcaggagctcaagttacctcaaaaaaagtctgaaacctgttttttaactgtaatttgaagtttcaaaa

SEQ ID NO: 33343 - DNA, 1180 bp, Homo sapiens
aggctagggttagactaaccttgtacaatatatataatatattatattatagtcttatatagaataatactatatggaaagtcttattaagggacataaaacaagatctgaagtcgcggagagatagctcgtccttatagggaaatgcctaatctctcaagacagcagttcttccaatcttaatgtaaaagtttaatgtgattccagtgagattaccaggcgtcttatttcacgaactgaaagttcatagggaagaataaattcccaagaatagtcaagcaaaccctaaaaaagaacggtaattgtaaaattgcctgatgtgaaaatgataacttgtttccaaggcgcttaaatcaaatcaatatggtactgrcccaggaatggaaaagcgaatgggggaatcagggcactgagaaccagaacctagtctatgaggtctgatttgtgataagaatggtgtccaattcgggggaagggaccggttcccctcgtgagtgtgtcctgcacagagatgcccatcaggatggaaatgactcagtcctcaacatcaaaccagtgacagacacaaatgccaggggaatcaaaggcttaaacaataaagataataataataataataacaataatgatatttacatccagaaacttctaggttctgcaactgaggaatctgcaactgaggaaatgactttttttttttttttttttgagacagaatctcactctgtcacccagcctggagttcagtggcgtgatcttggctcactgcaacctccacctcccaggttcaagcaattctcctgcctcagcctcccaagtagctgggattacaagtgcccaccaccatgcccggctaatttttgtatttttagtagagatgggattttgtcatgttggccaggctggtctcgaactcctgacctcaggtaatctgcccgcctcagcctcccaaagtgctggggttacaggtgtgagccaccatgcccaaccaggaaatgatttttaataaggaatttagaagccataaaagaaagtcatttgtgctcagatagtgataaaagtattttcatggcaaaaacgatactttatgtcaagccaatataaaagtaatctattagtaaaatattttttaatgtaaatgacattacatgtgtgacattattatttgtaatatcccaga

SEQ ID NO: 33344 - DNA, 2246 bp, Homo sapiens
tcactggaaaaaggaattctgattgttcaaaagcacaggatatattaagggcctcatataatgcctggcacataagagacctcagcaaattacgggcattcatattatgtttatacagtgaaggcatcaaggttataagcattctcttttttcttttgggtagactgaagctcagagaggttgagtggcttacttaaagctgcacagctattagtaggcagatcaagattagagttcagaacttctcactccctgcccagtttctgctttctttaccctttgcctctttcaagttgtgggtctgccggccaggtgggaggtgctgtctgcaaagggcttccctttctctttggccactatctggctggggagaggcctcacctagatgttgttgaaggcctgttacagccgctttattggggattttctggcgatgagaacgtgtgaatgtcctggcctttagtcaactccctacacctctgagagtgtcagacaagagagcccatcacactggtgggattgcaatctttgcctctaccactgcttagctgcctttccttagggcaagttacttaatggttctgtgactcagtttccctgtttgtgaaaagtgaaggttaatagtacccaccatatagggctgttagaatggagtggaataattcatgtagaataagtatgtataacagtggctaaaacatagtcaggctgggcgcggtggctcacgcctgtaatcccagcactttgggaggccaaggcatgtggatcacgtgaggtcaggagctcaagaccagcctggccaacatggtgaaaccccgtctccactgaaaatacaaaaattagctgggcttggtggcgggtgcctgtaatcccagctactcgggaggctgaggcaggagaatcacttgaacccaggaggcagaggttgcagttagccaagatcacaccactgcactccagcctgggcaacagagtgagactccgtctcaaaaaaaaaaaaaaaaaaaatagccagttgcctagaatagaaccaactaacagtggttttatttttactgcaaaaaataaaaataaaaataggagtagtgcaagcactgggccacatcactacaaaacaagtgtatctcagcatctcccacgagaataccactcaggtcaaaacatgatatagtgaagtggggatgaaaaggatccaaccatgggcagaacctggggtctggtgccagtggagacagccccagtgtctagcatgagacacggggaatgttccgttggagggtgggtatgatgactctcctgaaagcttccctccctccagtccagatggcccctccatccctcaacgtgaccaaggatggagacagctacagcctgcgctgggaaacaatgaaaatgcgatacgaacacatagaccacacatttgagatccagtacaggaaagacacggccacgtggaaggtgagggcctttgcccaggsaggggagaaacactggggagggcgggagaagggaaagcaaccagaggcattccacctgcaaggcgtcgggcccttggcaggtgaccagtgagaggtagccactgggacgtggtgatcactaggctgtgtggtcagcaggtcactgtcctgtctcttggtgaagtaactgaggtttggaaaagtggcgtggcttggccaacgtgaacagctgaccctgagtccccaggcaacagaagaccctctgggcagggaggggttgaaaggccactgggaagaaggttttcaaaagtcatgaaagtttggggttatttcctcagaggaatctcatctggacacacatggaggctcagacagagctgcttctaatgagtcgggggtgcgcccaggccagggctcggtcccctgcctccacagagcccagaacagaaaccacagaaccaaccccacaccttcagtctagaaatggggcaactgaggctaggagggaggtgggccagtggtggagccaggagcgggccctggggtcctgaacccccattctcagggtccagagtccagtcggcctgcactgcgttcctaaaaaggccacaatatgggtgcaagctgccccagaagggctgggagctgagaaggctcaaaatagggtgggacaggtggcttcagggttctgggcctcagtgttgtcaatgtcaggggctgcactgacaggtggagtccccggtgccatccgaagtgctgtccgtgggtgggccctcagggaggatccac

SEQ ID NO: 33345 - DNA, 2246 bp, Homo sapiens
tcactggaaaaaggaattctgattgttcaaaagcacaggatatattaagggcctcatataatgcctggcacataagagacctcagcaaattacgggcattcatattatgtttatacagtgaaggcatcaaggttataagcattctcttttttcttttgggtagactgaagctcagagaggttgagtggcttacttaaagctgcacagctattagtaggcagatcaagattagagttcagaacttctcactccctgcccagtttctgctttctttaccctttgcctctttcaagttgtgggtctgccggccaggtgggaggtgctgtctgcaaagggcttccctttctctttggccactatctggctggggagaggcctcacctagatgttgttgaaggcctgttacagccgctttattggggattttctggcgatgagaacgtgtgaatgtcctggcctttagtcaactccctacacctctgagagtgtcagacaagagagcccatcacactggtgggattgcaatctttgcctctaccactgcttagctgcctttccttagggcaagttacttaatggttctgtgactcagtttccctgtttgtgaaaagtgaaggttaatagtacccaccatatagggctgttagaatggagtggaataattcatgtagaataagtatgtataacagtggctaaaacatagtcaggctgggcgcggtggctcacgcctgtaatcccagcactttgggaggccaaggcatgtggatcacgtgaggtcaggagctcaagaccagcctggccaacatggtgaaaccccgtctccactgaaaatacaaaaattagctgggcttggtggcgggtgcctgtaatcccagctactcgggaggctgaggcaggagaatcacttgaacccaggaggcagaggttgcagttagccaagatcacaccactgcactccagcctgggcaacagagtgagactccgtctcaaaaaaaaaaaaaaaaaaaatagccagttgcctagaatagaaccaactaacagtggttttatttttactgcaaaaaataaaaataaaaataggagtagtgcaagcactgggccacatcactacaaaacaagtgtatctcagcatctcccacgagaataccactcaggtcaaaacatgatatagtgaagtggggatgaaaaggatccaaccatgggcagaacctggggtctggtgccagtggagacagccccagtgtctagcatgagacacggggaatgttccgttggagggtgggtatgatgactctcctgaaagcttccctccctccagtccagatggcccctccatccctcaacgtgaccaaggatggagacagctacagcctgcgctgggaaacaatgaaaatgcgatacgaacacatagaccacacatttgagatccagtacaggaaagacacggccacgtggaaggtgagggcctttgcccagggaggggagaaacactggggagggcgggagaagggaaagcaaccagaggcattccacctgcaaggcgtcgggcccttggcaggtgaccagtgagaggtagccactgggacgtggtgatcactaggctgtgtggtcagcaggtcactstcctgtctcttggtgaagtaactgaggtttggaaaagtggcgtggcttggccaacgtgaacagctgaccctgagtccccaggcaacagaagaccctctgggcagggaggggttgaaaggccactgggaagaaggttttcaaaagtcatgaaagtttggggttatttcctcagaggaatctcatctggacacacatggaggctcagacagagctgcttctaatgagtcgggggtgcgcccaggccagggctcggtcccctgcctccacagagcccagaacagaaaccacagaaccaaccccacaccttcagtctagaaatggggcaactgaggctaggagggaggtgggccagtggtggagccaggagcgggccctggggtcctgaacccccattctcagggtccagagtccagtcggcctgcactgcgttcctaaaaaggccacaatatgggtgcaagctgccccagaagggctgggagctgagaaggctcaaaatagggtgggacaggtggcttcagggttctgggcctcagtgttgtcaatgtcaggggctgcactgacaggtggagtccccggtgccatccgaagtgctgtccgtgggtgggccctcagggaggatccac

SEQ ID NO: 33346 - DNA, 2246 bp, Homo sapiens
tcactggaaaaaggaattctgattgttcaaaagcacaggatatattaagggcctcatataatgcctggcacataagagacctcagcaaattacgggcattcatattatgtttatacagtgaaggcatcaaggttataagcattctcttttttcttttgggtagactgaagctcagagaggttgagtggcttacttaaagctgcacagctattagtaggcagatcaagattagagttcagaacttctcactccctgcccagtttctgctttctttaccctttgcctctttcaagttgtgggtctgccggccaggtgggaggtgctgtctgcaaagggcttccctttctctttggccactatctggctggggagaggcctcacctagatgttgttgaaggcctgttacagccgctttattggggattttctggcgatgagaacgtgtgaatgtcctggcctttagtcaactccctacacctctgagagtgtcagacaagagagcccatcacactggtgggattgcaatctttgcctctaccactgcttagctgcctttccttagggcaagttacttaatggttctgtgactcagtttccctgtttgtgaaaagtgaaggttaatagtacccaccatatagggctgttagaatggagtggaataattcatgtagaataagtatgtataacagtggctaaaacatagtcaggctgggcgcggtggctcacgcctgtaatcccagcactttgggaggccaaggcatgtggatcacgtgaggtcaggagctcaagaccagcctggccaacatggtgaaaccccgtctccactgaaaatacaaaaattagctgggcttggtggcgggtgcctgtaatcccagctactcgggaggctgaggcaggagaatcacttgaacccaggaggcagaggttgcagttagccaagatcacaccactgcactccagcctgggcaacagagtgagactccgtctcaaaaaaaaaaaaaaaaaaaatagccagttgcctagaatagaaccaactaacagtggttttatttttactgcaaaaaataaaaataaaaataggagtagtgcaagcactgggccacatcactacaaaacaagtgtatctcagcatctcccacgagaataccactcaggtcaaaacatgatatagtgaagtggggatgaaaaggatccaaccatgggcagaacctggggtctggtgccagtggagacagccccagtgtctagcatgagacacggggaatgttccgttggagggtgggtatgatgactctcctgaaagcttccctccctccagtccagatggcccctccatccctcaacgtgaccaaggatggagacagctacagcctgcgctgggaaacaatgaaaatgcgatacgaacacatagaccacacatttgagatccagtacaggaaagacacggccacgtggaaggtgagggcctttgcccagggaggggagaaacactggggagggcgggagaagggaaagcaaccagaggcattccacctgcaaggcgtcgggcccttggcaggtgaccagtgagaggtagccactgggacgtggtgatcactaggctgtgtggtcagcaggtcactgtcctgtctcttggtgaagtaactgaggtttggaaaagtggcgtggcttggccaacgtgaacagctgaccctgagtccccaggcaacagaagaccctctgggcagggaggggttgaaaggccactgggaagaaggttttcaaaagtcatgaaagtttggggttatttcctcagaggaatctcatctggacacacatggaggctcagacagagctgcttctaatgagtcgggggtgcgcccaggccagggctcggtcccctgcctccacagagcccagaacagaaaccacagaaccaaccccacaccttcagtctagaaatggggcaactgaggctagragggaggtgggccagtggtggagccaggagcgggccctggggtcctgaacccccattctcagggtccagagtccagtcggcctgcactgcgttcctaaaaaggccacaatatgggtgcaagctgccccagaagggctgggagctgagaaggctcaaaatagggtgggacaggtggcttcagggttctgggcctcagtgttgtcaatgtcaggggctgcactgacaggtggagtccccggtgccatccgaagtgctgtccgtgggtgggccctcagggaggatccac

SEQ ID NO: 33347 - DNA, 2246 bp, Homo sapiens
tcactggaaaaaggaattctgattgttcaaaagcacaggatatattaagggcctcatataatgcctggcacataagagacctcagcaaattacgggcattcatattatgtttatacagtgaaggcatcaaggttataagcattctcttttttcttttgggtagactgaagctcagagaggttgagtggcttacttaaagctgcacagctattagtaggcagatcaagattagagttcagaacttctcactccctgcccagtttctgctttctttaccctttgcctctttcaagttgtgggtctgccggccaggtgggaggtgctgtctgcaaagggcttccctttctctttggccactatctggctggggagaggcctcacctagatgttgttgaaggcctgttacagccgctttattggggattttctggcgatgagaacgtgtgaatgtcctggcctttagtcaactccctacacctctgagagtgtcagacaagagagcccatcacactggtgggattgcaatctttgcctctaccactgcttagctgcctttccttagggcaagttacttaatggttctgtgactcagtttccctgtttgtgaaaagtgaaggttaatagtacccaccatatagggctgttagaatggagtggaataattcatgtagaataagtatgtataacagtggctaaaacatagtcaggctgggcgcggtggctcacgcctgtaatcccagcactttgggaggccaaggcatgtggatcacgtgaggtcaggagctcaagaccagcctggccaacatggtgaaaccccgtctccactgaaaatacaaaaattagctgggcttggtggcgggtgcctgtaatcccagctactcgggaggctgaggcaggagaatcacttgaacccaggaggcagaggttgcagttagccaagatcacaccactgcactccagcctgggcaacagagtgagactccgtctcaaaaaaaaaaaaaaaaaaaatagccagttgcctagaatagaaccaactaacagtggttttatttttactgcaaaaaataaaaataaaaataggagtagtgcaagcactgggccacatcactacaaaacaagtgtatctcagcatctcccacgagaataccactcaggtcaaaacatgatatagtgaagtggggatgaaaaggatccaaccatgggcagaacctggggtctggtgccagtggagacagccccagtgtctagcatgagacacggggaatgttccgttggagggtgggtatgatgactctcctgaaagcttccctccctccagtccagatggcccctccatccctcaacgtgaccaaggatggagacagctacagcctgcgctgggaaacaatgaaaatgcgatacgaacacatagaccacacatttgagatccagtacaggaaagacacggccacgtggaaggtgagggcctttgcccagggaggggagaaacactggggagggcgggagaagggaaagcaaccagaggcattccacctgcaaggcgtcgggcccttggcaggtgaccagtgagaggtagccactgggacgtggtgatcactaggctgtgtggtcagcaggtcactgtcctgtctcttggtgaagtaactgaggtttggaaaagtggcgtggcttggccaacgtgaacagctgaccctgagtccccaggcaacagaagaccctctgggcagggaggggttgaaaggccactgggaagaaggttttcaaaagtcatgaaagtttggggttatttcctcagaggaatctcatctggacacacatggaggctcagacagagctgcttctaatgagtcgggggtgcgcccaggccagggctcggtcccctgcctccacagagcccagaacagaaaccacagaaccaaccccacaccttcagtctagaaatggggcaactgaggctaggagggaggtgggccagtggtggagccaggagcgggccctggggtcctgaacccccattctcagggtccagagtccagtcggcctgcactgcgttcctraaaaggccacaatatgggtgcaagctgccccagaagggctgggagctgagaaggctcaaaatagggtgggacaggtggcttcagggttctgggcctcagtgttgtcaatgtcaggggctgcactgacaggtggagtccccggtgccatccgaagtgctgtccgtgggtgggccctcagggaggatccac

SEQ ID NO: 33348 - DNA, 761 bp, Homo sapiens
ccctggaaacatggtctctggaatgctgggaacagcttctccaccctgactcttacagactcttgggaaacaaaaagccactaagaattgttcctcagctctgggctagggctttctagaaagatcaggcaggtatgtccctgctgaggttgctggctgagagttccttttttccaaagtgccccatcagtgggacttcaaaaggcaaaggtaatttaattctctgatgcctccaggagtgtgataagaataaggacgctgactgctgagtgctcacaccgtgcatcatcctgttgaatggtcagacaagccctgtgagggctgtggtcagttccacctcacagatgaggcagtgacaggagtaacttgcctgaggtcacaggctggtaaggggcagagtcaggagttgaacccagggagcttagctccaccagctccaccaggattgggtcctggttcagtgtgactgctgggtgtatttgtcagggatgcatttggctgcaagtaatagaaaacccaaccaactgtggctcaggcaaatcctgaatccgtgtttttctgacayaacacaaagttctggttactggtgatagttctgcagtgtgggggctgacatccttgtgattttccaggcctttctttcatggtcacaaggcagccggtgaagccgtgggtgtcatgtctgaattaaagacaggaaagaagggtgaagagtgacagggcatgtccacttggatcaggaaaatgagattttctttccg

SEQ ID NO: 33349 - DNA, 612 bp, Homo sapiens
taaacaactataaaattcaggaaaaatatataaaaaaataaatcttcagacattggacaaggggcaacaaaggacaataatcctgagagaaggggaaaaaaggggtaagccctacctctaagtgcactgcctagagagttttcaggctccagctctgggaaggggaagcaaagaagagcccactggtcttagttgggaaggcagagttgagagctcagagaagccaaagtgcctagagttcacaaggcaaaatactggaatggagacagctgcactgagagaaaactgtagagatcctcagagagtgccccgacctgaygtcttcagctgagaaccaatcagcacatccaggtgagaaaactacccaaggctgaggaaagaagcaccagaaagaaacaggcagaacactctccagagctcatagaaacaggaatggtcttctcacaagccagagtgaaaaaaaccttgtcatacataggacacaataaattctaaagtaaaaacacaaacccatgtaatacataggacgtaacagattctaaagttaaaaaaaaaacatgtaatacacaggacataatagattctaaagtaaaaaaacccatgtaatacata

SEQ ID NO: 33350 - DNA, 592 bp, Homo sapiens
tatatatgggattataggtgtgagccaccacacctggccctcaagttcttatttagggaaaatatatttacctgtaatggtgtaatctatatatccatttggttctcattcttcccctccaccctatacagaataaacatccctcctacaatccttcagatatgtgaagacaatcatcatgtcataactgttctataactgagccatcactaacaaagacttgtctcctaagcctatcagagccaggatgtttattcatccttgccactcagcaactgaaagatcctcatctctagagtagattggtggtggtacttctcagatgaaaagcctgtgatgtggttgtgttgtgttgatgagttactgctgaagacactagagccagagaggaaatcctaatcctagagcccaggcaagagccgcagatttgaattaagttggtggcagcaaaggcagggaccatgatgttttacctgcaccaaaaaacaaaaccaagaactttcaatttgtgtcaytgacattcaactgagcctgtaattttctagttatggccttgagctccattttactggcagctctgccactggccaga

SEQ ID NO: 33351 - DNA, 1191 bp, Homo sapiens
tttcctgtgacccactgtgatagttaacctaaagttcccaatgtcaattcaatttccaaaggtaaacttttaattttttccttaatacgtgttaatagttgagatactggtgtaaacaaaaccatctcatgtttgaagtaaaaactaatgcattttaaaaaattaacagatgtgctacacttgtatcagtggagagagtgaatattgagaataagatggatactatggaactggacctgatgatatcatctcaaggtttagaagcataaggaaaggatgtgtccagtgcttctgccaggtgcaacgccttttaggttgcccacagtaattggccatyaaactaaatctctaaagtcagctgaaacttcatggaggtagttgaaattccagggcttctggaggttctactatttgtcaaacacgggattaaatcatttaaaatagccatatgctttaaaatattgataataaacctaaataaatgtatcctcttttcccatacctctgacattttcaggcatccaccattctaggcaatggtgataaagacatgaacgttttcacagtccttgcctccaaaggtatcagctccgaaagtattgactacaacagtagaaagcctaacacctgtgctaactagagtttcaaccttgttctttaggctgtgtttttcaagccattttttttattatgtcaagtaatatggaatgattgagttattgtatctattacatgtatctattacattagagtgacagtttattgcagcattaccaaaaagctgtattctgacagaatgcatatcaacacacagcagcaaagatgaaacaactttttcctactcaaaaaaaatttacacaagaggtatgtgaaattcacatatgtatttaagtttggataaaaacttagctcacataaggaatatactgaaattgagcaaattatatatcacttaaaataatactacaagaagctaaaaaaaagtaagggtgtttgtacactcagaaaactgccacaaaacataccccagataaatcaacaaacctctttatgcctattttataaactattaccaactacgttgtactctgtttactcttctttcttgtgaggacaaaccttctcatcctactggctttgtcaccctgtctcgtaagcaagcccaaatcgcttctatcttttttttttttt

SEQ ID NO: 33352 - DNA, 1197 bp, Homo sapiens
atcatgccctcgctctgggctggagctggtcacagctgttttggcctcagcctccccctctgtagatgtgactagtgtgagggagagggtcattgactgcatgtagggctgaggaccatgctccgtgcagagtgcagagcccaactgctgccagactgggtctttgtaaatgaaatcaaatacaagccacatacaatttcacgtcctgaaaccatttttaagtgtagagttcagtggcattgggtacattcacaaagttgtgcagccgtcatcatcctcatttccagtcgctccccatagcccctccccagcccctggcacccccctttctgctttcagtctctatggacgtagccactccagggacttcgtagaagtgtagtcacacaggatttgtccttttgtgaccggctgatctcacttggctcatgtcctcaaggttcagccgtgttgtcacacatgtcagagtttcccgccttttaaagactgagtcatcctgcgtcgcatggctggcccatgtctcccttgtctgttcctccgtggacagtcccagctgcttctgcctytgccacgctctctccagcagtgccctcgctctgagccttgcttctgtgctgcctgtgactcatctgcccaggggctacgggcctctttgggggttcaggacaccctctttgacctgtcttctctgtcccctcctgctgcggggctcccggcggggctgtgtggggtctgatctgatttcttccctgttccccagcagatgtgcactgggtgccttcttcgaagatccacgtgagtcagtaatggacaatgttgcctttttgttagattttactcacttttcatttgaggcttaagccccaagggatttccagggctgcagcaattcctgggtcactgtccccaccttgtccctgattggatgaggaagcagggggtggggtgagaacttcaccagcgggattgggggctctttgctgagtacttgaggacagtgactggcctccactcacacccctaaaattgggtatgtcccctgagagagccagggacatggctcctgcagatcctggggagacacgctgaggggcagcaacctagcccccagccccactcgctcctgaccctcagcctccaggcagcctcaaggggaggatggctacaccccggaccccagagctcccaagaaagaac

SEQ ID NO: 33353 - DNA, 1289 bp, Homo sapiens
gcatgtgacaaagatctaatgtccaacactgataaggaacttaaacaaatttacaagraaaaaaaaaatctcattagaaagtgggcacaggacataaacagacacttcaaaagaagacacacatgcggccaacaagcatatgagaaaaagctcaatatcactgatcattagagaaatgcaaatcaaaaccacaatggcataccatctcacaccagtcagtatggttattattaagaagtcaacgccgggcatggtggctcacgcctataatcccagcacttcaggaggccaaggcaggcagatcgcatgaggtcaggagttccagaccagcctggacaacctggcgaaaccccgtctctactaaaaatacaaaaattagcccagcgtggtggcgggtgcctgtaatcccagctactcaggatgctgaggcaggagaatcgcctgaacccgggaggcagaggttgtagtgagccgagatcataccactgcactctccagcttaggtgacagagcgagactctgtctcaaaaaaaaaaaaaaatatttgaattttgtttaaatcgctaacacatactgggcatttaataacaaaaaaaaaaggacatgagattgtgatccttatgaaggtttgagaggcatttcactagggttcaacatacagcagtctgaaacatactgtaataatttaatccaatggctcatctacagcacctaaaaagattacagcagattctcattattcagtgtagttacggtctagaaagttccatgaacaaataaaaagttaggtttcagcaagctactggtcacacttttgtaagcttaccaacacctacttttgttgtatgtgtgcttatttaatatatattgttggccaggcacagtggctaacgcctgtaatcccagcactttgcgaagccaaggcgggcagatcatttgaggtctggagttcgagaccagcctggccaacgtggtgaaaccccgtctctactaaaactacaaaaaaaaaaaaaaaaaaaaaaaattagccaggcatggtggcgcatgcctgtagtcttagctacttgggaggctaaggcaggggaatcgcttgaacccaggaggcagaggttgcagtgagccaagactgcaccactgcactccagcctgagcaacagagtgagactctatctcaaaaaaaataataataataattaattaaatgaagaataaataaataatatacattgttcattcattaacattgaactcacagccaacggcactacagcactcacgcctgaatggag

SEQ ID NO: 33354 - DNA, 1273 bp, Homo sapiens
tatgcatacatcgatagagatacacatagatagatacagatacagatagatatcgatatagatatagacttggctatagagactgtgggttttttaatacagcaagaaaagagaaatatttatttacactggatcaacaaaggaactaggctattaactcagattgtaatagtctaaaatttttccaaaaattaggaaaaataaaatatttatatgaattttacctggaagtgtttcaaaatagtttgcaaagagtgagaatgaatttcaacttgtgagtaaagggtaaaactgaaatgaaagttaaaacaaatagtttccccctttcattattagatcatgatttattgaaaacaatcttgattgttaaatattgattaaaattaatgaaggtgcagagttcctaagaccttgtcatttgaacgttatgaatatcttcacaatgaaaacattattcgtgttatttatgtgagcttatatgtacttttccgcataaataatttgtactcttagttagaaacaaatgaactatggcttttggtgtggttttgtttatttatgaataaacattaagaactgtgcttatgaaattttcaggaaatatactgaatgctttaatgtactctgtaacattgcaacatataatttcccctcttccctcactttttgatgtagctatcattgctttgagtttttatttactggttattttaaagagcttaatggtctcatttacttaaaagtggaataatattggactactattttctttttttaacctctctaggtcattctacagtcattaccttccatcctatttgtttctgcagaatctacrtatgtaatacctataaattttcttttcatatttgttcactcatccacatcattaataaagttattaagtgaagacgaacccagcagtagcactcccttaccaccttgaaatattgtgctgatgtagaggttgtatctgatttaattcttcaaggattattaatgtatgtggaactagcttttcagccatggaaatctttagtacgtatttaagaaaaagtgatttaatgctcagtagggaaatgttgtccaaaacagtgcctgaaaaaagcaggtatgtgtccacattgggcacactgcaggtggggtatattgttgagataggaaggaaaaataaaatgtgagaaaaggcaagagacagaaaacaaagtgcaggtcgggaagagacaactttaacttccaccatttgttaatcaattctgaaatattttcattt

SEQ ID NO: 33355 - DNA, 911 bp, Homo sapiens
taacaggaggggagaaaatcaggccactttagaaacacttttatgactggcagttatccagtttgctactaaggtcaggtctaaaagattgttaagactagcctgtttctgtatccatgggtatcagctggggaagccaagttctgtctttgtgcttggcagccctccccaatgccatgtctctgctgatgacattggaatttcctccaaattaaacagcctgacagcagccatctgtaaagaaggcagcaaggttacgagtgatcactggctagtgccatttctgctgccaaccaggcaggcaaagcttctggcatgttcttgaccacctctgagaagagttgatgtttcctttggggtatcakagagtttctgccacccagctctgtttctctgcctcctggtgcctgcccctaattattgcatagttgtcactgatcctggtaacctgactgctggatttttgctccagaaacctacagtaaaggagaccgtaggccaccagaagccaggaggaaacatcaggctgcagtcaagggcactgccttctcccctccaggctgctgggctttgagggcagagaaataaaaagactgaaagggattagaggcctggagtccacaacaaagccctgtagtcatccaccaccttgcacagcctcttcctgccatgcttacaggtgaaaagtctagttcataggacacattgcttttccagaaccttccgctgccttccagagccagcattcttcctgaaaactctctcttgccagttgtttgccttcagagttacagtttaaaaaccaacacttaaactgatatcctctgaagaaaaaaacagataacaaattcatgaatcatagttatacttaaatttcctccgtcacagagaaacatgttatttttagaaag

SEQ ID NO: 33356 - DNA, 911 bp, Homo sapiens
taacaggaggggagaaaatcaggccactttagaaacacttttatgactggcagttatccagtttgctactaaggtcaggtctaaaagattgttaagactagcctgtttctgtatccatgggtatcagctggggaagccaagttctgtctttgtgcttggcagccctccccaatgccatgtctctgctgatgacattggaatttcctccaaattaaacagcctgacagcagccatctgtaaagaaggcagcaaggttacgagtgatcactggctagtgccatttctgctgccaaccaggcaggcaaagcttctggcatgttcttgaccacctctgagaagagttgatgtttcctttggggtatcatagagtttctgccacccagctctgtttctctgcctcctggtgcctgcccctaattattgcatagttgtcactgatcctggtaacctgactgctggatttttgctccagaaacctacagtaaaggagaccrtaggccaccagaagccaggaggaaacatcaggctgcagtcaagggcactgccttctcccctccaggctgctgggctttgagggcagagaaataaaaagactgaaagggattagaggcctggagtccacaacaaagccctgtagtcatccaccaccttgcacagcctcttcctgccatgcttacaggtgaaaagtctagttcataggacacattgcttttccagaaccttccgctgccttccagagccagcattcttcctgaaaactctctcttgccagttgtttgccttcagagttacagtttaaaaaccaacacttaaactgatatcctctgaagaaaaaaacagataacaaattcatgaatcatagttatacttaaatttcctccgtcacagagaaacatgttatttttagaaag

SEQ ID NO: 33357 - DNA, 422 bp, Homo sapiens
tgcataacactgattgctccattggttatcccctctcctgaatcaccaatctgattattaggctattcccatagacatgactgtccccacaaatccctagytaccagcctgtttcttttaaagcaattttgttgagagatctatcttcatatttcattttcaaagtccagtctggcttctgctgtcatcactcccccaaaactgtataaaattagcaatatcaggctaggagtggtggctcacgcctgtaatcccagcactttgggaagctgaggcggacagatcatttaagcccaggagttcaaaaccagcctagacaacatggcgaaaacccgttgctgcaaaaaatacaaaaaaattaactggacatgggggtgtgcgcctgtagtcccagctaccaaggaggctgaggtgggaggatc

SEQ ID NO: 33358 - DNA, 422 bp, Homo sapiens
tgcataacactgattgctccattggttatcccctctcctgaatcaccaatctgattattaggctattcccatagacatgactgtccccacaaatccctagctaccagcctgtttcttttaaagcaattttgttgagagatctatcttcatatttcattttcaaagtccagtctggcttctgctgtcatcactcccccaaaactgtataaaattagcaatatcaggctmggagtggtggctcacgcctgtaatcccagcactttgggaagctgaggcggacagatcatttaagcccaggagttcaaaaccagcctagacaacatggcgaaaacccgttgctgcaaaaaatacaaaaaaattaactggacatgggggtgtgcgcctgtagtcccagctaccaaggaggctgaggtgggaggatc

SEQ ID NO: 33359 - DNA, 590 bp, Homo sapiens
ttacccctgcccactcccactctgtccttttctattcatctttcaaggctccatttaaatgttaacccctctgggcagcctttgctcctccaccaggcatatctagctgctctttttccttcattcacatggcaccctgacttatgtgttttatagaytgtttctcaaattctagagcgcttatgaatcccctggtgatcttgttaaaatgcagaccctgactcaggagtagagcctgaaagtctacatttctaacaagttcccaggtgatgtttctgcattacattaggattcattatttacgtatttgtgtaaccccgagctcctccagggaagaagctatatcttttttttttttttttttttttgagatggcgtcttgctcttgttgcccaggctagagtgcagtggcacaatcttggctcactgcagcctctgcctcccggattcaagcaattctcctgcctcagcctcccaagtagctgggattacaggcgccaacgaccacgcctggctagtttttgtatttttagtagagacggggtttcgccatgttggccaggctactctcgaactcctgatcttgtgat

SEQ ID NO: 33360 - DNA, 614 bp, Homo sapiens
tcctaccctcagttcaagcttcttttttttttttttttttgagacggagtctcgctctgtcgcccaggccggactgcggactgcagtggcacaatctcggctcactgcaagctccgcttcccgggttcacgccattctcctgcctcagcctcccgagtagctgggactacaggcgcccgccaccgcgccyggctaattttttgtatttttagtagagacggggtttcaccttgttagccaggatggtctcgatctcctgacctcatgatccacccgcctcggcctcccaaagtgctgggattacaggcgtgagccaccgcgcccggcccagttcaagcttctttacgctgtataaaatgtccctcaaaattagaaataaaaaagtttccagatacttgatctgttattccttctttcttctaatcaattgaacacatacttactgcaggttcatatctgttctgggcactgtgcaaaaacactaggatatagcaaatgacaataatgtcctccagaaacttacagactgctggggagaaacagctaggtgatctgatgatttcaatgcaacgcgacatgctctaaaacagttagacctggccctgtgtttctga

SEQ ID NO: 33361 - DNA, 1101 bp, Homo sapiens
ttaccagtacgtgggtgagtacgtgggcccagcacagggacaggggcggggacagaaaggtcccttcgctgtcatggggctgtcacggggctgagcctggctcgaggaagcccccttttccagaagagatgtgaaacaagacatacaatttcacagattccagagctctgggtacggccggccaatgctgctccccacccaaccccacccctgggactcttaaaagagggaaacagaacaactgcctagccagacccaggggcccatgaccaagaagaaagcaagcaccatgactgggtccaggctggcccgaggggccatggtgcaggtagccacctgggatgtgcagaacaggagcagcaggacggtgtaggcagcaatcagggcagcagggggcgccgccagcaccacccatgccctgctgcgggcacccaggagggaccccaggtgaagccagatcctccttgttccgacgggagacagcgccctgcctggccctgctgcccatggtggcacaagctgtcagcacggatgaggctggagggctctgggaccccagtgaggtcaaccacactgtccagctcgtacctcccgtctgtcgggagcccctcccgccaccagctcactctggccctctgagtcagggccttccccatccagtcccccaagcccgccttggcctccaggtgactcacgaatttcagcatgttccagtcaaagacgtagtcataggagaagccctgccggtggaagaggttgcggaagagctgacgtaggtaagagtagtcgggcttgtcgtcaaaccgcagggagcggcagaagttgaggtatgttgagaattcggctggagggtgttgcagaggatagagaaggccactgtgaggcccacgctcccagaccccctgcagccagcactgtcctagccacccactgtccctagatacttccaatctgtgagaggcaagaaaaggaggcaacagagccatggccttccctatcctacygtgatgaaagcctagcctgcccgtgagcagagcctctgctgctttcagagcaagggaagacctgcgaacagtggccaggagcctctgccaggtagcc

SEQ ID NO: 33362 - DNA, 524 bp, Homo sapiens
ggccaaaaatgaagcatttcttatttagtagaagaaagaagaccagctaaacaggaagcataatgaactcctagctaagctcagaggaatttgtctgcaaaacccttacagaacaccacacaatcaaattatttgctccatagcaactttacccccaaagtgcagatctgtttggcttattggcttgagggctacctgcacaggatctaggcccatgttgtcttgccctctgatgctctgtctttccatttccacctgttttctgctgggggcacctcaatctggactgggcacctggaaggggccctctgtgagagcagctcatcatcacactgccayggatgactctaaacccaaagctgctgcattcccaaaacatcagaagcacactgctccccctggagttatgaataatgcaacaccatcagctacacagagctgcaatctgagacggctgcctgtgactcaacagcctacatacacaccctctcctggccaccttatccagaaccaggagataatcg

SEQ ID NO: 33363 - DNA, 524 bp, Homo sapiens
ggccaaaaatgaagcatttcttatttagtagaagaaagaagaccagctaaacaggaagcataatgaactcctagctaagctcagaggaatttgtctgcaaaacccttacagaacaccacacaatcaaattatttgctccatagcaactttacccccaaagtgcagatctgtttggcttattggcttgagggctacctgcacaggatctaggcccatgttgtcttgccctctgatgctctgtctttccatttccacctgttttctgctgggggcacctcaatctggactgggcacctggaaggggccctctgtgagagcagctcatcatcacactgccatggatgactctaaacccaragctgctgcattcccaaaacatcagaagcacactgctccccctggagttatgaataatgcaacaccatcagctacacagagctgcaatctgagacggctgcctgtgactcaacagcctacatacacaccctctcctggccaccttatccagaaccaggagataatcg

SEQ ID NO: 33364 - DNA, 1274 bp, Homo sapiens
tagttttattttttacatcccactgccttcacagagttctgccagagtcttcctcattcagagtgaaatttcaagggatcttgtaactttcctcgtcattttcatgaccagtccagtctaatggcaaagcttccgtcttccgtctaatttaaagcttctttccctccttcagctcagaacacctgcacgggcatagaagcttgaggtatggtggtggtgagctgggaagggtcaggtagggagaagagaagtagggcaaggacaacagagggcttttttgactggtagagttggaatccaccagcatgggtgtgaccagtatacatatgctatcttttttttttttttttctcatgggagtgctttggtggatttcttggagattccccattagtgactttggattggaagcccgggcatgggcgatgtcatatctggctggtggttgggtccccgctcagggtctctgtattcagtggtatgcctgtgggctctttctgctgcggtcggctcagccgctgcatcagaccttatgcatagggcacttttcatggaggctcacagacagctgcggcgtgcttgggtgccaatctaggctacagcaaactcacaatttttctactgttacctagcacactttctgtgtgtgcctgtgtgtgtgttttctcagctgcactgctatagccttttccattttgtctttaccctttagggtttgtcaggtatggatgatggttagtctctaggtccctcaaatccaaggagacacatgcaaagttctccacgtggcttcccaaatccccctacttctttgatgggagagccactgtttcttttccctaggagtgagggaaaggcaattatctaatgataattcttcaaaggggtcatgtttccaagaacatgatgaattcttagtttttaccaatayagcataaaggagagtgatgagaagactggtctcactgtttcacagtctgcccagcctctattctttttagcctttggaacctctactgacaatagataatgaatgtaccacttgacattctactcctattcacatctttagagatagcagtgttacctatgggaaggaaatattaaggcgagcaatccataagacactaaaagtagtgagacccataggagagagggaacttggaagaggatgtgtgctgggtttcaaggatgaagggcatatgtgggaaagaggaactgtgagggcactgagtgcctgactacagagtgagctggtcatgtagaggcccttg

SEQ ID NO: 33365 - DNA, 1089 bp, Homo sapiens
tggcacacctgctggctacaggcggcccttccttctcctcaggcgaggaggtgcccactctgagctgtgcagccgggagccagggtgagctgagcccccacctgctgccccagggagaccctgccacgtctctcttagcctaatttagctgtgcgtgaacctcccacctgccctgcactrgctggtccctaagctcactggggccaccttgtggctgctcacggcctcggccccgcaagttggggcctgatttccacactggctgcatttgtcctctgtggacttttgtcctctgtgccaccttcttgggtggcacccgccacatgctgtgctgagctacttctttttttttttttttttctgaggcggagtcttgctctgtcgcccaggctgcagtgcaatggcgctatctcggatcactgcaagctccgcctcccgggttcacgccattctcctgcctcagcctcccgagtagctgggactacaggtgcgcgtcaccacgcccggctaattttttgtatttttagtagagacggagtttcaccatgttggccaggctggtctcgaactcctgacctcatgatctgcccgcctcggcctcccaaagtgctgggattacaggcatgagccactgcacctggcctgtgctgagctacttctaaaccccacagagggccaggtgtgctggctcacacctgtaatcccaacactttgggaggccaaggcggatcacctgaggtcaggagatcgagaccagcctggccaacatggtgaaactccatctctactaaaaatacaaaaaattagccgggcatggtggcaggcacctgcaatcccagctactcgggaggctgaggtaggagaaccacttgaacctgggggtgggaggttgcagtgagccgagatcgtgccactgcactccagcctgggcgacagaatgagactcagtccccccgcaagaaaacgaaacaccatgggggaagacgcacattttcatgtataggctcttcctgtttcacgtgaggagcatcgcaggatgcatctgttctgacacgaggggcaccagatcgctggaggcaaaaagaggga

SEQ ID NO: 33366 - DNA, 576 bp, Homo sapiens
cagtgagtcaatggggattggcgtggggggtaaccccaagcgctcagcaactccttatctatggccagcagatcactctggggtgcctgcctccacttgcagctttaggaactacgttccttttctgctragaaaattgaaagcattcagaaagaaagatgtgaacatatgtagtggaggaataaaagaagtcagacaagcattagagctggggttttcaatcttgggttcactgacctttggaaaggcctatgtatggacactggggttgtgaaccctttgaaagtgcaatgcaaaattttgcgagaatggtgcacatggcctaaaaagaatttccttcaggggagaagttccctgaagttaccagaatctgtaaggggtccttggctcgggagggctaagaagcccgtgaatggatagaccatctcaaccagcaccctgtaaaaaggacagtgaccaactggtatgtgtttggagaaggcagtccagaagctgaggggacagagagcaaattttatgagaaggacttgtagaaagaaattgggccattcactttggataggagaggctgggaca

SEQ ID NO: 33367 - DNA, 528 bp, Homo sapiens
atgtggatttgagtcctggcttactaattctgtggcatcgggtaagtttctgagctcttcttagccaccatttctttttctataaattaaaaatgatcgtatctatctttaagggtggattagagggttaacagttcagcacccacagggtttttaataagtactttgaattttgagaatagacaagacctaaacattaaaktattttgcttttgactaataacgtctagattattagtctaataacttcaggctgttcatagtgatcttgctgggttgaggcaattgagactacattttgaaatcttttgttttgtgaagtatacaccacacataaaatgcataaaccataaatgttaatgaatttaatagtaatagacacctatgtaatcatcacgcagcatatcagctttaaaaaaaatttttaaagaactttttgatggtattatagcaaagatacagaaaagtgaacaaatcataaagtttataattcaaaataattttcacaaactgaacaacctcataacc

SEQ ID NO: 33368 - DNA, 612 bp, Homo sapiens
tgagaggcagaaactacaaaaggagagtaaagacaaacttgatagcaccattatttaaaaatacttctacacaaaacaattcacaaatgccaagtccgaaccaaacaaactggaatatttttgcaaaatagatgacattttagaaactttaaatccttattctgtactagcctttataaattaaagaataatagaaatatgggtaaacgatatgaatgggaaagtaaagycccccaaagaaagaaagaaatgcaaacacaaatagatatgagaaagttattaatttcagcaataatcaaagaaatacatactataacaataattattttcacccataaaatttcccttattttcaaaactaaaagttccagtggttgacagtggggaggttaaataccactccaaggtattttgcagataatttacattggttcagcttttctggtagcctttggcatatttatcacaagcatgaaagtcctcaagccctttaattcaaaaattttatttttaatgtattattctaaggaaattataatgaaagtaggcagacattgcaaggaaattgcttgtagtactgatcaatagtataacaaattgaaacataaactg

SEQ ID NO: 33369 - DNA, 1003 bp, Homo sapiens
ctaaccacaggtgagtgacaagctggctgtctacctccagggggctggtgatgagaagcaggtgggctcctttcctggcctcctaggacaacaggggggtgaggcggcaaggctgggaagctcaggggtcagttagggttgggctgggaattgggctggggcaagtcgccccaggggccctagtaggcctggccagtttccacaggcaggagtcccagcacagcagagtgctccccgagcttcatgcgacgctgggtggagaggctcacatttttggccagataatcaacagcagctggaaaaaagaagagactctcctagaaattgaggttctttttgtttattcttccattcactctatctacacccatccatccatccatccatccatccatccatccatccatccatccatycatttatccatccatccatccatccatccatccgtcctgtctactcatccattctttcatccatccatcatccttccatccttctatccactcatcttctcatccatccagccatatccatgcatccatgcctccatccacccatccattctgtccatctatccatccattcattcatttatccattctctgtccatccatccatccatttatccatccatccatccatccatccatccatccatccatccatccatccatccttccatctatccatctcttcatgaagctctttctctcacctcctctccaatcattcagcaaatatgtttaatgcattttgtgcccagctccctggtaagttcctagggaggcacagaagattacccacattgctgagcaaagaattaaccacccctcaacaagcccactacatatacctgctatggagaaggccctgtgaatccctgagtgcaggtaatgatgagggcaaggtctctctgccttctctatctgtgcccagcttacagataaggcaaagcaagacctttgctgcgaggccaaagtggctgtgggtgagctgaggg

SEQ ID NO: 33370 - DNA, 1003 bp, Homo sapiens
ctaaccacaggtgagtgacaagctggctgtctacctccagggggctggtgatgagaagcaggtgggctcctttcctggcctcctaggacaacaggggggtgaggcggcaaggctgggaagctcaggggtcagttagggttgggctgggaattgggctggggcaagtcgccccaggggccctagtaggcctggccagtttccacaggcaggagtcccagcacagcagagtgctccccgagcttcatgcgacgctgggtggagaggctcacatttttggccagataatcaacagcagctggaaaaaagaagagactctcctagaaattgaggttctttttgtttattcttccattcactctatctacacccatccatccatccatccatccatccatccatccatccatccatccatcyatttatccatccatccatccatccatccatccgtcctgtctactcatccattctttcatccatccatcatccttccatccttctatccactcatcttctcatccatccagccatatccatgcatccatgcctccatccacccatccattctgtccatctatccatccattcattcatttatccattctctgtccatccatccatccatttatccatccatccatccatccatccatccatccatccatccatccatccatccttccatctatccatctcttcatgaagctctttctctcacctcctctccaatcattcagcaaatatgtttaatgcattttgtgcccagctccctggtaagttcctagggaggcacagaagattacccacattgctgagcaaagaattaaccacccctcaacaagcccactacatatacctgctatggagaaggccctgtgaatccctgagtgcaggtaatgatgagggcaaggtctctctgccttctctatctgtgcccagcttacagataaggcaaagcaagacctttgctgcgaggccaaagtggctgtgggtgagctgaggg

SEQ ID NO: 33371 - DNA, 1003 bp, Homo sapiens
ctaaccacaggtgagtgacaagctggctgtctacctccagggggctggtgatgagaagcaggtgggctcctttcctggcctcctaggacaacaggggggtgaggcggcaaggctgggaagctcaggggtcagttagggttgggctgggaattgggctggggcaagtcgccccaggggccctagtaggcctggccagtttccacaggcaggagtcccagcacagcagagtgctccccgagcttcatgcgacgctgggtggagaggctcacatttttggccagataatcaacagcagctggaaaaaagaagagactctcctagaaattgaggttctttttgtttattcttccattcactctatctacacccatccatccatccatccatccatccatccatccatccatccatccatccatytatccatccatccatccatccatccatccgtcctgtctactcatccattctttcatccatccatcatccttccatccttctatccactcatcttctcatccatccagccatatccatgcatccatgcctccatccacccatccattctgtccatctatccatccattcattcatttatccattctctgtccatccatccatccatttatccatccatccatccatccatccatccatccatccatccatccatccatccttccatctatccatctcttcatgaagctctttctctcacctcctctccaatcattcagcaaatatgtttaatgcattttgtgcccagctccctggtaagttcctagggaggcacagaagattacccacattgctgagcaaagaattaaccacccctcaacaagcccactacatatacctgctatggagaaggccctgtgaatccctgagtgcaggtaatgatgagggcaaggtctctctgccttctctatctgtgcccagcttacagataaggcaaagcaagacctttgctgcgaggccaaagtggctgtgggtgagctgaggg

SEQ ID NO: 33372 - DNA, 1003 bp, Homo sapiens
ctaaccacaggtgagtgacaagctggctgtctacctccagggggctggtgatgagaagcaggtgggctcctttcctggcctcctaggacaacaggggggtgaggcggcaaggctgggaagctcaggggtcagttagggttgggctgggaattgggctggggcaagtcgccccaggggccctagtaggcctggccagtttccacaggcaggagtcccagcacagcagagtgctccccgagcttcatgcgacgctgggtggagaggctcacatttttggccagataatcaacagcagctggaaaaaagaagagactctcctagaaattgaggttctttttgtttattcttccattcactctatctacacccatccatccatccatccatccatccatccatccatccatccatccatccattyatccatccatccatccatccatccatccgtcctgtctactcatccattctttcatccatccatcatccttccatccttctatccactcatcttctcatccatccagccatatccatgcatccatgcctccatccacccatccattctgtccatctatccatccattcattcatttatccattctctgtccatccatccatccatttatccatccatccatccatccatccatccatccatccatccatccatccatccttccatctatccatctcttcatgaagctctttctctcacctcctctccaatcattcagcaaatatgtttaatgcattttgtgcccagctccctggtaagttcctagggaggcacagaagattacccacattgctgagcaaagaattaaccacccctcaacaagcccactacatatacctgctatggagaaggccctgtgaatccctgagtgcaggtaatgatgagggcaaggtctctctgccttctctatctgtgcccagcttacagataaggcaaagcaagacctttgctgcgaggccaaagtggctgtgggtgagctgaggg

SEQ ID NO: 33373 - DNA, 533 bp, Homo sapiens
cagccgtcagcgcctcgtcagcccgcagccccagaggaggacccttctagacacaaattcttattagacttgtcagatctattaaaattcttttcacacttcagcgttctatcagccccattattagtacagccctggcctctgggaacaccagggccgtattaatctgccatgtgccccatccctgggcccctgcccccactcccctagagacgaggaaagacggacaggtggatggacaatggccagagcaggaaaaggagtgaaggtgtccctggcaagatgmgaagcccacggagaagaggaggagtactctggggcctaagagtttggcccatgtgtaggcttgttccatgcacacctgaaggtggctctccaggaaccaggctgcaggtgtggctgtgtacacatcagtatgggctgccgggtgaccttgcataaacagcctctctgggatcccatttcctcatctgtccaatgggaataaccacgtgtactgcatagggtggcataaggatgaaatgctagaccca

SEQ ID NO: 33374 - DNA, 852 bp, Homo sapiens
atcaggaggatggccagaggagcaggggtaaaactccaaagggagaaaaaattctctagctgaactgtgtaataatttgaacagggcgagaagcctcctggccagaactcgaaggagggtgggaatccaacatgcagacttcacagacatggggaagagctaaagcccttttccttcacagctgagaggcagaaaaacctcaggcaaatttttaagcccatctcaccctccgtctggaaacagactcagggctgttgggagaagcacagtgagagtgagaccagcccttcagtttgcctgggagctggatgaggcctgttactgccagctttcccccacttccctgacaaccagcatgactcagaagaggcagtcataatcctcctaggtacacaactccagtgaacttggaatctcatccccatcccctacagcagccatagcaagacccacccaaggagagtcttgagctcagacatgcctagcctgcccccacctgatggtccttccctatccaccctggtagcaaaagaaaaaaggcatttaatcttgggagttctagggccctgcccaccaccagtccctgtccacactactacaactgatgctttctggaaaaccccacctactgacaggaggccaaccagcacaaaaatagagcattaaactaccaaagctaaggaccctcatggagtccattgcaccctytgccacctccaccagaacaggaactggtatccatagctgagagacccatagatggttcacatcacaggactctgtgcagacaacccccagtaccagcccggagctgggtagacttgctgggtggctagacccagaagagagaca

SEQ ID NO: 33375 - DNA, 627 bp, Homo sapiens
cttgagcagataaagaacatattcagaatacacacagctttatacaatggacttactcattttaacactgagcaaacaaataatgagaagttagtaggtctaagacgcagctggggaaggaggtcttttctccagaagattctgtcacatacctctttttatgccattgttgctttaaaaaatccagattctcaggccgggcatggtggctcacgcctgtaattccagcactttgtgaggccgaggcgggcggatcacctgaggtcacgagtttgagaccaggctggccaacacagtgaaaccctgtctytactaaaaatacaaaaattagctgggtgtggtggtgcatggctgtaatcccagctactcgggaggctgaggcaggagaatcgtttgaacctgggaggtggaggttgcagtgagcgagatcatgccattgtactccagcctgggcaacaagagtgaaactccgtctcaaaaaaaaaaaaaaaaaaaaaaaaaaaaaaaaaaatccagattctcacccgtgagctgtgttatgaggaagggacctctgcaataatgtgaaggtaacccttggctaacgaaagtaaaaacaccagacccatgcttcttcagaatcataaa

SEQ ID NO: 33376 - DNA, 937 bp, Homo sapiens
tcactctacatctcctgattagatgcaaacattgacaarcaattttttcataattaaaaatgcttttgatgagacaacttattctcactaaaaccacttctacatggcattggtccaaagtctttacttatcaaataatcatatatattaatcatacatatacacacacatataattttttaaactctcttttttcaactaaaacttattccactaaattctttccaacgcttttgcccacatgtagggtcccctctcttcacccttgctaactcattttcctgaagcattgatatatttctagtttgaccttctgaatgtagctactgtttggaactgtcagacagagctcagggccagattcatgggcatgagacacaaccatgcagtcacagtgctcagaagggccttgtgcttggtttactgctttgctgttgccattttgaaattataaataacgtttgaacacacggccccaaattgtcattttgcaccgggccctgcaaagttagtagctggttcagacagctactagaggaaacgaaacagtgagaaaaaacaaaatggggcagaaagggtaatagggtagtccagtttagagaactcccaggggggagcagaaaagagtgactgagctggcctgtggggggtcattcaggaaagctagagagcagagaatgcagctgcagaggagccatttaatgggagagacaggttctagaaaagggagatttgctaaggaatcctgtgaagctagcactgtcagattcaggctgtcagggcttcagagagagtacttttaatatgaagacaagaagttagtcctccagcataggaaggggacctagagccagagagcagccagagccagagagcagccagagagtaaaactgacaagtagaaaaacctgaccactgagctaatggaacacaaact

SEQ ID NO: 33377 - DNA, 937 bp, Homo sapiens
tcactctacatctcctgattagatgcaaacattgacaagcaattttttcataattaaaaatgcttttgatgagacaacttattctcactaaaaccacttctacatggcattggtccaaagtctttacttatcaaataatcatatatattaatcatacatatacacacacatataattttttaaactctcttttttcaactaaaacttattccactaaattctttccaacgcttttgcccacatgtagggtcccctctcttcacccttgctaactcattttcctgaagcattgatatatttctagtttgaccttctgaatgtagctactgtttggaactgtcagrcagagctcagggccagattcatgggcatgagacacaaccatgcagtcacagtgctcagaagggccttgtgcttggtttactgctttgctgttgccattttgaaattataaataacgtttgaacacacggccccaaattgtcattttgcaccgggccctgcaaagttagtagctggttcagacagctactagaggaaacgaaacagtgagaaaaaacaaaatggggcagaaagggtaatagggtagtccagtttagagaactcccaggggggagcagaaaagagtgactgagctggcctgtggggggtcattcaggaaagctagagagcagagaatgcagctgcagaggagccatttaatgggagagacaggttctagaaaagggagatttgctaaggaatcctgtgaagctagcactgtcagattcaggctgtcagggcttcagagagagtacttttaatatgaagacaagaagttagtcctccagcataggaaggggacctagagccagagagcagccagagccagagagcagccagagagtaaaactgacaagtagaaaaacctgaccactgagctaatggaacacaaact

SEQ ID NO: 33378 - DNA, 937 bp, Homo sapiens
tcactctacatctcctgattagatgcaaacattgacaagcaattttttcataattaaaaatgcttttgatgagacaacttattctcactaaaaccacttctacatggcattggtccaaagtctttacttatcaaataatcatatatattaatcatacatatacacacacatataattttttaaactctcttttttcaactaaaacttattccactaaattctttccaacgcttttgcccacatgtagggtcccctctcttcacccttgctaactcattttcctgaagcattgatatatttctagtttgaccttctgaatgtagctactgtttggaactgtcagacagagctcagggccagattcatgggcatgagacacaaccatgcagtcacagtgctcagaagggccttgtgcttggtttactgctttgctgttgccattttgaaattataaataacgtttgaacacacggccccaaattgtcattttgcaccgggccctgcaaagttagtagctggttcagacagctactagaggaaacgaaacagtgagaaaaaacaaaatggggcagaaagggtaatagggtagtccagtttagagaactcccaggggggagcagaaaagagtgactgagctggcctgtggggggtcattcaggaaagctagagagcagagaatgcagctgcagaggagccatttaatgggagagacaggttctagaaaagggagatttgctaaggaatcctgtgaagctagcactgtcagattcaggctgtcagggcttcagagagagtacttttaatatgaagacaagaagttagtcctccagcataggaaggggacctagagccagagagcagccagagccagagagcagccagagagtaaaactgacragtagaaaaacctgaccactgagctaatggaacacaaact

SEQ ID NO: 33379 - DNA, 607 bp, Homo sapiens
gtagactgaataatgagcgctcaaagatgtccgtgctgtaatcccrggagcctgtgactatgttaccttgcatgacaaaagggactttacagatgtgtttaaattcaggatttgagatgagatgatcctggattctctgaatggatcttctaagaatcacaagggtccttacaggagggaggcaggagggtcagagttagagaaggagacgtgatggctgaagcagagatcagagcgcgaggggttggaggatggagggaggatctagaagaggaaagcaggcagcttctagaaactggaacaggcaaggaaatagattttcccttcagagcctctggaaggagctgaccctgctggacgcttcaatcctagcccggtgagactgatttttttcttcatgacaagtcagttgatgttgttttaagctcctaaatttgataattggttacagcagcaataggaagcattgcagtcacatagcccagtttggcatcttgtattattttaacaaactctccatcaatccacctgtgtatcattttagtctgctaacaccaagaacaatatgttgcatgtggaagaccttaataactacttgttggatgca

SEQ ID NO: 33380 - DNA, 607 bp, Homo sapiens
gtagactgaataatgagcgctcaaagatgtccgtgctgtaatcccgggagcctgtgactatgttaccttgcatgacaaaagggactttacagatgtgtttaaattcaggatttgagatgagatgatcctggattctctgaatggatcttctaagaatcacaagggtccttacaggagggaggcaggagggtcagagtyagagaaggagacgtgatggctgaagcagagatcagagcgcgaggggttggaggatggagggaggatctagaagaggaaagcaggcagcttctagaaactggaacaggcaaggaaatagattttcccttcagagcctctggaaggagctgaccctgctggacgcttcaatcctagcccggtgagactgatttttttcttcatgacaagtcagttgatgttgttttaagctcctaaatttgataattggttacagcagcaataggaagcattgcagtcacatagcccagtttggcatcttgtattattttaacaaactctccatcaatccacctgtgtatcattttagtctgctaacaccaagaacaatatgttgcatgtggaagaccttaataactacttgttggatgca

SEQ ID NO: 33381 - DNA, 603 bp, Homo sapiens
gaggttacagagagctgtgccactgcactcaagcctgggcaatagagcaagagtcgagtctcaaggaaaagggcagcagggaacaaggycagcgggaaagtgagtgggcatcatgggcgcgggtgacaatttcagcgaggctcagggttggccttgctgaggtgaggtctgggcaaagacttgcaggaaggcagggagcaggcggggatctctgatccctgcagagggatcagcctctgtgaaggcaggggtgctggcctgttggaggggaccacagcccggaggagggacagcctctgggccattgtaaggaagtgagcagcattccctgtcagtggccagaagcctgtgacgggaggtgctcttttttttttgtgaaacggagtcttgctctgttgcccaggctggaatgcagtggcacaatctcagctcactgtaaccgctgcctcccaggttcaagtgattcttatgcctcagcctcccaagcagctgggactacaggcgggagccaccacacccggctaactatttttccccctgagatggagtcttgctctgtcgcccaggcttgagtgcagtggcgcaatcttggttcactgcaac

SEQ ID NO: 33382 - DNA, 603 bp, Homo sapiens
gaggttacagagagctgtgccactgcactcaagcctgggcaatagagcaagagtcgagtctcaaggaaaagggcagcagggaacaaggtcagcgggaaagtgagtgggcatcatgggcgcgggtgacartttcagcgaggctcagggttggccttgctgaggtgaggtctgggcaaagacttgcaggaaggcagggagcaggcggggatctctgatccctgcagagggatcagcctctgtgaaggcaggggtgctggcctgttggaggggaccacagcccggaggagggacagcctctgggccattgtaaggaagtgagcagcattccctgtcagtggccagaagcctgtgacgggaggtgctcttttttttttgtgaaacggagtcttgctctgttgcccaggctggaatgcagtggcacaatctcagctcactgtaaccgctgcctcccaggttcaagtgattcttatgcctcagcctcccaagcagctgggactacaggcgggagccaccacacccggctaactatttttccccctgagatggagtcttgctctgtcgcccaggcttgagtgcagtggcgcaatcttggttcactgcaac

SEQ ID NO: 33383 - DNA, 603 bp, Homo sapiens
gaggttacagagagctgtgccactgcactcaagcctgggcaatagagcaagagtcgagtctcaaggaaaagggcagcagggaacaaggtcagcgggaaagtgagtgggcatcatgggcgcgggtgacaatttcagcraggctcagggttggccttgctgaggtgaggtctgggcaaagacttgcaggaaggcagggagcaggcggggatctctgatccctgcagagggatcagcctctgtgaaggcaggggtgctggcctgttggaggggaccacagcccggaggagggacagcctctgggccattgtaaggaagtgagcagcattccctgtcagtggccagaagcctgtgacgggaggtgctcttttttttttgtgaaacggagtcttgctctgttgcccaggctggaatgcagtggcacaatctcagctcactgtaaccgctgcctcccaggttcaagtgattcttatgcctcagcctcccaagcagctgggactacaggcgggagccaccacacccggctaactatttttccccctgagatggagtcttgctctgtcgcccaggcttgagtgcagtggcgcaatcttggttcactgcaac

SEQ ID NO: 33384 - DNA, 1106 bp, Homo sapiens
tcctgatatttttaaaaacttaataacgactgcttttgtttcatcctggaataactcatcagcttctttatatggaagcatcacacgacacatttctctgagctcattggggaaaagagacctctcccacattaaagagcttgagaaaagtaacctccatagttaatgaagaacatttactttcacccttttcaaggaggaaatattgcctttatccccttattttgcagtttaagttcctttccagttatcctatccttgttggggatgaagaagagcaggttttatcctctaaaatgccagaaaaaaatattgcaatatggtgatgcaaagacagatataaaggatgtgaagatagagccagaggcactaccagagagcttaggtttgaatcccaactttgccactgaatagcttgtgtgactctgcaagttacatagcttctctgtctcttactttcttcatctatgacaatagtaaccttggaggggtctgttcacacatgtgaaaatgacagtagctgatacttgttgggccatatttgctatggccagacagcattctaagcgctttacgtatgttaattcatttattttccacaacaatcctatgggtrggtactataattttcattttcatctccattttttttttttttttttgagacagagtctcgctctgtcaccaggctggagtgtagtggtgcgatctcagctcactgcaacctctgcctcctgggttcaagtgattctcctgcctcagcctcccaagtagctgggactacaggcgcatgccacaatgcccagttaatttttgtatttttagtagagatcgggtttcaccatgttgacctggatggtctcgatctcttgacctcgtgatcctcctgcctcggcctcccaaagcgttgggattacaggtatgagccaccacgcctggccttccatttaaaaaaatatcttgcagatattactaataacagacacatcagatctcttactagaaaatgtggaggcataaatcattgataaaattttaaaaatacctaatttgtattgagtgcctgtctatgctaggactccacatacgttctctcctctcttctt

SEQ ID NO: 33385 - DNA, 689 bp, Homo sapiens
gaaagtataaatcgaaggatctcaagcttaccttcacaaactgggatttgctgtgtccactgcccttgagtggtgcattcaacctgggctggtccctgcaacatgaagccttcctcacaggtgaagttgcaggatgatttgaaggtgaactctccagcaggggaatggctgcacctcacagagccattctgaggctggcggacggccctgcatgtcacagctgtaacaaatatacgcattgatattagcacggcctagaattagcttgcccatttccagtatgggttgagagaaagaatgttcacagtaagtctccatgtggaacaactctacctttacacgttggcttctcgttgtcccaattcccagatgaggtacactgaaggctctgggctcccattagttcaaatccttcttcacagtcaaatgtacaggttgtgttccatgggaagcttccagggttttggaaacattccacgaacccattggctggatttgtcacagcatcacactcaaccactgaggatttkaaagagcaccatgaattttacagaagaatgatcttttcacttcctattgagctgggtgcctaacagagtgaggaagctgccttcaaagggtagatcccaaagtcctatgtcaattcttagggacatgcacagccagaataaaagcttttattctttttc

SEQ ID NO: 33386 - DNA, 613 bp, Homo sapiens
atatctatacgacagtaatagatgatagcgaacctaattaaaattaccagaaacttaagaatctctaatgatttcaactgtaactaaggttatttctctttatgttgaacaatgttgggagataagacacaagagtttctgaagtatttcagaaacacaaagagggaggttatataaataatatttttttcctactttgggaaaatgaaagctagtcacaaagttaaacgagtggttattttaatatttaaaatacaggcttggatgtatttcctgttaaagaaaataaaatgcagaatattcaaaacgtctgaccacccttctaagaaaatgcatctctgaggtatttttccttagaagttattgtaaaaatcctggagaagcttgaacacagcaaagcaaacaggatgcagagtttaatctgtggaaagcttagggaagaaaagcaaatcattaaaaataggtcttcctctgaagatttttaaaacgcaaagagggtggaatagcaatgataataaaaaagctggcatagagagtggcacaatttgctgtgccactgagctgactggatgtgttctgaatttctaggcattagtgtacctttccacaygca

SEQ ID NO: 33387 - DNA, 1213 bp, Homo sapiens
ttccccagtgcctccagaacataatgcagctctgctatcttgattttactctggtgcaacccttagcagagaaaccagctgagccacactgcatccagacttcttaccaacagaaacaacaggtgctgttctaagccgctaaatttgtggtcatttgtattgcaacaatagaaacctactacaaccaccaaccaaaatagcaaatataaagccaagatgaccttactctacacacaccaaagaaagccttcaagtgttcccaaggctatccccatgatttggagtaggcattttccaatactgaactcaccaacacgaagacattttccatcatgttagcctcatctttactcccatgtgttagcacattatgatgaaatgaaaccactgcttcgttctactggcatttcaccatatggtagtggatctgtgtttgctattatgtgccagatggcattgggacaccaaccacttacagtgtcatctaaaacatagagacaaacaaaaattgaggaatccctgctgtagaaactggatacaagaagtttcatgagtatgttaggattcatgatatttaatttgaactgaccatgagcccgttttaagacttctgtcccagtgtgagtctgacccytaaattataccaccacaacacagtgctgaaaccttctttgttatctgtgatacctttaccaatcagagaaagcaatttaaaatactcaggttctcagccatctgtcattattaatgcccaattttattatgtaacttccttggaaagttttgatggtatgagatctttctgacacacagctacaagttgataaaaaggcacatattttaccatgtgacatttcatattggtttgcatctgatacaaggtgaaagatttggaggatcgagaaacttcctatcacaagctattcacatgctatttagctatcataagctatttagctacttagcattagctatttatttattgtcaacatgaactatttgccataaatatgactttttaaaatataatatattgttatagatttctatatcacatgtgctggtgacatcacatggaaaccaaccaggaatatttttcagctagatgggaagggtcttgtcctggagtttaaggtcaggatacaaggatactataagccaagcacagtggctcatgcccatagtcccagctactcaggaggctaaggtagaa

SEQ ID NO: 33388 - DNA, 551 bp, Homo sapiens
ctatccacttcygcctcctgagggacccctgctggatatcacctatccacttctgcctcctgagggacccctgctggatatcacctatccacttccgcctcctgagggacccctgctggatatcacctatccacttctgcctcctgagggacccctgctgggtacatcagctcgttggctgggcgagtccgagagcagcattttgtgaagggcaggcaggacactggggtccccggaccaggcatttagtcttccagggcccaggagaaatacatttctcaaaaagaaaacagctgtttgcctaaagggcatgattttccaaaatctcagaggctgaccatgtggttcccatattggagctggtcgtggatgctggtgcctccaccatgcagacgcttcaagcttccttgtccttgcaggtgacagagttgctccaagctcaagttttagccgaaccctcatactagcctccctccctgaggctactaggacatgcggggccctttgttctgctgcctcctctgcctggagcacctttcccatgcctctgc

SEQ ID NO: 33389 - DNA, 551 bp, Homo sapiens
ctatccacttctgcctcctgagggacccctgctggatatcacctatccacttcygcctcctgagggacccctgctggatatcacctatccacttccgcctcctgagggacccctgctggatatcacctatccacttctgcctcctgagggacccctgctgggtacatcagctcgttggctgggcgagtccgagagcagcattttgtgaagggcaggcaggacactggggtccccggaccaggcatttagtcttccagggcccaggagaaatacatttctcaaaaagaaaacagctgtttgcctaaagggcatgattttccaaaatctcagaggctgaccatgtggttcccatattggagctggtcgtggatgctggtgcctccaccatgcagacgcttcaagcttccttgtccttgcaggtgacagagttgctccaagctcaagttttagccgaaccctcatactagcctccctccctgaggctactaggacatgcggggccctttgttctgctgcctcctctgcctggagcacctttcccatgcctctgc

SEQ ID NO: 33390 - DNA, 551 bp, Homo sapiens
ctatccacttctgcctcctgagggacccctgctggatatcacctatccacttctgcctcctgagggamccctgctggatatcacctatccacttccgcctcctgagggacccctgctggatatcacctatccacttctgcctcctgagggacccctgctgggtacatcagctcgttggctgggcgagtccgagagcagcattttgtgaagggcaggcaggacactggggtccccggaccaggcatttagtcttccagggcccaggagaaatacatttctcaaaaagaaaacagctgtttgcctaaagggcatgattttccaaaatctcagaggctgaccatgtggttcccatattggagctggtcgtggatgctggtgcctccaccatgcagacgcttcaagcttccttgtccttgcaggtgacagagttgctccaagctcaagttttagccgaaccctcatactagcctccctccctgaggctactaggacatgcggggccctttgttctgctgcctcctctgcctggagcacctttcccatgcctctgc

SEQ ID NO: 33391 - DNA, 551 bp, Homo sapiens
ctatccacttctgcctcctgagggacccctgctggatatcacctatccacttctgcctcctgagggacccctgctggatatcacctatccacttcygcctcctgagggacccctgctggatatcacctatccacttctgcctcctgagggacccctgctgggtacatcagctcgttggctgggcgagtccgagagcagcattttgtgaagggcaggcaggacactggggtccccggaccaggcatttagtcttccagggcccaggagaaatacatttctcaaaaagaaaacagctgtttgcctaaagggcatgattttccaaaatctcagaggctgaccatgtggttcccatattggagctggtcgtggatgctggtgcctccaccatgcagacgcttcaagcttccttgtccttgcaggtgacagagttgctccaagctcaagttttagccgaaccctcatactagcctccctccctgaggctactaggacatgcggggccctttgttctgctgcctcctctgcctggagcacctttcccatgcctctgc

SEQ ID NO: 33392 - DNA, 540 bp, Homo sapiens
aaaagcaaaaaggaaataagaaaggcccataatcttaatctcccttggcctttactagcactataaaatatctattcttgatcattgtttacatagccccattacaactgagaccattgtctaccttggtttatcttaattcagagcaagactataaactttccaaacatgtgagaaaaaaatatgacaagccmaatcataatgtagcctctggtaagtagcttcgtgtctggaatctagtccagaaactattgcttttctccatgaactttatatgttggtggatgatccacatatttgtaactttcaccgaagcacagaaaatttgagttgagagtcgtgatgtttaaagagtctatccccttcccttcttatttgtgtaaattacgttcccatagaaaataattttccggataacacaatgtgaattacagtgggatctctaatcacagccccaatttcctgactgagtccagtgagctttctattttgctgcagattttcgattcccacaatattttcagaaaatgagctagaaaa

SEQ ID NO: 33393 - DNA, 476 bp, Homo sapiens
tattcccttatctggccccacccacatcctgctgattggtccattttacagagagctgattggtccgttttgacagagtgctgattggtgcgtttacaaacctttagctagacagaaaagttctccaagtccctacccatcttggaagcccagccggcttcacctctcactggcactcgccactggcactccggcagcccagagggagctcattacccgatcaaccccagcacgtgccagccccagcatgcccagccggcggcgccgagtgcgggcctgaggagcccacccgcgcccaccgagaagcggcgccaacagtggtgcacgcagccccggyggagccgacacttccccctccacacttccccctccacacctcccccgcgagcagagggagctggctccggcctcgtccagccccagagaggggcccccacagctcagtggcaggctgaagggctcctccagcgcggcca

SEQ ID NO: 33394 - DNA, 1053 bp, Homo sapiens
ccagtcacctcccaccaggccctacctccaacactggggattacaattcaacatgagatttgggaggggacacagattcaaaccatatcattcagctttcccaatttccttgttaattaaatgtattcaataatattgttgtatttgatgttaaatgaagatgagtttatagttaacattttaataaatacaactgggctgcatgtgaactactgtgggcaccatagaaaactatttgagtccatcgtacaatatcagtattttcaatttcccctcttacagagagcacatgtcatcatgtgaatcagagcctgacacatagtaggcccagaagaaatgtttcctgcattgtatactgtgagaaaatagtggtggtagtattagatcataattcaaagatgctaaagttcaataagagtatatatgacatgattgatttctttatcttggagcctgcctttatctcataaatctctgtatgctttctaatttcttgatttgtcaaataacgttatggagaaattatagttatcttttctaaggacttacactttgtcctatgtattaactcatttaaacctcacaacaattctttgtggtaggtactatcactatatccattttacagatgaataaactgaggcttctcaagtttctgaacaatttaagtgattttcccaaggtcacacagctggtaagaagaaatagatcttcacacaagccgtctggttccagagcctgctcacagtatctagctgcctctttttcccactgacttttttttttggatgggggactcttttgaaaaatctctgcaaggtgtataaattaagttgtccrgattgataacaagaataaaggtgatttcatctattaagagtttatttccaatgaactttcgactgtcaatattttccccatgagaattaacatacattcggagaatttggacttacattatcttaaatggtattctaataacacaggaaattaatacctagggagaggatataattccctaggctcacaggagggattagttgcaaagaagca

SEQ ID NO: 33395 - DNA, 599 bp, Homo sapiens
accgactcacagaatgagcttaagcaaatcgctttttctctaattaggaaaaaaaaaaagaaatgttattttaattattcccaacatctcttccagccaggcattctataattctaaatccagtagggagggttttcattgttgttgctgatttttcttttaagcaggggatgatttcaaattagagttaaaatgcaagaagaaaggctcttctttctaaggcccacgtccttttggtgagtggcaacctactcagagattagcttcgagctcccccaacacattaaaaattgtacagagaggccaggcgtggtggctcacgcctgtaatcccagcacttcgggaggccgaggcgggtggatcatgaggtcaggagatggagaccatcctggctaacacggtgaaaccccgtctctactgaaaawacaaaaaaaattagccgggcgtggtggcgggtgcctgtagtcccagctacttgggaggctgaggcaggagaatggcgtgaacccgggaggtggagcgtgcagtgagctgagatcgcgccactgcactccagcctgggtgacagagcgagactccgtctcagaaaaataaaaagt

SEQ ID NO: 33396 - DNA, 3062 bp, Homo sapiens
ccagggcctccggagcctcctggagtctgggcctcaccttggagttttcctgactttttggaccttgagcctcctttaagctgcaggagacccagacacggcgcactgtccagggtgacccgttcctgttggagttgggtagtggtgggaagggctgccctgggtacccttggccttgcagggaactctgggctctgggaaacataatttcagcctggccttgcagtgtgccaccggggtgctcacatggtttcaggctggtgaggggcttaggaggttggcaggatgggcagatgcagctttcctgggcagcgaatccgatcatctaccagagctggagagccctgtgacctgaaaatggcaggcccatggggtcctgatggcagtgggggtgagagggacccttgccttgggcaaggctgaaggcagcagcctggactttgcccctgaaactctgagaagccccaaggccgcaggtgggtgtggactctgctgctgtcacttgccagctgcgagtttgaggccctgtgtgcctgtgggggtggaatgaagcgaggccagtagtgctacagtcttcacatcacccccaaccctytcacagccccaagcaccttccctgcacactggcccagccctcacgggctcccactgcctcctggctctgcacacagcaggtctgtggtcatgtgtggccctgcagaggggacccttttcctctccctgagagataaagagccctgtgcctgaaatgccaccagcagtactcattcctctggctaatcccaaacattcactgaatatttgctctgggtgcttcgggcaggagccactgctcacttctggcctggcctgttcccccaggccaagtttacatctctccattccaggctttgtgtgtaagaggcagtcagagccctcgggccctcctgaaatgtgcatatgcaccactagccccggctgggacatccgccctctgctccctgataaggtccctctctgcctggactggggactgaggatccgagatggaaaagccccagcccagcgcccctgccttcctggagtcagagaggcctgggttctgcttgtggtgcggccttcaccaatcaccccctcctcagggcctccatctccctgctggtgtggagtgagggatgaattcacagcagggcttgccaggcttttttttttttttttttttttaactgtagaagctttccttccaacaaaatcttgcgaggagctcagtgtctgaaattgaaaagctgggagcatcttcttgattgtgttttttgggggcgagtccctgggctttgttttctctcccccttcactccacctctctctcaggtcctggggcacctggaggggagttccagggacctggctgggaaagagctgtcctcagtgcccatgggaccagtccatgggatgtgtctgtacatctgtgtatcgggccctgaggcccacctttagcccacctcccctcccgaggtctccttctgccaatcacctgcctaatgcccctgcaccctggtgtcaggcagccccccagagctgcatccctccctcctgtagttaaccaatgctctatgagcctctctcagccaagaccttggcatcagctcaccactgccccgcccctggccctccccttcatcacgggccgtctctcaggcttggcgccctgggatgctcccttgctccagctctgtgactgtccccatgagggtcctccctcagtgcagccccatctctccagcggtgctggcacgatggacccggttgactccctgcctcctgccctctccgttcagtctaaactgcacagtctaacgtaggaaccactagagcatgcagctattaaaattcaaattaaattaagctgggtatggtggtgtgagacttgtcccaactactcacgaggctgagatgggaggattgcttgagtccaggaattcacatacagcctgggtaacataggtctcgtctctaaaaaacaaaaacaaaaacattatggaatgagcctctggggatgaggagctgatgtcctgaatggaccagtgaccagtgcaggaggggtggagtcctagcaggggtagatcccagctttgggaaccaactttcccaggcacttgccggccactccgtgggaaagtcctcaggcagcctgcagggagctgggatcagctgatggggatgggtttggaggggagagagtggtgcacagggactggaggtgggggaggggtggggttgccatggaaagggctcttgggatgggtcttgggctgagcctttggcaaggcctccaccctggagctgagccagcagagagtggggctgactccatgaggcccagactctcgtgggtattctggtggcctgggcaccctgtctttcctgaaccctgcctgcctaatctaagaactgctccccttgtagctctgtctctcctctgttggcctagtttcttcatccatgggtgggcacagcagaagctgtctcacctgctccatggtgaacgggatttgcaaggatttgactctggccatccagggaagatggagtctttgaccaggcctggcccctgaagcagacttcttccttctgagcctgctggggaagcagaattcctcgatgctgggtgtcatggtctaccaggccctccctcgcccaggccacttgtgttgagcctggagcagaacccccagatctgtagtccgcctgtcagcttggggagtctccgtttccgtctgtttcattcccatcagctgtgtgtggctgagcaagtcacttaacctcttgaggcctccatgtcctcatctgcaaaatggagacacacatatctgcgtccccgatgaccaccagtagctgggatgatacgtcgactgcagagtgaccactttgtgtaggcgtccctgtggatggttgtcagtcaaaggagtgagtcagatgatgagaggggaggacagcagagcagcagttgtttcttcagtctcgccgggactccaggatcggccatgttctgcagccaccgcctctacctgtctccccatgtg

SEQ ID NO: 33397 - DNA, 1156 bp, Homo sapiens
cacacagcccaaacacttccctcgttcactcgtgctcggctttcccgacagcctcctatgctgggctgtggtcagactgttcaagagccacctgcagatatttgaaaggctgccatgaggaagaggaactaggcttttcccttgtggtttcggaaggcagtgctgaagctaacaacgtgaggctggcgtttccctaagactcacatggactgagatctactgtggctgctttttattttgtattattatttgttggagacagtctcgctctattgcccaggctgtcatgcagtggcacaatttaggctcaccgcaacctctacctcctgggttcaagcgattcttgtgcctctgcctccagagtagctgggattacaggtgcccgccaccacaccgagctcatattttacatttttcgtagagatggggtttctagtctctaccatgttggccaggctggtctcaaactcctgacctcaggtgacccacccgcctcagcctcccaaagtgctgggattacaggcatgagccactgcgcctggctgtggctgctttcaaactggcctttctctgagaagactcagatagaggcgaggggtctcagcactcatctagttcagcttctccctggtgtgggctcccttctgtggtgtyccagtcagatggccatcgagtcaagacttggccgtcgctattctgggaaacctgaatttggaggtgaccaattcccccactgaacagctttaactcttagtgcctcctttttctttttttttgagacagagtctcgctctgtctcccaggctagagtgcagtggcacaatcttggctcactgcagcctctgcctcctgggttcaagcgattctcctgcctcagcctccctagtagctgggactacaggcgcacgccaccacgctggctaatttttgtatttttattagagacggggtttcactatgtcggccaggatggtctcgacctcctgacctcgtgatccgcccgcctcggcctcccaaaatgctgggattacaggcgtgagcgaccgcgcccggcctttttgtttgtttgtttgttttttttgagacagagtcttgctctgtagcccaggctggagtgcagtggtacaatctcggctcactgcaacctctgcctccc

SEQ ID NO: 33398 - DNA, 1156 bp, Homo sapiens
cacacagcccaaacacttccctcgttcactcgtgctcggctttcccgacagcctcctatgctgggctgtggtcagactgttcaagagccacctgcagatatttgaaaggctgccatgaggaagaggaactaggcttttcccttgtggtttcggaaggcagtgctgaagctaacaacgtgaggctggcgtttccctaagactcacatggactgagatctactgtggctgctttttattttgtattattatttgttggagacagtctcgctctattgcccaggctgtcatgcagtggcacaatttaggctcaccgcaacctctacctcctgggttcaagcgattcttgtgcctctgcctccagagtagctgggattacaggtgcccgccaccacaccgagctcatattttacatttttcgtagagatggggtttctagtctctaccatgttggccaggctggtctcaaactcctgacctcaggtgacccacccgcctcagcctcccaaagtgctgggattacaggcatgagccactgcgcctggctgtggctgctttcaaactggcctttctctgagaagactcagatagaggcgaggggtctcagcactcatctagttcagcttctccctggtgtgggctcccttctgtggtgttccagtcagatggccatcgagtcaagacttggcygtcgctattctgggaaacctgaatttggaggtgaccaattcccccactgaacagctttaactcttagtgcctcctttttctttttttttgagacagagtctcgctctgtctcccaggctagagtgcagtggcacaatcttggctcactgcagcctctgcctcctgggttcaagcgattctcctgcctcagcctccctagtagctgggactacaggcgcacgccaccacgctggctaatttttgtatttttattagagacggggtttcactatgtcggccaggatggtctcgacctcctgacctcgtgatccgcccgcctcggcctcccaaaatgctgggattacaggcgtgagcgaccgcgcccggcctttttgtttgtttgtttgttttttttgagacagagtcttgctctgtagcccaggctggagtgcagtggtacaatctcggctcactgcaacctctgcctccc

SEQ ID NO: 33399 - DNA, 589 bp, Homo sapiens
gggagataataaaatggtattgctgttttaagccactgaatttccagtcatctaaagagaggttaatccctgataaatttctctctttctctctctctctctttttttttttttttagagagacaagttctcactacgttgcccagactggagtgcagtgactgttcacaagtgcaatcatagtgcactgcagcctcgaactcctagtctcaagcatccctcctgcctcagcctcctgggtagctgatattctaaaaatcattgccccaatgcacttacttcatagcattcacaataatctataattatataattatttgattcttaacttgctaattttcccttttttctttttctttttcttttcttttctttttttttttttttgagacagtctcgctctgttgcccargctggagtgcagtggcatggtcttggctcactgcaatctccacctcttgcattcaagcaattttcctgcctcagcctcccgagtagctgggattacaggcatgcgccatcatgcccggctaattttttgtatttttagtagagatggggtttcaccacgttggccaggctggtttca

SEQ ID NO: 33400 - DNA, 1506 bp, Homo sapiens
gccaggaaggcgggcagggactacagcagggacaccgagaatctagactttgtaccaggggccctgggttctatcgcgggctcaccgctatgagtattgttcttctttgagtctccatttccctgtctgcaaaaggcaggcggtgagtagtcccagccacacctacaaaggcagacagtccaggagtggagggtgccctggagaccaacattcagccttagctgcatctactcggacaaattcctccccctctcaacttctacatctgaaaagtggacaatagtcccccatgtgcagggactgcctctgagttgcagtctctccatatgtgaagtgggtacaggaatgtcagtcctcttcccaactcatcaaaaggcatgcctccatgtttcaaaccagtctgcgtcctactgcctgtagccccactggtccaagccacacatgcccccacaaactcccacccacagtgctatgggctatggtatgttctccactctgcagccttaatgatgtttgtttggtttgggaggtttttcttagacaaggtctggctctgtcacccagcctagggtgcagcggcccaatcatagctcactgcagccttgaactcctgggctcaagcaatccttctgcctcagcctcccacatagctgggactgcacatatgcaccaccatgcccggctactttttttacccttggtagagaggggtcttgccacgttgcctaagctggaaagaatgatggttttaaaaacataacaggtttttctctggcttaaaacctcttaatggtttccaccaaactggaataaaatgcaaactgcccccagaccctgctggctcccccgcctcccacttcccactgccccactcgctcactagtctcattctgttcttggaacctgtcagcttcttccacatcaaggcccttgtccaccctgttgcctctgctgggactgctcatccctccactcctggtacggagggttccttctagcttttcaggtctcagatcaaattccccctcccttgattcaggagcaccctccagcagggagttccatacaccccatccaagcmattctgtgctacgtaggggccaaaggacagcttctccttctccctctagaggtttgccggaaatgcactgacaataggcagataaatagaagaaaaaaagcataaaaaatgtatttaacatgcctagcacaggggaatcataggagaatgattacccagttatccattgaggtccagatgtttatatccgcttcttcgctggggaaggggagacggggctgtaggagtgaatgactgttaggaggcattaatgggcctgggaggcagacattatcttacagatgattttctttggaaattgagtgggaccgaagaagaaacactcatttgggacaaagtttgtctggactctagatgtggtgtttaattttctcttcctctgtgatatgaattttaatctccagttaatgaaatttcagggaagg

SEQ ID NO: 33401 - DNA, 478 bp, Homo sapiens
cagcactttgggaggccaaggcaggcggatcacctgaagtcaggagtttgtgaccagcccggccaacatggtgaaaccccatctctactaaaaatacaaaaattagctgggcgtggtcgcacctgtagtcacagctrctcaagaggctgaggcaggagaatcgcttgaacccgggaggtggaggttacagggagctaagatcgcgccactacactccagcctgggcgacagagtgaggctccgtctcaaataaaaaaataaaaaataaataaaagtgcagaaggagtgggagggctgagtgggggacatggaggatgaaaatgctttgctcttgacttctgttacttatgtaactggcatgcttactatagacaattagagatattaaataaaaagaaaaataatcactcataatgccaccgccacgagggaactggcttacgctgttggcacatttccttccaggcggttctccaca

SEQ ID NO: 33402 - DNA, 1016 bp, Homo sapiens
caggtgccraaatacagagaacaaggagggcctgggaagcctctgctgttgaagggcctgcgggcagggctgactgtgccacctgtgggtcatccattcctgggctctacccccatccctcctgccccagcccctccgggcagacttcatgcatcaccagttcttaccaccctccagctcccatcttcccgggggtgtgagctccgtgccctccctgctggcctttgcagaagtcaggtgcaggcattgccccgggaggcaatgccattcttccagacttgccccagtggagtcgcacactctgctctttgtcctcactgtccccaaagctgccaaccgcggttcgggtccaccctctgccacttctggttggtagtttccagcttcaattcatttatccaccactgcaggtgctcccgggtcctctgtgcctggagggagcctctttctcctggactctctccttaccccatcctgccgctgccatcaggggcatccacagcgaaccaggggctcccagggctgctttagcaatgcaaacgcagcagctgctctggcctccgggttctctttcccttccagcccaggctctcacatcagccgttctccccaggtacagagggtgtgtgggcagcagaaagcttctgctgtgtgtcaggcacccaactggtgcttcagaagtgctctcctgcagatctcctgatgtcaggagtttgagaccagcctggccaacatggtgaaacccagtctctactaaaaatacaaaattagccaggcgtggtatcgcacgtctgtaatcccagctacttgggaggctgaggcaggagaatcacttgaatctgagaggcggaggtgcagtgagtcaaggtcgcaccattgtactccagcctaggcaaagagtaaaactccatctcaaaaaaaaaaaaaaaaaaaagtgctctccttccatgttcacttagtgggcagggtctaccctccttatcccatttccagaggaggaaactgaggctcagaga

SEQ ID NO: 33403 - DNA, 1016 bp, Homo sapiens
caggtgccgaaatacagagaacaaggagggcctgggaagcctctgctgttgaagggcctgcgggcagggctgactgtgccacctgtgggtcatccattcctgggctctacccccatccctcctgccccagcccctccgggcagacttcatgcatcaccagttcttaccaccctccagctcccatcttcccgggggtgtgagctccgtgccctccctgctggcctttgcagaagtcaggtgcaggcattgccccgggaggcaatgccattcttccagacttgccccagtggagtcgcacactctgctctttgtcctcactgtccccaaagctgccaaccgcggttcgggtccaccctctgccacttctggttggtagtttccagcttcaattcatttatccaccactgcaggtgctcccgggtcctctgtgcctggagggagcctctttctcctggactctctccttaccccatcctgccgctgccatcaggggcatccacagcgaaccaggggctcccagggctgctttagcaatgcaaacgcagcagctgctctggcctccgggttctctttcccttccagcccaggctctcacatcagccgttctccccaggtacagagggtgtgtgggcagcagaaagcttctrctgtgtgtcaggcacccaactggtgcttcagaagtgctctcctgcagatctcctgatgtcaggagtttgagaccagcctggccaacatggtgaaacccagtctctactaaaaatacaaaattagccaggcgtggtatcgcacgtctgtaatcccagctacttgggaggctgaggcaggagaatcacttgaatctgagaggcggaggtgcagtgagtcaaggtcgcaccattgtactccagcctaggcaaagagtaaaactccatctcaaaaaaaaaaaaaaaaaaaagtgctctccttccatgttcacttagtgggcagggtctaccctccttatcccatttccagaggaggaaactgaggctcagaga

SEQ ID NO: 33404 - DNA, 1016 bp, Homo sapiens
caggtgccgaaatacagagaacaaggagggcctgggaagcctctgctgttgaagggcctgcgggcagggctgactgtgccacctgtgggtcatccattcctgggctctacccccatccctcctgccccagcccctccgggcagacttcatgcatcaccagttcttaccaccctccagctcccatcttcccgggggtgtgagctccgtgccctccctgctggcctttgcagaagtcaggtgcaggcattgccccgggaggcaatgccattcttccagacttgccccagtggagtcgcacactctgctctttgtcctcactgtccccaaagctgccaaccgcggttcgggtccaccctctgccacttctggttggtagtttccagcttcaattcatttatccaccactgcaggtgctcccgggtcctctgtgcctggagggagcctctttctcctggactctctccttaccccatcctgccgctgccatcaggggcatccacagcgaaccaggggctcccagggctgctttagcaatgcaaacgcagcagctgctctggcctccgggttctctttcccttccagcccaggctctcacatcagccgttctccccaggtacagagggtgtgtgggcagcagaaagcttctgctgtgtgtcaggcacccaactggtgcttyagaagtgctctcctgcagatctcctgatgtcaggagtttgagaccagcctggccaacatggtgaaacccagtctctactaaaaatacaaaattagccaggcgtggtatcgcacgtctgtaatcccagctacttgggaggctgaggcaggagaatcacttgaatctgagaggcggaggtgcagtgagtcaaggtcgcaccattgtactccagcctaggcaaagagtaaaactccatctcaaaaaaaaaaaaaaaaaaaagtgctctccttccatgttcacttagtgggcagggtctaccctccttatcccatttccagaggaggaaactgaggctcagaga

SEQ ID NO: 33405 - DNA, 1016 bp, Homo sapiens
caggtgccgaaatacagagaacaaggagggcctgggaagcctctgctgttgaagggcctgcgggcagggctgactgtgccacctgtgggtcatccattcctgggctctacccccatccctcctgccccagcccctccgggcagacttcatgcatcaccagttcttaccaccctccagctcccatcttcccgggggtgtgagctccgtgccctccctgctggcctttgcagaagtcaggtgcaggcattgccccgggaggcaatgccattcttccagacttgccccagtggagtcgcacactctgctctttgtcctcactgtccccaaagctgccaaccgcggttcgggtccaccctctgccacttctggttggtagtttccagcttcaattcatttatccaccactgcaggtgctcccgggtcctctgtgcctggagggagcctctttctcctggactctctccttaccccatcctgccgctgccatcaggggcatccacagcgaaccaggggctcccagggctgctttagcaatgcaaacgcagcagctgctctggcctccgggttctctttcccttccagcccaggctctcacatcagccgttctccccaggtacagagggtgtgtgggcagcagaaagcttctgctgtgtgtcaggcacccaactggtgcttcagaagtgctctcctgcagatctcctgatgtcaggagtttgagaccagcctggccaacatggtgaaacccagtctctactaaaaatacaaaattagccrggcgtggtatcgcacgtctgtaatcccagctacttgggaggctgaggcaggagaatcacttgaatctgagaggcggaggtgcagtgagtcaaggtcgcaccattgtactccagcctaggcaaagagtaaaactccatctcaaaaaaaaaaaaaaaaaaaagtgctctccttccatgttcacttagtgggcagggtctaccctccttatcccatttccagaggaggaaactgaggctcagaga

SEQ ID NO: 33406 - DNA, 1016 bp, Homo sapiens
caggtgccgaaatacagagaacaaggagggcctgggaagcctctgctgttgaagggcctgcgggcagggctgactgtgccacctgtgggtcatccattcctgggctctacccccatccctcctgccccagcccctccgggcagacttcatgcatcaccagttcttaccaccctccagctcccatcttcccgggggtgtgagctccgtgccctccctgctggcctttgcagaagtcaggtgcaggcattgccccgggaggcaatgccattcttccagacttgccccagtggagtcgcacactctgctctttgtcctcactgtccccaaagctgccaaccgcggttcgggtccaccctctgccacttctggttggtagtttccagcttcaattcatttatccaccactgcaggtgctcccgggtcctctgtgcctggagggagcctctttctcctggactctctccttaccccatcctgccgctgccatcaggggcatccacagcgaaccaggggctcccagggctgctttagcaatgcaaacgcagcagctgctctggcctccgggttctctttcccttccagcccaggctctcacatcagccgttctccccaggtacagagggtgtgtgggcagcagaaagcttctgctgtgtgtcaggcacccaactggtgcttcagaagtgctctcctgcagatctcctgatgtcaggagtttgagaccagcctggccaacatggtgaaacccagtctctactaaaaatacaaaattagccaggcgtggtatcgcacgtctgtaatcccagctacttgggaggctgaggcaggagaatcacttgaatctgagaggcggaggtgcagtgagtcaaggtcgcaccattgyactccagcctaggcaaagagtaaaactccatctcaaaaaaaaaaaaaaaaaaaagtgctctccttccatgttcacttagtgggcagggtctaccctccttatcccatttccagaggaggaaactgaggctcagaga

SEQ ID NO: 33407 - DNA, 525 bp, Homo sapiens
aaaaataaaaataaaagaataaagagagaaggagaaggatagaagaagggaaactcaatgaataaaacaccctggggcctactatgtagccagaaaaatgaaaagtaaagaaataaaataaggcygtgcatgtggtttatgctcatagtcccagagctttgggagggtgaggcaggaggatcgcttgagcccaagagttcaagatcagcctgggcaacatggtgaaaccccgtctctaaaaaaattatttaaaaaattaggcaggtgtggcggcatgcacctgcatcccagcttatcaggaggctgaggtgggaagattccttgagcctgggaggtcaaggctgcagtcagcccagatcccaccactgcaccccctaacctgtgcaccagagagagaccctgtctcaaaaatgagtaaataaggaaacggcccggggctccaggcccgccctctgctcccatcgccccacccctgcactcctcctgctcctggtctgagctcccctgtcctcctcctcctccttc

SEQ ID NO: 33408 - DNA, 525 bp, Homo sapiens
aaaaataaaaataaaagaataaagagagaaggagaaggatagaagaagggaaactcaatgaataaaacaccctggggcctactatgtagccagaaaaatgaaaagtaaagaaataaaataaggctgtgcatgtggtttatgctcatagtcccagagctttgggagggtgaggcaggaggatcgcttgagcccaagagttcaagatcagcctgggcaacatggtgaaaccccgtctctaaaaaaattatttaaaaaattaggcaggtgtggcggcatgcacctgcatcccagcttatcaggaggctgaggtgggaagattccttgarcctgggaggtcaaggctgcagtcagcccagatcccaccactgcaccccctaacctgtgcaccagagagagaccctgtctcaaaaatgagtaaataaggaaacggcccggggctccaggcccgccctctgctcccatcgccccacccctgcactcctcctgctcctggtctgagctcccctgtcctcctcctcctccttc

SEQ ID NO: 33409 - DNA, 525 bp, Homo sapiens
aaaaataaaaataaaagaataaagagagaaggagaaggatagaagaagggaaactcaatgaataaaacaccctggggcctactatgtagccagaaaaatgaaaagtaaagaaataaaataaggctgtgcatgtggtttatgctcatagtcccagagctttgggagggtgaggcaggaggatcgcttgagcccaagagttcaagatcagcctgggcaacatggtgaaaccccgtctctaaaaaaattatttaaaaaattaggcaggtgtggcggcatgcacctgcatcccagcttatcaggaggctgaggtgggaagattccttgagcctgggaggtcaaggctgcagtcagcccagatcccaccactgcaccccctaacctgtgcaccagagagagaccctgtctcaaaaatgagtaaataaggaaayggcccggggctccaggcccgccctctgctcccatcgccccacccctgcactcctcctgctcctggtctgagctcccctgtcctcctcctcctccttc

SEQ ID NO: 33410 - DNA, 515 bp, Homo sapiens
cccttcggagtctcatggcctcacatgggaggcgaatcagatttaacaaaccctaaacaaatatttgtgcaggctttacagcaactgagtgaagtgtttctttcttgtccccattgtgtaggtgaagaaactgaggcccaatgagacaaagggacttgcccagggccccactcccaggcatagaaagggagggacttaggattcaagcctgtctacaccaggggttcccaccctgaacctccttctcctgggaatccccagacaagccccatcactgttagttaacccataccttttcrgggctctggtgtgactggatattatctgatgtttccatgcaagaacaaagaagtaaggggtatgtctgccatcggaggtctgtgacttccaaattcaggggaaaatgcccttttgctctcagagtccttgactaacctgcttttaattcccctggaccatgcacatctttgtccaggtgctgttaggagtcctttccctttagggatggtggatcc

SEQ ID NO: 33411 - DNA, 590 bp, Homo sapiens
tttacaactattaatggggcagcttttatgcccacagactgctgaggcccagattaagctagcacaggagtttgacaagagaagaggaaaactaaccctgtgctttgaaaatccaattcacatttcttgagtatgactatgtcctaggcagtggggatataaaggagaataacataacaccatctattggagacaycaatgagaaaaccagaattgtagttcaacgcaataaaggctatgctggtaatacttgtgataatccctgaaccaactggtatggccaatcataggcatgagatctcagctagtccagtcagagtgaatctcagagctctttactgtttaaaaagcttgttcttttttcttctaggtgttggagtgtggatatgagtcatggaactctggggctatattgctgccaggtaagaagctgttctaggaacgacaaaatcaatggacatagaaaggcagactggaggagaagggaaagggagctgagccctgctgatagagtaaacctctggattaaactatgcctgaagcacacatccctgtttgacttttcatttatataagctgtattactcagg

SEQ ID NO: 33412 - DNA, 590 bp, Homo sapiens
tttacaactattaatggggcagcttttatgcccacagactgctgaggcccagattaagctagcacaggagtttgacaagagaagaggaaaactaaccctgtgctttgaaaatccaattcacatttcttgagtatgactatgtcctaggcagtggggatataaaggagaataacataacaccatctattggagacatcaatgagaaaaccagaattgtagttcaacgcaataaaggctatgctggtaatacttgtgataatccctgaaccaactggtatggccaatcataggcatgagatctcagctagtccagtcagagtgaatctcagagctctttactgtttaaaaascttgttcttttttcttctaggtgttggagtgtggatatgagtcatggaactctggggctatattgctgccaggtaagaagctgttctaggaacgacaaaatcaatggacatagaaaggcagactggaggagaagggaaagggagctgagccctgctgatagagtaaacctctggattaaactatgcctgaagcacacatccctgtttgacttttcatttatataagctgtattactcagg

SEQ ID NO: 33413 - DNA, 590 bp, Homo sapiens
tttacaactattaatggggcagcttttatgcccacagactgctgaggcccagattaagctagcacaggagtttgacaagagaagaggaaaactaaccctgtgctttgaaaatccaattcacatttcttgagtatgactatgtcctaggcagtggggatataaaggagaataacataacaccatctattggagacatcaatgagaaaaccagaattgtagttcaacgcaataaaggctatgctggtaatacttgtgataatccctgaaccaactggtatggccaatcataggcatgagatctcagctagtccagtcagagtgaatctcagagctctttactgtttaaaaagcttgttcttttttcttctaggtgttggartgtggatatgagtcatggaactctggggctatattgctgccaggtaagaagctgttctaggaacgacaaaatcaatggacatagaaaggcagactggaggagaagggaaagggagctgagccctgctgatagagtaaacctctggattaaactatgcctgaagcacacatccctgtttgacttttcatttatataagctgtattactcagg

SEQ ID NO: 33414 - DNA, 590 bp, Homo sapiens
tttacaactattaatggggcagcttttatgcccacagactgctgaggcccagattaagctagcacaggagtttgacaagagaagaggaaaactaaccctgtgctttgaaaatccaattcacatttcttgagtatgactatgtcctaggcagtggggatataaaggagaataacataacaccatctattggagacatcaatgagaaaaccagaattgtagttcaacgcaataaaggctatgctggtaatacttgtgataatccctgaaccaactggtatggccaatcataggcatgagatctcagctagtccagtcagagtgaatctcagagctctttactgtttaaaaagcttgttcttttttcttctaggtgttggagtrtggatatgagtcatggaactctggggctatattgctgccaggtaagaagctgttctaggaacgacaaaatcaatggacatagaaaggcagactggaggagaagggaaagggagctgagccctgctgatagagtaaacctctggattaaactatgcctgaagcacacatccctgtttgacttttcatttatataagctgtattactcagg

SEQ ID NO: 33415 - DNA, 590 bp, Homo sapiens
tttacaactattaatggggcagcttttatgcccacagactgctgaggcccagattaagctagcacaggagtttgacaagagaagaggaaaactaaccctgtgctttgaaaatccaattcacatttcttgagtatgactatgtcctaggcagtggggatataaaggagaataacataacaccatctattggagacatcaatgagaaaaccagaattgtagttcaacgcaataaaggctatgctggtaatacttgtgataatccctgaaccaactggtatggccaatcataggcatgagatctcagctagtccagtcagagtgaatctcagagctctttactgtttaaaaagcttgttcttttttcttctaggtgttggagtgtggatatgagtcatggaactctggggctatrttgctgccaggtaagaagctgttctaggaacgacaaaatcaatggacatagaaaggcagactggaggagaagggaaagggagctgagccctgctgatagagtaaacctctggattaaactatgcctgaagcacacatccctgtttgacttttcatttatataagctgtattactcagg

SEQ ID NO: 33416 - DNA, 993 bp, Homo sapiens
cattcagataggcagtaggagcccgctttacagataaggggactgaggcccagccaggggaaggaaggggctcagggtccacaaggggtctgggcggggccaggaactacacaagttcttctgccttcctttgcactcttgtcgctgctgcctggcactggccttaactgtcagccactgtgacctgcaggactccctgcgtctgagcccggtgctaagccccagagcttcttgatactctcattagggggaccgggcctgtggcagaaacaaatctcttttggcttttattattaaaatagaataaagtgccaagctttctctgtgggggagggaaatgatggaggtggggaaaaaaaaacagccttccagccccgacgccgacacccccatgcagcgcccctctcagctcccagaaaggagagttccttccaggtgagttgtcagctctttctggggcagaagaaggtggaaaactaattttaacctctcaggattttttttgttttttttttttttttagccttcatgtctttcagaccaggggaaggacatcaggtacccctctatgtccattgagacacaggggaagaagggaaccaagggtgattttgcctccmccaggcaggttttgcaaaccccaggtggatactgaggccaatctgggctcggcaggtctctaccttctcccccgcagcagaaaatgaggtccctcctattccacctcttcccaaatccaaggaaggtgtcagcaggctgaagtcagatatgtgagtttatgaaaactggggcctgagttccagaccacctgcttcagggatttgctgtatggcgttgagttaagtcacctcctcctctgggcctgagttgcctcatctgtcccaagaggaacaacttccatcttgctcacttcccagggtggccatggaggcttaaagcagtgtgggctgatgtccaggccccagcatttagaggctgtaaccaaactggagc

SEQ ID NO: 33417 - DNA, 605 bp, Homo sapiens
catttggtccccattcgttgggtattatcatagtagtgggcatgttcatatagttatttctgaataataatggagtttaaggctttcaacacttctcccaggataaaaacaaagtgatatttaagttgtatttcatgagaataaacatgtgaatttcttcagggttagttccccacctggaagttaaaataatatactatatccctccrgagggtttacactagcctccctgatactctgcctaagatatatttttctggaagtgtccaacccagctgaaaatagctttagttggttactttatttagaaaaatagttaaaactatatttcagctaaaaaaaaaacctaaacaaaatggaaattcaggtactattgtaacattactcatttctccaaaggatgtgttttcttgagtgtcttagggaggctaatcagaaatactctacatctattttttaaattttttttctggaaagttagagctctcaaatatcatgaaatacaatttcccctcaactggaaaagggctcctctgcataacagatagtgcccctgattgacaaggatgggtcctgactaacgggcatctatgaagtaggcatgc

SEQ ID NO: 33418 - DNA, 568 bp, Homo sapiens
tggacagcctgaatccagaatgcagagcggtaagcgagggcattgtaatagttataaaaaataatagcaatggcctacaaatagaacattagtggtggaaatgttgaggagaagatggatagaaaagatacttcrgaagtagaagcaacagaattaaatggctaggtggcaaggcagaaatgaataaaagatgattctgaatattttagcctggaactttaagtcctgttttcaacattttgagataaaaaatacacagacagtgaaaaatataggcttggagattaggaatagagatttggaaaatatttataatgtaatccttggctttaaatttgattttccagggtgaatgggtagaggattagatataagacaagcaagatcagaacattaaggggcgctgacatttagagcgtgggtgaataaaaagtcgctgaaacagtgaagaaacagacaaaggaagaaatctagggaatgctgtgctgtagtaaaggatcttggtagattcctttctctttgttcatgaatgatgacatggcagaagtaaggcttatatctctgactt

SEQ ID NO: 33419 - DNA, 550 bp, Homo sapiens
agagtagattaaacaaggtggttgtttctactttcaccaacttcccactgagaactccagcccctgctagagataactgattaatgtctttgaagagtatttatccaggtttacttgagggcaaatgtcattacttagagaaggagcaaggcagtgagaagaggggtgataacatgaaaggcagaccaaactacacatctttttgcaagcagctcttcagtcgaaacccttgacttatattcctcttctcacttccattgtccgttactactgattctggagaactgcactgggaagaggagtcccctcatccactggtaccttctttcgtgaatgctctaagccaaagttcactctactcagtatatgtgctgccgaagcaagcacgaagttcactctactcagaattagctgtcaatatgatcccctggccttctcattctcccaaaatttaacaccatctttgttcactaattcctcatttccatctaaatgtctaccatattctcattgtctttcttcaattcttttttatttktatttttttccc

SEQ ID NO: 33420 - DNA, 1513 bp, Homo sapiens
gggaagggaagatagcagagggctcttatagccaatcctttcctctttggggagggctgacctattaaaggggaacagatgtcttctaaaataagaatgattttactatggaattatttactaataatcattattcagagcagcaaacaaaagattaagttaagctgatacatcaccgtatgaattattggttgtagaagcccccagacttctgcttggtttataattatataacatggtttaaaattacctgtaagagaaaatggacaggaaaattaccacatagccacataatattgagttcttatgagtagtaaatgcctagaaactgtaaggttgtttttatcagctgagcatatggggacaatgtagtggatgaatttcactgtgggtaaatcttgatggactatgaaccattggctcttcatttatatgtaaaactacccagtgtgttccagtcatcgtacaaggtactgaggtccctgccccccagatctcacagtccagcggggaagatcagcaggaaagcacatgctatgacagtgtgtcagggagctcaagggggccccaacaccccaagggggccctaagctgaaagagaggtctcaagaggcctcttgggggtgatggcacctaagataggccttggcacaagagatggatctgagggtaactgtagattattccttcaaaacagcagatcaaggctgaggtgagaggattgcttgagcgcaggagtttaaggctgcagtgagctgtgatccggctgccggagcaacagagctagaccctgtctcaaaaacaaaaaatgaaaaacaaaacaaacaaacaaacaaaaaaatcccacagatcagacagcttcctatgcatacattttggagcacataaagaagatggttgaggagaaagtagaaatgtcctcaaaaccattaggtatttctatgtgtcctgtgtatagttctgcacagttcaagaaaaatatagcaaacttggagaacagagaagaataattcaagyaataacatatcaacttccatttgcacacactgcctattacaacgtaaaagccagtcttacagactgccatctgttgatagctgacccctcctcaccattcctccctccaccaccctctactccactccagtcaccagcaacagctccttcaataactgatggataaagacctgctaactgcaactttgtttaagcaacattctagaagaagacacccacacatcagggtcccagtagcaagactaaagttgatctatgtggcaaataaaggctgaaatctgaattttcaggattgagaatgtatgtctctatgaatagagcttatgtctgatagtgttgtggtaaagaaaaagtgggactcttcttaatctgaaacaatgaaagttgaaaggagggtatctggtgaaattgtataaaatcatgcgaaacagagttggcctgtctttccatgttgcacaacagcagggggcaccatgcatcattgacattgtgatca

SEQ ID NO: 33421 - DNA, 1513 bp, Homo sapiens
gggaagggaagatagcagagggctcttatagccaatcctttcctctttggggagggctgacctattaaaggggaacagatgtcttctaaaataagaatgattttactatggaattatttactaataatcattattcagagcagcaaacaaaagattaagttaagctgatacatcaccgtatgaattattggttgtagaagcccccagacttctgcttggtttataattatataacatggtttaaaattacctgtaagagaaaatggacaggaaaattaccacatagccacataatattgagttcttatgagtagtaaatgcctagaaactgtaaggttgtttttatcagctgagcatatggggacaatgtagtggatgaatttcactgtgggtaaatcttgatggactatgaaccattggctcttcatttatatgtaaaactacccagtgtgttccagtcatcgtacaaggtactgaggtccctgccccccagatctcacagtccagcggggaagatcagcaggaaagcacatgctatgacagtgtgtcagggagctcaagggggccccaacaccccaagggggccctaagctgaaagagaggtctcaagaggcctcttgggggtgatggcacctaagataggccttggcacaagagatggatctgagggtaactgtagattattccttcaaaacagcagatcaaggctgaggtgagaggattgcttgagcgcaggagtttaaggctgcagtgagctgtgatccggctgccggagcaacagagctagaccctgtctcaaaaacaaaaaatgaaaaacaaaacaaacaaacaaacaaaaaaatcccacagatcagacagcttcctatgcatacattttggagcacataaagaagatggttgaggagaaagtagaaatgtcctcaaaaccattaggtatttctatgtgtcctgtgtatagttctgcacagttcaagaaaaatatagcaaacttggagaacagagaagaataattcaagcaataacatatcaacttccatttgcacacactgcctattacaacgtaaaagccagtcttacrgactgccatctgttgatagctgacccctcctcaccattcctccctccaccaccctctactccactccagtcaccagcaacagctccttcaataactgatggataaagacctgctaactgcaactttgtttaagcaacattctagaagaagacacccacacatcagggtcccagtagcaagactaaagttgatctatgtggcaaataaaggctgaaatctgaattttcaggattgagaatgtatgtctctatgaatagagcttatgtctgatagtgttgtggtaaagaaaaagtgggactcttcttaatctgaaacaatgaaagttgaaaggagggtatctggtgaaattgtataaaatcatgcgaaacagagttggcctgtctttccatgttgcacaacagcagggggcaccatgcatcattgacattgtgatca

SEQ ID NO: 33422 - DNA, 1513 bp, Homo sapiens
gggaagggaagatagcagagggctcttatagccaatcctttcctctttggggagggctgacctattaaaggggaacagatgtcttctaaaataagaatgattttactatggaattatttactaataatcattattcagagcagcaaacaaaagattaagttaagctgatacatcaccgtatgaattattggttgtagaagcccccagacttctgcttggtttataattatataacatggtttaaaattacctgtaagagaaaatggacaggaaaattaccacatagccacataatattgagttcttatgagtagtaaatgcctagaaactgtaaggttgtttttatcagctgagcatatggggacaatgtagtggatgaatttcactgtgggtaaatcttgatggactatgaaccattggctcttcatttatatgtaaaactacccagtgtgttccagtcatcgtacaaggtactgaggtccctgccccccagatctcacagtccagcggggaagatcagcaggaaagcacatgctatgacagtgtgtcagggagctcaagggggccccaacaccccaagggggccctaagctgaaagagaggtctcaagaggcctcttgggggtgatggcacctaagataggccttggcacaagagatggatctgagggtaactgtagattattccttcaaaacagcagatcaaggctgaggtgagaggattgcttgagcgcaggagtttaaggctgcagtgagctgtgatccggctgccggagcaacagagctagaccctgtctcaaaaacaaaaaatgaaaaacaaaacaaacaaacaaacaaaaaaatcccacagatcagacagcttcctatgcatacattttggagcacataaagaagatggttgaggagaaagtagaaatgtcctcaaaaccattaggtatttctatgtgtcctgtgtatagttctgcacagttcaagaaaaatatagcaaacttggagaacagagaagaataattcaagcaataacatatcaacttccatttgcacacactgcctattacaacgtaaaagccagtcttacagactgccatctgttgatagctgacccctcctcaccattcctccctccaccaccctctactccactccagtcaccagcaacagctccttcaataactgatggataaagacctgctaactgcaactttgtttaagcaacattctagaagaagacacccacacatcagggtcccagtagcaagactaaagttgatctatgtggcaaataaaggctgaaatctgaattttcaggattgagaatgtatgtctctatgaatagagcttatgtctgatagtgttgtggtaaagaaaaagtrggactcttcttaatctgaaacaatgaaagttgaaaggagggtatctggtgaaattgtataaaatcatgcgaaacagagttggcctgtctttccatgttgcacaacagcagggggcaccatgcatcattgacattgtgatca

SEQ ID NO: 33423 - DNA, 524 bp, Homo sapiens
gatcactagtaccaatggatactgggagagtgtcactgctgggaccacagtatgaggagagaggagtggcaggaaagagcatcatccatgcagccggatgcttgtgcactgcacacctggtcagggaggctgcaagagctctgcttccttgcatttgcccagagaaacacttyccactgtacaactcatttacatctcatttgacctttaggaaggacacagaacaataattctcagctccacttcccaataaggttgtacaggctcaaagataaataattgatatcaaataacaatatgatttaagtttaatataaataataaatgataataatatagtatcaaataattgactatgttcacacagcaagtaagttatggagactgaggtcccatatctctaggggtgcgcttcctacacaataatagccttgataataaatgacacttatttagcatttaccaggtgcctctcactgtcattctaagctacacaaacatatatatatgtatatatgtatgta

SEQ ID NO: 33424 - DNA, 560 bp, Homo sapiens
tggaaggaggccctgaaccttggaccacccacactcacgcattacggaccttcgaaaaagcagagggtgaccgaggagcggagggcgcgccacgtcccggcctcggagccagggagtcccggcctggtccccgcagatctcccatttcaggcacctctgttactggagctgaaaacccttagggaagaaggaagggaatgtcstggtctgttcgggcaaaggcccagtcgccccttcccggcccatcgcagccccctcggaaccggctgcggcaggcgtcagccccctctcggctgaaaggctgtgctgaaggagagtggcttctggtttggactcccagaaccctggccccggacttccagccccgcaagcttgtatttcgagggctgctctaccctccttccctcccctccccccgcccacggcttgccaccttcgttactaatttgggggagattttaaaactttattttacattgtccactgggaaaatcaagactttttttaaagggtaaaatatcttgtagcaacatgatttttccactccttcatttgcaacc

SEQ ID NO: 33425 - DNA, 531 bp, Homo sapiens
ctaatattatataaggcttagtctaaaacgtagtttttkccttaatttatttttacttattgcaagaagttgcataagaagttccaaggtcctgttatcttgtctatgaggaaagagcccatttaaccaaatggggagagagcagaactgggcacctgtgctactgttgcttgaccagggtcaggaagaacactcagtgactgtcatcggttctcccgtgcagaagcctttttgctggaagaatgcagattattattgattccattactggaaatgtagggaaatcttcccccacaaccttgctgctgtttctttcttggtgcatacaattatttttgtttcacttggatgcttgaaaaatttattccaagaaaacaaccaaataatgtctctttttatttatgtgtaacacatatgtatgatatgtttcacttttctacatatatatggaaaaacaaaaatagatatcattatatataagtatatataaaatatatttactatatatataaagtaaatataaaatatatt

SEQ ID NO: 33426 - DNA, 531 bp, Homo sapiens
ctaatattatataaggcttagtctaaaacgtagtttttgccttaatttatttttacttattgcaagaagttgcataagaagttccaaggtcctgttatcttgtctatgaggaaagagcccatttaaccaaatggggagagagcagaactgggcacctgtgctactgttgcttgaccagggtcaggaagaacactcagtgactgtcatcggttctcccgtgcagaagcctttttgctggaagaatgcagattattattgattccattactggaaatgtagggaaatcttcccccacaamcttgctgctgtttctttcttggtgcatacaattatttttgtttcacttggatgcttgaaaaatttattccaagaaaacaaccaaataatgtctctttttatttatgtgtaacacatatgtatgatatgtttcacttttctacatatatatggaaaaacaaaaatagatatcattatatataagtatatataaaatatatttactatatatataaagtaaatataaaatatatt

SEQ ID NO: 33427 - DNA, 615 bp, Homo sapiens
ttagaatttagattattagaatcgattattataatttagattatcaaattttaaaaacagttgcttcttgttttatcttttcatttataggataattagtattttgatgatttgttacatggtagttgattaaacttgatatttcctccaagtcagtttttcctgaattccctatttttgtcaatagcaatacttttggcaccaaggtttaaaattctgaagacctttcttgacttatcacattcccccaacccctacatctaagcagttactaaggaccctggaattcctttatagtcagtcccgtccttttcattctcatggctgtgctgaaggttgggctcctgccctctcatttggactatcatataacttcctaactggcttccccacttgtagttttccatttttctttcttttttttttttttgttttttgttttttkttttttgagatggaatctagctttgttgcccaggctggagtgcagtggcacgatctcagctcactgcaacctccgcctcccaggttcaagcgattctcgtgcctcagcccccttagtagatgggatcacaggtgcccgccaccatgcctggctaatttttgtatttttag

SEQ ID NO: 33428 - DNA, 497 bp, Homo sapiens
ctcatgaagatcagaacctgacaatgtctcctccctttttgctctgagaagctggatgtgatgattagggaaatgtggaggtgcagcatgtctgacctactccaaagtttcaaatggaccactaacaatattccaggaggcagaatggagaaacatgggctgcaatgttcaaccattctctatataaacaattggctaaatcatctttgcttaaagactgttgataagtagattggcttcatcttgtaagtccctaatgttgagccacagggctgaggtttgacatttttgtcagtagtttcgatgaatatgtatcatgcttaagcatgacggccagaaaggaggtcatgagcagratgtctgggtgtacacgtgcaatacaattagattagatcaaggggtgcatgtggaggaaaaatgagccttgatcctcacatggcaaacagtggaagacagaagtaagctccttcaagcctcttcttataagggcggtaatc

SEQ ID NO: 33429 - DNA, 462 bp, Homo sapiens
atttgtgaccctgtaaatggaaggatctcctcatctctcctgctccagcaaagtcaagggacattgccctctcaaaattttataatatttaatttttatgtaatcaaacaaaaaccatttcacacctttatagttcttcacacatcccaattcagatatttcagctrgaaagcagatcagcctgcagggactgataaaaatgcagtgtgtgttgtctttgctgaattaggttgataagaataaacctggtgaaagaaaggcttttccttcaaaacctctcaggtggaaagcagcagacttcaggagtcaagagaagggatcagaaaggtaaactagaggttgaaagaggaatggtgcagtggtcaaaatgcctgttaaagtaagaagatgcagacagccagagaaggataagcctgaaattgtcttggattcatttagactcttggaaacagaattagccca

SEQ ID NO: 33430 - DNA, 609 bp, Homo sapiens
aggggtaggggaaagggagcctaagagagggctaaagagaggaccaagagctataaaaaattctggctattcctacgtgattctgcaacttataccctgtgggctcctcctgcccatatgttcaccttcaagcccatagtgcccttagctatttacagcaggcctctcttatgtattgattttggtctacggtttccttattttatctgktgccttcagattttaaaaaaagaatacacacacacacacacacacacacacacacacacacacacacacacacacacatcttgttattttgtaggatttggagagggaatggaaacttcccaaatgatcacctctggtatttcttgattatgatatctccaggtttagagaaaagaaagcaagttgggggtcagacaaagggaagaagaaaaaaacgtattccacatatttaaagtaaatcttctgcaaacacagaaatgcgaagtgattaaccatcctcaattgttttttcattttatatactaacgagctattctttttcatttttaggtcttgaatataatcatggccaaaccttatgaatttaactggcagaaggaagttccctcctttttgcaa

SEQ ID NO: 33431 - DNA, 643 bp, Homo sapiens
cctgaacggagctgctgtgacatggatcagggggaatctcctcgctgggtctccagtgagatgcccttttcagtcctttcaccagagagaacaggctctttttcttttcttttttccccctgcaggttttggcagttacaggttgcagggttctctgggcccatccaggagatgagagagaaaaagaaaactcagggcctggtacagcgtcacccccaaagtcccaaggttcctggacagcctttcttcctctccatctcctagagtcctcttaygtctgttaaattatttccagggtgtctagttgtatttagagggcagatgccacctcgtcatagaacaccagggtccactctccaggcatttggaaagagttgccacgaggtcctcggaagggtgtgacagttcacacgcccaccagcagcgtttccacgtctccatttcctctgcccctgacagcatctaatgctatgatttttgtttgaaaatttggcttttggttcctttatgaggtgattaattaatacaggctgctggctccttcccatgaatccaaaccttggagatgccatcaaagggatgacagttgatggagcccagaacctaagaggaaacccctgagagcctcgcagaggctgggcaa

SEQ ID NO: 33432 - DNA, 728 bp, Homo sapiens
atcataagctcaggacaaggtgtcacactgaccagacctggcccagcactcatcctagtgagccacttcccaccctggtggcttctctgctgggcgaatggctgcaagtgacctgactgcatcccatttcccagtggctgcccccctgagcctggaaaacagggaatgtggaggaagctgcccatcccacccacaggccctctggcttggacagcagctcctttctccacaggagcctcctgaagacttcaaaagcagactctggaaaagcatatgtaatcttggccttagtggggtttcctgggtccaaaaatatgtgaaattggatctgatatggtttggctgtgtcccctcccaaatctcatcttgaattgtagctcccataattcccatgtgttgtaggagggacctggtgggagataattgaatcatggggtgttcccccatacagttcttatggtagtgaataagtttcacaagttctgatggttttataaggggaaacctcttttgcttggctctcattctttcttccctgccatcatgtaagatgtgacttgctcctccttgccttctgccatgattgtgaggcttctgcagccatgtggaactgtgagtcaattaagcctctttcctttataattacccagtctcaggtatgtttttattcgcagtgtgagaacagactaatactgatgtgagcgaaagmaaaaaaaaattcatttttc

SEQ ID NO: 33433 - DNA, 739 bp, Homo sapiens
tcaggagatgtggaatctgccagtgccttgatcttggacttccagcctccagaaatgtgagaaataaatgtctgttgtttataagccacagaaatttatggtattttgttagagcagccccaatggaataagagacaaggtaggtggagtttgggttcacctacctccagacactgcctttggatgaggctcctgcccctcccacttgaatcaatccctcctcaaggagggcattttacctgacacctccaatcagcccccaagtgaggctccctccctgcagaaatccctgacctggctctgatgaaccctttcctttcaaaaccaaacagcaggagaacagggcctttgatgggtctcgacagagccccctgagcagtgtgccagtgccaccgctgctatacagagctcctacctatgccaaagggccccacattcactcactaaccaaagttcccttttctaagatcccttcgtcctttctaactcccagagaccatgggaacccctacacgttgcccagcaatctcctttcttgatctctcacaaaccccacctgctaccawactccccttcagggaccgttgctcggacctggtttccacgggctattactccctgatgctctgccccctacaacctgctgtcagaaaaccttccatcctctgcctccatttctgccacgtctgattaatacccttgccctgtcattctttttctcaacacgaatgtccaccca

SEQ ID NO: 33434 - DNA, 739 bp, Homo sapiens
tcaggagatgtggaatctgccagtgccttgatcttggacttccagcctccagaaatgtgagaaataaatgtctgttgtttataagccacagaaatttatggtattttgttagagcagccccaatggaataagagacaaggtaggtggagtttgggttcacctacctccagacactgcctttggatgaggctcctgcccctcccacttgaatcaatccctcctcaaggagggcattttacctgacacctccaatcagcccccaagtgaggctccctccctgcagaaatccctgacctggctctgatgaaccctttcctttcaaaaccaaacagcaggagaacagggcctttgatgggtctcgacagagccccctgagcagtgtgccagtgccaccgctgctatacagagctcctacctatgccaaagggccccacattcactcactaaccaaagttcccttttctaagatcccttcgtcctttctaactcccagagaccatgggaacccctacacgttgcccagcaatctcctttcttgatctctcacaaaccccacctgctaccatactccccttcagggaccgttgctcggacctggtttccacgggctaytactccctgatgctctgccccctacaacctgctgtcagaaaaccttccatcctctgcctccatttctgccacgtctgattaatacccttgccctgtcattctttttctcaacacgaatgtccaccca

SEQ ID NO: 33435 - DNA, 739 bp, Homo sapiens
tcaggagatgtggaatctgccagtgccttgatcttggacttccagcctccagaaatgtgagaaataaatgtctgttgtttataagccacagaaatttatggtattttgttagagcagccccaatggaataagagacaaggtaggtggagtttgggttcacctacctccagacactgcctttggatgaggctcctgcccctcccacttgaatcaatccctcctcaaggagggcattttacctgacacctccaatcagcccccaagtgaggctccctccctgcagaaatccctgacctggctctgatgaaccctttcctttcaaaaccaaacagcaggagaacagggcctttgatgggtctcgacagagccccctgagcagtgtgccagtgccaccgctgctatacagagctcctacctatgccaaagggccccacattcactcactaaccaaagttcccttttctaagatcccttcgtcctttctaactcccagagaccatgggaacccctacacgttgcccagcaatctcctttcttgatctctcacaaaccccacctgctaccatactccccttcagggaccgttgctcggacctggtttccacgggctattwctccctgatgctctgccccctacaacctgctgtcagaaaaccttccatcctctgcctccatttctgccacgtctgattaatacccttgccctgtcattctttttctcaacacgaatgtccaccca

SEQ ID NO: 33436 - DNA, 524 bp, Homo sapiens
atatatagtactatatataataytatatataatatataatatataatatatagtattatataatatataatatatagtaatatataatatataatatatagtaatatattatatataattatataatacatcataatatataatatataattatataatatagagtaatatataatatataatatagattaatatataatatataattatataatatacaatatagagtaatatataatatatacttatataatatataatatagaataatatgtaatatacaattatataatatacaatatagagtaatatataatatatacttatataatatacaatatagagtaatatataatatataatatatatattacccttacacccttacagatgaggcagcatacagtacatacagctttgtgtcctgaacttttcattgaatgctatcttgtgaatatcttccttatacctgcaggggcgtaccaaggtttgggggagcaggtgggagtggttggttctgggta

SEQ ID NO: 33437 - DNA, 524 bp, Homo sapiens
atatatagtactatatataatactatatataatatataatatataatatatagtattatataatatataatatatagtaatatataatatataatatatagtaatatattatatataattatataatacatcataatatataatatataattatataatatagagtaatatataatatataatatagattaatatataatatataattatataatatacaatatagagtaatatataatatatacttatataatatataatatagaataatatgtaatatayaattatataatatacaatatagagtaatatataatatatacttatataatatacaatatagagtaatatataatatataatatatatattacccttacacccttacagatgaggcagcatacagtacatacagctttgtgtcctgaacttttcattgaatgctatcttgtgaatatcttccttatacctgcaggggcgtaccaaggtttgggggagcaggtgggagtggttggttctgggta

SEQ ID NO: 33438 - DNA, 878 bp, Homo sapiens
tccttgagcttatgaggtcaaagcagcagtgagctatgatcgcatcccactctagcctggacgacagagtgagaccttgtttctaaaaaaacacaaaaagccccaaaaaacgctttcagagatcatttgtttaacctcttatttaaatgaggaaactggccgggtttcctccgccttctgagttcaagtgattctcctgcctcagcttcctgagtagctaggattacaggtgtgtgccaccacgccaggctaattttgtatttttagtagagacagggtttcaccatgttggtcaggctggtctagaactcctgacctcaggtgatccaccagcctcagcctcccaaagtgctagaattacaggcataagccactgtgcccagccccatatttacttttcatagccaccttaagacctcctctgccacggccatggctagaatttcactagcctctggcacaaagcagtggtgcccaggcatatggcagggataatgctctcccagccaaagtagcaatgtcatctcttctattctttcttcttctccctctaagtcactcagccctaaaccaggtgtgttccaatttcctctactatatgtgcctcaaccttctctcagctccagagaagacaggaccaccttccaaagaaggtaagatgctacaatttgaccactcatgtggcctgtgctggtctttagagtctgggtgccttgctgattgactagatagtgagttagtacagccaygagatttctttgcctgaggctgcccagaggaatcggagtgatgcaattataggttgattcctagggatatgaagtaatagaactggaaaatgatggaacccaaggctcctggcaccttagagttgagaa

SEQ ID NO: 33439 - DNA, 583 bp, Homo sapiens
cataatgaactgactgtatcatcacccagaacaagccagcgaatgaccatggcaaccttattttatggtctcccactatctcacaactaactatacagtcttcaccactgaagttagagaggtggccactttgcatctgtatttctgcaccatcagatgcaggtctggcagcaggaaggggctgctgctgcaggaatgcagggaggtctcagcctcaacaaggccctttccccttgtagaacacaagtgttaggctgcagggaaatggcagtgaaccttcacccccagggcacatgtgaagacccactgcagctgggagaagagggagggatggaaaacyatcctcgacccaggattgtatgccaataccattacgaggttcctacttttgggaaaggggcaagaaactctcacataggatctgccaaacgtactaggcagagttttggtgctgtggaaagggggaaggagcaagatcactgaggaagccccactctcaagacctagggcgacggagtttgcataagattgaatttgaaccaggacaacagacacccccgctttctaaggctagcaagcatca

SEQ ID NO: 33440 - DNA, 727 bp, Homo sapiens
gatccgttttgagttatttttgtgtggggtgagacgtgggtcgaagattttgtttttgtccatggaattgcttttgcgcttttgtaaaaaaaactcatccgggcatgtttgtttgggtctctttgtgggttctctgttgtgttccatggaattrcatgtctgtccctctgtcaatactacactgtgttgactactgtagttctgtgtcttgaaactgggtagattgattcgttccaccttgttctctttcaaaatggttttagctatttttgctcctttacatttccatagaaaacttgggatgacttgtccttacctattaacacatcttgctgggttttttttttaataggaattgcattaaacctgtccatcaatctggaaggacctgtcatctccacgttgttgtatcttccaacccacgaacgcggccgtgtctctaggtgtgtgctgacgtctttcagcagcattgctgagttttcagcatgtaagttctgtgcatgttttgtcaggtttatacctaagtatttcgctttttggagtggttttaagtggttctgcgtatttaatttaggtgtctgtgtgttcattgctagcgtacaggaatactattgaatcatttaggttgatcttgtgtcttctgactttgctgaactcacttattaattttctttctttttttttttttttttttttgagatggagtttcactctgtcgcccaggctg

SEQ ID NO: 33441 - DNA, 557 bp, Homo sapiens
tgtgactgattattattattaaaaggttaaaaaaatcataaactgaagtgaagkactgttggaacttcataggaataaatgtaaaaatgccacatttacatttcataagcgaattacacaaggataggattgagaggtccaacctaacagcatttggggagggttggagggcttcatggtggtaaaaaaattatattattgtttatggagagcccgttatggatcaagcattggatatattaggttggtgcagaagtaattgcagttcttgccattaaaagtagttgcaaaaacaacaatcacttttgcaccaattgaatagattaaggtgagtttctggccttgagaaatttacaatctaataaacaagtatattgtgaagtgtaaaggaaagcaggactaatctattggagaaaaccttcctagggggttttcatttgaagaatgtcagatccatgagtcatttggtaaacaattacttagtgctttgttagggggcagttacatgttggtgattcagggataaaaaaccacttctggcctttaagaggctcata

SEQ ID NO: 33442 - DNA, 611 bp, Homo sapiens
tttctcatctttctgggcttattattgaggttgttgacctcaaagattgaaggtagataagcccagaaaaattgtttggattttttattttacacttttaacagtatggccacttttctgtaggattgctgtggttttctggggtccctagtcacctggtccctagycacctcagatttttcagtacttggagttatcaccagtgaaggctgcaaaacatcaaaaatggcagcatttcccttcctctgggagctccatcccagggtggtacaaacctgttgccagcccaaatgtacttgcaggaggtggctagagaccccagttgggaggtctcacccagtgagaagaaaggggagaggaaggggatcggggacctacttaaaaaaagcaggctagccatgcttttgtagagcaactgtactgtgctgggatatcacttccaccctcagtcaccttgggctttccaaagccgggagactggaacagctaagttgctgaaacagcaaagatagtggcctgccctttcctctaggagctctgtcccaggaagtttttaaatctttgttggcaaaagaatattgtcagaagtgattggaggctccagttgggag

SEQ ID NO: 33443 - DNA, 732 bp, Homo sapiens
atatatacatattagaaatagcataaaaatacctaggaataaatttaaccaaggaagtgaaagacctgtatgctgaatactgcaattgcttaaagaaattaaagaagacctaaataattggaaagacatcccatgttcatgggttggaagactaactactgataagatgataatacaatttgatatacagattcaatgtattccttataaaaatttcaacatttgtttgcagaaatagaaaatcccatcctaaaattcayatggaaaatcaaattaccctgaataaccaatgaaaaccttggagaaaagaataaagtttaaagacacatacttcataatttcaaaactttacacaagcctacagtaacctaaagagtgtggtgctggaataagaataggaatatagaccaataaaatagaaaagagagcccagaaataaacctcacatatacggttgattgattgattttcaacaagtgccaagaccattcaatgggaaatggacagtattttcaacaaatggtgctgggaaaactggatatccaaatgcaaaataataaagttgtagtatttacaccatctacaaaaattaacccaaaatggatcaaggacctaaatttaagaagcaaaactataaaactcttagcagaaaacataaaaatctttattagacaatgtaattttcaagtattgcacaggtgataaaaataaataaatggagcttcatcaaaa

SEQ ID NO: 33444 - DNA, 732 bp, Homo sapiens
atatatacatattagaaatagcataaaaatacctaggaataaatttaaccaaggaagtgaaagacctgtatgctgaatactgcaattgcttaaagaaattaaagaagacctaaataattggaaagacatcccatgttcatgggttggaagactaactactgataagatgataatacaatttgatatacagattcaatgtattccttataaaaatttcaacatttgtttgcagaaatagaaaatcccatcctaaaattcacatggaaaatcaaattaccctgaataaccaatgaaaaccttggagaaaagaataaagtttaaagacacatacttcataatttcaaaactttacacaagcctacagtaacctaaagagtgtggtgctggaataagaataggwatatagaccaataaaatagaaaagagagcccagaaataaacctcacatatacggttgattgattgattttcaacaagtgccaagaccattcaatgggaaatggacagtattttcaacaaatggtgctgggaaaactggatatccaaatgcaaaataataaagttgtagtatttacaccatctacaaaaattaacccaaaatggatcaaggacctaaatttaagaagcaaaactataaaactcttagcagaaaacataaaaatctttattagacaatgtaattttcaagtattgcacaggtgataaaaataaataaatggagcttcatcaaaa

SEQ ID NO: 33445 - DNA, 1186 bp, Homo sapiens
cttcccatccctggccaagaggtgagcatttggcccaacttaggccagctgggctctgcctggggacttgaagcttgactgagggtcaaagggctgaaaatgtttggagatgattcttctggttgacaggttctgtagatagcccctacatcatgccacctgtgtccatggagcttcccaaattcctgcctctttctgagacctggttcttcacattgttctttgattcagttcgctacctcctacctttccagtaggttctctttatgttccagttatctgaagttagtttccacttcttgtgagcaaaaaactcaactgttacaattcaatatggtaaagatatcccaccccaccaagttaaggagccaatgggaggcttttatggatctttaaaaaagtgattcaagtatccatatgaaagaaaaaatgggtgagaataccactgagggggaaaagaagaaagagagagagagagacagacagacagacagacagaaagaaagaaaggaaggaaggaaggaaggaaggaaggagaaagaaagaaagaaaaagaaagaaagaaagaaagagaaagaaagagaaagaaagaaagaaagaaagaaaacaaagaaagaaagaaagaaagaaagaaagaaagaaaacaaagaaagaaagaaagaaagaaagaaagaaagaaagaaagaaagaaagaaagaaagaaagaaagaaagaaagaaaggagggagggagggagggaggaaggaaggaagaagagagagagagaacaggcatttcctccaccagatattaagataaatttaaaacaacagtaattaaaaatgtgtggccccaacaatagcatagacagatcagtataacagaaataaatccaagaataattttaaagtktttaatattttataaagcgagcatttcaattcactgggaaaataaaagatcatctcataggaggtctaggtcggcaggctaaccccctggggaaaaatatttttaaaattattaggacctgtctcatatcatcacgaaaacttaaaaatacatatggcttacttaacaaattaaatgtaaaacataaaatgaatttttttttttaaatttcagtgataaggtctcatttggttgccaagctggagtgcagtggcgcaatcatagctcactgctgtctcaaactcctgggatcaag

SEQ ID NO: 33446 - DNA, 1186 bp, Homo sapiens
cttcccatccctggccaagaggtgagcatttggcccaacttaggccagctgggctctgcctggggacttgaagcttgactgagggtcaaagggctgaaaatgtttggagatgattcttctggttgacaggttctgtagatagcccctacatcatgccacctgtgtccatggagcttcccaaattcctgcctctttctgagacctggttcttcacattgttctttgattcagttcgctacctcctacctttccagtaggttctctttatgttccagttatctgaagttagtttccacttcttgtgagcaaaaaactcaactgttacaattcaatatggtaaagatatcccaccccaccaagttaaggagccaatgggaggcttttatggatctttaaaaaagtgattcaagtatccatatgaaagaaaaaatgggtgagaataccactgagggggaaaagaagaaagagagagagagagacagacagacagacagacagaaagaaagaaaggaaggaaggaaggaaggaaggaaggagaaagaaagaaagaaaaagaaagaaagaaagaaagagaaagaaagagaaagaaagaaagaaagaaagaaaacaaagaaagaaagaaagaaagaaagaaagaaagaaaacaaagaaagaaagaaagaaagaaagaaagaaagaaagaaagaaagaaagaaagaaagaaagaaagaaagaaagaaaggagggagggagggagggaggaaggaaggaagaagagagagagagaacaggcatttcctccaccagatattaagataaatttaaaacaacagtaattaaaaatgtgtggccccaacaatagcatagacagatcagtataacagaaataaatccaagaataattttaaagtttttaatattttataaagcgagcatttcaattcactgggaaaataaaagatcatctcataggaggtctaggtcrgcaggctaaccccctggggaaaaatatttttaaaattattaggacctgtctcatatcatcacgaaaacttaaaaatacatatggcttacttaacaaattaaatgtaaaacataaaatgaatttttttttttaaatttcagtgataaggtctcatttggttgccaagctggagtgcagtggcgcaatcatagctcactgctgtctcaaactcctgggatcaag

SEQ ID NO: 33447 - DNA, 571 bp, Homo sapiens
cagcactttgggaggctgagacaggtagatcacccaaggtcaggagtttgagaccagcttggccaacatggtgaaaccccgtctctactaaaaatacaaaaaataagccagacgtagtgtcagcagcctgtaatcccagctactcgggaggctgaggtgagagaattgcttaaacctggaggcagaggttgcagtaagctgagactgcatcattgcactccagcctgagcaacaagagcraaactccatctcaaatatatacatatatatatatatatatatatatatatatatatatatatatatatatatacatagagagagagagagagagagttaaaaaactctgtgaaatggttacatccttaggaaatattattttcaaagctgaagatgatatcttaaacaacaacaacaacaaaaaaaacccttaagtccttctggggttgacctccatggatctctagcgaagtttcagtataggtcgtgggacatctcagactgctaatttagagaagctaaaactaaagagttttaagtctgtttcaacatgcactgctgcctgttttac

SEQ ID NO: 33448 - DNA, 1102 bp, Homo sapiens
cacccagtcttcaaccaaagcaatgtggctttgacctgttttctgtcttggacttgaataatactttatttgaaagaagtgttaaattgtttattaaaaaaaaagacaagtttgaaaaccactgtttccaagtcgcttattttgccaataaagaatctggggtcaaagggtaaatgccttgctgattgtatctgtctcaggaccagggctatgagatttaaagtcaaccagatctggattttcaaacctagctctaccatgttttagcggagacactctggacatgttcactatcctttcatcatcacaggcaagggtctgtccagtgccctaagtcctagggctctccagttgctaaccacactgaagggatgaaatgtatgagtgggccctccactggtgtgatctgtaatcagaatgggaaagactctctttgctccaccatgtccgtgggatgagatggaaaagtgcaccattcctggtggtgatgcttctatttaaaatactgctaaactgagtttccttccttgctcttctctctccctttctttgacaaacctatgcatgactcgagtatacagctatctcccctagtggagcacaggctttttggaggataagggtcactctttccatgtttatttcttcccacgcctacacctcacacctcattccaactccacagcacaataaccatcctatcttcacagcagcagagattatgtaaatggttataaattaaataatatgttttcttctccatgaccctagtgtagcattttggagaagacatggcttcaggaatgatttcccagaaattttgaaggtccttaaaactaaagaagaaagtcctgtgatatctgcaaaggctcatttgcagaaactggcccagcccaagtgtacagaaacaaagaaatgctacagccagtcaaaaccatttggctcactggttcttatttcaaatcagcagaataaacaaactkcagtccaagtaggaactggttctgctgtcctcttcttttaagccaaggcacaatgtttgaatgtttcagaagtttctttctaatgggtttccttttattgtctgtgccagatggccaat

SEQ ID NO: 33449 - DNA, 585 bp, Homo sapiens
ttaatgttactattattatagtaaataattattttatggttctatatttccttgtttattagcaatttactaggttggttataacccragagatttttttctttttcttttaagctatgatttttccttattccagttttccatttgcttgttcttttttatggtatccgattctttacagaagtattctgattaaattagactgtacttaatggaaaacagaaaaacaactagctgatcaaataaacatttcctaaactgaagaatgacacagagggagtgaaaaaccaggatcttccaagtatgacagacacaaagaaaagcctgtgatgatttagaaatgtgctgggctaattgcagctggttgagggtcctcgttgttttccataaaaccgtattgtattatgaagaggacagcaggtcaataagaccctgggccatgggacccctcttcagcatcacttttcagtaaaagacaattcccgattattttgtgaaagcaactttgaaatcctaaacatgaaaggaaaacacattggaatgttttgttatattcccctcaacacacaagaatatcaggttcct

SEQ ID NO: 33450 - DNA, 585 bp, Homo sapiens
ttaatgttactattattatagtaaataattattttatggttctatatttccttgtttattagcaatttactaggttggttataacccaagagatttttttctttttcttttaagctatgatttytccttattccagttttccatttgcttgttcttttttatggtatccgattctttacagaagtattctgattaaattagactgtacttaatggaaaacagaaaaacaactagctgatcaaataaacatttcctaaactgaagaatgacacagagggagtgaaaaaccaggatcttccaagtatgacagacacaaagaaaagcctgtgatgatttagaaatgtgctgggctaattgcagctggttgagggtcctcgttgttttccataaaaccgtattgtattatgaagaggacagcaggtcaataagaccctgggccatgggacccctcttcagcatcacttttcagtaaaagacaattcccgattattttgtgaaagcaactttgaaatcctaaacatgaaaggaaaacacattggaatgttttgttatattcccctcaacacacaagaatatcaggttcct

SEQ ID NO: 33451 - DNA, 585 bp, Homo sapiens
ttaatgttactattattatagtaaataattattttatggttctatatttccttgtttattagcaatttactaggttggttataacccaagagatttttttctttttcttttaagctatgatttttccttattccagttttccatttgcttgttcttttttatggtatccgattctttacagaagtattctgattaaattagactgtacttaatggaaaacagaaaaacaactagctgatcaaataaacatttcctaaactgaagaatgacacagagggagtgaaaaaccaggatcttccaagtatgacagacacaaagaaaagcctgtgatgatttagaaatgtgctgggctaattgcagctggttgagggtcctcgttgttttccataaaacygtattgtattatgaagaggacagcaggtcaataagaccctgggccatgggacccctcttcagcatcacttttcagtaaaagacaattcccgattattttgtgaaagcaactttgaaatcctaaacatgaaaggaaaacacattggaatgttttgttatattcccctcaacacacaagaatatcaggttcct

SEQ ID NO: 33452 - DNA, 552 bp, Homo sapiens
gaacaagtgaataaatggatattgtctcatttttagaacagagtactgaatggatcatgaacactatctggtatgtcacgtaggtaatttacaagggctacamtttcagctcagatttaccttttcctggatacaggtcttgataggtctcttgatgtcatttcacttcagattcttctttagaaaacttggacaatagcatttgctgtcttgtccaaattgttactaagaatcaagagagatatctgacatgaaatgacattggaaaacattaaacaccattgaaataatgctagccaatatggttattattagaaaccaattacattttcaacttaaaaatagtaatacttattgcagactcaaatgtgcttattctaaaacaagtaaatgtttgcctatggtctgagattctaatccacggagttcattctaatccacattcaacactatcatgtaccagtgggcctcataacccacctagccctgtgatttttcaggttcacttttctaaacttgtgaattaaatatttattttcttagttcagaaga

SEQ ID NO: 33453 - DNA, 552 bp, Homo sapiens
gaacaagtgaataaatggatattgtctcatttttagaacagagtactgaatggatcatgaacactatctggtatgtcacgtaggtaatttacaagggctacactttcagctcagatttaccttttcctggatacaggtcttgataggtctcttgatgtcatttcacttcagattcttctttagaaaacttggacaatagcatttgctgtcttgtccaaattgttactaagaatcaagagagatatctgacatgaaatgacattggaaaacattaaacacsattgaaataatgctagccaatatggttattattagaaaccaattacattttcaacttaaaaatagtaatacttattgcagactcaaatgtgcttattctaaaacaagtaaatgtttgcctatggtctgagattctaatccacggagttcattctaatccacattcaacactatcatgtaccagtgggcctcataacccacctagccctgtgatttttcaggttcacttttctaaacttgtgaattaaatatttattttcttagttcagaaga

SEQ ID NO: 33454 - DNA, 799 bp, Homo sapiens
caactctatttgcaactcccagtgcttgagtccaattcatggtcacacccactcttcccaacctggactctctgcctctgtcctctagtgcttatggtccatttycaaccgctggccagagagctccttgaacttgtatgtcagtcaaggtacttctgcattcccagcttcccctttcacccataacaaaatctaaattcccttcaacagtctacaaggtcccaagtgatctccatagcctaccccagctcagtgcctctcgggcctcacttcctgctattttctcctcattcattgcctaccgggacattccttaatctatcgcagggtctttagacctcccatcccatctgcctggagcaccatctcccaggtactcacatctctttcagatctttgcccaaaagtcactgccacattgaggccttttccaaccacccatactcccatccccctttgacactttatttagctctcacagataagaacatcctttcaacataaccacattagattatcctgccaagtggtgactctttcaaaactatggcaaagtataaagaactataccagccataaaaaggaataaagcactgatacatgcaggaacacggattgtatctgaaattactcgaaaacattaagcaaagtgcaagacgccagtcacaaaaagaccacgtaatctatgatcccatcgctgtgaaatgtccagaatagataaatacatagaaacagaaagcagatgagtggtcgcccggggtggaaggaatctggggatatggagtgggtgagacctaaa

SEQ ID NO: 33455 - DNA, 524 bp, Homo sapiens
actttttcctttagtatccctgcagacttgatctgtggggcttgtccttccgttgcccctggatgaaatctcaggcagttttctgcttattctcagataatgaaatgtcctctgatcattataagtcacccaaaaacaaaaaaaaatctcattttcataactaaaatgtcctgttcaggcaatagtcaaaatgtgcaactgtatgtaatgtaaaagcttctccctccaccgtctggcacctgctatgagctgacagcagtgtcaagaagagacagtgtgcttsacttccttcttcctctgccatcctctccctccgaaccctaaacctaccagctgcagtttctgacctttgcagaattggagttggggaaaggtcaagagggaagagagaagaaaagttctttctgaactggccccaatcctgggctagttttctctgatctcgggggtgtttaaaattggctttgtcaggtggtgtcccaggttctgattcagagagacgctttgttactggggatgtctca

SEQ ID NO: 33456 - DNA, 593 bp, Homo sapiens
tgggactgctataaggatataaatgagtatgtacgaacaagcaaagggccatgtctacatgagtgatttatgatttctgttgtaataaatgaggttggcagttgtcccagtgagccygtggcaggctctgaggtcccttgggttgtctgtctcaggagtagccttggcagggcccagggagccctgtcatccagtacatgtagcgttcctagcagtgaggcagagccttccctctgcagccagcagatcagccgcagtgggtggctggcacctgggaaagggagatgcatgaggaccaggcactgggtggggaaagccggtcttgattgactccttcactccatatgtaacttgttaggtgccagtgcctggtgctgactgctggggatacagggataaatgggacagcgaaagttctaccaactctgccaagacatgcactggcaacccttcctggagcctcttgggggtctgtctaggtgctctcagagagagggacaagtgggggtgaccacaagtgctgacatgggcagtccttacgggctggaacttccggcagacctgatttaaattcagactttactacgtcctgg

SEQ ID NO: 33457 - DNA, 536 bp, Homo sapiens
tccaagcctccctcagaccttgggtattcactaaggtgcaactttctcaccaaacaaaccctgctcttcccaactcacaggcctattatacaaaaaaaaaaaaaaagaagaagaagaagaagaaagaaaaaaaggccagctgagcagactctagagacagactgcttaaattcaaatcccagttccctcacttactagctctgaattcttggacaagctagctctgaattcttggacaagctttgtatcataacatgcctcagtttccacatatgaaaaaatgggggattgctgagaagactgagttaattcacacaaaggcttaaaagagtgccatgtagagaataaacactcaaattttaagaaggaccaaatgacacaatgggcaaaggcaccctacaatcctctaaagctacacctttagatcctctaaaggaagaakgtgtcatattctctcatgctacaactgatcctaaagtcacctcccccaaaaagctcctacccaacaaacctacccttacagatgaagcctttta

SEQ ID NO: 33458 - DNA, 978 bp, Homo sapiens
agttgtcgtgcaggtgtttcaccccccgcagcagctggatcatcagggtcttcacctcccctgggagggagggaggctcccatgtggacccggccgccccaagcccagggcactcagggtggcccgctcgcctcggcagcaacagaggcttctcagggctttccctgtggatgcagctggccctccctgcagcactgtcaccgcgggggtgaccaggacmctgcccccacttgtacgcagacaggaccccggggcgcggctgtacctggcaggaagggctgtttcatggtctccatcaggctcttgaggtcgtgctccacgtagttcatcacgatgtagatcttgtccatgttgctgcccaccacaatctcctgcagggcacggctctgtgggtgctgggcacctccaggcccccacccacccctgcacccgggcgcagatgctgagggacagtaaggacctccggtgccacccgggaggcaaatacttgcttctgtgtggtctgtgaagggctccactaagtgcaggagagtgtaggaagcacccggccccaggacagcacggggccctgtcggaaaagccttccacccggggccaggcgtggtggggccatgctcactctaacggtgacaatgttgggatgctgggccttgaggatggtgttgatctccctcagggacgtgatcgggaagccctccttctccttctccatcttcagccgctttagagccacaatttcatctgtgaagaaaatacagacggcactgagaggcattctcaaagtcacggtaccaacagtggactcgttcagtgaggaccgcaggcagtgcccaaagcgccagcatttcacggaggggggtctcgttctaggtgggggcacgtgggcaccaggagaacgccccagctgaggtctcggcaacacccacggcttcccactcaacacaccacagacactcacagccacctacagccacctgg

SEQ ID NO: 33459 - DNA, 978 bp, Homo sapiens
agttgtcgtgcaggtgtttcaccccccgcagcagctggatcatcagggtcttcacctcccctgggagggagggaggctcccatgtggacccggccgccccaagcccagggcactcagggtggcccgctcgcctcggcagcaacagaggcttctcagggctttccctgtggatgcagctggccctccctgcagcactgtcaccgcgggggtgaccaggacactgcccccacttgtacgcagacaggaccccggggcscggctgtacctggcaggaagggctgtttcatggtctccatcaggctcttgaggtcgtgctccacgtagttcatcacgatgtagatcttgtccatgttgctgcccaccacaatctcctgcagggcacggctctgtgggtgctgggcacctccaggcccccacccacccctgcacccgggcgcagatgctgagggacagtaaggacctccggtgccacccgggaggcaaatacttgcttctgtgtggtctgtgaagggctccactaagtgcaggagagtgtaggaagcacccggccccaggacagcacggggccctgtcggaaaagccttccacccggggccaggcgtggtggggccatgctcactctaacggtgacaatgttgggatgctgggccttgaggatggtgttgatctccctcagggacgtgatcgggaagccctccttctccttctccatcttcagccgctttagagccacaatttcatctgtgaagaaaatacagacggcactgagaggcattctcaaagtcacggtaccaacagtggactcgttcagtgaggaccgcaggcagtgcccaaagcgccagcatttcacggaggggggtctcgttctaggtgggggcacgtgggcaccaggagaacgccccagctgaggtctcggcaacacccacggcttcccactcaacacaccacagacactcacagccacctacagccacctgg

SEQ ID NO: 33460 - DNA, 978 bp, Homo sapiens
agttgtcgtgcaggtgtttcaccccccgcagcagctggatcatcagggtcttcacctcccctgggagggagggaggctcccatgtggacccggccgccccaagcccagggcactcagggtggcccgctcgcctcggcagcaacagaggcttctcagggctttccctgtggatgcagctggccctccctgcagcactgtcaccgcgggggtgaccaggacactgcccccacttgtacgcagacaggaccccggggcgcggctgtacctggcaggaagggctgtttcatggtctccatcaggctcttgaggtcgtgctccacrtagttcatcacgatgtagatcttgtccatgttgctgcccaccacaatctcctgcagggcacggctctgtgggtgctgggcacctccaggcccccacccacccctgcacccgggcgcagatgctgagggacagtaaggacctccggtgccacccgggaggcaaatacttgcttctgtgtggtctgtgaagggctccactaagtgcaggagagtgtaggaagcacccggccccaggacagcacggggccctgtcggaaaagccttccacccggggccaggcgtggtggggccatgctcactctaacggtgacaatgttgggatgctgggccttgaggatggtgttgatctccctcagggacgtgatcgggaagccctccttctccttctccatcttcagccgctttagagccacaatttcatctgtgaagaaaatacagacggcactgagaggcattctcaaagtcacggtaccaacagtggactcgttcagtgaggaccgcaggcagtgcccaaagcgccagcatttcacggaggggggtctcgttctaggtgggggcacgtgggcaccaggagaacgccccagctgaggtctcggcaacacccacggcttcccactcaacacaccacagacactcacagccacctacagccacctgg

SEQ ID NO: 33461 - DNA, 1391 bp, Homo sapiens
attctctctatagcccttctgaatggtctgtgacacacgcatgctttcagctggagtttgctctgtctggttttcggtctgtgacacacgcatgcttttagctagtttgctctctatagcccttctgaatggtctgtgacacacgcacgctttcagctagagtttgctctttctggttttcggtctgtgacacacgcatgctttcagctagagtttgctctctctggttttcggtctgtgacacacgcatgctttcagctagggtattctctctatagcccttctgaatggtctgtgacacacgcatgctttcaggtggagtttgctctctctggttttcggtctgtgacacacgcatgctttcagctagagtattctctctatagcccctctgaacggtctgtgacacacgcatgctttcagctggagtttgctctctctggttttcggtctgtgacacacgcaggcttttagctagagtttgctctccatagcccttctgaatggtctgtgacacacgcacgctttcagctagagtttgctctctctggttttcggtctgtgatacacgcacgctttcagctagagtttgctctctctggttttcggtctgtgacacacgcacgctttcagctagagtattctctctatagccattctgaacggtctgtgacgcacgtatgctttcagctagagtattcttttttttttttttgagacggagtcttgctctgtcgcccaggctagagtgtgcagtggtgcgatagcggctcactgcaagctccgcctcccaggttcatgccattctcctgcctcagcctccmgagcagctgggactacaggtgcccgccaccacgcccggctaattttttgtatttttagtagagactgggtttcaccgtgttagccaggatggtcttgatctcctgaccttgtgatccacccgcctcagcctcccaaagtgctgggattacaggcttgagccaccacgcccggccttcagctagagtattctctctatagcccttctgaatggtctgtgacacacgcatgctttcagctagagtttgctctctctatagcccttctgaatggcctgtgacacacgcatgctttcagctagtttgctctctctggttttcggtctgtgacgcacacatgctttcagctagagtttgctctctatagcccctctgaatggtctgtgacacatgcatgctttcagctattctctctatagcccttctgaacggtctgtgacaccattatgctttcagctacagtttgctttctctggtttttcagtggtgctctggggaaggcagaagagtaggaacaggaaagaaaccacacttgaacatgatgtcaaagaaagtaaatgcttctgtacc

SEQ ID NO: 33462 - DNA, 1391 bp, Homo sapiens
attctctctatagcccttctgaatggtctgtgacacacgcatgctttcagctggagtttgctctgtctggttttcggtctgtgacacacgcatgcttttagctagtttgctctctatagcccttctgaatggtctgtgacacacgcacgctttcagctagagtttgctctttctggttttcggtctgtgacacacgcatgctttcagctagagtttgctctctctggttttcggtctgtgacacacgcatgctttcagctagggtattctctctatagcccttctgaatggtctgtgacacacgcatgctttcaggtggagtttgctctctctggttttcggtctgtgacacacgcatgctttcagctagagtattctctctatagcccctctgaacggtctgtgacacacgcatgctttcagctggagtttgctctctctggttttcggtctgtgacacacgcaggcttttagctagagtttgctctccatagcccttctgaatggtctgtgacacacgcacgctttcagctagagtttgctctctctggttttcggtctgtgatacacgcacgctttcagctagagtttgctctctctggttttcggtctgtgacacacgcacgctttcagctagagtattctctctatagccattctgaacggtctgtgacgcacgtatgctttcagctagagtattcttttttttttttttgagacggagtcttgctctgtcgcccaggctagagtgtgcagtggtgcgatagcggctcactgcaagctccgcctcccaggttcatgccattctcctgcctcagcctccagagcagctgggactacaggtgcccgccaccacgcccggctaattttttgtatttttagtagagactgggtttcaccgtgttagccaggatggtcttgatctcctgaccttgtgatccacccgcctcagcctcccaaagtgctgggattacaggcttgagccaccacgcccggccttcagctagagtattctctctatagcccttctgaatggtctgtgacacacgcatgctttcagctagagtttgctctctctatagcccttctgaatggcctgtgacacacgcatgctttcagctagtttgctctctctggttttcggtctgtgacgcacacatgctttcagctagagtttgctctctatagcccctctgaatggtctgtgacacatgcatgctttcagctattctctctatagcccttctgaacrgtctgtgacaccattatgctttcagctacagtttgctttctctggtttttcagtggtgctctggggaaggcagaagagtaggaacaggaaagaaaccacacttgaacatgatgtcaaagaaagtaaatgcttctgtacc

SEQ ID NO: 33463 - DNA, 676 bp, Homo sapiens
tccacatggctagggaggcctcagaatcatggcgggaggcgaaaggcacttcttacatggcrgtggcaagggaaaaataaggaagaaacaaaagtggaaacccctgataaacccgtcaatttcgtgagacttattcaccatcaggagaacagcacgggaaagtccggcccccatgattcagttacctccccctgggtcccgcccacaacacttaggaattctgggagatacaattgaagttgagatttgggtggacacacagccaaaccctatcaccatgcacagaggaggagctcaataaataaatctctgacagctggtgccaaaggcctgctgtgtggcagtgatatgaagaacaggactgccagagctggggctgggggcggggaggccagtcattgagaggaggagccagaacagagcccaggacagcctctgctttcgcagcatttgaaaaacgtccgccgaaacagaagctggggtatgtttacacctgagaggatgtaagtgaggaaactgaggcccagcgagcttagccggccttcccgggaaacagctcactggggactggctgcaccctgccactcagaagaaagctttacaggttgctctgggtgttttacatgaaatctgtgtgacccctctctagccccctaataaaccacttgtgaggctg

SEQ ID NO: 33464 - DNA, 676 bp, Homo sapiens
tccacatggctagggaggcctcagaatcatggcgggaggcgaaaggcacttcttacatggcggtggcaagggaaaaataaggaagaaacaaaagtggaaacccctgataaacccgtcaatttcgtgagacttattcaccatcaggagaasagcacgggaaagtccggcccccatgattcagttacctccccctgggtcccgcccacaacacttaggaattctgggagatacaattgaagttgagatttgggtggacacacagccaaaccctatcaccatgcacagaggaggagctcaataaataaatctctgacagctggtgccaaaggcctgctgtgtggcagtgatatgaagaacaggactgccagagctggggctgggggcggggaggccagtcattgagaggaggagccagaacagagcccaggacagcctctgctttcgcagcatttgaaaaacgtccgccgaaacagaagctggggtatgtttacacctgagaggatgtaagtgaggaaactgaggcccagcgagcttagccggccttcccgggaaacagctcactggggactggctgcaccctgccactcagaagaaagctttacaggttgctctgggtgttttacatgaaatctgtgtgacccctctctagccccctaataaaccacttgtgaggctg

SEQ ID NO: 33465 - DNA, 676 bp, Homo sapiens
tccacatggctagggaggcctcagaatcatggcgggaggcgaaaggcacttcttacatggcggtggcaagggaaaaataaggaagaaacaaaagtggaaacccctgataaacccgtcaatttcgtgagacttattcaccatcaggagaacagcacgggaaagtccggcccccatgattcagttacctccccctgggtcccgcccacaacacttaggaattctgggagatacaattgaagttgagatttgggtggacacacagccaaaccctatcaccatgcacagaggaggagctcaataaataaatctctgacagctggtgccaaaggcctgctgtgtggcagtgatatgaagaacaggactgccagagctggggctgggggcggggaggccagtcattgagaggaggagccagaacagagcccaggacagcctctgctttcgcagcatttgaaaaacgtccgccgaaacagaagctggggtatgtttacacctgagaggatgtaagtgaggaaactgaggcccagcgagcttagccggccttcccgggaaacagctcrctggggactggctgcaccctgccactcagaagaaagctttacaggttgctctgggtgttttacatgaaatctgtgtgacccctctctagccccctaataaaccacttgtgaggctg

SEQ ID NO: 33466 - DNA, 558 bp, Homo sapiens
gaaaaattctctggtccttggggctcctcaaaagtgactttttaaagtgwttaaattttgcattcttctcaacttcccaatttcctttttcagacccttgtctacatctgatctccagaggtttcatttgactgctttttctgcctccttaatgatgttttctaagcctagttttagactcctttgggctatgcttattaaagtcactgcaggctgtcatgacccttggctgccttgattgtacatgtgttctgcaactgaaaccccagatacctgtgttgcaatctcatagcctaaaagcattttggtaatcttggtaggctttaactttaacaatcctggacctggcacgaaagtgatagattctgtattgttttagaggagtgttggggaaggagaaattgaaatgttttcactaacctgtgcagtgaagtgtttattagctaaactcttctatttgtggttttcacaaaatacactttaaaaatcggccacactgggatgaaaaagcactttcctccaactttcattatgattcttcctgtctgagcagtcttg

SEQ ID NO: 33467 - DNA, 575 bp, Homo sapiens
gactagcccaaggtcacgcagctasgaagtggtgggactgcagtagattcatccaggtctgatgtgggatccttttgtttcctgcccatcttcagagctgcctgaggccctgccaccccggggaccatgtttaacggggagccaggtcctgcctcatctggggcctccaggaatgtggtgcggagctccagcattagcggtgaaatctgcggatcccagcaagccgggggcggggctgggaccaccaccgccaagaagcggcggagcagcctgggtgccaagatggtggccatcgtgggcctgactcagtggagcaagagcacactccagcttccgcagcctggtgagggggcatgggacatcacggggtagaggtgggggacacttcgcaaagacagactacccagggactgccctgatgggtctgcacttccatgcccacagacacttatactgtggcccttcccatacaccaggtgctgttctaggtccagtaggtgtatggactgattaaatctccatggagctctatgaggcaggtaccaaagaacagaaaagggaggtcagatgcttca

SEQ ID NO: 33468 - DNA, 575 bp, Homo sapiens
gactagcccaaggtcacgcagctaggaagtggtgggactgcagtagattcatccaggtctgatgtgggatccttttgtttcctgcccatcttcagagctgcctgaggccctgccaccccggggaccatgtttaacggggagccaggtcctgcctcatctggggcctccaggaatgtggtgcggagctccagcattagcggtgaaatctgcggatcccagcaagccgggggcggggctgggaccaccaccgccaagaagcggcggagcagcctgggtgccaagatggtggccatcgtgggcctgactcagtggagcaagagcacactccagcttccgcagcctggtgagggggcatgggacatcrcggggtagaggtgggggacacttcgcaaagacagactacccagggactgccctgatgggtctgcacttccatgcccacagacacttatactgtggcccttcccatacaccaggtgctgttctaggtccagtaggtgtatggactgattaaatctccatggagctctatgaggcaggtaccaaagaacagaaaagggaggtcagatgcttca

SEQ ID NO: 33469 - DNA, 631 bp, Homo sapiens
aacatgaaggaaacatgttctggaaagttggaatttctcagactatctcatgggttgaaaccaatgtttaaggctcttctgcaatagcattgataagaagcttgcctttacagtacaaatgtaaagaaattaaacactgtctacacattcactaatcagtgatgataaattttttttctccccaagaaaccattcctggcacacaatcaaatctatttctctaattagcatattcacttgcttcagacttgtgtaacatgttctctttttttagggggcatattattttttaagcttaaatttttcatgctcctattttttcccccgtttgtaagacaaacataatcattttgtttctgatacaccctcaaggcaaatatgccttgcacatagtggggattcaatacacatctactgaatgaacaaacacaggttcctcaagaacttaaaaaaaaattttttttaaataacagtgtcttgctctgttgcccacgctggagtgcagtggcgtaatcatggctcactgaagcctcaacctcctgggttcaagtgatcctcccctgytcagcctcctgagtagcggggactacaggtgcttgccaccatacctggctaatttttaaaatttttt

SEQ ID NO: 33470 - DNA, 535 bp, Homo sapiens
tgaattgaatttcaactctgatttgatgcatgtgaaaaccaaaagaaaagagcatgttgtatttgtgcatttgrggttgatgggtgggttcatctgtggacactagagcttcatgttttgatcacttctcgagcaatagttcaagaattgatggtagtgcaaggccaacatagaagactgtggatttggagtacacagcagcaaaatggctcattttcaagttgatcattgtattctggacttgaaggtcagttttatgttgaggcatgcttttgcccagctaatagattaacgggtgtgcataaacatgtcaggtgtaagtagttcacgtggatggggaaaaagtagcaactgtcgatcaagcaagatagagggtctaagaggcaacttgtcctgagatcaagttgggagatcttgagcaaattagttaatggcttaagactcaatgttcccatctgtgaaatggcaagatattaataaattcacaacttaaagaattgttatgcagacttactacaattaatgtgaagtgcct

SEQ ID NO: 33471 - DNA, 885 bp, Homo sapiens
cagatgcggggcagtgttccgccttatctgaaatacagtctggatttccttagatgtttctaatttagaatattatgtagaactgcatattaaaatttagtcttctggtgagtgactaaagtttaatcttggtataaaattttgccccccaaaaattaggctttgcatttggaaactggccttcagtctcggcagaagcacacacaacaacgttagcagtttgttcactgggaagggagtaytaggtatctcttgattcgcagtttctatcccgtgctggtcagaacacatctcccgccgtgtaagcaaggtggcgggactgcactcccaggccgggaggcttctgaggcttggctagactgggctcagctcggcgaggcttcaggctggtggaagggagtgctcgctgacagcgtacctggtgggggtctccccggctctcgtgtgctggtccctggcatggtcacttaactcccgacccgttctgcacctgtggttgcgtgtggggtccacatgggtgttggcatgaggacgcgggcgttcattacttcactcactcacgcgtttggttacctgaggcacatcaagggctagctgacggaatgggggcagggccagaaaactgggctgggagatgggagccatggagcgttccagtgctagaagagaagtcagggccactcccagggcagatgggtgagcctgagagtctcgtgggagccagtgtgagcaccgggctctgtccaggtgctgagtggtagagctgcctccagctggcgctgtcctccagggagcctcacaccttactcgcagcccagcacactctccccaaatgtggagggtggtcagccacggagaggtcaggaggtggtgagggagggacac

SEQ ID NO: 33472 - DNA, 885 bp, Homo sapiens
cagatgcggggcagtgttccgccttatctgaaatacagtctggatttccttagatgtttctaatttagaatattatgtagaactgcatattaaaatttagtcttctggtgagtgactaaagtttaatcttggtataaaattttgccccccaaaaattaggctttgcatttggaaactggccttcagtctcggcagaagcacacacaacaacgttagcagtttgttcactgggaagggagtactaggtatctcttgattcgcagtttctaycccgtgctggtcagaacacatctcccgccgtgtaagcaaggtggcgggactgcactcccaggccgggaggcttctgaggcttggctagactgggctcagctcggcgaggcttcaggctggtggaagggagtgctcgctgacagcgtacctggtgggggtctccccggctctcgtgtgctggtccctggcatggtcacttaactcccgacccgttctgcacctgtggttgcgtgtggggtccacatgggtgttggcatgaggacgcgggcgttcattacttcactcactcacgcgtttggttacctgaggcacatcaagggctagctgacggaatgggggcagggccagaaaactgggctgggagatgggagccatggagcgttccagtgctagaagagaagtcagggccactcccagggcagatgggtgagcctgagagtctcgtgggagccagtgtgagcaccgggctctgtccaggtgctgagtggtagagctgcctccagctggcgctgtcctccagggagcctcacaccttactcgcagcccagcacactctccccaaatgtggagggtggtcagccacggagaggtcaggaggtggtgagggagggacac

SEQ ID NO: 33473 - DNA, 885 bp, Homo sapiens
cagatgcggggcagtgttccgccttatctgaaatacagtctggatttccttagatgtttctaatttagaatattatgtagaactgcatattaaaatttagtcttctggtgagtgactaaagtttaatcttggtataaaattttgccccccaaaaattaggctttgcatttggaaactggccttcagtctcggcagaagcacacacaacaacgttagcagtttgttcactgggaagggagtactaggtatctcttgattcgcagtttctatcccgtgctggtcagaacacatctcccgccgtgtaagcaaggtggcgggactgcactcccaggccgggaggcttctgaggcttggctrgactgggctcagctcggcgaggcttcaggctggtggaagggagtgctcgctgacagcgtacctggtgggggtctccccggctctcgtgtgctggtccctggcatggtcacttaactcccgacccgttctgcacctgtggttgcgtgtggggtccacatgggtgttggcatgaggacgcgggcgttcattacttcactcactcacgcgtttggttacctgaggcacatcaagggctagctgacggaatgggggcagggccagaaaactgggctgggagatgggagccatggagcgttccagtgctagaagagaagtcagggccactcccagggcagatgggtgagcctgagagtctcgtgggagccagtgtgagcaccgggctctgtccaggtgctgagtggtagagctgcctccagctggcgctgtcctccagggagcctcacaccttactcgcagcccagcacactctccccaaatgtggagggtggtcagccacggagaggtcaggaggtggtgagggagggacac

SEQ ID NO: 33474 - DNA, 885 bp, Homo sapiens
cagatgcggggcagtgttccgccttatctgaaatacagtctggatttccttagatgtttctaatttagaatattatgtagaactgcatattaaaatttagtcttctggtgagtgactaaagtttaatcttggtataaaattttgccccccaaaaattaggctttgcatttggaaactggccttcagtctcggcagaagcacacacaacaacgttagcagtttgttcactgggaagggagtactaggtatctcttgattcgcagtttctatcccgtgctggtcagaacacatctcccgccgtgtaagcaaggtggcgggactgcactcccaggccgggaggcttctgaggcttggctagactgggctcagctcggcgaggcttcaggctggtggaagggagtgctcgctgacagcgtacctggtgggggtctccccggctcycgtgtgctggtccctggcatggtcacttaactcccgacccgttctgcacctgtggttgcgtgtggggtccacatgggtgttggcatgaggacgcgggcgttcattacttcactcactcacgcgtttggttacctgaggcacatcaagggctagctgacggaatgggggcagggccagaaaactgggctgggagatgggagccatggagcgttccagtgctagaagagaagtcagggccactcccagggcagatgggtgagcctgagagtctcgtgggagccagtgtgagcaccgggctctgtccaggtgctgagtggtagagctgcctccagctggcgctgtcctccagggagcctcacaccttactcgcagcccagcacactctccccaaatgtggagggtggtcagccacggagaggtcaggaggtggtgagggagggacac

SEQ ID NO: 33475 - DNA, 2336 bp, Homo sapiens
tgggcttccagccactgtaaatggaagtggcaggtccaaattgagaggctggtctcacaggacactctttcccccaggttagggtcagagagcttttagggaaacctggagggtcagccagtccatatcttggccctggagagcctgcactggcaccgttttggaatgctaggacctcaaagctactatttaaaggagcttcttaactacgattccactttgttagtgtctcctaaacagaaagttctccaccattggagggttatgtccaagaaattggcttgaagacccttaagggggaaatgtagaattttgtggattaaattgggcatttctaaccctcagattcgaattaagcataagttcaggtaggcagaagaaatagtgtaattagcaagtgggcagtgagttgttgatgtaagttgatgcataattgatagtccaataaatgttagagtcttgccccctgtaagcattccagtgaaatctagctcaactcagcaagtaaggtcagtagaagcagtgtcccttcaacacagagagacctccctcaagtcccccaccgagaaaggtcagctctgactctgacacacctgtgttttcagttctcccacctggtggtctctttctctccacttccccaactccctgaactcagagcgctcatgaaactttcgccctctgcccatcaccagaggatgtgacaaagaactcattaataattaactcagcagaagagagcaggtgttgcaatcccagatcctcagaggagaaaaggcaggrcaggtgtgcggtgggcctcaccatgagtagctggggccccttaaatcctcctcctcctccctttatctgaggccatgagcccaggtaaatacacattcggtgtctcagacttcacaggcttgggcaggtcctggagtggtttggcttcgcaggagggacatgccaattgctgtgcttggctctcccctacactcccggcaaagtccaggaagctgtttatgcagacccccaagagcagcccagccagcctcactcctgagggacactgatcatttccaagtggggatccagtcccccaagaactccagggctccaggcacaagctctggagcttcagaacccaatttgttcagtcaagtagcctaaaatagagcctgaggccagatcagggtccagctaagattaaaggggtgtggtactgtggctggagcccctcagcctcccctgtgtgcacacctttcctctctccctgcgcccatcctcctacaacagagcacttatctgccctagagccttgacttattagaatgtgtgctcaggaaagtggctagtgaagtcatcccagacttcagtatctttcaaacctcatcactccatcagcaaattcggtcagctctgccttccaataataatcagaatctacttcttccctcctggcctgagcctcttttcctgggacgtctgcaacagcctcctcactgatatacagtcaagtcccaacacagcaggttatgcaccccgagctcagaatcttcacatgcccctatcccactcagggccaaggccagagctttttcagagtctaggggaccctacaccaccttcctcccattactcttcacctctactacaatggcctctatccctgtcttagctcaggcttagggctttggctccagctgcttctgctgcctggaacggtcttgcccctggatatctacaaagctaactctctgacctctttcaaagtctttgttcagatcctaacttctcaatgaggcctatcctaaacacactattaaaattacagccaacttccctgccccatccctgtcccccatcctaacactcctaaccccacctaccctatattttggtgagttatttatttacttatttggtaggggggcatcatgtaccagcttctaaccaactatataatttatctgcttatgtttattttctgtctcttcccaactagaatgtaatatccaagaaggcagagatttctatcttattcactactgttttccaagtgcctggcacatagtaggtgctcaatacttgtggaatgaatggatccacactaaagtacaaacaattgatacagttcaatgcatcccctgtgccgttgatgtgtagttgcattctcagaggggacaatccaggctttgggcactgggatggattactaatagtggaaattcctgtatcagccagagtgcggaggtcttttttgaggcacctatctccaattacagaaatgtcaccatattgacagaggcagtctccttctttgcctgcttctcagtcattcctggcaatgtctctga

SEQ ID NO: 33476 - DNA, 2336 bp, Homo sapiens
tgggcttccagccactgtaaatggaagtggcaggtccaaattgagaggctggtctcacaggacactctttcccccaggttagggtcagagagcttttagggaaacctggagggtcagccagtccatatcttggccctggagagcctgcactggcaccgttttggaatgctaggacctcaaagctactatttaaaggagcttcttaactacgattccactttgttagtgtctcctaaacagaaagttctccaccattggagggttatgtccaagaaattggcttgaagacccttaagggggaaatgtagaattttgtggattaaattgggcatttctaaccctcagattcgaattaagcataagttcaggtaggcagaagaaatagtgtaattagcaagtgggcagtgagttgttgatgtaagttgatgcataattgatagtccaataaatgttagagtcttgccccctgtaagcattccagtgaaatctagctcaactcagcaagtaaggtcagtagaagcagtgtcccttcaacacagagagacctccctcaagtcccccaccgagaaaggtcagctctgactctgacacacctgtgttttcagttctcccacctggtggtctctttctctccacttccccaactccctgaactcagagcgctcatgaaactttcgccctctgcccatcaccagaggatgtgacaaagaactcattaataattaactcagcagaagagagcaggtgttgcaatcccagatcctcagaggagaaaaggcagggcaggtgtgcggtgggcctcaccatgagtagctggggccccttaaatcctcctcctcctccctttatctgaggccatgagcccaggtaaatacacattcggtgtctcagacttcacaggcttgggcaggtcctggagtggtttggcttcgcaggagggacatgccaattgctgtgcttggctctcccctacactcccggcaaagtccasgaagctgtttatgcagacccccaagagcagcccagccagcctcactcctgagggacactgatcatttccaagtggggatccagtcccccaagaactccagggctccaggcacaagctctggagcttcagaacccaatttgttcagtcaagtagcctaaaatagagcctgaggccagatcagggtccagctaagattaaaggggtgtggtactgtggctggagcccctcagcctcccctgtgtgcacacctttcctctctccctgcgcccatcctcctacaacagagcacttatctgccctagagccttgacttattagaatgtgtgctcaggaaagtggctagtgaagtcatcccagacttcagtatctttcaaacctcatcactccatcagcaaattcggtcagctctgccttccaataataatcagaatctacttcttccctcctggcctgagcctcttttcctgggacgtctgcaacagcctcctcactgatatacagtcaagtcccaacacagcaggttatgcaccccgagctcagaatcttcacatgcccctatcccactcagggccaaggccagagctttttcagagtctaggggaccctacaccaccttcctcccattactcttcacctctactacaatggcctctatccctgtcttagctcaggcttagggctttggctccagctgcttctgctgcctggaacggtcttgcccctggatatctacaaagctaactctctgacctctttcaaagtctttgttcagatcctaacttctcaatgaggcctatcctaaacacactattaaaattacagccaacttccctgccccatccctgtcccccatcctaacactcctaaccccacctaccctatattttggtgagttatttatttacttatttggtaggggggcatcatgtaccagcttctaaccaactatataatttatctgcttatgtttattttctgtctcttcccaactagaatgtaatatccaagaaggcagagatttctatcttattcactactgttttccaagtgcctggcacatagtaggtgctcaatacttgtggaatgaatggatccacactaaagtacaaacaattgatacagttcaatgcatcccctgtgccgttgatgtgtagttgcattctcagaggggacaatccaggctttgggcactgggatggattactaatagtggaaattcctgtatcagccagagtgcggaggtcttttttgaggcacctatctccaattacagaaatgtcaccatattgacagaggcagtctccttctttgcctgcttctcagtcattcctggcaatgtctctga

SEQ ID NO: 33477 - DNA, 523 bp, Homo sapiens
atatagacttttttttgctaaggggcattcttttataaaaaggtattaatattatttataagttggcctctccagagcacaattaaggggcattctgaaattatggaaatcatgttttgaggagagtttagagtctgttgtgacactctgttcttcaattcttgtttgcattatttgcatagactgttctcttagcatttctttcactctccatatattctttaagagggagatccttggggactattagtgaggcacaaaaggtactgcatatattaaacaaagctttcattgctgggaagaaattgtacattgtcccacagctgcctaacagtagaatcaaaaaagaaagaaaaaacacaacatgttatagaaaaaaaatatttggacttctcaggaaaacatgctcccctatgaggaacaaattgcttcataacttttattgtggttccccagtcagataagtgttctgaaaktttttaaattcagttgattttagtgcaatgaacatttcttgactgcc

SEQ ID NO: 33478 - DNA, 700 bp, Homo sapiens
ttttttttattatactttaagttttagggtacatgtgcacattgtgcaggttagttacatatgtatacatgtgccatgctggtgcgctgcacctctctcagttctgatattggtaatttgtctatttttttctcttcatctgttttgttagaggtttattaatgttctcaaccaactttttagctttcatctattttctttattgtttttctattatctattacagtgattcctactctgatgtgtattacttcagttttcccccttattttgggtttcatttattctacttttctagtttcttaagatggaacctaagaatcattcatttgagacttttgatttcttcataaaccttatactttgggtgagggaatcagacaattagaaataaccacaaagcatgagttaaatagcatgtcagaaggttagacatgctgtgagaaaaaagaaaatgacatagaagatggttaggattgactgaaagtgtagatgttagttggatggttgcaattttgaatagagtgctcagtgtaagcctcactgaaaggtggcwttcaggaaaagacttggagctgagttagagaattagccttgcacatttccgtaggaagaactttccagtaaaaggaaagaatcactgcaaaggctctaaaatgactgaggtgctggagcaaaagcaaggaggccaatactgtca

SEQ ID NO: 33479 - DNA, 692 bp, Homo sapiens
gattgtggtcattatttcacaatgcatactgttaayaaaagatcatgaaatttgcaggggcaaaaaggagagctttactttcctaaagaaatttgtaggtgggggagacgcccctttgggacagagcaaaagtgtgctccaaggagacactggagagttaaagattataatggcaaaaactgcaagactggggagagggatcagagtcttgattagatgacatttaagcctaaaaccacaaatctctctttgttttctgactctaggtggtcagtggttggtcacatgaggattttccagctgtagtctattttgagattgataacaggaactggtttagcttgattgcagaaaggggagtctcgtgacatttctgcaacattttttgagaacacagtgtatgtgactacctcctcatcttgctgtggcctcccagttctgctttaacttgagcatctcagccacagggggtttattttatctatatgttggggcataatttgacaatacatacttcaaaacattacattgtacactgtacattatacaatttttgtccattacattttggtaaagctggagataagaagaaaggcaagggggtaaaaggagaaacggaatacaagacaagtattaatgaatattttactacatgtaatgtttggttaattataagatgctaagctaaacaa

SEQ ID NO: 33480 - DNA, 692 bp, Homo sapiens
gattgtggtcattatttcacaatgcatactgttaacaaaagatcatgaaatttgcaggggcaaaaaggagagctttactttcctaaagaaatttgtaggtgggggagacgcccctttgggacagagcaaaagtgtgctccaaggagacrctggagagttaaagattataatggcaaaaactgcaagactggggagagggatcagagtcttgattagatgacatttaagcctaaaaccacaaatctctctttgttttctgactctaggtggtcagtggttggtcacatgaggattttccagctgtagtctattttgagattgataacaggaactggtttagcttgattgcagaaaggggagtctcgtgacatttctgcaacattttttgagaacacagtgtatgtgactacctcctcatcttgctgtggcctcccagttctgctttaacttgagcatctcagccacagggggtttattttatctatatgttggggcataatttgacaatacatacttcaaaacattacattgtacactgtacattatacaatttttgtccattacattttggtaaagctggagataagaagaaaggcaagggggtaaaaggagaaacggaatacaagacaagtattaatgaatattttactacatgtaatgtttggttaattataagatgctaagctaaacaa

SEQ ID NO: 33481 - DNA, 588 bp, Homo sapiens
atttcagttgtattaccaaggaatagcagcagaaaagatttcaggcccaaactaataacatcgaagcagacttaatatgaggaaattccattaagggcttcgaatggcagttccttccaatatcccatcctgtgttttgtatctttgaagagwctcaataggattatattaacatatgatatgctggtggcagggacgacagctttatctctgaacatacagacagaacagacagaaatattaatgtggcagccagcgagatgagcctggtgtgctgctctctgcctttctctgatggaataattttacacttaactctgttttcccctgtgtttctgtagcttgtggaagagcgtgctgtttaaaaactgatatgaggcttttctgcagtaagtttagaaagcactcttttcactgagcatgtactatataccaggcagcctgaaaccactttttacctgcaaccctgtgaggtcaggcatgtcttccccacttctcatcaaggcaccagaggctcagagaagttgtatgacttccttagggccacacagcctgtaaaagacagagtgggcttcgccaggcttcttc

SEQ ID NO: 33482 - DNA, 588 bp, Homo sapiens
atttcagttgtattaccaaggaatagcagcagaaaagatttcaggcccaaactaataacatcgaagcagacttaatatgaggaaattccattaagggcttcgaatggcagttccttccaatatcccatcctgtgttttgtatctttgaagagtctcaataggattatattaacatatgatatgctggtggcagggacgacagctttatctctgaacatacagacagaacagacagaaatattaatgtggcagccrgcgagatgagcctggtgtgctgctctctgcctttctctgatggaataattttacacttaactctgttttcccctgtgtttctgtagcttgtggaagagcgtgctgtttaaaaactgatatgaggcttttctgcagtaagtttagaaagcactcttttcactgagcatgtactatataccaggcagcctgaaaccactttttacctgcaaccctgtgaggtcaggcatgtcttccccacttctcatcaaggcaccagaggctcagagaagttgtatgacttccttagggccacacagcctgtaaaagacagagtgggcttcgccaggcttcttc

SEQ ID NO: 33483 - DNA, 1042 bp, Homo sapiens
aagtgactgcaggaagaccactgcggaccctgttatagttgtctggggctagaggatggaggctgggatgagggtgaggacgatggagggagagagaagtagaagataacagagagatcaggagagtggatttaggggttaaggggaggtttgaggacaacttgcaagtttccagcctgggtacctggatggatggtcagtgcacagagagggaagcaggactggragggcaggtcagagattccacatgcaaaacaccaccagttttccttcctggtctgacctaatccctccatttcacagatggggaaaggaggtcctaaggaagtacctgactacccagagttccccagcatgccccaggcagagggcaatgggacccccagagtcctgccgcctatccagagcacttaccctacaggggactctctggctctggcctcagagagctattttcagctggggtttgagacgaggcaaatttgtcctgggctggaggccaattcacagcccctggagaacaggacatctctgctttatgaggtcagactgtattctgaccccagccagccaccctgtctgggtctaaagtgggtgtgacagccaccctgtctgtgtcacaagggtgtgaggggcctacctcaaagtggctgacaaaacacacgctcatccacaatcctgggtttggcattgatccagaaccaggcccagaccctgtgctttccccttcttggcccctttcctggctgtgtgaccttgggcaagtcattgcccctctccaggctttagtcttcccatctgtaaaatggggccatctcagagtatgacttctgtgacccaaagggttgtagtaaatatcagatgggaaatagatggacaaaaagtgctttgcgaactgtaaagtgcctagacttctattggggctcagtcctatgtctgccccacatcactgcccagcagtgaaaagtcttttcaaagctttgttccttcacaagatggctactcctctggaaaggaagaagtcttggtgtggaacacaagg

SEQ ID NO: 33484 - DNA, 531 bp, Homo sapiens
catcctcccagcagaggcagaatgtaaaaccagtgctccatggtgacgtctcactgggactgaccagagctcccagctacccctccagctgggccctggcccagtgctcctggaggctggtgcgactgaaggggcctctcagctagagggaggcaaggggacttgtctggggtgagtcctcaagggatgtctgtgagtctgtcccctctgaggagaagctgcccccagtgaggcgagggacctggctctgcctggggggctgctgccggaagaaggtggtggcaagcaaatgctcgcgggcagggtcaggcagcttgtgggagcctttgccgtcttcagcctctgcagcctggccagcttcctggggtggagagcctgcctggaaagttctgttctgttcccctctggggggcccaggaggccaataggactttggcaaatggtccatgcccagygagtctagtggaggctgatcccacctccccttggaagtgacctctacactcacaccctggcccttggctgccaccc

SEQ ID NO: 33485 - DNA, 1509 bp, Homo sapiens
aaaataaaatgagagaaaagttttgtgaatcacacccaaatctccacaaatatttaacttaatgtgtgcttctgtttttatcaaattgcagcaagttagcctattcacttattacaaatgtcagagttgagtatatcctttgagctacctgaatggcatggattttaaagggtagatattggcacatataccaagaataaaacaagcttatataaatttaaacaacaaccaaaatgttctaaattttatagacaagagtatacaaatacaattctctgctatatgacctctttatcttctcttcattgaacaactgatacagtcattggcactaattctgtatatctttctgactttctaatgccagaaaaaaatatatagttatttgattttctccagtgtaactcatacataaggttttgcttcattcaatcctatattgatgttcaacacgtcaggtgaatatatgagaaggcattgttccgtggaatgtacaaaagaagaaaattagggaatgtgaagaaaaaagcaatacttgtatgtttctcagaattattattttcacccttacctaaaatatcccaaaagcacataagctattatagttattccttgcttgagaagtcatcatcaaatactttctgaatgaaaaccacatccggctcaaaatttaacaaacatacatcttggcatgagaatagactctgaaaagctcagtaatatcactccagtgatagaaagaatcttattttttcttgggttttcaaccttgacaagtggtacaggaagatttgtggataatttggtcaatttttatacagcatacactcaaaagaatgaaatgaaggccagaacgtctgctttactaatgacccgtgctgtacttgggatccctaccaccaccatgtgacacagaaataagccatctcagttgaggataccctcagcctgtcttcgactcatctggaagttcacagctctcctataagttcctctaactgaacttagtctgacgtacatcagcagaaacagctagctgggcctaccccaaatttcaaatagccgaaacatgagcctaaacaaagagttgtcttaagccactaaattttgggggtaatttatgcaacaaaagctaactcactgtccttgggttagtcactattatggcatcacaygtctctggtaatgcatcaccaactataactatcttatttccggatgttccccgccgccttgagattgtgatccccaaggggacagggccctttgacaactttattttgccactgtaccccaaattctcagaagggttcatagttgttagttgcccaataagcattggtggagtaaagaaataatatcaattttatataattatttgaaggttaaataaaataacataaaggtggtcgggcgtggtggctcacgcctgtaatcccagaactttgggaggccgaggcaggcagatcatgaggtcaggagatcgagaccatcttggccaacatggtg

SEQ ID NO: 33486 - DNA, 1257 bp, Homo sapiens
acagatctgtgccattatttttatctgctgtgtagtattccatagtatggattaccagaattttctaactagctccttattgatgcagatttttccagtagcttcgcttttgccacagtgaatgttttatttccatgtgcaaatgtttatcgaggacagatgtgatgaaatgaaagagatggatctgaaggtattaaatttgaatgagaaaagtgctagaccccatgggctggtccccctgtctctatggggcagccaagtgaggggaaggggccagaatactgtgctctgtggcaggctcgtgggttggttttagggtccacagttgcctgggtttggatgaggggtgtgaggctgccatcagtcagcccttgacctcactgggctatgctcagcttcctggcagcactacagagcctgctgctttcagcaggctgggaacggctgcttcttgctggtggagctggtgtttgggaggctgccggggtgttagctcacagtggcgtgggagcgtggggtggcagctcccccactcccctgagctcacagcagcctctgagtcaacctcccccacctgcctggggaatgtgagttgtttccagagaaaggcaggctaggaactcactgagtttcatcctctggtcccatattgcctttagactagtgtccttgcccttggacctgcctgagccccatgctcactgctctcactgccatcaccctctgccccaggcgacgccagctccaccaagatcctcccatattccctgcgttatcttacctccacacctttgtatatgcaattccctctgtctgggacactcttcctgtgactaactcctgtaaccctcagctttgagtccrgcgtgatctctggggagccatctgtgagccttttcccggccctggttaaagtagcaactcaatacgtagctgatgtttactgagagacagtgtagtgtcatggctaggagcacagaccctgcagtttgtcctccaggattcaaatcctagctctaccgtttactagctgtgcatccttgggaaagttactttacttctcagtgcctccatctccccatcggtaaaaatgaggatgatgatgtacccgcttcataacgttgttggggggttaaattaagttgataaatgttgaagtggtatggtcagagctacgtaagtggtataaattgttgttattctacactattctacatttacgtaatctattattacagcatattctgattgtcatca

SEQ ID NO: 33487 - DNA, 864 bp, Homo sapiens
gtgagctcccgcacccagcctatttatatcctgtgtatttttgttaagaatttgaaaaatgaatgccaagtataacatgacagaggagttttaaacaaaagcagagaaatagktgtaagcaggaacatggcacaggtcgctgaagtccaattgttacccctgtttgtgggtgtgtgtgtgttttgagacgaggtatcactgtcacccaggctgaagtacagtggtgtgatcaagctcactgcatccttgacctcccaggctcaagcgatcttcctacctcagcctcctaagtagctaggactacagacatggaccattacgcctgactaattttttgaattttaatagacacgaggtctcactgtgttgcccagggtggtctcgaactcctgagcaatcctcctgcctcagcctcccaaaatgttgggattacaggtgtgagccactgtgcctggccacacacttggccacagctgagaggcgaatatattgagttagctactttttggcatcagagcaaaggaataaaacaagctggtataggagtacagaccttttcatgatccaacagttgctatgtctaactttcctcaaccgcagggcatcattatgtttcatttaattggatgtcatgacacctcttcttgcagctatgctgggactcatgtatgtctactggactcagctcaacatgttccagaccttgaagtacctggccatcctgggcagtgtgacgtttctggctggcaatcggatgctggcccagcaggcagtcaagaggtaaggccagacatgagccagggatctagagtagggttagaaatactcagctctgccggcctagctctttgaagggtaggtggc

SEQ ID NO: 33488 - DNA, 864 bp, Homo sapiens
gtgagctcccgcacccagcctatttatatcctgtgtatttttgttaagaatttgaaaaatgaatgccaagtataacatgacagaggagttttaaacaaaagcagagaaatagttgtaagcaggaacatggcacaggtcgctgaagtccaattgttacccctgtttgtgggtgtgtgtgtgttttgagacgaggtatcactgtcacccaggctgaagtacagtggtgtgatcaagctcactgcatccttgacctcccaggctcaagcgatcttcctacctcagcctcctaagtagctaggactacagacatggaccattacgcctgactaattttttgaattttaatagacacgaggtctcactgtgttgcccagggtggtctcgaactcctgagcartcctcctgcctcagcctcccaaaatgttgggattacaggtgtgagccactgtgcctggccacacacttggccacagctgagaggcgaatatattgagttagctactttttggcatcagagcaaaggaataaaacaagctggtataggagtacagaccttttcatgatccaacagttgctatgtctaactttcctcaaccgcagggcatcattatgtttcatttaattggatgtcatgacacctcttcttgcagctatgctgggactcatgtatgtctactggactcagctcaacatgttccagaccttgaagtacctggccatcctgggcagtgtgacgtttctggctggcaatcggatgctggcccagcaggcagtcaagaggtaaggccagacatgagccagggatctagagtagggttagaaatactcagctctgccggcctagctctttgaagggtaggtggc

SEQ ID NO: 33489 - DNA, 2749 bp, Homo sapiens
cctccactttttagtttcttatcccactcggaggggaaggggtgatggtggtttcctgttgctcttgggcggctcctagtgttcctacttaggtgtgctgggacctcagccgctcagactggagaggaaagagagccccagcagcgtgtgggatgagagcagggacacttgccacctatcaccagacctgtgcgggcctggaagacagactgggtgcggggctggtggacagtggtgtggagcaggggtagtagggcctgagggtggaagtacaaaggctgctgggtgtcctggtcactgggaacaaaggacagccagtggctggaaggaaggaagtcgggaaacagctttttggagaaacggctggcacagctaagtaaggggttcccgggctggtttggggctggcctgcagactcagatgggagctggagaacagagcccagtaaacattgccatgtgccaggctgtgttctgtgtccagagctaccacagggagcaagacagatccagtcccttcccttggtccaggtacagcccacgggcacccagctgagggagaaaggaagcagtgatcacacatgtgagaagggcctcagaggaagcagttcttaccttgatggcttgggaggtctcagctgagacctgaagaatgagaaggcgcctatgccaagctgaggaagagcactccggccagagaatcagccagcatggaggctctggggcaagagcacggcacattctgactggaagcaggccaagcagccagggtgtcactggcaggaacggcatcctcgctgggatagaagccagaacaaacttggcttttaggggctgtggtaaaggggactgatttttctcttaggaccttttttaaaacaaaacaaacaaagagatggggtcttgctatgttgcccaggctgaccttgaactcaagggatcctcttgcctcagcctcctgagtagctgggactacaagcatgcaccatcacgcctggccagcctgagttttattttggggtatagcagaggcagatgctgtctgtctgaccctrcccactgggcaaagcctttttttttattttttattttttattttatttgagacagggtcttgctctgttgctcaggccagaatgcagtggtgcaatcacgactcactgcagcctcaacctcccaggctcaggtgatccccccacctcagcctctggagtagctgggactacaggcgcgtgccaccacactgggctaatttttgtatttttggtagagatgggattttgcaatgttgcccaggctggtctcatactcctgagcacaagcaatctccccgacctcccaaggttctaggattacaggcaggagccactgcacctggcctcaaagcctcttaaagggactcggctctcagtgctggagcagtgctgcaggggaataacctggttgctatagccaagacagtctgggagtccagagctgacagcaggcctctctcttataattcatgaaatccactggattcatcactcaaatgattcgctgcagtagcgcctgggcctggccttctctgaggagtacaagacatgccagctttagagtcagagctgcttcgagttcccccattagctgtgtgtccttttgtacctttacctctctgggccttggtttcccatcagtaaaaatggggatcatacctctgagggttttatagggattagaggaggccacagccacaacacataccacagtgcctgacacttagcattgagtcagtgtttgctcccaatagcgcagatattgtcatcattattatttcccaggtggtgttaacaggagcccagtcaacagtttgtaccaggtctacattcacctgttagttcaagttactcgacaccccagctccctcatttcctccccagcatttcctgaggggcctggagtcttaaagcaaccttttcgagagagtgttgccttccctccccgccccatcagtcccgtcctgccaacctggagcgactctagttgaatctgacctctagttggatccagctgggccaatgtgccctgccctgccttcctcaggggcctgttgtagagaacaaatgaagtaatggatgggaagcctctttgtgaactctaagttaatacaaacagaagagattatcattaaaagcgacaagtcccccgttgattagagcatttctttagggagaaaaatagcactccgtcttaagtaggaccctccccggagtgggaagctcccagctcctctgcggggcaagtggagtctctccgacgccattcgtgccgtggttaatggtatggagcactggagttgttgctatggtggtttttcccctataattgcattcacctccaaaaccacaagtagcagcaggtcccagcagtcgttattttatttgaaaaactaattggaagttgaaagagccctcggcttttgcttttgtcaggataggccaaggaaagagatgagcaggtgggtctgggaggaaggagggggtcttggggcaggccgggcgcgcctcccattcacagccccttcctttgtgcctgcctctcttggttgaagtgggccacctgccctctaaggccagccttttcctccgagggggcttttgtctcccattgttctgattgtctcctccgtggagccgcctcagtggccccctgcagacggtttcccaggcttcacgttttttttctcaggcgcccagggagagcaggtggtc

SEQ ID NO: 33490 - DNA, 2749 bp, Homo sapiens
cctccactttttagtttcttatcccactcggaggggaaggggtgatggtggtttcctgttgctcttgggcggctcctagtgttcctacttaggtgtgctgggacctcagccgctcagactggagaggaaagagagccccagcagcgtgtgggatgagagcagggacacttgccacctatcaccagacctgtgcgggcctggaagacagactgggtgcggggctggtggacagtggtgtggagcaggggtagtagggcctgagggtggaagtacaaaggctgctgggtgtcctggtcactgggaacaaaggacagccagtggctggaaggaaggaagtcgggaaacagctttttggagaaacggctggcacagctaagtaaggggttcccgggctggtttggggctggcctgcagactcagatgggagctggagaacagagcccagtaaacattgccatgtgccaggctgtgttctgtgtccagagctaccacagggagcaagacagatccagtcccttcccttggtccaggtacagcccacgggcacccagctgagggagaaaggaagcagtgatcacacatgtgagaagggcctcagaggaagcagttcttaccttgatggcttgggaggtctcagctgagacctgaagaatgagaaggcgcctatgccaagctgaggaagagcactccggccagagaatcagccagcatggaggctctggggcaagagcacggcacattctgactggaagcaggccaagcagccagggtgtcactggcaggaacggcatcctcgctgggatagaagccagaacaaacttggcttttaggggctgtggtaaaggggactgatttttctcttaggaccttttttaaaacaaaacaaacaaagagatggggtcttgctatgttgcccaggctgaccttgaactcaagggatcctcttgcctcagcctcctgagtagctgggactacaagcatgcaccatcacgcctggccagcctgagttttattttggggtatagcagaggcagatgctgtctgtctgaccctgcccactgggcaaagcctttttttttattttttattttttattttatttgagacagggtcttgctctgttgctcaggccagaatgcagtggtgcaatcacgactcactgcagcctcaacctcccaggctcaggtgatccccccacctcagcctctggagtagctgggactacaggcgcgtgccaccacactgggctaatttttgtatttttrgtagagatgggattttgcaatgttgcccaggctggtctcatactcctgagcacaagcaatctccccgacctcccaaggttctaggattacaggcaggagccactgcacctggcctcaaagcctcttaaagggactcggctctcagtgctggagcagtgctgcaggggaataacctggttgctatagccaagacagtctgggagtccagagctgacagcaggcctctctcttataattcatgaaatccactggattcatcactcaaatgattcgctgcagtagcgcctgggcctggccttctctgaggagtacaagacatgccagctttagagtcagagctgcttcgagttcccccattagctgtgtgtccttttgtacctttacctctctgggccttggtttcccatcagtaaaaatggggatcatacctctgagggttttatagggattagaggaggccacagccacaacacataccacagtgcctgacacttagcattgagtcagtgtttgctcccaatagcgcagatattgtcatcattattatttcccaggtggtgttaacaggagcccagtcaacagtttgtaccaggtctacattcacctgttagttcaagttactcgacaccccagctccctcatttcctccccagcatttcctgaggggcctggagtcttaaagcaaccttttcgagagagtgttgccttccctccccgccccatcagtcccgtcctgccaacctggagcgactctagttgaatctgacctctagttggatccagctgggccaatgtgccctgccctgccttcctcaggggcctgttgtagagaacaaatgaagtaatggatgggaagcctctttgtgaactctaagttaatacaaacagaagagattatcattaaaagcgacaagtcccccgttgattagagcatttctttagggagaaaaatagcactccgtcttaagtaggaccctccccggagtgggaagctcccagctcctctgcggggcaagtggagtctctccgacgccattcgtgccgtggttaatggtatggagcactggagttgttgctatggtggtttttcccctataattgcattcacctccaaaaccacaagtagcagcaggtcccagcagtcgttattttatttgaaaaactaattggaagttgaaagagccctcggcttttgcttttgtcaggataggccaaggaaagagatgagcaggtgggtctgggaggaaggagggggtcttggggcaggccgggcgcgcctcccattcacagccccttcctttgtgcctgcctctcttggttgaagtgggccacctgccctctaaggccagccttttcctccgagggggcttttgtctcccattgttctgattgtctcctccgtggagccgcctcagtggccccctgcagacggtttcccaggcttcacgttttttttctcaggcgcccagggagagcaggtggtc

SEQ ID NO: 33491 - DNA, 2749 bp, Homo sapiens
cctccactttttagtttcttatcccactcggaggggaaggggtgatggtggtttcctgttgctcttgggcggctcctagtgttcctacttaggtgtgctgggacctcagccgctcagactggagaggaaagagagccccagcagcgtgtgggatgagagcagggacacttgccacctatcaccagacctgtgcgggcctggaagacagactgggtgcggggctggtggacagtggtgtggagcaggggtagtagggcctgagggtggaagtacaaaggctgctgggtgtcctggtcactgggaacaaaggacagccagtggctggaaggaaggaagtcgggaaacagctttttggagaaacggctggcacagctaagtaaggggttcccgggctggtttggggctggcctgcagactcagatgggagctggagaacagagcccagtaaacattgccatgtgccaggctgtgttctgtgtccagagctaccacagggagcaagacagatccagtcccttcccttggtccaggtacagcccacgggcacccagctgagggagaaaggaagcagtgatcacacatgtgagaagggcctcagaggaagcagttcttaccttgatggcttgggaggtctcagctgagacctgaagaatgagaaggcgcctatgccaagctgaggaagagcactccggccagagaatcagccagcatggaggctctggggcaagagcacggcacattctgactggaagcaggccaagcagccagggtgtcactggcaggaacggcatcctcgctgggatagaagccagaacaaacttggcttttaggggctgtggtaaaggggactgatttttctcttaggaccttttttaaaacaaaacaaacaaagagatggggtcttgctatgttgcccaggctgaccttgaactcaagggatcctcttgcctcagcctcctgagtagctgggactacaagcatgcaccatcacgcctggccagcctgagttttattttggggtatagcagaggcagatgctgtctgtctgaccctgcccactgggcaaagcctttttttttattttttattttttattttatttgagacagggtcttgctctgttgctcaggccagaatgcagtggtgcaatcacgactcactgcagcctcaacctcccaggctcaggtgatccccccacctcagcctctggagtagctgggactacaggcgcgtgccaccacactgggctaatttttgtatttttggtagagatgggattttgcaatgttgcccaggctggtctcatactcctgagcacaagcaatctcccygacctcccaaggttctaggattacaggcaggagccactgcacctggcctcaaagcctcttaaagggactcggctctcagtgctggagcagtgctgcaggggaataacctggttgctatagccaagacagtctgggagtccagagctgacagcaggcctctctcttataattcatgaaatccactggattcatcactcaaatgattcgctgcagtagcgcctgggcctggccttctctgaggagtacaagacatgccagctttagagtcagagctgcttcgagttcccccattagctgtgtgtccttttgtacctttacctctctgggccttggtttcccatcagtaaaaatggggatcatacctctgagggttttatagggattagaggaggccacagccacaacacataccacagtgcctgacacttagcattgagtcagtgtttgctcccaatagcgcagatattgtcatcattattatttcccaggtggtgttaacaggagcccagtcaacagtttgtaccaggtctacattcacctgttagttcaagttactcgacaccccagctccctcatttcctccccagcatttcctgaggggcctggagtcttaaagcaaccttttcgagagagtgttgccttccctccccgccccatcagtcccgtcctgccaacctggagcgactctagttgaatctgacctctagttggatccagctgggccaatgtgccctgccctgccttcctcaggggcctgttgtagagaacaaatgaagtaatggatgggaagcctctttgtgaactctaagttaatacaaacagaagagattatcattaaaagcgacaagtcccccgttgattagagcatttctttagggagaaaaatagcactccgtcttaagtaggaccctccccggagtgggaagctcccagctcctctgcggggcaagtggagtctctccgacgccattcgtgccgtggttaatggtatggagcactggagttgttgctatggtggtttttcccctataattgcattcacctccaaaaccacaagtagcagcaggtcccagcagtcgttattttatttgaaaaactaattggaagttgaaagagccctcggcttttgcttttgtcaggataggccaaggaaagagatgagcaggtgggtctgggaggaaggagggggtcttggggcaggccgggcgcgcctcccattcacagccccttcctttgtgcctgcctctcttggttgaagtgggccacctgccctctaaggccagccttttcctccgagggggcttttgtctcccattgttctgattgtctcctccgtggagccgcctcagtggccccctgcagacggtttcccaggcttcacgttttttttctcaggcgcccagggagagcaggtggtc

SEQ ID NO: 33492 - DNA, 2749 bp, Homo sapiens
cctccactttttagtttcttatcccactcggaggggaaggggtgatggtggtttcctgttgctcttgggcggctcctagtgttcctacttaggtgtgctgggacctcagccgctcagactggagaggaaagagagccccagcagcgtgtgggatgagagcagggacacttgccacctatcaccagacctgtgcgggcctggaagacagactgggtgcggggctggtggacagtggtgtggagcaggggtagtagggcctgagggtggaagtacaaaggctgctgggtgtcctggtcactgggaacaaaggacagccagtggctggaaggaaggaagtcgggaaacagctttttggagaaacggctggcacagctaagtaaggggttcccgggctggtttggggctggcctgcagactcagatgggagctggagaacagagcccagtaaacattgccatgtgccaggctgtgttctgtgtccagagctaccacagggagcaagacagatccagtcccttcccttggtccaggtacagcccacgggcacccagctgagggagaaaggaagcagtgatcacacatgtgagaagggcctcagaggaagcagttcttaccttgatggcttgggaggtctcagctgagacctgaagaatgagaaggcgcctatgccaagctgaggaagagcactccggccagagaatcagccagcatggaggctctggggcaagagcacggcacattctgactggaagcaggccaagcagccagggtgtcactggcaggaacggcatcctcgctgggatagaagccagaacaaacttggcttttaggggctgtggtaaaggggactgatttttctcttaggaccttttttaaaacaaaacaaacaaagagatggggtcttgctatgttgcccaggctgaccttgaactcaagggatcctcttgcctcagcctcctgagtagctgggactacaagcatgcaccatcacgcctggccagcctgagttttattttggggtatagcagaggcagatgctgtctgtctgaccctgcccactgggcaaagcctttttttttattttttattttttattttatttgagacagggtcttgctctgttgctcaggccagaatgcagtggtgcaatcacgactcactgcagcctcaacctcccaggctcaggtgatccccccacctcagcctctggagtagctgggactacaggcgcgtgccaccacactgggctaatttttgtatttttggtagagatgggattttgcaatgttgcccaggctggtctcatactcctgagcacaagcaatctccccgacctcccaaggttctaggattacaggcaggagccactgcacctggcctcraagcctcttaaagggactcggctctcagtgctggagcagtgctgcaggggaataacctggttgctatagccaagacagtctgggagtccagagctgacagcaggcctctctcttataattcatgaaatccactggattcatcactcaaatgattcgctgcagtagcgcctgggcctggccttctctgaggagtacaagacatgccagctttagagtcagagctgcttcgagttcccccattagctgtgtgtccttttgtacctttacctctctgggccttggtttcccatcagtaaaaatggggatcatacctctgagggttttatagggattagaggaggccacagccacaacacataccacagtgcctgacacttagcattgagtcagtgtttgctcccaatagcgcagatattgtcatcattattatttcccaggtggtgttaacaggagcccagtcaacagtttgtaccaggtctacattcacctgttagttcaagttactcgacaccccagctccctcatttcctccccagcatttcctgaggggcctggagtcttaaagcaaccttttcgagagagtgttgccttccctccccgccccatcagtcccgtcctgccaacctggagcgactctagttgaatctgacctctagttggatccagctgggccaatgtgccctgccctgccttcctcaggggcctgttgtagagaacaaatgaagtaatggatgggaagcctctttgtgaactctaagttaatacaaacagaagagattatcattaaaagcgacaagtcccccgttgattagagcatttctttagggagaaaaatagcactccgtcttaagtaggaccctccccggagtgggaagctcccagctcctctgcggggcaagtggagtctctccgacgccattcgtgccgtggttaatggtatggagcactggagttgttgctatggtggtttttcccctataattgcattcacctccaaaaccacaagtagcagcaggtcccagcagtcgttattttatttgaaaaactaattggaagttgaaagagccctcggcttttgcttttgtcaggataggccaaggaaagagatgagcaggtgggtctgggaggaaggagggggtcttggggcaggccgggcgcgcctcccattcacagccccttcctttgtgcctgcctctcttggttgaagtgggccacctgccctctaaggccagccttttcctccgagggggcttttgtctcccattgttctgattgtctcctccgtggagccgcctcagtggccccctgcagacggtttcccaggcttcacgttttttttctcaggcgcccagggagagcaggtggtc

SEQ ID NO: 33493 - DNA, 647 bp, Homo sapiens
aaaacctttccatagtttctcattacacttagattaaaacccaaacttctttccattgttctgcatcatccatatctgtttgtctcaacctcatcctgaaccactcttgcctttgctcatgatgctctcatcatatcgacattctttatgttgacagtgctaagctttttctcacttgatggtcttttctcatkctattccctcctgcctaggaataaatatgtgttgacattcctgaatcttctcttctctgaaccaaacatcttctgtgtctgccattattcttcaattgatataaatgtaggtcttctcactaatctgattgcatgctttagtgtcttgttgcctcattttgaatatgatacccagaaatgaccatacttcttgggcatgactacagcaagaaagttatcttgttctttctgaaagaagtctacatgcacccaaggtatcgtgccaccaggatagaaagaaccatgcacattcacttatgatggattggctaggtggataggatgacgaatgcttggaaaacagactatctggcttctaccaggtcaatggcaaagaccttgtagcctcctaatatataagaggttgatgtgtacacagattgacaggacagacaggaatagtcaccaaggatt

SEQ ID NO: 33494 - DNA, 608 bp, Homo sapiens
tgaactcagaagggacttaggagactcaggagggacatcacagcatctactacattctccttccacacagaaggttccaagcgtaagtaacttgctcacagccgggcgtggtggctcacacctgtaatcccagcactttgggaggccaaggcagctggatcacttgaggccaggagttcaagaccagcctggccaacatggtgaaactccgtctctactaaaaatacaaaaaattagccaggcgtggtggcacatgcctgtaaccctggctactggggaggctgaggcatgagaatcacttgaacccaggagctgaaggttgcagtgagctgagatcacaccactgcactccagcccgggcaacagagtgggaccctgtctcaaaagacaaaaaaaaaaaaaaaaaaaaaaraaagagataagtaacttactcaggctcacacagccagtgtgggaactaaacccaggtctgattgatcaaccccaaagcccttgccctttccgccacctgaagctgccctcaaaatcccttgtaaggtgcacccaccactgcttatcctatctcctcttcactctgccctcaggaaaataccatccactggcaagtt

SEQ ID NO: 33495 - DNA, 608 bp, Homo sapiens
tgaactcagaagggacttaggagactcaggagggacatcacagcatctactacattctccttccacacagaaggttccaagcgtaagtaacttgctcacagccgggcgtggtggctcacacctgtaatcccagcactttgggaggccaaggcagctggatcacttgaggccaggagttcaagaccagcctggccaacatggtgaaactccgtctctactaaaaatacaaaaaattagccaggcgtggtggcacatgcctgtaaccctggctactggggaggctgaggcatgagaatcacttgaacccaggagctgaaggttgcagtgagctgagatcacaccactgcactccagcccgggcaacagagtgggaccctgtctcaaaagacaaaaaaaaaaaaaaaaaaaaaaaaragagataagtaacttactcaggctcacacagccagtgtgggaactaaacccaggtctgattgatcaaccccaaagcccttgccctttccgccacctgaagctgccctcaaaatcccttgtaaggtgcacccaccactgcttatcctatctcctcttcactctgccctcaggaaaataccatccactggcaagtt

SEQ ID NO: 33496 - DNA, 608 bp, Homo sapiens
tgaactcagaagggacttaggagactcaggagggacatcacagcatctactacattctccttccacacagaaggttccaagcgtaagtaacttgctcacagccgggcgtggtggctcacacctgtaatcccagcactttgggaggccaaggcagctggatcacttgaggccaggagttcaagaccagcctggccaacatggtgaaactccgtctctactaaaaatacaaaaaattagccaggcgtggtggcacatgcctgtaaccctggctactggggaggctgaggcatgagaatcacttgaacccaggagctgaaggttgcagtgagctgagatcacaccactgcactccagcccgggcaacagagtgggaccctgtctcaaaagacaaaaaaaaaaaaaaaaaaaaaaaaaagagrtaagtaacttactcaggctcacacagccagtgtgggaactaaacccaggtctgattgatcaaccccaaagcccttgccctttccgccacctgaagctgccctcaaaatcccttgtaaggtgcacccaccactgcttatcctatctcctcttcactctgccctcaggaaaataccatccactggcaagtt

SEQ ID NO: 33497 - DNA, 533 bp, Homo sapiens
tcaaactcttgacacatcagttgagtggcagtgtccaccgtgccaaagccttcccaacttcagatgacctgacgttttctttcgttttgcgggggaaatgtaagtaaaagttcctggaaatttctcagttaattcttacaggtctggaaggtggtctgtaaggaagtctttggatgaagcttgaaaagggtgcaatactcatcaaagcagtgagttcagcaccaggcagattgaatgtaccaccttctctcccctcttcaggtcctatccttaccacccatgtggtctcagggcttgggtcatctagtatgaatcacagcaaaccaggggtcatagaagttagaggtttatgatattaagtatatgtgcatcttagtgatgggtgcctcttggaatagtgaggaagaagggaggaaaaatggagaaggctgtgccacacatagaccaaaacaagaaggccctctctttgaggggccctcctctagctctgtcrtttccccatagagcaaaaagcttatggaaccaagaggatg

SEQ ID NO: 33498 - DNA, 1089 bp, Homo sapiens
ctaggccttctggtacaataaatattatttgtattatgactgtgcccaccgaggcactgttaaggccttgacatccatgatcacatttagctttgcagatgagaagctgggacttggagaggaagaggaagacattgcagctgacccgggtccccctgtgcctctgctcaccaagtctgcccagtgggcctcctgcatcagacacatctgtatgccataaaaatgcttattcctcgttgagtctyagccagtgagcttggggatggattgtgagaatctgcattttaataagcagccccagttgatcctgattcacacagaaatttgagaaaccttaccaccctgcccatcctcatccattagagcacattctaccagtcacgttagataaaaactcctcgagtgtggatctgtttttcttcgtaatgattaaaaatgccttctctgcaagtaacagcatcttcgacaatggtggcttaaaatcctaaagatctttatttgtttagttcatacagtgtccagaatttgacagtctcaagactggtgtagcagctcagcagtggcgccaaagggcctcattccttcaacgtctgtgtttcactatccttgactcttggctgttttctgtgcctgttgcttcattgccaccaggtggttgctgcagatccaggcatcttgtctaaatagttactttcccagattttgctgcagcgagggcatggtcacatgacaggcttagcctagcggatgttctcacctggaatttttacttgggagctggtgtcaagaagagggcatggtgaggactccattctgggggcaatggtgatggccctggtggccagaatggattctcctgccatcttattcttaggtcaagcaatgatgtccttacctgatgggctttgtggtgcagttttggctgtagtgctgggcttcatggtcactctttgcgcctgcgtgttttctaagcctgattccctaatatttccagctggtctgtgagtttcctgatatccgttcaacattttctcctctcctcgattcagccagtgaatgtccattgctacagatggacttaccaggctt

SEQ ID NO: 33499 - DNA, 1089 bp, Homo sapiens
ctaggccttctggtacaataaatattatttgtattatgactgtgcccaccgaggcactgttaaggccttgacatccatgatcacatttagctttgcagatgagaagctgggacttggagaggaagaggaagacattgcagctgacccgggtccccctgtgcctctgctcaccaagtctgcccagtgggcctcctgcatcagacacatctgtatgccataaaaatgcttattcctcgttgagtcttagccagtgagcttggggatggattgtgagaatctgcattttaataagcagccccagttgatcctgattcacacagaaatttgagaaaccttaccaccctgcccatcctcatccattagagcacattctaccagtcacgttagataaaaactcctcgagtgtggatctgtttttcttcgtaatgattaaaaatgccttctctgcaagtaacagcatcttcgacaatggtggcttaaaatcctaaagatctttatttgtttagttcatacagtgtccagaatttgacagtctcaagactggtgtagcagctcagcagtggcgccaaagggcctcrttccttcaacgtctgtgtttcactatccttgactcttggctgttttctgtgcctgttgcttcattgccaccaggtggttgctgcagatccaggcatcttgtctaaatagttactttcccagattttgctgcagcgagggcatggtcacatgacaggcttagcctagcggatgttctcacctggaatttttacttgggagctggtgtcaagaagagggcatggtgaggactccattctgggggcaatggtgatggccctggtggccagaatggattctcctgccatcttattcttaggtcaagcaatgatgtccttacctgatgggctttgtggtgcagttttggctgtagtgctgggcttcatggtcactctttgcgcctgcgtgttttctaagcctgattccctaatatttccagctggtctgtgagtttcctgatatccgttcaacattttctcctctcctcgattcagccagtgaatgtccattgctacagatggacttaccaggctt

SEQ ID NO: 33500 - DNA, 517 bp, Homo sapiens
cctttttaggaaacaaatatagttatgccttattttcttgagtataaaacttagacatgtttactctccttctgggcaataccagggcattggaacaattttaattccactggtccctcatcagtttatttttgaaatttaatctaatagacttttaaacacataagacattattctatgttwtgatcatggttcatttagatatgtctacatattcacatattctttgtgaaacgttttttcttgtatcttctgcccatttgggatcatcatcttgtacttcctctagaagttcctttcatgcggtctactggtgggaaactctttggagtttttatttttgtttttgtgcagaaatgtctttgtttgtttaatgtagtaatagatgagaatctacatttcctccattctggaatgatattttcactggatataaaattttgtgttggtggttattttcctttagcacactgaagataaacttccaccaccctctagcatctattgctgttcttga

SEQ ID NO: 33501 - DNA, 556 bp, Homo sapiens
ggagtttgagaccagcctcgccaacatggtgaaacactgactctattaaaaacaatacaaacattagtcaggcatgctggtgtgcacctgtaatcccagctaccctggaggctaaggtgggagaattgcttggacctgggaggtggaggctgcagtgagccgagatcatgccactgcactccagactgtgtgacagcgcaagactctatatcgaaaaaaaaaaaaagctttagtatcaaacccagcttcttaatttttttcagtggaaaggatggtccaaataacctaatcagccattaccagaaatagaaagtccccacattgcatttctgaaatatttgaattagttaacatctgtatcagtcaggkttcaactagaaaaacagagccagtaaaagattgtgtgtgtgtgtgacagtaattggcttatgcaattttggtggatggctatctgccccgttctcaatgctgtctctctaatgatggaccctagcaggcaggcaggaaaggaaaattacaagtaggcttggtgactagagtaaccagcagaagctga

SEQ ID NO: 33502 - DNA, 547 bp, Homo sapiens
attttctaactccttattttattctattttcattatttcytcgcttctgttttctttagattattttattcttctttgtcttttttatttagatgctacatttatttaattttgtatttcctaatgattatatagcatttaagactttaaaatgtgttaggaattaagctttagctataataagttgtgctgattcttaaacatttcttgctctttcattcactgaagttttttccccaaaactgccatagttttgaccctttaataatttatgatggcatcctctttgttattataatgtttactcttttattcttgggagtactgttattattttgtgtggcaaaaaaaaaaaaaaaaaaaaaaaagagttttagcaacatgctctcaaactgcccctgtgagcctcaagtcctgggcatgtgactttttgacatgagtaatttgatctgccaccaagtcaaaagttttttgttgttgttgttgttttgttttgttttttaacatgaggacatggtgacaagtgcaaaagaattaaaagatttaa

SEQ ID NO: 33503 - DNA, 935 bp, Homo sapiens
accagctgacaggtggagctgcgagcctccagtgctcagccctcggcggggcctgcctggcagccccacacacagagggcatcggggtggcgggggcatgtgttacacgggggccctgggtctgagtcatccacttcctccgagtctggatgggaggacccagcgcccctcctccgccccctcctgatctggaagsataaatggggaggggagagcccgctgggtagaaggaacagggagtggccagggtaagtccctactctcagagaccctgacatcagcgtcacctggagcagagtggcccagcctcagactcagagcaccaagacccaggcccgcaggcctggacccaccccggtccccccgtcccagctccattcttcaccccacaatctgtagcccccagccctgccctgtgaggcccggccaggcccacgatgctcctccttgctccccagatgctgagcctgctgctgctggcgctgcccgtcctggcgagcccggcctacgtggcccctggtgagtcccagccggggtccaccctgcccctcaccacattccacagatcagggcctgggtgggttctggggaggccgggctggcccccacacagggaagggctggtcccaggcgtggggcggcttcttggtcctgacctggcacctgccccagccccaggccaggccctgcagcaaacgggcattgttggggggcaggaggcccccaggagcaagtggccctggcaggtgagcctgagagtccgcggcccatactggatgcacttctgcgggggctccctcatccacccccagtgggtgctaaccgcggcgcactgcgtggaaccgtgagtctcctggggcctggaggggtgggcaagggctggatgtgagccctggctcccgggtgctcctgggggctgcccagggccctgagtg

SEQ ID NO: 33504 - DNA, 935 bp, Homo sapiens
accagctgacaggtggagctgcgagcctccagtgctcagccctcggcggggcctgcctggcagccccacacacagagggcatcggggtggcgggggcatgtgttacacgggggccctgggtctgagtcatccacttcctccgagtctggatgggaggacccagcgcccctcctccgccccctcctgatctggaagcataaatggggaggggagagcccgctgggtagaaggaacagggagtggccagggtaagtccctactctcagagaccctgacatcagcgtcacctggagcagagtggcccagcctcagactcagagcaccaagacccaggcccgcaggcctggacccaccccggtccccccgtcccagctccattcttcaccccacaatctgtagcccccagccctgccctgtgaggccyggccaggcccacgatgctcctccttgctccccagatgctgagcctgctgctgctggcgctgcccgtcctggcgagcccggcctacgtggcccctggtgagtcccagccggggtccaccctgcccctcaccacattccacagatcagggcctgggtgggttctggggaggccgggctggcccccacacagggaagggctggtcccaggcgtggggcggcttcttggtcctgacctggcacctgccccagccccaggccaggccctgcagcaaacgggcattgttggggggcaggaggcccccaggagcaagtggccctggcaggtgagcctgagagtccgcggcccatactggatgcacttctgcgggggctccctcatccacccccagtgggtgctaaccgcggcgcactgcgtggaaccgtgagtctcctggggcctggaggggtgggcaagggctggatgtgagccctggctcccgggtgctcctgggggctgcccagggccctgagtg

SEQ ID NO: 33505 - DNA, 935 bp, Homo sapiens
accagctgacaggtggagctgcgagcctccagtgctcagccctcggcggggcctgcctggcagccccacacacagagggcatcggggtggcgggggcatgtgttacacgggggccctgggtctgagtcatccacttcctccgagtctggatgggaggacccagcgcccctcctccgccccctcctgatctggaagcataaatggggaggggagagcccgctgggtagaaggaacagggagtggccagggtaagtccctactctcagagaccctgacatcagcgtcacctggagcagagtggcccagcctcagactcagagcaccaagacccaggcccgcaggcctggacccaccccggtccccccgtcccagctccattcttcaccccacaatctgtagcccccagccctgccctgtgaggcccggccaggcccacgatgctcctccttgctccccagatgctgagcctgctgctgctggcgctgcccgtcctggcgagccyggcctacgtggcccctggtgagtcccagccggggtccaccctgcccctcaccacattccacagatcagggcctgggtgggttctggggaggccgggctggcccccacacagggaagggctggtcccaggcgtggggcggcttcttggtcctgacctggcacctgccccagccccaggccaggccctgcagcaaacgggcattgttggggggcaggaggcccccaggagcaagtggccctggcaggtgagcctgagagtccgcggcccatactggatgcacttctgcgggggctccctcatccacccccagtgggtgctaaccgcggcgcactgcgtggaaccgtgagtctcctggggcctggaggggtgggcaagggctggatgtgagccctggctcccgggtgctcctgggggctgcccagggccctgagtg

SEQ ID NO: 33506 - DNA, 935 bp, Homo sapiens
accagctgacaggtggagctgcgagcctccagtgctcagccctcggcggggcctgcctggcagccccacacacagagggcatcggggtggcgggggcatgtgttacacgggggccctgggtctgagtcatccacttcctccgagtctggatgggaggacccagcgcccctcctccgccccctcctgatctggaagcataaatggggaggggagagcccgctgggtagaaggaacagggagtggccagggtaagtccctactctcagagaccctgacatcagcgtcacctggagcagagtggcccagcctcagactcagagcaccaagacccaggcccgcaggcctggacccaccccggtccccccgtcccagctccattcttcaccccacaatctgtagcccccagccctgccctgtgaggcccggccaggcccacgatgctcctccttgctccccagatgctgagcctgctgctgctggcgctgcccgtcctggcgagcccggcctacgyggcccctggtgagtcccagccggggtccaccctgcccctcaccacattccacagatcagggcctgggtgggttctggggaggccgggctggcccccacacagggaagggctggtcccaggcgtggggcggcttcttggtcctgacctggcacctgccccagccccaggccaggccctgcagcaaacgggcattgttggggggcaggaggcccccaggagcaagtggccctggcaggtgagcctgagagtccgcggcccatactggatgcacttctgcgggggctccctcatccacccccagtgggtgctaaccgcggcgcactgcgtggaaccgtgagtctcctggggcctggaggggtgggcaagggctggatgtgagccctggctcccgggtgctcctgggggctgcccagggccctgagtg

SEQ ID NO: 33507 - DNA, 935 bp, Homo sapiens
accagctgacaggtggagctgcgagcctccagtgctcagccctcggcggggcctgcctggcagccccacacacagagggcatcggggtggcgggggcatgtgttacacgggggccctgggtctgagtcatccacttcctccgagtctggatgggaggacccagcgcccctcctccgccccctcctgatctggaagcataaatggggaggggagagcccgctgggtagaaggaacagggagtggccagggtaagtccctactctcagagaccctgacatcagcgtcacctggagcagagtggcccagcctcagactcagagcaccaagacccaggcccgcaggcctggacccaccccggtccccccgtcccagctccattcttcaccccacaatctgtagcccccagccctgccctgtgaggcccggccaggcccacgatgctcctccttgctccccagatgctgagcctgctgctgctggcgctgcccgtcctggcgagcccggcctacgtggcccctggtgagtcccagccrgggtccaccctgcccctcaccacattccacagatcagggcctgggtgggttctggggaggccgggctggcccccacacagggaagggctggtcccaggcgtggggcggcttcttggtcctgacctggcacctgccccagccccaggccaggccctgcagcaaacgggcattgttggggggcaggaggcccccaggagcaagtggccctggcaggtgagcctgagagtccgcggcccatactggatgcacttctgcgggggctccctcatccacccccagtgggtgctaaccgcggcgcactgcgtggaaccgtgagtctcctggggcctggaggggtgggcaagggctggatgtgagccctggctcccgggtgctcctgggggctgcccagggccctgagtg

SEQ ID NO: 33508 - DNA, 935 bp, Homo sapiens
accagctgacaggtggagctgcgagcctccagtgctcagccctcggcggggcctgcctggcagccccacacacagagggcatcggggtggcgggggcatgtgttacacgggggccctgggtctgagtcatccacttcctccgagtctggatgggaggacccagcgcccctcctccgccccctcctgatctggaagcataaatggggaggggagagcccgctgggtagaaggaacagggagtggccagggtaagtccctactctcagagaccctgacatcagcgtcacctggagcagagtggcccagcctcagactcagagcaccaagacccaggcccgcaggcctggacccaccccggtccccccgtcccagctccattcttcaccccacaatctgtagcccccagccctgccctgtgaggcccggccaggcccacgatgctcctccttgctccccagatgctgagcctgctgctgctggcgctgcccgtcctggcgagcccggcctacgtggcccctggtgagtcccagccggggtccaccctgcccctcaccacattccacagatcagggcctgggtgggttctggggaggccgggctggcccccacacagggaagggctggtcccaggcgtggggcggcttcttggtcctgacctggcacctgccccagccccaggccaggccctgcagcaaacgggcattgttggggggcaggaggcccccaggagcaagtggccctggcaggtgagcctgagagtccgcggcccatactggatgcacttctgcgggggctccctcatccacccccagtgggtgctaaccgcggcgcactgygtggaaccgtgagtctcctggggcctggaggggtgggcaagggctggatgtgagccctggctcccgggtgctcctgggggctgcccagggccctgagtg

SEQ ID NO: 33509 - DNA, 744 bp, Homo sapiens
tgcagagcctggtgagaaaaccccggtgaggccggtgacccaggggggctccctgcagtccccaccacrctccccacggcccgccagcgtccgcactcgtaagcataccttcggacagcgctgcgtctccagccggccggcggccccaggcggaaaggatgccgaggcctcggacccatccgacgaggaggtcagccacatcaccagctccgcctgcccctggcagcccacagccgagccccatggccccgaagcctctccggtggccggcggcgagcgggaccctgcgcaggctctacagcgtggacgctcagggcttcctggacaagccgggccgggcagacgagcagtggcggccctcggcggagctgggcagcggggagcctggggaggcgaaggcctggggccctgaggccgagcccgctctgggtgcgcgcagaaagaagaagatgagccccccctgcatctcggtggaaccccctgcggaggacgagggctctgcgcggccctccgcggcagagggcggcagcaccacactgaggcgcaggaccccgtcctgtgaggccacgcctcacagggactccctggagcccacagagggctcaggcgccgggggggaccctgcagccaagggggagcgctggggccaggcctcctgccgggctgagcacctgaccgtccccagctttgcctttgagccgctggacctcggggtccccagtggagaccctttcttggacggta

SEQ ID NO: 33510 - DNA, 744 bp, Homo sapiens
tgcagagcctggtgagaaaaccccggtgaggccggtgacccaggggggctccctgcagtccccaccacactccccacggcccgccagcgtccgcactcgtaagcataccttcggacagcrctgcgtctccagccggccggcggccccaggcggaaaggatgccgaggcctcggacccatccgacgaggaggtcagccacatcaccagctccgcctgcccctggcagcccacagccgagccccatggccccgaagcctctccggtggccggcggcgagcgggaccctgcgcaggctctacagcgtggacgctcagggcttcctggacaagccgggccgggcagacgagcagtggcggccctcggcggagctgggcagcggggagcctggggaggcgaaggcctggggccctgaggccgagcccgctctgggtgcgcgcagaaagaagaagatgagccccccctgcatctcggtggaaccccctgcggaggacgagggctctgcgcggccctccgcggcagagggcggcagcaccacactgaggcgcaggaccccgtcctgtgaggccacgcctcacagggactccctggagcccacagagggctcaggcgccgggggggaccctgcagccaagggggagcgctggggccaggcctcctgccgggctgagcacctgaccgtccccagctttgcctttgagccgctggacctcggggtccccagtggagaccctttcttggacggta

SEQ ID NO: 33511 - DNA, 459 bp, Homo sapiens
agcttggagaaggattagaaaaatgctcattcttaatcagttcgggcttgtctttatgccagcgaggttgaccttggggacagaagggtggccaggataaggacaagcatcctggtattggggaattctctgatatggggctgggacgtcaagatgggccatgatggcccctggggatagggcttctctgcagtggaagcagaagcatcccggtgttttctgctgtgtcactgtcctcagagggatgtataaagctgcttgggggctcataggagagggatgaaaccaagagtttggctttccagcaacagcggacaaagagtgggaaggggtactctatgccccaggtctgcaacatcttgccctatgcgctaggttttcccaaaggtcctttggctccaagaattttacagcagaacaaagggatcgatacccccaasggggcataaaagcatgcca

SEQ ID NO: 33512 - DNA, 377 bp, Homo sapiens
ccagctcttagcagggcagactctgccaggcagagaaggcgccctgaatggccggcccccagagaaagctgctgagctcatggttatccctgggtccacaaccatttggcactgtaggagcaacgataacccgcatatgatcactgtgcacgttgttattgcagacagcagagagaaaggccccagggaccagcagctctgcgtgcagtctgcgttctgctcccaggcttattctcattggctgtgtgaccttgggcaagccccatcccctctctgaccctgtttcctcgtcttccaagggaaatcgcgttgatctctaagggccttytcagcaacagccttgccaacaacaaaagcacctgaagtagcctttatgt

SEQ ID NO: 33513 - DNA, 1095 bp, Homo sapiens
acagaggctaccctccttctgtctgggattcccagtcaacttcgggtcccagcgcaggcattccgtcgcctgtggggccatcctagggagacatagttgctccttctcctttgttctcagtgtactttgcctacacctctcttctccattaaaacacttctttcagagttgtgtttgcacgtctgtctttccatcagactctaagctccttgaaggcagaagcctgtgtctatttatccatttatctctgctgcttacaacagtgcctcgcttacagtagatgataaatcaacatttacaggatacaggggcaagtgggatcgggctctccctatcttaattctacgataaggaaaaagaaataagaacggctgagcgctggggttctgtatatcgtctgaagaaattgctaaaatatgacttttgcatctagcatccctggttcaagtgaaaccacaggaacaaactcagaggggcatcagaagtggcccttttgtcctcaaacttcagctgctacgtgaagataaaattaaccccaatcgggctcctccggccaggtgggtatgccatgagctttcctccgccctccagagctgaagcttggactgtctcaagctctatgaagctgcaggacttgacttcaatggagtgggccatccacacagccaggattcttcccctgctaatacagcagcagtgggaccgccttgcagtaggcacagcggagatgtgccctgccaggtccccaggtgagaacacacgaagaggtgccacagaaggaaaggcgccttaagacatcagtcatctccatcaggccacgcagcagcaatcttcaacttctgattacgaggtggaagcagttctgaaaactacgcctgagggggcaaatgggaaggatacccaacaactggtttcagggggttctcagagaggctgtgagcaggtggctacagctgctggcagttcacacacagtcctcctcatgctcagagaccaaaggtgaagaaacaaaggccatgcaatggacttcctmtttttgtttaatttatttaagaccacctccttacaacttccagagagaaaatacaaaacaag

SEQ ID NO: 33514 - DNA, 1650 bp, Homo sapiens
ccctctgccaggaaagcttgttccccactcggtgcagaagccgcttcgagaaagggaggctttgtggttctcagagcatgggtagccccccgcaaaggagtctggacccaccttccacacacatgcagtcatcgaagcatttgttgttgaggcctcggttgtggggtgtgcagagatgctcccgcaggtcgcagcaagtccctgccaacacagagagcacacgcagtcagccaagctgagccgcccctccccgcagccctgcactcggtcccactggacaagagatccatcatctctgtggcaggccgcgccctggcggggtgggccatctggtgtgcaaggctcctgagtggaaccacagggagatgtcatggccgaggcccccaagggtcggtggcagagaccccagctgcctcagatggggtactgattgaccatgggaagagcgaaggtggtgtgaggtctcctcccagacagagccagtagaacagctgggggctgccaggtgtggagtcagctcagagctgggaggggcctcaggatccccaaaaccaatgtcctcttttgacagatggggaaactgaagtcctgggcacctgccatggagccggctcccagagcgactgtccagtcggcccaaatgcgggccttttctttgtgcccagggtgaaaacaatggtttgggaatgaagcagcctgtcagggagctggtggtttgccttatacaatgctaattgctggtttggttgctgttttgtagaatattctggtcactgatctaacaatcgtggtgccgtggaggtgtgccgctccgatctctcttggggaaagcacttgctggcggcctccagctggtacagcttcagggccaccttggcccatggcaggctgttcccagcagcccctgccaatgacgggcatgggggttctggggcccagccatttctgctcagcacgggcctcgtctaacaggccacctctgtactggagcgcccatccggtgcatgatgtctgaagcttcctccatgcttcctccacctttcgtcattcacaagtgtttcccacccctagcccaccccaaaataaatctgttgygctttttgttttgttttgttgagacagggtcttgctctgtcacccaagctggagtacagtggtgcgatcatatctcgctgcagccttgacccccgaggctcaggtgatcctcctgccttagcctcctgaatacctggaaccacaggcgcacaccaccaagcctggttggttaattttttattttcttattttttttaattttgagacagagtctcgctctgtcagagtgcagtcgtgcgatctcgggtcactgcaacctccacctcccaggttcaagcaattctttgcctcagcctcctgagtagctaggattacaggcacctgccaccatgcccggctaatttttgtatttttagtagagatggggtttcatggccaggctggtcttgaactcctgaccttgtgatccacccatctcggcctcccaaagggctgggattataggcgtgagccaccgcacccagccaagcctggttatttttttaaattattactatttttggagatggagtcttcccgtgttgcccaggctggtcctgaactcctgggctcacg

SEQ ID NO: 33515 - DNA, 903 bp, Homo sapiens
acagcgaccaagggctccaatccatttctgtcactctgaaagccagttggaggctgtgtcacaaagcaccaggcaaccaggcrgaaggaggaggcagccccctccgcctccccgcagcccggggcggttctgcccggcccgggttgctcacaaagcctgcgcttctggcccagggtctgctcctcccagccgagcacagtcagcagcccggagtagccctggaccagagttgctgagggatggcaggaacatccacaacccacagccggcccctttcacaactgaggtctgatagcgaatcattaaaaacaaaacaaattaaaacaaaagcaatcgtaattgtaggagctgctgtccccgagcagctgtgaagcccaggcctttccgcgtttctttctttcattcacatctcatttttcctctcaactgcgctgtacatcagggagacttttccatggttttaaaatgacgaaaccgaggctctgggggcgagggggttgtaagccacaaatccaagatggcacaactggcaagtggcaaagcccatctcaaggccggggttctcctggcacccggtgcacacaggacatggttcttgtccccattgcccgtggggccacctgcctccctcacgcagccgctcatcctcgcggtgagaggcatcttcctccttgagtgcagtcagggcccaggagccaccagcagctgggaaacagacactaaccagggaggggaaggggcttatctcaagcccccatcttgtcccccatcctaggggagagttggagagctgtcagcatcgccgtatgcaaacgaaggcgatgaatcgagcctggagtcagctttgattcctgagcccctccccccacaacagccttgcatttgggggccaggagactcggg

SEQ ID NO: 33516 - DNA, 903 bp, Homo sapiens
acagcgaccaagggctccaatccatttctgtcactctgaaagccagttggaggctgtgtcacaaagcaccaggcaaccaggcagaaggaggaggcagccccctccgcctccccgcagcccggggcggttctgcccggcccgggttgctcacaaagcctgcgcttctggcccagggtctgctcctcccagccgrgcacagtcagcagcccggagtagccctggaccagagttgctgagggatggcaggaacatccacaacccacagccggcccctttcacaactgaggtctgatagcgaatcattaaaaacaaaacaaattaaaacaaaagcaatcgtaattgtaggagctgctgtccccgagcagctgtgaagcccaggcctttccgcgtttctttctttcattcacatctcatttttcctctcaactgcgctgtacatcagggagacttttccatggttttaaaatgacgaaaccgaggctctgggggcgagggggttgtaagccacaaatccaagatggcacaactggcaagtggcaaagcccatctcaaggccggggttctcctggcacccggtgcacacaggacatggttcttgtccccattgcccgtggggccacctgcctccctcacgcagccgctcatcctcgcggtgagaggcatcttcctccttgagtgcagtcagggcccaggagccaccagcagctgggaaacagacactaaccagggaggggaaggggcttatctcaagcccccatcttgtcccccatcctaggggagagttggagagctgtcagcatcgccgtatgcaaacgaaggcgatgaatcgagcctggagtcagctttgattcctgagcccctccccccacaacagccttgcatttgggggccaggagactcggg

SEQ ID NO: 33517 - DNA, 903 bp, Homo sapiens
acagcgaccaagggctccaatccatttctgtcactctgaaagccagttggaggctgtgtcacaaagcaccaggcaaccaggcagaaggaggaggcagccccctccgcctccccgcagcccggggcggttctgcccggcccgggttgctcacaaagcctgcgcttctggcccagggtctgctcctcccagccgagcacagtcagcagcccggagtagccctggaccagagttgctgagggatggcaggaacatccacaacccacagccggcccctttcacaactgaggtctgatagcgaatcattaaaaacaaaacaaattaaaacaaaagcaatcgtaattgtaggagctgctgtccccgagcagctgtgaagcccaggcctttccgcgtttctttctttcatycacatctcatttttcctctcaactgcgctgtacatcagggagacttttccatggttttaaaatgacgaaaccgaggctctgggggcgagggggttgtaagccacaaatccaagatggcacaactggcaagtggcaaagcccatctcaaggccggggttctcctggcacccggtgcacacaggacatggttcttgtccccattgcccgtggggccacctgcctccctcacgcagccgctcatcctcgcggtgagaggcatcttcctccttgagtgcagtcagggcccaggagccaccagcagctgggaaacagacactaaccagggaggggaaggggcttatctcaagcccccatcttgtcccccatcctaggggagagttggagagctgtcagcatcgccgtatgcaaacgaaggcgatgaatcgagcctggagtcagctttgattcctgagcccctccccccacaacagccttgcatttgggggccaggagactcggg

SEQ ID NO: 33518 - DNA, 903 bp, Homo sapiens
acagcgaccaagggctccaatccatttctgtcactctgaaagccagttggaggctgtgtcacaaagcaccaggcaaccaggcagaaggaggaggcagccccctccgcctccccgcagcccggggcggttctgcccggcccgggttgctcacaaagcctgcgcttctggcccagggtctgctcctcccagccgagcacagtcagcagcccggagtagccctggaccagagttgctgagggatggcaggaacatccacaacccacagccggcccctttcacaactgaggtctgatagcgaatcattaaaaacaaaacaaattaaaacaaaagcaatcgtaattgtaggagctgctgtccccgagcagctgtgaagcccaggcctttccgcgtttctttctttcattcacatctcatttttcctctcaactgcgctgtacakcagggagacttttccatggttttaaaatgacgaaaccgaggctctgggggcgagggggttgtaagccacaaatccaagatggcacaactggcaagtggcaaagcccatctcaaggccggggttctcctggcacccggtgcacacaggacatggttcttgtccccattgcccgtggggccacctgcctccctcacgcagccgctcatcctcgcggtgagaggcatcttcctccttgagtgcagtcagggcccaggagccaccagcagctgggaaacagacactaaccagggaggggaaggggcttatctcaagcccccatcttgtcccccatcctaggggagagttggagagctgtcagcatcgccgtatgcaaacgaaggcgatgaatcgagcctggagtcagctttgattcctgagcccctccccccacaacagccttgcatttgggggccaggagactcggg

SEQ ID NO: 33519 - DNA, 903 bp, Homo sapiens
acagcgaccaagggctccaatccatttctgtcactctgaaagccagttggaggctgtgtcacaaagcaccaggcaaccaggcagaaggaggaggcagccccctccgcctccccgcagcccggggcggttctgcccggcccgggttgctcacaaagcctgcgcttctggcccagggtctgctcctcccagccgagcacagtcagcagcccggagtagccctggaccagagttgctgagggatggcaggaacatccacaacccacagccggcccctttcacaactgaggtctgatagcgaatcattaaaaacaaaacaaattaaaacaaaagcaatcgtaattgtaggagctgctgtccccgagcagctgtgaagcccaggcctttccgcgtttctttctttcattcacatctcatttttcctctcaactgcgctgtacatcagggagacttttccatggttttaaaatgacgaaaccgaggctctgggggcgagggggttgtaagccacaaatccaagatggcacaactggcaagtggcaaagcccatctcaaggccggggttctcctggcacccggtgcacacaggacatggttcttgtccccattgcccgtggggccacctgcctccctcacgcagccgctcatcctcgcggtragaggcatcttcctccttgagtgcagtcagggcccaggagccaccagcagctgggaaacagacactaaccagggaggggaaggggcttatctcaagcccccatcttgtcccccatcctaggggagagttggagagctgtcagcatcgccgtatgcaaacgaaggcgatgaatcgagcctggagtcagctttgattcctgagcccctccccccacaacagccttgcatttgggggccaggagactcggg

SEQ ID NO: 33520 - DNA, 546 bp, Homo sapiens
gggcttgggccccagctgtggtcctgagtggcatttcagacctgtctgaagaagggaaagggatgcgctcccaggaggccgtgtgacgggggtcctgtttctgtggctccctccccatctccctctgcaaggaccatctgggtaggttccccaaggcgcagggtctgctccccttggcctatctgacccgccctttctctctctctctctcttttttytctttttgagatgaagtctctctttgttgcccaagctggtctcgaactcctggcctcaagctatcctcctgcctcagccactgtgcctggccacagcccttctctttaggcctccccactgcttgctcagaacctgctgaagctgccagctcctcttgtgtgaatctacttcctcttctcattcttcagccccttctccgggagtgcattaagattcccacatctggctgggcgtgatggttcatgcctgtaatcccagcattttgggaggcaaggcaggcagatcacttgaggttgggaatttgagaccagcctggccaacatggca

SEQ ID NO: 33521 - DNA, 546 bp, Homo sapiens
gggcttgggccccagctgtggtcctgagtggcatttcagacctgtctgaagaagggaaagggatgcgctcccaggaggccgtgtgacgggggtcctgtttctgtggctccctccccatctccctctgcaaggaccatctgggtaggttccccaaggcgcagggtctgctccccttggcctatctgacccgccctttctctctctctctctcttttttttctttttgagatgaagtctctctttgttgcccaagctggtctcgaactcctggcctcaagctatcctcctgcctcagccactgtgcctggccacagcccttctctttaggcctccccactgcttgctcagaacctgctgaagctgccagctcctcttgtgtgaatctacttcctcttctcattcttcagccccttctccgggagtgcattaagattcccacatctggctgggcgtgatggttcatgcctgtaatcccagcattttgggaggcaaggcaggcagatcacttgaggtygggaatttgagaccagcctggccaacatggca

SEQ ID NO: 33522 - DNA, 607 bp, Homo sapiens
gttctggctgccagggtgggttccaggccctgcggctccctgaggctccccacaactctgtcctgttacacttgtcacatggccttgtggtcygggagtgttctgcagtagtgtctgaatccactctgtgtccccgggccccagtttggctcctttcgggcagctcagtagtggtgactagcattcacatatgtgcccagcaccacggtaggtccttcttgaccccttctccttggagaaactccatgggggagatgcctttactgtccccatttgcagatgggtaaactgaggcccagaggcctagacacattgcagagagtcatgctcttagtaggtggcagagacaggattggaacccaggtccacactgctaatcactttactgcttcccagtgagcagaaattgagtcaatgaatggcttccctagacccgggtctcagagtcttgccaaggctggactcagggcagtggtggtggagagtcctggcccaagtgggacctgggtcgaagtagtggttttgtcagctgccattcaacatctctgttggacaccgagctcagggggcagggtggacacccatcgtatttcttgctgcatctttg

SEQ ID NO: 33523 - DNA, 938 bp, Homo sapiens
agacccctttcctataacaaaaggagaagacgaaaggaaggatgaggatatctcactctgagaagcaaaacttgtgtcagtcagcaacccattaagcggaggcagtcactgrttggaaatcatctgccagggtccaagttttcagctgagtctgtgggaaattggtgcagtatgtgggtagggggagtccatctccatgacagaaaggatgggtggtggtcaccaccaccaccacccacccagcagccacctggccacatatggtggccatatgctgtgagggcccttcctgctttctctcctcttggatataaaagtgagggccaaccacaggctgcccagagtcctgggggtgagagtgtccatcctgaggcatcaaaaaagtgtgggtggaggctgagtgattttcaaaaaagagaaagggcagctttgcaatgcagtgtggggagagcagactgggctgatgcatgaggccgcaaaacaacccagaaaaacatctccgtggcttgcacaatcatcctctgaatatgtgtcatcaaacacgagaccatctttacctggcaataacgcagctgaaatcagtcatttaaggagtttctcactattactgagcccaacatggtctttaactgttgtctaccccataaaaaaaaaaaaataggaggctgaagtgcaggaaaatttttttttcttcttaatcacatgaaatgttgtgagtacacgccagagaataggcctgaattggatgttttttgatgccttaaatttaaacagctgggctttttttctttttttcttttcttttttacagtagctgcactatcctgtttaacttttgaaatgaaggatttgagttttcatagggaatctacatttcatcttaaagctggaacacagcatctttaacttttctctaaagttgagttctctgcggatca

SEQ ID NO: 33524 - DNA, 226 bp, Homo sapiens
caaaaaaaagtatgtacaacagtacttctcaaagaaaaatcaaggttatagaaagactgcctattacttcactacaattatttgatcattttaacactcaaataaaatgtagatatcaaatttgcmattacaataagaaattcataatatccatccatgcatttatgtaaatatcattgttaaacgaggcaccaaggaataatgtctgtgtagggtagtatctaaa

SEQ ID NO: 33525 - DNA, 1732 bp, Homo sapiens
ttgacaaaacagagaactgtagaatgtgacaaagctctcaggagagcagactcagacagcaaactcttcagtgggaggcccaggggagtggaaatcaaagtccccaggagaccagagtggagagaattatagctctcttctcataattctaaggaagcaattgtagttctccattcattcttggtaatgacatcagggtttctctgccagcctcaacaatctcaccactgccagtctcaaggctgatacagattcatccacatcatgtggcattcacatccttgctgccatgcccacctgtccactcaggaggacagctgctgcagccagaaactgggagagaagacctcattgctgggcagaattactcactaactagtacagcatacgaagaccaccctcgccacacaaggagaggcacacctggaagcactggaagagaggctaacctcgtcccccatgccctttcctcctttctttgaaggtttttcccctctcttgggaccacttatgcaccttaagacccctggaccctcatgctgcacctcattgtccctaagcactgacgcacatcacagtgagaaaatagaaaataatgggacccaaatgtccccaaaagacaccagccctcacagggagccagcacctggttggggtacactttgaaatggcctgtagatgtctcagcctctgcctcctccaagtaagcaccctgaaagcagctctgcaactcctcaccattcatcaccagcccccagcatagtcccggtacatgacaggcagtatttgttgtttagctaacaatgaatgagcatgtagtagtgccatgcactgttgcagttcatttaatcctgacatcagccttaagaggcaaatgctattagtcccattttacaagtaagtcacagagaacttgaaatcacttgcccaagagcccacagctactaagtgacagaaccaggacacaaactcaatcggctacagaattctttagcttaactgaaatgctcatgactcatacaagagatattgaaagtgtgtgtgtgtcagggtgaaggtgggcaggggcaggggtagaaggaagaaagagaaagacaagaaaagaagggtggtaggcagggagggacagaggaggagaaaaagtgaggtggatggaagggaggccactaggtcccgggcacaggctttccaccttgagaggcagcaactctatacggtcagtaccctacagtccagagactgacccaggttgaacaaactctcaagtgactgatgaataagccagaatatcaatcagtttattagtttcagagagaactattacttccaagaaaaccagagyctcacgtccattggtgggaggtcaatgtacatgggaaaaggatcagcctcatctgaagcttgcgtggaaagcaaggactcggtgccagagagccacaggatgatgttaatggcttgtgtcagtgagttatgattgtctggtgctccctgctcctcctagacccatctgtcaagcagagcggatgtttctgtcagccagtcgggaccccttgctttggacaatgccggaaaaacactgacaaattactgctccgtggcatccccttcctctagaccatgcacagaccaccccactttggttaatacatttgtttcccagacgaggcacattgtgattgattagatttcacaattgattaggtttcacaatcccagatgtttaacttcatta

SEQ ID NO: 33526 - DNA, 580 bp, Homo sapiens
gagttcagacaagcggctccctgttgcctcctaagcacataacactcctcactctggaatcaaagccctacatgccctcctccaatttccttctctgaaattatctccaactatccctctacagtctacacactccccagggttcctggactatgtggttttctccatcccatctgttgtttttcccctctagacctttcctcatgatctttgctggatttagaatgtgctcttcctccccactctgctcctggggaaatcctatccctccctcaggcccatctgaaatgaagactttggtaaacctctgtacggttctctccctgctggccaggccctctgcttcttttcaacccaggggctgtgagcttctcttacagttctcatctttccagtcttctgtgacgtcctcccaggctggtctcattcctgctgcaaaataaaarctcacaaaagcagggactacttgatactcccttttgtctccctttctgacctgagtactgttgctagctctgttactaatagtgttctcccctaaatgcgtttgaacaccatgactgctttttcctaactaaag

SEQ ID NO: 33527 - DNA, 1118 bp, Homo sapiens
tgagcccgcccctgctcggcgcaacccrgaggggtccgggggccgcagtcccgccaggtttcccagcctgtcgctcggacgcgccctcggggtggggcaggactcggggcacccactggggaccagcaggcgagagcacgcgagtcggagcggggattgcggggggggggggggatcggagccccagggggttgggactgtaggggcgggggctggggggggcgtgccggagatgtccaggcctcgcgctgcgcgtccctccctgggcgacggccaggccgggccccgtggaacacatcggctgcagcgcgggcggagaccggcgtgggggcggaagccggggcgcagccagagcccggggaatcctttcaagttctgggttctctttgttgcgcaatggggcctcggggccgcgcggcctcattggcccggagctgtgacgtcacgccccggccccgcccgcatgtcttgcggagggaggcctcatggcccgggtgggtcccaggctagttgcacctgcagttggccctgcagtgggcggggaagtgggaagccgggtcctgagatgctgcggaatgctttaagtgccctgcaggagaaacttcccagcagaagacagggctttaagtgccctgcaggagacacttcccagcaggagactgggtcccgtcggcactgtggggagcccagcctggggtctggccctagtggccgctccattctatgaagaatgaacagaaagggtgcaatccgtggatctgtggtcactgacccagagccagagggacactttgttcccacacaaccagtcctctgtcactctgcacttggaacccggtgtccacgccctgtcccccaggacgttcctctcccatgccaagactacagtgcccaggagtgcctggccccaaacccagccctgacactattctctccgtgttgccctgagcttctgcctgaagtgttcccatctgcagtgtggggacggtgagacctgccctgcagacctgaggctcagaaagacctcagctctagggacaaaaaaaaaaaaaatgcccttttccccaacattttagggtttgagaggccaggactttggtgtcaggcaagtggagttt

SEQ ID NO: 33528 - DNA, 541 bp, Homo sapiens
ctttgagggagaagagggtagaagagaggcttggtgtggggatttgccatccctgcaaggaggtagccctccacctacaggaaggaggtgaggacygcctgttaaacggtgcaatcatagtgcttatctctaggaacaggaaactgaatttctcatccagccattttcttgtctttgggatggatttgagaatacacattcttttttttcccccaggctattttgggcccagctaaaacagtctgtaaaggctgtgctgaccagcggagtgagttagctgccaccatagctagaacccagagaacacccataaaacgttctcaggcttacacaaggattttctcaggttcagggccatggcccagggctgcctttttgagaagctccttcctcccctgcaaccccaactgatttgaattcaggtggtgcagggtccacactttcggaaaaagccttcaagtgcaacgaaagtcttggtgcagcaggtgggcactgagccttcattgcagaggacactgcggtcctgagtgacgccgtttca

SEQ ID NO: 33529 - DNA, 528 bp, Homo sapiens
cgcttgaacccaggagacagagattgcagtgagctgagatcatgccattgcattccagcctggtgacagagtgagactccatctaaaaaaaaaagaataggagacatttgtgcattgttcatggttacagtcatatcacttagttctgaagatggaaaaaacrgaatattttcttcctcatattaattccgttgagattaaagattaacagtgtcctcgtggggagacacatctaaatgtgtaaaaaggaaaaaatattgtacacattgtggcctatttattttcgaattactcattctggaattagaaaatagaaacggtttaaggcttctggataattattttgtcatcgcacacacaccaaggattagaaggaaaaaagagcagtctgctattaaagactcaacaatgtgaacctttggacacgcagtcctacctctccgttaagccagattgactgcccaagaactggcacagtacacaagaactagtattctctgttctgctcacacatgagcgtgtgagggc

SEQ ID NO: 33530 - DNA, 694 bp, Homo sapiens
cgactcccttccagcttaaggacgcaggcataggtggggggcccagagcacagcactgaaacagctgggggtgatgggaggaacaggcgtactcccatgccgggctatattgctaattttttttttttttgagacagagtctcactgttgcccaggccggagtgcagtggcacaatctcagctcactgcaacctctgcctcctgcgtttaagcgattctcctgcctcagcctcccgagtaactgggattacaggcacctgccaccatgcctggctaatttttgtatatttagtagagacagggtttcaccatgttgaccaggctggtcttgaactcctgacatcaggtgatccgcctgccttggcatcccaaagtgctgggattacaggcgtgagccaccgcgcccggcctaatttttttgtagagacagaatcttgctgtttcccaggctggtcccaaactcctgggctcaagcgatccacttgcctaggcctcctgaagtatttggactgcaggtatgagccactgcacccggatgcctctgagttttaaagactgctckcacgtcccaggccggccgtgggctttcctcttgctcccaaagcccaagctcatcatgagatcagtttaaacagcaaattctacacaccctgaagtgagtggaactttcacctacgccttaggtcctaaggca

SEQ ID NO: 33531 - DNA, 611 bp, Homo sapiens
tgggaagcctaggcatatggatcgcttgggtactccggaggctgaggcacgaggatcagctgagtccaggaggcagaggttgcagtgagccaagatcgagccacggcactccagcctgggagacagagccagaccctggctcaaaagaaaaacaaaaaaaagatggaccctggagaggcccggggtcccgcggggcgccttttctatttctttaccgcaatctgtttaaagagaaaagcaagcgcctgcccctcagctacacccccggggcctcaaggccacgcccacatgggagctgcccccccccccaacgaccaggacggttcccacgggggcggggcttcacacgtgacccgggacagccaatcgcgggcgcgcagcggaggggcgtgtcgcgcggaacaaaaggcctttcccsagcggggcggggcggggccgagatcacgctgatgcccacaggaccggcacggcgtggggtgcaacaaggggcagccacccacctaggaaagggtgcacagtgggggcacccacgggggcaggcaccggagggggtgcccacagaggatagaggacgccgagaagtgacctggggagccataggatgaggaaga

SEQ ID NO: 33532 - DNA, 611 bp, Homo sapiens
tgggaagcctaggcatatggatcgcttgggtactccggaggctgaggcacgaggatcagctgagtccaggaggcagaggttgcagtgagccaagatcgagccacggcactccagcctgggagacagagccagaccctggctcaaaagaaaaacaaaaaaaagatggaccctggagaggcccggggtcccgcggggcgccttttctatttctttaccgcaatctgtttaaagagaaaagcaagcgcctgcccctcagctacacccccggggcctcaaggccacgcccacatgggagctgcccccccccccaacgaccaggacggttcccacgggggcggggcttcacacgtgacccgggacagccaatcgcgggcgcgcagcggaggggcgtgtcgcgcggaacaaaaggcctttcccgagcggggcggggcggggccgagatcacgctgatgcccacaggaccggcacggcgtggggtgcaacaaggggcagccacccacctaggaaagggtgcacagtgggggcacccacgggggcaggcaccggagggggtgcccacagaggatagaggacgccgagaagtgacctggggagccayaggatgaggaaga

SEQ ID NO: 33533 - DNA, 658 bp, Homo sapiens
tctcctccagaaaagccccctcgaggaaataaattagtgcggttctctttgaccyccaaagacaagacaagcacttatttttattttcagaagacaaaagaaccaagatgccaactggctgcgaatgctctatctccagtctgtctctgtgtactggtagaggctgggaggagtagggggcagcctgttccatttctgatagtgcccttgctcttctgtctgtcatcttgcaggatgcccgagggccagatgggcttagctaggccaaagtaacagactcaagagttattgtacattactgaccacgctcatttgttcaaaagttagaacatctggctgcaccaggaaaaaaaaaaaaaaaaagtcctgttcttctttagataaacaagagacattttcataattgctttctagcaatcagcttttatttgccttaatataagcttttaagcagttatctaactagtgtccacaaccctgtaaccatacttccacatcttcagcttaggcagacatcgaacctctctgggatgtttccagcaaaagtgagcttttctaatcgtctcattgtaacatggcttattttgtagaggtattcatcagccacacacttcatgttggtttttggtttttaagctaactacaaatctagtaaaaa

SEQ ID NO: 33534 - DNA, 702 bp, Homo sapiens
tcttccataagggacacgagtcacattggatcaggggcacaccctgttcccacatgaccttatcctaacttaattaattatatccgtgatggcttcacttccaaataaggtcaccttctcagtaggacttcagtgcatgtattctgggggacacaaatcggcccccctttgaagtgtgtttcttccttcaggactctcagccttaggctattctttagcggtgtttttgaccccttcaccgttgacaccctggtcagtaggtgttgtgttttactctaatttggtcttgtggtctctctcaggagagtggccacaaactttagccctgcccttgaagcgctccagggaacttcatcatggatgtttacagtgagcctttcgtggagtacctctttattctggcagacaacctaatgcttaaatgtgtgacccacggccaggggtccctctcacagaacacctgttgatactggtaggtccccttgtggcttctgtctgacctgtgtgcagtttattcccaccaagatggccgctctctaggagagccctgagcaggagagaagtcaggggagacacagaagagcagttgcacagagcccatgaagaaacagaagcagttcatcacatacagatcgcagacaraacagggcagtggcacgctgccctgcagggcacactgaagggcacactgcaaggccaaca

SEQ ID NO: 33535 - DNA, 1612 bp, Homo sapiens
ctctggcaccaagtaaacaactgacgataatcaacagtttcattcctccatccgtcagggcaaggttttcgtctcttctagtcagggaagcataactctggggcctcaagtctgaacaatggccctaacgtagcatttcattgctttttgaggagcaggccatgcacatggggaccctgaaccctgctgtgagccaccctccagctgggggagcctgtcaggctgcaccccatctcacttgacttggccttgattcaccatcttcaaacaggtagctgtgaatggcttaggaccattctcagagttcacttcaccagctgagtttaaaacatcccgctatcctgtgagaatgatgaacagccacagccacgctgggcctgtgcttgtacaacaaacttgactttgcttctgcgcttcccagaagacactccagcatgctctgggagtaggcatactgggtatttgcacctgatgtgcaagaaagagtgcttggaagatcacagaagagtcagacaggaggagagccgaggggttgaaaccctcccgcgaacaggtacctggcacgtacctggcacaccattctcctccggagagtgctgctctgtcgcccaggctggagtgcagtggcacagtcacagctcactgcagcctcaaactcccgggctcaagtgatcctcctgcctcagcttcctgagtagctgggactatgggcatgctaccatgcctggctaatttttaaatttattttgtagtagagacagtgtctcactatgttgcccaggctggccttgaactcctgccctcaagggatcccaaataaatatatttatttctaaattcattctaaatgtttgcaatgttaagtatgtgtggcaaaagaacagatacctttcattttttcaatcacctttcaaatattgttacaaaagcacatattactgtgaaatagtcgtaatttcagaaagaaattattcttcattcaacttctcttaagatttttaattaaactttttattttgaaarcattcagaacctacagcaaagttgcaagaatattacaagttaatgattatatgctcttcccctctattctcccaccattgatacttagccatgccaactctctccatctctatattctacacatttacagtgcaattatcaaatttagaaaacttaacattgacacaatgctattatctaatatgtggtgaatattcaaattttgttgatggttacaaaattgccttaaaagcaactttttcccctcaacacaaaatccaatctagggtgatgcgtcgcatttaggtgtcatgtccccttagacttccttaatcaggagcagtccttagcctttctttgttccatgaggctgaaagttcgtttctgaagtgctcagggtctttttgttttgctgacgtctcagtttgggtatcacttggttaaggtggtgtcatccagagttatcttctggaaaggcaccttctatcttggataggaaggaatttaagagcaggcactaggcaactgtaaatatcaccccacaattccactgaatgatattaatattcagcgacgatctttgcccgggccaacaattattatggtggtt

SEQ ID NO: 33536 - DNA, 1370 bp, Homo sapiens
cctcttctaaattattacacaaacattgaattttccagagctttccatgcttcaggatttccataatttccatttcttcaccatcctgctgggattaatcttcatttggtcttttaaatcactaccttggatattcaacatctgctctactggtgagaatactcaccattaaataagcacaatctataatacttgttttatggatgtgactgaamctctctagaatttgtctgaggccactaattagaattcctttaagaactctttccaaagctgagcatggtggtttgtgtctgtaattccagctacctggaaggctgaggcagcaggaggacgatcatttcagcccaggagttcgagaccagcctgagcaacatagtgagaccctgtctctaaaaaaggtttaaaagtattttttaaaaaatagtaattctttccagttgcttttttttttcaagagatgggatctggcaatgttgtcggggctgcactagaattcctggattcaagcaatcctcctgcctcagcctcctgaggagcagagattatagatttgcgctgggcccagcttacttccttgaagtaactaagtttgactttacagagtatgcccttgcaagaccagtaggcccttctctttaaggctgttaattgttctcaattttctgttgccttccaagcatctattcttatttataagcaaaggcttagactggtagcttacatggaatctctcttagatggatttggtctccccagtaggtaggcatgagggcaatgtgggcccacagagttctgtgggtgacctttggtctgggtgtgaggagcaggcagggatgggctgacagccagatttccttcagggggtgtggggatgagcacagtctggcaaacccctcatggaggaaggagatgccccaggggcagatgctggagctaagcagtttcattcttgcttccatgtttgctgtgacagggctaccctacttctccattctctggccccgaaaccctcaaccaggaacccctgcggcagggccctctctatttagcagtttttcccagccactctctgccaagaggaaccctggcccagaaaccaaaggcgttcacctcctcagctactgctccacaacccacagctctgctccctcatcacctggagttgttttgctggcaaactcctcccagaaagcttgttttttggtcttttggggggcagattaactccaatttgtttttctgagagttcaatcccatccgaattcttcagaaatatctcaagttcagttctactgaggagacttttaccggcattccagcagttacactttccctccccatcctaatttaacattgtaatcaacctg

SEQ ID NO: 33537 - DNA, 515 bp, Homo sapiens
ttatcataaaggatacaactcagaagcagccaattggaagagatgcccagggcatgtggcaaaggtcaagaagcttccctgggctctctgagcccctacccatcacctccatgtgttcactggccctgaaggtctctgaaccccattgttgaggggttttgtggaggttttgttatgtaggaatgattgattaaatcattggccactgatgactcagtctctagccccctcccctccctggaggttgagggtgggtgtggaagggaaggttgggtaaaacttccaaccctttaatcatgccttggtctttctggcagccagcactcatcctcactttatytagggaccaaccaagagttgcgtctttaaaacaaaagatattcctatcacccaagaaattccaaggcattaggaagctgtatgccagaaacctagggacaaagacaaaatatgtatttatcacacctgccgtggagatgcctaacagtgcaatctgaccttcagagagagaagac

SEQ ID NO: 33538 - DNA, 327 bp, Homo sapiens
tgctctgttcttggaaacatgagggatttccctaaaggacttataatatatggtatgaatragcaggataaataattcactgtggctcaggatcagataggataaatattgtggtgaagatgcagtggatgatctggaatatctgagaagggtgaaattaatagcagccagtgcaatcaggaaagatgtggaggatcaggggacatttgagttgggccactttctgtgcttgacagaataaatatcccatttgtcttgcttttgcgattcttatttgatttcacagagactttaagcaattttacctcaagttttcgcttgagtttt

SEQ ID NO: 33539 - DNA, 904 bp, Homo sapiens
cagcctgtttatccgagactgctctgcacttcctgctcagatttgagagttagttatgtggcctggaaacttctttctctaagctaaactcctttggcatgtgatttgcatccagacaagagctgagcagcttaaagtcccaggaactccttcaggggcgcttggatcttattaaatgagatcagagccctggtgtgtcctgctcagtgcyagcattcccaccctgaaaagatgccttgcacacagaaggcgagaaacaaccatgcgttgagcgagtgtgtcattgtgtctggaacaggctaacgcctttcccaagcacccagggtaccccagggagtctgaattttctctggaaatgaccccttcattctttcccagcttgatcttcagtagtcccagggtggccgtgagagggtatttgctcctctccttcactggaatttctcctcccgctcaccagaaagaagaatgaggaagtgtacatgacagattctctgggtctggcttatttgttcaaggaacacatttgggccagcacccaaggataagggacagccctgccaggctcccctggggactgtggagggcagggtgtttggtttctgggctcatcaaaagcaaggtggcagttgagatttggaagatcccagctcatccagtgggcagcagccagatggcaggagtttccccactgagcaggtgggctgtggtctgggtctctggaagtcacacagacctggcctggggggcactggctctgttctgcccctgccctgtgctcatgcggaggctgggcttccgactggctttgctggagcacccaggaacctgatgggtagagcctggcctggaccagccttgttctgtgtgaagccctgatgcctggcctttcttctgtcaggga

SEQ ID NO: 33540 - DNA, 904 bp, Homo sapiens
cagcctgtttatccgagactgctctgcacttcctgctcagatttgagagttagttatgtggcctggaaacttctttctctaagctaaactcctttggcatgtgatttgcatccagacaagagctgagcagcttaaagtcccaggaactccttcaggggcgcttggatcttattaaatgagatcagagccctggtgtgtcctgctcagtgccagcattcccaccctgaaaagatgccttgcacacasaaggcgagaaacaaccatgcgttgagcgagtgtgtcattgtgtctggaacaggctaacgcctttcccaagcacccagggtaccccagggagtctgaattttctctggaaatgaccccttcattctttcccagcttgatcttcagtagtcccagggtggccgtgagagggtatttgctcctctccttcactggaatttctcctcccgctcaccagaaagaagaatgaggaagtgtacatgacagattctctgggtctggcttatttgttcaaggaacacatttgggccagcacccaaggataagggacagccctgccaggctcccctggggactgtggagggcagggtgtttggtttctgggctcatcaaaagcaaggtggcagttgagatttggaagatcccagctcatccagtgggcagcagccagatggcaggagtttccccactgagcaggtgggctgtggtctgggtctctggaagtcacacagacctggcctggggggcactggctctgttctgcccctgccctgtgctcatgcggaggctgggcttccgactggctttgctggagcacccaggaacctgatgggtagagcctggcctggaccagccttgttctgtgtgaagccctgatgcctggcctttcttctgtcaggga

SEQ ID NO: 33541 - DNA, 904 bp, Homo sapiens
cagcctgtttatccgagactgctctgcacttcctgctcagatttgagagttagttatgtggcctggaaacttctttctctaagctaaactcctttggcatgtgatttgcatccagacaagagctgagcagcttaaagtcccaggaactccttcaggggcgcttggatcttattaaatgagatcagagccctggtgtgtcctgctcagtgccagcattcccaccctgaaaagatgccttgcacacagaagrcgagaaacaaccatgcgttgagcgagtgtgtcattgtgtctggaacaggctaacgcctttcccaagcacccagggtaccccagggagtctgaattttctctggaaatgaccccttcattctttcccagcttgatcttcagtagtcccagggtggccgtgagagggtatttgctcctctccttcactggaatttctcctcccgctcaccagaaagaagaatgaggaagtgtacatgacagattctctgggtctggcttatttgttcaaggaacacatttgggccagcacccaaggataagggacagccctgccaggctcccctggggactgtggagggcagggtgtttggtttctgggctcatcaaaagcaaggtggcagttgagatttggaagatcccagctcatccagtgggcagcagccagatggcaggagtttccccactgagcaggtgggctgtggtctgggtctctggaagtcacacagacctggcctggggggcactggctctgttctgcccctgccctgtgctcatgcggaggctgggcttccgactggctttgctggagcacccaggaacctgatgggtagagcctggcctggaccagccttgttctgtgtgaagccctgatgcctggcctttcttctgtcaggga

SEQ ID NO: 33542 - DNA, 904 bp, Homo sapiens
cagcctgtttatccgagactgctctgcacttcctgctcagatttgagagttagttatgtggcctggaaacttctttctctaagctaaactcctttggcatgtgatttgcatccagacaagagctgagcagcttaaagtcccaggaactccttcaggggcgcttggatcttattaaatgagatcagagccctggtgtgtcctgctcagtgccagcattcccaccctgaaaagatgccttgcacacagaaggcgagaaacaaccaygcgttgagcgagtgtgtcattgtgtctggaacaggctaacgcctttcccaagcacccagggtaccccagggagtctgaattttctctggaaatgaccccttcattctttcccagcttgatcttcagtagtcccagggtggccgtgagagggtatttgctcctctccttcactggaatttctcctcccgctcaccagaaagaagaatgaggaagtgtacatgacagattctctgggtctggcttatttgttcaaggaacacatttgggccagcacccaaggataagggacagccctgccaggctcccctggggactgtggagggcagggtgtttggtttctgggctcatcaaaagcaaggtggcagttgagatttggaagatcccagctcatccagtgggcagcagccagatggcaggagtttccccactgagcaggtgggctgtggtctgggtctctggaagtcacacagacctggcctggggggcactggctctgttctgcccctgccctgtgctcatgcggaggctgggcttccgactggctttgctggagcacccaggaacctgatgggtagagcctggcctggaccagccttgttctgtgtgaagccctgatgcctggcctttcttctgtcaggga

SEQ ID NO: 33543 - DNA, 904 bp, Homo sapiens
cagcctgtttatccgagactgctctgcacttcctgctcagatttgagagttagttatgtggcctggaaacttctttctctaagctaaactcctttggcatgtgatttgcatccagacaagagctgagcagcttaaagtcccaggaactccttcaggggcgcttggatcttattaaatgagatcagagccctggtgtgtcctgctcagtgccagcattcccaccctgaaaagatgccttgcacacagaaggcgagaaacaaccatgcgttgagcgagtgtgtcattgtgtctggaacaggctaacgcctttcccaagcacccagggtaccccagggagtctgaattttctctggaaatgaccccttcattctttcccagcttgatcttcagtagtcccagggtggccgtgagagggtatttgctcctctccttcactggaatttctcctcccgctcaccagaaagaagaatgaggaagtgtacatgacagattctctgggtctggcttatttgttcaaggaacacatttgggccagcacccaaggataagggacagccctgccaggctcccctggggactgtggagggcagggtgtttggtttctgggctcatcaaaagcaaggtggcagttgagatttggaagatcccagctcatccagtgggcagcagccagatggcaggagtttccccactgagcaggtgggctgtggtctgggtmtctggaagtcacacagacctggcctggggggcactggctctgttctgcccctgccctgtgctcatgcggaggctgggcttccgactggctttgctggagcacccaggaacctgatgggtagagcctggcctggaccagccttgttctgtgtgaagccctgatgcctggcctttcttctgtcaggga

SEQ ID NO: 33544 - DNA, 1082 bp, Homo sapiens
tagactgggtgactgatggcatgggttagaggtgccacttactaatatcaggaatgtaatgcttattgacaaagcctccgtccccctgggcctgtttctacagtagtttcaatgttcactgttgagttctctactctcaaggggcctctgcctgcactgtagggctgcagcaactatagagtaagctccagccacctaggtcatgctcccaggcccattgtacctacagagaaagccattagctgctggtgtcatggcgccttccactctacctgggcaactccaatgaggcagtgttatgcccgaacactgcttgaaaacttggtgcctaaaatcccaccaggcctctactcccccatgtcattcatcattcctgccatctaggtcctgttctgtgttttsttttgctcttcccaaattcctcattttccttccttccaaatatctgctggaccctccagtatccttatcctgtgaaaaacaaactattagagaaattcttaagttgccagattgccctttcaaactcctaccttaaggaaatctgactctcctctgaggactgcttccctacagccctcctgagctagacagcttattctttctcatccaaatacctccaagatggtagtgggtttcggtatcctcactccacagtgatgcttcaggaccactgcttttctgcctccatgtataaccccccaccacttgaggcctataacacccaactccaccactctgcctgtttcctccttactgttgtcttcagcctgactgaatgctttggtatctggcataccattgccttccttcctgccatcatcatggatgacttcaatgtccagcagagaatccatccatccaacatcctagcaagacatcctcaggagctattttaattatttgaacccactttgctataattagggtaaactgctactagactggcaggattcctgggtcatgttctcatggtggtaacatccaggtgtctcacctgcatacggttagctgaatctgaaatcataacatgtttttatgtaaaagaatgagttaaattttattcatattaagaattaaac

SEQ ID NO: 33545 - DNA, 567 bp, Homo sapiens
tgaaatttatgttgtagtttctttcccacagctgctgtaacacattactacaaacttagtagcttcaaacaacacacatttcttatctcagacaccactttggaggtcagaaattcaacacagatctcactggcaaaactcaaggtgtcggcagggcttcagtcctttctagaggccgtagaggataattcgggcccttgctttttccaccttctaggayccacctgtattcctgggcttgtggccccttcctctgtcttccaagacagcaagagcctgttgagttcctctgagggactctgaccttctcttctgcctctctctttcacgtctaaggagcatagtgattacattgtctcccctagataatttgagataatctccctattcttaaaaatcaggtgattagcaaccttcattctatctgcaattcccatgtgccatgtggtgcaacatattcacttgctgtggggattaggatatggaaatttttggaggtaggggaatgtgcattattctacctgccaccctggcacatgtgtatcaggagtggattcagatatgatc

SEQ ID NO: 33546 - DNA, 546 bp, Homo sapiens
cgaatgcccaagaattaacatctatatttggctaaggtgagaatccccatcttagaatgagatcccatggtacaagaataagtctgaaatgttcatcaagattgtgtcataattatcacaattttattattaaaaacgttagtggccaaagttttgatgttttgcattgcagtatcagtacagtcacacccagcactgttgggtaccactygctcttgaggtcttcaaaccagacatttgtgatgctagatgctcactttcaactcagaaggctggaggagcacgtggacctttggctgatgctgtctgaagggatactcctcatgtgaagctgcccctgggctgtcagtttttctctctctgagtggctggttatggtagagacttacctcctctttgatcttggatgtgaagattgggctgttgctggtgatggccctctgttgaagcagtccccccaattggtactttgctccctacctgaagcagatattttctaatattttcagaagcaaacttgagtgttttgttcactttcatttttta

SEQ ID NO: 33547 - DNA, 494 bp, Homo sapiens
tgggtgaagcaatgatataattacttctactgtacagtagatgagtaccaagggattctccatgattctcattagtactagaatgctttgtgataaaagctaacacttgctcactggttacaacagaaaacacacttctaacttcacatgcatgcacttaattaatcatcatcataactctgtgaggtaggaaatattaaataggcccattrtacatatgagaaaattgtggcacagattgagatagtatctttcctaaggttataatagtgatatggtggtagacttctgcatttcatcaccaagctccattgccttttgtgggagatctgccacaaatcacttccctttgtgagaggctctaaaccatggcatcttttctgaggatcactttttctgtgaatggtcagggagagcaagctacaatatttgcttagtcatacaattacgacattttaagctttgtggaaagctcattagaaagctaaccaata

SEQ ID NO: 33548 - DNA, 547 bp, Homo sapiens
ggtaaaagtatccatgccttctttctttttttcactatgccccagaactgagcagacctgtatcttttcaaagtttggagtacacaagaatggacactgtcagatgttatgaaggcaaatgtcaaaccattcagggaaaaatcacagatctgattacatggcctgagacactaaacaggaggatgtctccagagaataagagaactgtcaaaaactgaacactgaggatacaatgaacaatggggaaggcaggaaattgagagctggagagacccatcaagctgaaatgcaaactcattagtcagctcagatttgaaraatgccgcattgagaaaagagaatgtagatgcaatgaaggtggcttagtctgctcaggctgtcataacaaaatgccatagacttttcgatggcttaaggcacagaaatttatttcttacagttcggtaggctgggaagtccaagatcaaggtgctggcaaggcaggtctcatcctgaggcctcttctcttggcttgtaggaggctgccattactgtttactcacatgac

SEQ ID NO: 33549 - DNA, 556 bp, Homo sapiens
acctgtaatcccagcactttgggaggcagaggtgggcggagcacttgaggtcaggagttcgagaccagcttggccaacatgggaaaccctgtatctactaaaaatacaaaaattagccaggygtgatggtgcacgcccgtaatcccaactactcaggaggctgaggcaggagaattgcttgaacccaggaggcagaggttgcaatgagccaagatcacaccactgcactccagcctgggcgacagagcaagactctgtctcaaaaacaacaacaaaaaaaattaaaattaaaattaatgaatataaaaaataaatttagactatatttcaacttaactcataatgaaacatttcagcatttatttatgtcaggttaaattaagtctaaatggatcatgaagtctttatgcttcccctgaaaatgaaaaacgagggctacataatttttacatgtgaaagatttaagctttacaatgccatataacaaaaagatttcccattccaagacagtgttcccaaggaaattaagctttcttttctccaccatgatagttta

SEQ ID NO: 33550 - DNA, 556 bp, Homo sapiens
acctgtaatcccagcactttgggaggcagaggtgggcggagcacttgaggtcaggagttcgagaccagcttggccaacatgggaaaccctgtatctactaaaaatacaaaaattagccaggtgtgatggtgcacgcccgtaatcccaactactcaggaggctgaggcaggagaattgcttgaacccaggaggcagaggttgcaatgagccaagatcacaccactgcactccagcctgggcgacagagcaagactctgtctcaaaaacaacaacaaaaaaaattaaaattaaaattaatgaatataaaaaataaatttagactatatttcaacttaactcataatgaaacatttcagcatttatttatgtcaggttaaattaagtctaaatggatcatgaagtctttatgcttcccctgaaaatgaaaaacgagggctacataatttttacatgtgaargatttaagctttacaatgccatataacaaaaagatttcccattccaagacagtgttcccaaggaaattaagctttcttttctccaccatgatagttta

SEQ ID NO: 33551 - DNA, 523 bp, Homo sapiens
ccactgataaaggatataatttttttctatttataaccttttggatataaacaacaaaakcacatactttcactgacactatcttacaaccagaacataaatgagttctaggatgaaatggattctataaccatcaaagtagaaaattagaaagaatttgagtcctttgtgataccactgagctgctaacacaacccactccaaaacttgcccaactccaagacttcctgctacgtgagatgatgacttagcgttcctgcctccataagcaaggatttctgttgcttgcagcctaaagcatcctacctgatactcttcattctctttcactgtgggttaaaaattcaacaagccactttggatttgggaggtatgaatctttcaccaactcagacaacaactaaaatccctcttcagccttctcaaaacctaatgcttctcaaccctgtaagctttcatcataagtgccctcctttgtccctttaatcagtcacagttctcttctgtatcacgcaaggttcca

SEQ ID NO: 33552 - DNA, 694 bp, Homo sapiens
tcagctaatttttgtacttttagtacagacggggtttcaccatggtggccaggctggtctcgaactcctgacctcaggcgatccacccaccttggcctcccaaagtgctgggattacaggcatgagccactgtgcccagcctaaagcattttttaaatccttgtacactggaagtacctgctttgaaaaccttgtggaattcacaatgaaagctactctacctgcaggttggcagttaaaatttcatgctttctcggtcacagcctggattcaattccaagtcagggaaccagtcccaactaaaatatgataataaaagatttgaaaaaaaaagtttttaagagctctctggtcagaagtcagattaattaaaagctgatgttcaagctatgtatacataaaggcctgccttttctcttttagatcctgtttctgggaacttttttcagttgactgacacccctttttaaagtatatttagtccttctgtttgcttccttccttgatggtataacttttgcrgggaaaaatgtaatattttcattggccttttggaaaactttaagtatcctcaaattggcttctgtagaaattgttctttcatttccttccacttctgcctctccttccttttgccatcatcttcagcaccacatgcagtgttctagagaggacttccaatgactctgccacc

SEQ ID NO: 33553 - DNA, 2101 bp, Homo sapiens
tgttttgatacaaggaaaaatactgcatagctcagagcttcccattcataatgtcataatggcctccagggcagtgagatttgaaagccctctattcttccctaatgaatattcaaaatttgagatcttgagcagtatatcccagcaatcaggctaccaggataaagagaaagaagatggtgtactccaaaatggctttgagaaaaacatacactaatttaaacagtcaagagacttatatctgttgtgttaatgatgattgaatttgtgattttaaatgtaaatagtctacaaatcttggtttgatttcaagcattttcttctcagtgggaaaaaatacccttggatgagaagtgacaaggaatgttagaaacaagaataaggtgttcgttcatttcatttatgttttggaacatttgtcagatgccaaaacgttaatacgaagtggtttgacaaaaactagtcattttccagttaacacatgtaccttacagaaaattatctgatattgacacggggatgaaattaacctaatcctcctgttattttgttgttttggtatctgtttttgaaaatgtattaagctagttcttgcctatttactagagaagtcagtcacatccaagattgcagagagatagaaactgcccataaacagatgtggagctaaaaagaaggagattaaaaatgaaattatgtatagaagaatataaactcatgaccaaataaaaccgaatcacagaatttttccctccccacaaaggagcaaaaaaaaaaaaaaagaaagaattaaagaaaaacacctcactagtagtaagcaaacaaaaaacccataacctaaagcaatacattttagtaactggtggctgagtggcttttgatttctaaccctgtccccaaaacgccttaaagacattccttaggggaaacgaaatcaggaaaggagaatatgaagcaagaaaaaaacaccatggactgcttctgtttatagatgtaaagccctcatgtctaggttttgaatcagagaaatgatctaaagtcggaagggaccactccatccgaatggcatgtgttccaagaatggggagtgaatcctggtttggggcatttagcaaattcccagaagaatgagcagcacttgaagacacaaataaagactggacatcacctcagccaaattcttcctctccctgttctagcaggccttaaagaatagagagcagaaagcatttagcccccagattctggcttgaaagggcaaagaagctgatctccaatatgatggcaaggaatcacccacattttatcagaaaaattaaaatatgtgcaagatggaaagagccaatgtggcagctacaagtaatgtgtcagaaaggaggctagcatgcaaagtagaaagacaggggcttacccttgaagaaaatagtatttaaggaacagaaacaggttcctcaataagaagataacttgtactcttagaatttaacaagattataaaaagtatttttaaaatagcctaaagacaaggtgataaaacaagaatgaaatgaaaaaggaaatttaaagtctgacaaatcaagaattaaatacattaatgcaaaaaagatatgtaaattagaaatgataacatatatgagacctgttgaaaatttgtttactaacaatagaaaaagtattcttataatcacagagaatgcagataacaaacaaggagattaaagacagagagactctaaaagatattaagacattcaaatattctacactatgaggataataattgggtccctgaatagagactctaacaaaargaacagaagagacactgaaagatgtgataaaatttcccagaaatgaagaaaggactaaacctattccaggaaatatactatggaatgttcaaaacgcaaacatatcttagtgaagctattaaacctcaaggataaagaaataattcttgagatatcaaatcagaataagtcaatttcctacaagggagaaaaaaatcaagctagtctcagatgtcaccattgccacatctggggccacgctctctgaaaatggagagagaaagtgacccaaggatattatatcccatcaa

SEQ ID NO: 33554 - DNA, 2101 bp, Homo sapiens
tgttttgatacaaggaaaaatactgcatagctcagagcttcccattcataatgtcataatggcctccagggcagtgagatttgaaagccctctattcttccctaatgaatattcaaaatttgagatcttgagcagtatatcccagcaatcaggctaccaggataaagagaaagaagatggtgtactccaaaatggctttgagaaaaacatacactaatttaaacagtcaagagacttatatctgttgtgttaatgatgattgaatttgtgattttaaatgtaaatagtctacaaatcttggtttgatttcaagcattttcttctcagtgggaaaaaatacccttggatgagaagtgacaaggaatgttagaaacaagaataaggtgttcgttcatttcatttatgttttggaacatttgtcagatgccaaaacgttaatacgaagtggtttgacaaaaactagtcattttccagttaacacatgtaccttacagaaaattatctgatattgacacggggatgaaattaacctaatcctcctgttattttgttgttttggtatctgtttttgaaaatgtattaagctagttcttgcctatttactagagaagtcagtcacatccaagattgcagagagatagaaactgcccataaacagatgtggagctaaaaagaaggagattaaaaatgaaattatgtatagaagaatataaactcatgaccaaataaaaccgaatcacagaatttttccctccccacaaaggagcaaaaaaaaaaaaaaagaaagaattaaagaaaaacacctcactagtagtaagcaaacaaaaaacccataacctaaagcaatacattttagtaactggtggctgagtggcttttgatttctaaccctgtccccaaaacgccttaaagacattccttaggggaaacgaaatcaggaaaggagaatatgaagcaagaaaaaaacaccatggactgcttctgtttatagatgtaaagccctcatgtctaggttttgaatcagagaaatgatctaaagtcggaagggaccactccatccgaatggcatgtgttccaagaatggggagtgaatcctggtttggggcatttagcaaattcccagaagaatgagcagcacttgaagacacaaataaagactggacatcacctcagccaaattcttcctctccctgttctagcaggccttaaagaatagagagcagaaagcatttagcccccagattctggcttgaaagggcaaagaagctgatctccaatatgatggcaaggaatcacccacattttatcagaaaaattaaaatatgtgcaagatggaaagagccaatgtggcagctacaagtaatgtgtcagaaaggaggctagcatgcaaagtagaaagacaggggcttacccttgaagaaaatagtatttaaggaacagaaacaggttcctcaataagaagataacttgtactcttagaatttaacaagattataaaaagtatttttaaaatagcctaaagacaaggtgataaaacaagaatgaaatgaaaaaggaaatttaaagtctgacaaatcaagaattaaatacattaatgcaaaaaagatatgtaaattagaaatgataacatatatgagacctgttgaaaatttgtttactaacaatagaaaaagtattcttataatcacagagaatgcagataacaaacaaggagattaaagacagagagactctaaaagatattaagacattcaaatattctacactatgaggataataattgggtccctgaatagagactctaacaaaaggaayagaagagacactgaaagatgtgataaaatttcccagaaatgaagaaaggactaaacctattccaggaaatatactatggaatgttcaaaacgcaaacatatcttagtgaagctattaaacctcaaggataaagaaataattcttgagatatcaaatcagaataagtcaatttcctacaagggagaaaaaaatcaagctagtctcagatgtcaccattgccacatctggggccacgctctctgaaaatggagagagaaagtgacccaaggatattatatcccatcaa

SEQ ID NO: 33555 - DNA, 2101 bp, Homo sapiens
tgttttgatacaaggaaaaatactgcatagctcagagcttcccattcataatgtcataatggcctccagggcagtgagatttgaaagccctctattcttccctaatgaatattcaaaatttgagatcttgagcagtatatcccagcaatcaggctaccaggataaagagaaagaagatggtgtactccaaaatggctttgagaaaaacatacactaatttaaacagtcaagagacttatatctgttgtgttaatgatgattgaatttgtgattttaaatgtaaatagtctacaaatcttggtttgatttcaagcattttcttctcagtgggaaaaaatacccttggatgagaagtgacaaggaatgttagaaacaagaataaggtgttcgttcatttcatttatgttttggaacatttgtcagatgccaaaacgttaatacgaagtggtttgacaaaaactagtcattttccagttaacacatgtaccttacagaaaattatctgatattgacacggggatgaaattaacctaatcctcctgttattttgttgttttggtatctgtttttgaaaatgtattaagctagttcttgcctatttactagagaagtcagtcacatccaagattgcagagagatagaaactgcccataaacagatgtggagctaaaaagaaggagattaaaaatgaaattatgtatagaagaatataaactcatgaccaaataaaaccgaatcacagaatttttccctccccacaaaggagcaaaaaaaaaaaaaaagaaagaattaaagaaaaacacctcactagtagtaagcaaacaaaaaacccataacctaaagcaatacattttagtaactggtggctgagtggcttttgatttctaaccctgtccccaaaacgccttaaagacattccttaggggaaacgaaatcaggaaaggagaatatgaagcaagaaaaaaacaccatggactgcttctgtttatagatgtaaagccctcatgtctaggttttgaatcagagaaatgatctaaagtcggaagggaccactccatccgaatggcatgtgttccaagaatggggagtgaatcctggtttggggcatttagcaaattcccagaagaatgagcagcacttgaagacacaaataaagactggacatcacctcagccaaattcttcctctccctgttctagcaggccttaaagaatagagagcagaaagcatttagcccccagattctggcttgaaagggcaaagaagctgatctccaatatgatggcaaggaatcacccacattttatcagaaaaattaaaatatgtgcaagatggaaagagccaatgtggcagctacaagtaatgtgtcagaaaggaggctagcatgcaaagtagaaagacaggggcttacccttgaagaaaatagtatttaaggaacagaaacaggttcctcaataagaagataacttgtactcttagaatttaacaagattataaaaagtatttttaaaatagcctaaagacaaggtgataaaacaagaatgaaatgaaaaaggaaatttaaagtctgacaaatcaagaattaaatacattaatgcaaaaaagatatgtaaattagaaatgataacatatatgagacctgttgaaaatttgtttactaacaatagaaaaagtattcttataatcacagagaatgcagataacaaacaaggagattaaagacagagagactctaaaagatattaagacattcaaatattctacactatgaggataataattgggtccctgaatagagactctaacaaaaggaacagaagagacactgaaagatgtgataaaatttcccagaaatgaagaaaggactaaacctattccaggaaatatactatggaatgttcaaaacgcaaacatatcttagtgaagctattaaacctcaaggataaagaaataattcttgagatatcaaatcagaataagtcaatttcctacaagggagaaaaaaatcaagctagtctcagatgtcaccattgccacatctggggccaygctctctgaaaatggagagagaaagtgacccaaggatattatatcccatcaa

SEQ ID NO: 33556 - DNA, 474 bp, Homo sapiens
gggcaggtagataataatgacatggcagatttttaatattactagtttgtatttccttaatttctcttcaagctattacagagaatccatgtaaaagactaatgttttcaatgaaaggattaatgttctttccatctcataactcaagtttccaataacgtcttcctcgctgagggtrgaatagtcagtgccttacacaaaagccagtgtttgcattaaatgactgtggtgcagcctcgcataacataaatgacttcaacagccacatcctgatgcacaagggaaaacaaaggaatggaaatttcaaaaagctaaagtcacaaaaagtaatggaaggagtagtaacaacagcagcaaagggaaatgccctgggcggggagacagacccccacccacacatccccagcacttgttttcttgactctggaggcgctttcttgattagtctatttaaaaaaatgttattgttttaaa

SEQ ID NO: 33557 - DNA, 474 bp, Homo sapiens
gggcaggtagataataatgacatggcagatttttaatattactagtttgtatttccttaatttctcttcaagctattacagagaatccatgtaaaagactaatgttttcaatgaaaggattaatgttctttccatctcataactcaagtttccaataacgtcttcctcgctgagggtagaatagtcagtgccttacacaaaagccagtgtttgcattaaatgactgtggtgcagcctcgcataacataaatgacttcaacagccacatcctgatgcacaagggaaaacaaaggaatggaaatttcaaaaagctaaagtcacaaaaagtaatggaaggagtagtaacaacagcagcaaagggaaatgccctgggyggggagacagacccccacccacacatccccagcacttgttttcttgactctggaggcgctttcttgattagtctatttaaaaaaatgttattgttttaaa

SEQ ID NO: 33558 - DNA, 530 bp, Homo sapiens
tggcartattcgccaaactttaaacatacactttcacccagcaactcagtttataggagttcttcctatggatcaattccctcttcatatgccaatcagaattcatatttttgttttgaattccaaaccacgtgcatgtattattgttttagttttgtgttatcaggatatacatatttaggattatgtcacttggtgaattgactccattatcattttgaaatgtcccattttttccctggaaatatttctcaaattgaaatctattttatctgaaattaatgcagccaatccactttattaggctttgtgtttgcatggagtatctttttcaatcccttacttctaatctacctggtctttatatttaaagtggggtttcaggctgggtgcgatggctcatgcctataattccacaactttgggaagctgaagcaggcagatcacgtgaggtcaggagttcgagaccagcctggccaacacggtgaaaccccttctctgctaaaaacacaaaaattagctgggcatgc

SEQ ID NO: 33559 - DNA, 961 bp, Homo sapiens
ggataggccgggagcggtggctcrtgccctgcaatcccagcactttgggaggccgaggcgggtggatcacttgagatcaggagttcaagaccaacctggccaacatggcaaaacctcgtctctactaaaaatacaaaaattagcagggtgtggtggcgcgtgcctgtaatcccagctactagggaggctgaggcaggagaatcgcttgaacccaggaggcagaggttgcagtgagccgagatcacaccactacactccagcctgggcaacaggtgagactctgtcttaaaacaaacaaacaaaaaaaagaatacttggctaacctcggtgaaggatgccatgtgttgatgatgcaggttcatgctacaaaatcacccagcgttgctcttggctgacgccccagaggaaatctgaaacgcagcactacgtgagctctctggaaatggatggtagacggagagcacgtggaaactgcacagagccgtccacagatggagccagctgcctgaggctcaggaagcaaattgaagaaataagttgaaacaacagcccaatgtgtttttttttgttgttttgtttcattttaatggcaggtaaaggggttgacggatggggaccagggatgtggggctgagatggagctaaaggggagggggctgtgaaagccggcaggtccagttgccatatgttgctgggattctgggaccttgacctggggaactgcatttgagcagagtctgaagaacttgagattggaggggagccagaggaagttgcagaagaacttgaacccgaaagggcagaggaaaaacaaaacagaccccatcctgggccagaagagaagccctttcctgacaccttgccctctgtccggctcatcatcacgtgaggaaggaggggctgtgtggctcttggctccagctgctctgatttcttttttcagttcctccaaggtgctctg

SEQ ID NO: 33560 - DNA, 789 bp, Homo sapiens
catcaaggtaaatcagtgcctgaagatgtggctttggcttctgtcatttctgttaaatcctctccagccagctctgacccttgccgagctacattccttttttttttttttttttttttttgagatggagtttcgctcttgtcccccaggctggagtacagtggcgtgatcttgggtcactgcaacctctgcctcctgggtttaagtgattctcctgcctcagcctcctgagtagctggaattacaggcatgcaccaccacccccagctaatttttgcatttttagtagtgatagggtttcatcgtgttggccaggctggtcaagaactcctgacctcaagtgatctgcctgccccagcctcccgaagtgctaggattacaggcgtgagccaccgtgcctggcccsgaactacatccttgactggcagccacctctcctctggctcggtggcacctgttggccatcacacccagttaactggccccatgagagagttctggcaaaggcagctgaaaggctggccaatcttcccaggcagttgcctttgtgaggcactggcctcagccttggaaactgccctctgtccccttggcccaccaggtgctttggcctaccttaccgcccacgttgtgctctcctgttaggatgtcgtagctcttagtttacatagggggccagtggagggcatgatgtcctcagggcaagtaagagctggggcccacagcccacagaatcctgagttggacaggcttttagagatcagataggacagtggttttccaaatgtg

SEQ ID NO: 33561 - DNA, 1108 bp, Homo sapiens
cacaaagctggagcaatgagcagaaagtaccttgtttagaaagaaatggaacctggacaaacccaagatagatttgagtatcatctgccccacaccagccctgtgaccttgaccaaattcatttgatctccttgagcctcagattstttatctgtgaaatctgggaatacttacctaggagggtgggtgtaaaaatgaaatgagataatgaatccaaatgcaagaaaatggccaatgtagtcagttctcaatgccctcctctggcaaacggggaagggagcaggctcagtggtgagggacgggcgtggtgtcaaattcctgttctggagggaaagaagggtgcctagtgttgtttgctctggagaatgagcattttaggtggctagtccgtctactggaaggaagggaatactgaatggacaggtttgcagagccccaagcagtacgactagggcctgaacaggtgcagttatgggaggcaaagtgttgttcaatagaataaagtggtttttttgccttaaaaaatggcgacacatatacacacacacaaaataaaataaaacaaaacaaataaatagaaacaggaagatggcaggtttaccatcattggaagtatttaggttatgctgggcacaattttctggcagtggtgttgagagaattcaagcacatcttgatggggtgcgatgatggttgttcctctgtgaagctataccaggatgccccatagatagatggtctgcttgctcctttgagccccactatgcttttggaagagacctgtttctgcacttgggactccttagtgaacttaatttctggggtagacttaatccaccttcagatctccagtggttatcacagagtgggtacttcgtgaaggctgtaattaatgaatgaatgcatacatgcgtgaatgaatgtagggttggaaggcagggacatatgacttcttaggtccctctgaccccagactttcatcgtttcatgaacaaaatgagctcgctcttcccagaactgacctgtggatttagcttttccggccttagctggttctaggttctgggggaaccccacagttccagtcatcccttcctcccaaaatgcc

SEQ ID NO: 33562 - DNA, 1108 bp, Homo sapiens
cacaaagctggagcaatgagcagaaagtaccttgtttagaaagaaatggaacctggacaaacccaagatagatttgagtatcatctgccccacaccagccctgtgaccttgaccaaattcatttgatctccttgagcctcagattctttatctgtgaaatctgggaatacttacctaggagggtgggtgtaaaaatgaaatgagataatgaatccaaatgcaagaaaatgrccaatgtagtcagttctcaatgccctcctctggcaaacggggaagggagcaggctcagtggtgagggacgggcgtggtgtcaaattcctgttctggagggaaagaagggtgcctagtgttgtttgctctggagaatgagcattttaggtggctagtccgtctactggaaggaagggaatactgaatggacaggtttgcagagccccaagcagtacgactagggcctgaacaggtgcagttatgggaggcaaagtgttgttcaatagaataaagtggtttttttgccttaaaaaatggcgacacatatacacacacacaaaataaaataaaacaaaacaaataaatagaaacaggaagatggcaggtttaccatcattggaagtatttaggttatgctgggcacaattttctggcagtggtgttgagagaattcaagcacatcttgatggggtgcgatgatggttgttcctctgtgaagctataccaggatgccccatagatagatggtctgcttgctcctttgagccccactatgcttttggaagagacctgtttctgcacttgggactccttagtgaacttaatttctggggtagacttaatccaccttcagatctccagtggttatcacagagtgggtacttcgtgaaggctgtaattaatgaatgaatgcatacatgcgtgaatgaatgtagggttggaaggcagggacatatgacttcttaggtccctctgaccccagactttcatcgtttcatgaacaaaatgagctcgctcttcccagaactgacctgtggatttagcttttccggccttagctggttctaggttctgggggaaccccacagttccagtcatcccttcctcccaaaatgcc

SEQ ID NO: 33563 - DNA, 1108 bp, Homo sapiens
cacaaagctggagcaatgagcagaaagtaccttgtttagaaagaaatggaacctggacaaacccaagatagatttgagtatcatctgccccacaccagccctgtgaccttgaccaaattcatttgatctccttgagcctcagattctttatctgtgaaatctgggaatacttacctaggagggtgggtgtaaaaatgaaatgagataatgaatccaaatgcaagaaaatggccaatgtagtcagttctcaatgccctcctctggcaaacggggaagggagcaggctcagtggtgagggacgggcgtggtgtcaaattcctgttctggagggaaagaagggtgcctagtgttgtttgctctggagaatgagcattttaggtggctagtccgtctactggaaggaagggaatactgaatggacaggtttgcagagccccaagcagtacgactagggcctgaacaggtgcagttatgggaggcaaagtgttgttcaatagaataaagtggtttttttgccttaaaaaatggmgacacatatacacacacacaaaataaaataaaacaaaacaaataaatagaaacaggaagatggcaggtttaccatcattggaagtatttaggttatgctgggcacaattttctggcagtggtgttgagagaattcaagcacatcttgatggggtgcgatgatggttgttcctctgtgaagctataccaggatgccccatagatagatggtctgcttgctcctttgagccccactatgcttttggaagagacctgtttctgcacttgggactccttagtgaacttaatttctggggtagacttaatccaccttcagatctccagtggttatcacagagtgggtacttcgtgaaggctgtaattaatgaatgaatgcatacatgcgtgaatgaatgtagggttggaaggcagggacatatgacttcttaggtccctctgaccccagactttcatcgtttcatgaacaaaatgagctcgctcttcccagaactgacctgtggatttagcttttccggccttagctggttctaggttctgggggaaccccacagttccagtcatcccttcctcccaaaatgcc

SEQ ID NO: 33564 - DNA, 1108 bp, Homo sapiens
cacaaagctggagcaatgagcagaaagtaccttgtttagaaagaaatggaacctggacaaacccaagatagatttgagtatcatctgccccacaccagccctgtgaccttgaccaaattcatttgatctccttgagcctcagattctttatctgtgaaatctgggaatacttacctaggagggtgggtgtaaaaatgaaatgagataatgaatccaaatgcaagaaaatggccaatgtagtcagttctcaatgccctcctctggcaaacggggaagggagcaggctcagtggtgagggacgggcgtggtgtcaaattcctgttctggagggaaagaagggtgcctagtgttgtttgctctggagaatgagcattttaggtggctagtccgtctactggaaggaagggaatactgaatggacaggtttgcagagccccaagcagtacgactagggcctgaacaggtgcagttatgggaggcaaagtgttgttcaatagaataaagtggtttttttgccttaaaaaatggcgacacatatacacacacacaaaataaaataaaacaaaacaaataaatagaaacaggaagatggyaggtttaccatcattggaagtatttaggttatgctgggcacaattttctggcagtggtgttgagagaattcaagcacatcttgatggggtgcgatgatggttgttcctctgtgaagctataccaggatgccccatagatagatggtctgcttgctcctttgagccccactatgcttttggaagagacctgtttctgcacttgggactccttagtgaacttaatttctggggtagacttaatccaccttcagatctccagtggttatcacagagtgggtacttcgtgaaggctgtaattaatgaatgaatgcatacatgcgtgaatgaatgtagggttggaaggcagggacatatgacttcttaggtccctctgaccccagactttcatcgtttcatgaacaaaatgagctcgctcttcccagaactgacctgtggatttagcttttccggccttagctggttctaggttctgggggaaccccacagttccagtcatcccttcctcccaaaatgcc

SEQ ID NO: 33565 - DNA, 1108 bp, Homo sapiens
cacaaagctggagcaatgagcagaaagtaccttgtttagaaagaaatggaacctggacaaacccaagatagatttgagtatcatctgccccacaccagccctgtgaccttgaccaaattcatttgatctccttgagcctcagattctttatctgtgaaatctgggaatacttacctaggagggtgggtgtaaaaatgaaatgagataatgaatccaaatgcaagaaaatggccaatgtagtcagttctcaatgccctcctctggcaaacggggaagggagcaggctcagtggtgagggacgggcgtggtgtcaaattcctgttctggagggaaagaagggtgcctagtgttgtttgctctggagaatgagcattttaggtggctagtccgtctactggaaggaagggaatactgaatggacaggtttgcagagccccaagcagtacgactagggcctgaacaggtgcagttatgggaggcaaagtgttgttcaatagaataaagtggtttttttgccttaaaaaatggcgacacatatacacacacacaaaataaaataaaacaaaacaaataaatagaaacaggaagatggcaggtttaccatcattggaagtatttaggttatgctgggcacaattttctggcagtggtgttgagagaattcaagcacatcttgatggggtgcgatgatggttgttcctctgtgaagctataccaggatgccccatagatagatggtctgcttgctcctttgagccccactatgcttttggaagagacctgtttctgcacttgggactccttagtgaacttaatttctggggtagacttaatccaccttcagatctccagtggttatcacagagtgggtacttcgtgaaggctgtaattaatgaatgaatgcatacatgcgtgaatgaatgtagggttggraggcagggacatatgacttcttaggtccctctgaccccagactttcatcgtttcatgaacaaaatgagctcgctcttcccagaactgacctgtggatttagcttttccggccttagctggttctaggttctgggggaaccccacagttccagtcatcccttcctcccaaaatgcc

SEQ ID NO: 33566 - DNA, 1328 bp, Homo sapiens
taggtagcagctaggaatacttcaaatcagactctggargagggtgaaagaagggagaagaaatgaatattagctaacttcaacactgctcacaaaagggaatcacaacaacagccaaacactgagaagatgaagggcatataataaagataatagtatagaagcaactattagaaaacacaaatgttcctaaatgccaaaagatttaatgatttataaaatttcttctcatattatacaaataacatgtccagtgtatataatacaaagatataacaataacctaaccagtgttcacagtctggcagtgcctactcttccccactcttctccaaacacacgcaaacgtaaacagcgaattcttactgcttgtttttacacagaaaggatcacactgtacacatcactctgacagtcacacctaactagtttttcttctcaggtccttgctgtttgcttgtatagccccttggccgttttatctcctgtttctacattttttttccagctgactttctggtcagtgtgcttgtagctaccccatgcaacctgacaaccagcttctcttctgtccttttcatgctttctcaactccaaatactctaacacaacttccttttcacatttctgtttttttttttttaactttttacaacaccctcaaatcaaaactcgggattgttttctgattataaaggtactgtgtttccatttagaaaattcaagcaacactgaaaaccaggaagtataaatcaactgaccacctatgtaccaaccagggtgctgagtatcttttcggttatttgttccccagagaggcagccagtggagaaagctcgatggcctattaccacctgagaacaacatccactcaagatgaagagcaaaagctcaaagcctcctctgttgctggaactttccccatgtttattcttctacttactctactctgcttaaattacgggccatttgacatgtacattactgtcaggcctttttcagacattgctgatgcttcagtccattttgaacggcattcaatggttctctgttggttaggtatcatccagcatacctttcagcacccagggtaactataaactggctaaaccgtatctaaacaatcaacaggcttataaagtacaagcagattggcaattctgttttcaatctcatttctcttacaggtagctgctttcttaaaacaggtttaaagaaaacatacaagggtatgacggagatatgattaggagagggaatgctttttgagggcagaacaaaacaacctagaattgaatcacattaaaaacagctttataataaaagag

SEQ ID NO: 33567 - DNA, 433 bp, Homo sapiens
gcatccgtgccgaccgcaacatttaccatcggcagctatttcagaggtcggtctttcgcctcctacagagagccagcctcctccttgtccccgccctcaaatatccttcagtgaggacaccggtgacctttgggggtggagagggaggcgcctacaagccccttcccctctcttcggccggacacaaagcgggcttttccacctagagtcccagcgctctcacctgcgcaccagccgtcgcgccgccccaggccgccaccgccagaggccccagaaacagatctcaagcagccgctgctgccgcggatcccgacaaccttcgcgtcgcgcgagggcacggagcacgcgcagctctgcggtcgacgccgggccgcccccactccgcttctccgggttttccgtgaagctccagccaacwgcggccgtcaccgga

SEQ ID NO: 33568 - DNA, 1166 bp, Homo sapiens
gagctcccaactgaggacctcgtttgtaacatagcaaagaacccaaatataactgagggagggggtgcagtggcttcaatgtggcctagatccagggtccagcaacgtggaagaagacaggaaaacagggcagtgggactggaggatgaagccaggggagtcagaacctgcaatggaatgagagtggaacaggcttctgaatcagggacagctttggcccaagagccccctacctctcactgcctactgctaacagcagcagcagcaggaacatttgaggaggcctagcccccaccacaggcctgccaggaagcatatagtctggggaaaacaacaggaggaaggtggacaccaggatcccctatggtgaaaactraacccattgcagacctccaccaaggtacccatatttcaaaagagtttatctaacaacaccctaaatattttaagtaatcattcattcatttccatttgtgaatattcataatcatccagagttttctggccagtagggtgaccccaccacgctggtataatttccccttcaagcaaagctccgtgctttaggtaacttgggtggcctgatggcgacttgctgaaatactaaatatagtttgagaacaattcctggccagtctgtaaccagatctgccttgttcagggctatttccccagggaacctggcacatgaaggttctcaataaacaaatatttgtagaatgaatgaatgatccctgtattagtacgttttcacactgctattaaaaaaaaaaaagcctcagactgggtaatttagaaaggaaagaggtttaatggactcatagtccctcatggctgaggaggcctcaggaaacttacaatcacggcagaaggggaagcagaaatcttcttcactaggtgacaggggagagaacaaaggaggaaccatcagacacttatcaaacaaccagatctcgtgagaactcactatcacaagaacatcttgggggaaaccacctccacgatccaatcacctaccaccaagtccctccctcaacacatggggattacaatttgagatgagatttgggtggggacacaaagcaaaaccatatcagcctccatgaagggaaactcccaattctttacttcttccaacatgagctattccctacacccaaggggat

SEQ ID NO: 33569 - DNA, 1166 bp, Homo sapiens
gagctcccaactgaggacctcgtttgtaacatagcaaagaacccaaatataactgagggagggggtgcagtggcttcaatgtggcctagatccagggtccagcaacgtggaagaagacaggaaaacagggcagtgggactggaggatgaagccaggggagtcagaacctgcaatggaatgagagtggaacaggcttctgaatcagggacagctttggcccaagagccccctacctctcactgcctactgctaacagcagcagcagcaggaacatttgaggaggcctagcccccaccacaggcctgccaggaagcatatagtctggggaaaacaacaggaggaaggtggacaccaggatcccctatggtgaaaactgaacccattgcagacctccaccaaggtacccatatttcaaaagagtttatctaacaacaccctaaatattttaagtaatcattcattcatttccatttgtgaatattcataatcatccagagttttctggccagtagggtgaccccaccacgctggtataatttccccttcaagcaaagctccgtgctttaggtaacttgggtggcctgatggcgacttgctgaaatactaaatatagtttgagaacaattcctggccagtctgtaaccagatctgccttgttcagggctatttccccagggaacctggcacatgaaggttctcaataaacaaatatttgtagaatgaatgaatgatccctgtattagtacgttttcacactgctattaaaaaaaaaaaagcctcagactgggtaatttagaaaggaaagaggtttaatggactcatagtccctcatggctgaggaggcctcaggaaacttacaatcacggcagaaggggaagcagaaatcttcttcactaggtgacaggggagagaacaaaggaggaaccatcagacacttatcaaacaaccagatctcgtgagaactcactatcacaagaacatcttgggggaaaccacctccacgatccaatcacctaccaccaagtccctccctcaacacatggggattacaatttgagatgagatttgggtggggacacaaagcaaaaccatatcagcctccatgaagggaaactcccaattctttacttcttccaacatgagctattcccwacacccaaggggat

SEQ ID NO: 33570 - DNA, 767 bp, Homo sapiens
tcctaacccggactgggtctacgggctcccggaggcgcgcagagcttgtcctgcctcggctcccgcctcttctgggctctttgcacgccttgggctcggagagaaacaacaacgggccctcgaactggggccgtatccgcgtttcactcagcctccttggcggccgagtcttagtttgcctctcggtgacatggggggaaagaaggaaactcgctttgcggggtgttcgtggattcagggagggaactaatatgtgaaagaagtgtttaacaccgacagggaacatttaatgagacttcacccaggaacttcccaagccttatttcatttaatgttcacaacggccttctggtttatcctcatttacaaaagcagaaattaaggcgcagaggggtcaagtaattttctccaagtcacagtagccacagaagtgcaaaggagtggtgccagtacctattatttattaatatttcctggtgtgagcatgtatcatctcttagtgcagagggyatttttacctagccttgggtcacaccatttaattaggggcataactctgggttttccctgacttctgggccgttgtccactatactgtggatgaaatcccattctggggttaccatagttctaaagggaaaggtttggatgaattccttgctagtgttgcggcagttagaagttgatggatgcagactccaggtctcagacacaactcaaattccctggggttttggctcaaggaagctttgagactgtaaacggtg

SEQ ID NO: 33571 - DNA, 647 bp, Homo sapiens
tgtttctgtaaatcctcagagcctggctcacagaacagagctccataaatatttgtggaatgactgaatcctcgttaaagcacctaacccatagtcttaactcccctccttccattgacgcaagtgaagatacagttaggatttttaaccagatcaaatatctgatttgttagtgagagatcgcaacttgcacgacactgaccactactggttctagtggtgacctggatttagtgccattctgtatgaaacaaaaccagggggctgtgcttccggctgtttgtgcggttttgtgcttcattcttcatgggcacagatgagcacggtgataacagtgtttacgaagccaggtgccggagacagtgaggatggctacaggaaagaaaggccacagattgctcttcagtggcagtgagaggagacctaatgcagaggctgcacagtggtgctgggattctataaccaacaacaaaagcaacaccctcattaccgacactcctgcagcycaaactactttgcctttgtgcgttggaaacccaacccaagcccattttccccactggaattatttgtgatgatgtgaagtttttggagatgcaaccatcccagaacaggcacgctcagatgagaagacgtgggagacacag

SEQ ID NO: 33572 - DNA, 1175 bp, Homo sapiens
aactttttgtttaatttttagacctggatgtaaggaagaggagattaaaaattcatagaaagtgatagtaattctatcagttgagagaaaactcctggttttcagcctaagttttgaggtgaaaattaagaaacgtgaccttgttggtatcttttctcaagtccagtactattagacacaataccgttcagtctttgaaatgtttttatattattttatggaagtaaccatctgatctcccaaagctgtgcttttatctttagtgaccataggtgagcattatattgacttttttccatgctattcctgatcccatccttgaatactaattataccttcactgctaatagccacagccaaggccagatgaccaatttattctccaaatttctttgccagtctgttgactatatacttaggctacctgcctacttttgttactaatttctctataaatgcaagctatgatattaactagataatatttaagtagaaaatacaaatttaaagataatgctggatagcttaygaaacaccagagaaccacacttaaagctttgcagccaagggtgataaccaaaccatgtactagtggaagaaatagctattgttatgtccttaacatgggtgcatgctttgttgttcctattgctactccaagaaacttgacttactgcattcacatccaagtctcacactacttttaatgctgcttcagatattgccacagcagctacagttgtcgaacaaagtactctttgtgggcctttatttttagtagcactagctctacaggttaaagacctatgggtaagggtgggattgactggcagaatctcattatatgcctaggccctagcttcaaaaacaagaaaaataagcatataggatgttcagtttataggatgagagggagctcagaatccatatgaaaagaatcaaagaggtggcagaggttcaggtttttatctcatgctgcccagcccttggttcaacattttctgctcctatttcatgcttcattaagcaatccactctttggctgggaagctctctattaggaagtccagtgcagtgctaatcaggtactttacatattgggtgcaatttgtaaggaaaatgccaggcatggtgcaagatgcttcatttcattagcttgacctgatcaggaaaaa

SEQ ID NO: 33573 - DNA, 1209 bp, Homo sapiens
gtgatgctgaggctgcaccacactttgaatagcaaaaagtcatcttccagaaagacataaatgaagcttcttttttgcagcgtgccctcaatatattttgttctttcatcacagataagaactgttcacaaacttagatgagaaagctctcaccttcagcaaagagcaaacactggaatagattttttccaaattggcttttggcctgtactctgtcaggtaatgagatggtttttaagcagaattctgtatcttatttccctgatcagaggggttgtgcaattattattctctccaagcctggataacgacgtgcaacaagccatcagtcatttaaatcgccaaagatatgattgaagaatggaggtccctctgctgtaggagagagcaaaaaataagaaaaatgttggaacctggccaaggtagatttgggttaaggagtgactcactacctgcttcttgattggctctgaaagatgggagtgcatgggggaagggacataacaacaagacctctaattgccctgattgattgaggcacagtgatcaggaggagcacaatgtatgtatgcactgcaaatgttctgtgtctaatgaggggagcccttgacaaactcactgaggggagcccttgacaaactcactttggggagcccttgacaaacccactttctacctggttatagcacattcaaatagattgaagttcaagattttcctaacagctctttccaagacccatgaaaataagaaatgaggagatttcagagaacagcccaaggtggacccttctcatctgtgcatgcagataggtgagtgaacacagcctaagaatatggaaacagaaagggctcatttttactttcttatcagtgactcctgacatatgaacctgttgagacttggacagctgcaggtgtgtttactttcttcttcaagatgacccagggttctatgtcagaaagtktacatattttgactgttggaactcaggatatgaaattaagaataatgccagagtgcacacaacaattcaggtacaaagatgataattatggcatttttataagaataaaaatcatagcaacaaagtaaatggttcatgatagggtgtcaactaaaacaattatggtacatcaggcaatggagtactaggaagttattaaacatcatggttccaaagattacgtgatgaaattttaaaaaagt

SEQ ID NO: 33574 - DNA, 543 bp, Homo sapiens
taaagtggaggaaaccgagagggagaagacaggtcaacagccccagcaaagagaagacggggtgttctccccgaaagggcccctgaggggcacacgctggaggcatggctgctgaagccccagaccaagccgagggcatcctgggttacactggtgggtctcagagctgctggaaggctgcycctggcctcgcgctcccatctcctcacagctgcgaactgtgaagggttctcaaaagcagggtttcaattttgcaaacagatcttcagaaaagtgtgcctcccagcttcccacggccagccacgtcggcaaaacatacctcgggagaggagtccgctgccaaggaggctgggaaacagcccggaagcccaatgcgcctcgggaggctctgtttccaatcagctggtggccgttccccccaactcgttaccataaccagatttggggtaagtgagcatgccccatttcatgaacagttgtcagagaatccccaaatcctactctctgacaggccacacagaccccccagcgcaggcagcccgg

SEQ ID NO: 33575 - DNA, 930 bp, Homo sapiens
aataaaatgcagcatggaaagtagctcagaaaaccacccaaagccatcgtacttcgttcactctgcgagtggctgtcagccagctttccttggtcagggatctggtccacaagtgctgaacccgaggacggagcagcgaggagcacagacaagtctgggcactgggggaccctgcagcccaatgagtcgtgtgggaaacagatgttcatcaaattcacaccagttcagctctcacgccccctctgtctatttgctgtagtatttaccacattctgccttatcatgtacttaatgctgtgcacatctgtctcctttacaagacaggaaggtttttgaaacaagggccatatgcttttcatctgtcctagtgcctcgcgtggtgctttgcagagcagtccgagtgtaatttcagaaagaatcagatgatgaatttaactccatcactgcagccatggttttcaggtacattcaggggtcgtgcagcttcttcaggaattaaatcaataccacatatattcactgagcaccgactgtgccagactctagggcatactgggaggtgagtgtcatgtcatcatccctggccctggaagagacatcaaatgctgggggtttttttgtgtgagttttgaggcattgctctttctgagcccttacatraattctcatcccaggcatccatgcaaaagcctccgattttgcacatagcacactgacagctggatcatgggtgccagattttgtagctgctaaggggaggctgctgggaggaggagcagggaggtggcagatgatgcagggagagaaggatggagctgcaccctggcttgctccctgctccagttgactggtacatttccctgcttcacggctcagccagatgcagtcacttaactctgtggtagatctcgcagcacgacaggtcgggag

SEQ ID NO: 33576 - DNA, 523 bp, Homo sapiens
ggcacacgccactccgcccctgcatgaccacaaggccccacctctccctttcttcttgattttgttttaataccaactcattgccgaggctgttgctggacatttaacatggttttaccccacctggggactctgtctctcctgtgcgcagttgtattygatccccagcctttgttaccatacagcgtgctggtggtgctttgattcagtggcgctgtctgtttcctgtgtgagcaggggctttgcctgctttgacagcatcttcagcacctggaacagtgcctggtgcacagtgggtgctcactaaatattcagagggtgagtcttacaggaatgaacaaaaatatattgggaattggccagtaagggttgcaaaggcaaatgtggtgaactatggctccggcttgcctgggactgaggcatttccaaggatgcaggacttcaaatgttaaacccaggaaagtctcaggcaaaccaggacaagtgggtcgccctaatgagaacccccaaatgtcctcagaga

SEQ ID NO: 33577 - DNA, 1011 bp, Homo sapiens
acttgcctcagcttctcagagtgctgggattacaggtgtgagccacgcacctggcctctttggaacatttaaaaaagcttattattacaattattataattgttttggcaaaaatattcgaacacacctaaaagtagagtgaatagtactacggaccctcataggccattatccagattcagtaattaagattttgcaacacttacttcagagagtctcctctccttaccccacctttatattttaaagcatatcacactgtaggatgactatagttaatcaaaacatgttatatggtttcaaatagttagaaggaagatactgaatattcccagtgcaaagaatgatacaaagatgatggacatgactaactaccctgatctgatcactatacattatatgtatcacaacatcactatgtaccgcataaatgtgctcaattattattttaaaagtttttaaaaagtgtatcatataatttaaaaagttttttaaaaatgcatcattgggctgggtgtggtggctcatgcctgtaatcccagcactttgggaggctgaggcgggtggatcacctgaggtcaggagttcaagaccagcctggccaacatggtgaaaccctgtctctactaaaaatacaaaaaatttagccaggcctggtggcagatgcctgtaaccccagctactcgggagactgaggtaggagaatcacttgaacccggaaggcggaggttgcagtgacccragattgcaccactgcactccagtctggggaacaagagtgaaactccgtctcaaaaaaaaaaaaaaaaaaaaaaagcatccttgacttcgtgtcattttaccctatacacttagtattcatcaatgtttttaaagtttattaaagaaaactcccacacaatgccattatcttgtccaacaaaacaaacaatgtttccttgatatcatctactacccaaaggtcctcagcatctcaaaaatgcctgctttaccctggatttgatggaatca

SEQ ID NO: 33578 - DNA, 580 bp, Homo sapiens
tgcaatttctccattcttctgttgatggacatttgtgtggtttccagtgtgrggctattaggtataaactgccacgaacattcccatgtagttgtgtctgtggacaggccgtgcttcagttttgacagtccaggtgatagtggaactttcatctcttcagctttcactcctaaagactttctaaaaataccctcatttgctctctctctacagatgggtgagggaagaataaaagcctctaaggaacagaggaaaaagttcttgctgggagatggacattagtgcatcagcaaatctcatccactctagctccacaagctttcttttttttttttttttgagatagagtctcgctctgtcacccaggctggagtgcagtggcacgatctcggctcactgcaacctccgcctcccaggttcaaggaattcccctgcctcaccctcctgagtagctgggactacaggcacctgccaccacgcccggctaattttttatttttagtagagacgggggtttcaccatcttggccaggctggtcttgaactcctgaccttgtgatccacccgcctcggcctccca

SEQ ID NO: 33579 - DNA, 580 bp, Homo sapiens
tgcaatttctccattcttctgttgatggacatttgtgtggtttccagtgtgaggctattaggtataaactgccaygaacattcccatgtagttgtgtctgtggacaggccgtgcttcagttttgacagtccaggtgatagtggaactttcatctcttcagctttcactcctaaagactttctaaaaataccctcatttgctctctctctacagatgggtgagggaagaataaaagcctctaaggaacagaggaaaaagttcttgctgggagatggacattagtgcatcagcaaatctcatccactctagctccacaagctttcttttttttttttttttgagatagagtctcgctctgtcacccaggctggagtgcagtggcacgatctcggctcactgcaacctccgcctcccaggttcaaggaattcccctgcctcaccctcctgagtagctgggactacaggcacctgccaccacgcccggctaattttttatttttagtagagacgggggtttcaccatcttggccaggctggtcttgaactcctgaccttgtgatccacccgcctcggcctccca

SEQ ID NO: 33580 - DNA, 580 bp, Homo sapiens
tgcaatttctccattcttctgttgatggacatttgtgtggtttccagtgtgaggctattaggtataaactgccacgaacattcccatgtagttgtgtctgtggacaggccgtgcttcagttttgacagtccaggtgatagtggaactttcatctcttcagctttcactcctaaagactttctaaaaataccctcatttgctctctctctacagatgggtgagggaagaataaaagcctctaaggaacagaggaaaaagttcttgctgggagatggacattagtgcatcagcaaatctcatccactctagctccacaagctttcttttttttttttttttgagatagagtctcgctctgtcacccaggctggagtgcagtggcacgatctcggctcactgcaacctccgcctcccaggttcaaggaattcccctgcctcaccctccygagtagctgggactacaggcacctgccaccacgcccggctaattttttatttttagtagagacgggggtttcaccatcttggccaggctggtcttgaactcctgaccttgtgatccacccgcctcggcctccca

SEQ ID NO: 33581 - DNA, 167 bp, Homo sapiens
tgcactccaacgtcggcaacagagccagaccctgtctcaaaaaaaaaaaaaaaaaaaaatgccttgagactcattaattattatacttaacccttgaacttttgtgaygtttccttatctctttcttaaagccaagtccttagatgagaaagtaattagatcaaggt

SEQ ID NO: 33582 - DNA, 732 bp, Homo sapiens
atccctcaacaaccccaagggcaatgccaccccagacctcactgccaggccttccagagtccaataaactcatgtcccatgaccacagcttgttcccttgatctatgtgcacctggggatgctggtggctgggaggtgagttcatgaggcctcagatccgcccttgaagtcagtactgwcattcacccattcttcagacgaggacatagaggcctgggaagagtcagcaaggacagaagctgggttcacagccccccaggccagctccagaggcctcaatcttcaccagcaatgtgcctctgggcttgagaagattggacaggaagaacacaggaagctccaagaaaaaagaactgaaactgcaccaagagtcaatgatctgctgcctcctcagacgtgcagcaatctgacaacatccatcaaaattaaaagcgcgtgcacccttgacttcacaatggccttctaggaatttaccctcccaacgcactagtgcacgtgtctaagatacaaggttctgccgtagcagaactgcttacggcaatgagtttatggctgcccacacccccagcctcaagtgaggaggctccaactccacagcaggttggcaggggctgagctgtgcccctccactcaatggaaatatttcctggaccaaaacggaactgcaccagggaccaagacagacaggacctcctccaccccgtggaaggtaacatggagagaggtcccagt

SEQ ID NO: 33583 - DNA, 732 bp, Homo sapiens
atccctcaacaaccccaagggcaatgccaccccagacctcactgccaggccttccagagtccaataaactcatgtcccatgaccacagcttgttcccttgatctatgtgcacctggggatgctggtggctgggaggtgagttcatgaggcctcagatccgcccttgaagtcagtactgacattcacccattcttcagacgaggacayagaggcctgggaagagtcagcaaggacagaagctgggttcacagccccccaggccagctccagaggcctcaatcttcaccagcaatgtgcctctgggcttgagaagattggacaggaagaacacaggaagctccaagaaaaaagaactgaaactgcaccaagagtcaatgatctgctgcctcctcagacgtgcagcaatctgacaacatccatcaaaattaaaagcgcgtgcacccttgacttcacaatggccttctaggaatttaccctcccaacgcactagtgcacgtgtctaagatacaaggttctgccgtagcagaactgcttacggcaatgagtttatggctgcccacacccccagcctcaagtgaggaggctccaactccacagcaggttggcaggggctgagctgtgcccctccactcaatggaaatatttcctggaccaaaacggaactgcaccagggaccaagacagacaggacctcctccaccccgtggaaggtaacatggagagaggtcccagt

SEQ ID NO: 33584 - DNA, 732 bp, Homo sapiens
atccctcaacaaccccaagggcaatgccaccccagacctcactgccaggccttccagagtccaataaactcatgtcccatgaccacagcttgttcccttgatctatgtgcacctggggatgctggtggctgggaggtgagttcatgaggcctcagatccgcccttgaagtcagtactgacattcacccattcttcagacgaggacatagaggcctgggaagagtcagcaaggacagaagctgggttcacagccccycaggccagctccagaggcctcaatcttcaccagcaatgtgcctctgggcttgagaagattggacaggaagaacacaggaagctccaagaaaaaagaactgaaactgcaccaagagtcaatgatctgctgcctcctcagacgtgcagcaatctgacaacatccatcaaaattaaaagcgcgtgcacccttgacttcacaatggccttctaggaatttaccctcccaacgcactagtgcacgtgtctaagatacaaggttctgccgtagcagaactgcttacggcaatgagtttatggctgcccacacccccagcctcaagtgaggaggctccaactccacagcaggttggcaggggctgagctgtgcccctccactcaatggaaatatttcctggaccaaaacggaactgcaccagggaccaagacagacaggacctcctccaccccgtggaaggtaacatggagagaggtcccagt

SEQ ID NO: 33585 - DNA, 547 bp, Homo sapiens
ttttatcaggtcacaaaaattaattctcatatcattctgttgttttgcaaacaaactgcaagattgcagagggttttatttattttagacagcctgaaaacagcaaggtgtacaataacaggaataaccaggtcatttgaacaggatcgtgacagctattgatgctacctgtccagcctggacatgatttggcctgaccaagcacccaagaaggctcagtgggttgtgagcacaccctgagccaaaagcgttatgggctgctccaaaccaagtgtacttttaacgtggattaataaaaacctgatattcgggttcagaaatatgacwgttgcattgtaaggctacatctagagtagtgcctttcttctgggctccacatttagaaaggacagggacaaagtaaagaatttcagatgaagaggaacaaaatgggaaaggccatgaaattgatttgttatacatatttgttcagggaaagaaaggacagaggcagaatgataagaggagcaaggaacacaggacagagggaagggatgaggaaggcaca

SEQ ID NO: 33586 - DNA, 754 bp, Homo sapiens
cagtgcctggagagagcagctccctttccttaggacgcggggagcgcactgcccccagcccagggcccaggacccagagccagaccccaaacgcagagtctcaggtccggagcccgatgcccagatggcggagaccggagcgcacagccaggaaccgggttcccaaagtctggttacccgcgcctggggcgcttctkgaagcgctgcggaccagcttcgccaacaagtgcaatccgcgctccccggcggcccgagtggggaggggctggggctgcgggcctctagctgggccctgatgacagcatgggggagggggagcctggcgtggaacccgagtcccggtaaaaaaatacaccagagcagagctcccaaaataaacccgagcccgcgccagctgcagggcgcattctggggctgaggagctgcgtcccctcccagaggggcgccacgggtcccttcccaagagacttatgacccctcctccggggtaacccttcccccgtcccccgcatacccgtgcattgcttttaccgatttgggtttcttcttgggcgcgaggttgtcgtagaaaatcttggcttcctcccagaccggggccgcagcggtctccgctcctggcccgggctcgcggggctcctggggctcccggggctgcccaggttccatgctccggctctgacccggcccggccagagcaggcggcggcgtagacgcggaggtggctggggctgggctgcaggagggaggcgagtcc

SEQ ID NO: 33587 - DNA, 754 bp, Homo sapiens
cagtgcctggagagagcagctccctttccttaggacgcggggagcgcactgcccccagcccagggcccaggacccagagccagaccccaaacgcagagtctcaggtccggagcccgatgcccagatggcggagaccggagcgcacagccaggaaccgggttcccaaagtctggttacccgcgcctggggcgcttctggaagcgctgmggaccagcttcgccaacaagtgcaatccgcgctccccggcggcccgagtggggaggggctggggctgcgggcctctagctgggccctgatgacagcatgggggagggggagcctggcgtggaacccgagtcccggtaaaaaaatacaccagagcagagctcccaaaataaacccgagcccgcgccagctgcagggcgcattctggggctgaggagctgcgtcccctcccagaggggcgccacgggtcccttcccaagagacttatgacccctcctccggggtaacccttcccccgtcccccgcatacccgtgcattgcttttaccgatttgggtttcttcttgggcgcgaggttgtcgtagaaaatcttggcttcctcccagaccggggccgcagcggtctccgctcctggcccgggctcgcggggctcctggggctcccggggctgcccaggttccatgctccggctctgacccggcccggccagagcaggcggcggcgtagacgcggaggtggctggggctgggctgcaggagggaggcgagtcc

SEQ ID NO: 33588 - DNA, 1142 bp, Homo sapiens
aaccaccactcccgtctcggacccgcagctgccacttcccaccagggctctctgcttcgacttttgcttcccaaagcctccccgatggagcagccggagagcagcctccctttccaggctgagctgcagctcgccctcctctgcccacaattttgccacggctcccgtctcactcagaagtccctggaggtgtttcgtgcctctcaggatctgcccctctgctccaggcctttttgggcctttgcatcaactcttcctgctggtggaaggttcttcccgcaggcatttgcgtgacttactccgcatctctcaagactgctcaagcaccaccttctcaacaagcccacctgacaggcccccttgaacctgagtctgcagcgccaccgtccctggccccagctccctccctttatctctggcttctctcctacagcgctcgtccaccctgacacacattctaacctccttgtttcgtgcagttagtgttcatgtctgttcctgctggaaagcaagctctccaggagcacaactctgatggttcacgggcrcatcctgagtgcctagaacagagcctggcacgcaggacgagcctgggaggatgcactggacggggctcgggctgggatgggccctctgcccagcagggcctctcactcttacctgtattgccccaatgttctccatgagctggtccgcattggaggcccccaggagcacggagctgactccctcattcctcaggcaccaggctgtggcggcgagacccaaggtgagggagaaacacccaccacaggggcccctgatgggtctgccttgcctctgactgggccgagagacccagcatcttggtctgggggtctgagggggtctaggaagccctgcagtgctgggcacgggctttgtctaagaggtggctggaggaggcatgggggagcccgctgctccctgatggagaggtggcccaagtgcttagcgctccccatcctcttcccatgaaagcgggagccccattacctatggctggcagatggagggggtggcccaggtcctcagggactcctgacatccccctagaggcatggggtcccaaccatgccccttagagcccgattacccgaggctggctgggggatgatgtccag

SEQ ID NO: 33589 - DNA, 416 bp, Homo sapiens
aaccctggggagccctccttgactaatcctcccatcactggagcctgaagttcagcccctgccgcggcttcccctgcaaattagtccagaatctgacccgtctccccacctccayggtgcccaccctgctctgagcctccagcggctcttgggtggtttctcacaatagcctcctagctctctgcttccatcctctctccctgcaccttccccaggcaaagcgtggtccatgggccagcatcagcatgagatcagaaatgcggcctcccaggctccacgacagccctgccacatcaggatgtgccttccgagtacatgggatcgtgcacacgctgaactctgggacatcctcatgactcgccattcccagtgcagcagccagggcgagccttggcagaccttttaaatcaggtcaa

SEQ ID NO: 33590 - DNA, 547 bp, Homo sapiens
caattttaataacttttaagattatttcaatgatttatattttctrtttctgaagaattttaacaaatatttttataaaacaaatttcatggtttctgtctactcatcacatcttcaaattaaaagaaaagtgacaagagaaagaaaaaagccttctaaacactttttctatagtttttacataaataatagaaaacagcatagagcaaattacttttaaaattatacaataagtcagataaaaatttttgtcaatatatagagatgtatatgaatttgaaacaatattcaccaaaatcatagtgtaaatctatcactaaattttttttatgtcattaaattttaaccaagtcaaaagctaaaaaaaatgcgctgcatttatatatatacttgttttgcttcattttttttcagaattcaagatgcaatgcttgatttggtttattagtcacatcaaaaaataaaattaagtaagtgatcctgtttcacacaattcctggctcttatactcagtagttttgctattttcctgttttcaacttttctt

SEQ ID NO: 33591 - DNA, 709 bp, Homo sapiens
aggggagggtctgggtgcgcgcccccactgcagggcaggtgacttcggaggcgctggagccagcggagcgcaggcctgtcatgcaagccgaccctgcggtgggaggaaaagcggtctctcgggggaaggctcctggcagaggcctttcccttgatcggctcacttggctcttctggcaatgcggtgcccttcgcaggcaactttccaggggtcagaatcacagtacgccagccctggtttactccccacaagcgtctcagtccatcactctgctttgtgttgtgcttgctctgaggcccaggctcatcctgtacaggcctcatccagtagctcaacatctgtctccattccctctccctgtcctttccccagaacctcccaccaagaacgctggtctcctattgctttcacaataggtcttgatggcccagaaaacccgagcgcaamtctatggcatccaaaaatgtgttccccattactacaggcaggggagagctgggtctttaaacaccctggaggtgaggggcatacacgtgtgccttcctgccttagagtaggcggaatcctaagacattaaagaaaagaaaacaagacagctgatttctgaattaagccggattaaaattcatactaagctgtactattaatttaaaaagctcttatttacggtctactagacactgggcactttaaattcaataaattatct

SEQ ID NO: 33592 - DNA, 2036 bp, Homo sapiens
cttgagyccaggaggttgaggctgcagtgagccgtgattgtgccactgtactccagcctgagtgacagagggagaccctgtctcaaaaaacaaaacaaaacaaaacaaatatgattagagaaaatgcaatcttatttattatggctgatattcaatctcttctcagaatctacattgcaaaaccagctcagcaagctctagactatgccttccctaaatcagatctaaatcggtgacagaaaactatatctattgacataaggaagaaatcatcaggcttttatgtgctccagagagctccagaaagacaggtcagatctgggcttaaccttcaggttgaaattcatttaggagtaattctggagcagtcgtctccagtaagaaatgtttccttctcttacccctgagtcatccccccaggtcttccagggtgaagtgaagatgatgttggctattctaactgcctttgttgatcatgaatgtgcctggataaagcaggactttggctctggatgcgcagggctctggagaaacttgacaaggcctgttagagaggattggcaacaggtcacagggaagagcttgggttctggcttagatttcaggtcctggtgggaggccccaggggcaggaaacaacatgtggacttagagatgtgtttggtagacaggtgctagaattggggtttaggtggggccttatccaccagatggttattaggattggggtgggagttctagaacagtccccaacctttttggcactaaggactggtttcgtggaaggtaatttttccatggaccggggattaggggacggttttgggttgaaactgttctaccttagatcatcaggcattagattctcataaggagtgcacaaccttgcatgcatacttcacaatgcgctcctgagaatctgatgccaccactgatgtgataggaggtggaactcaggcagtaatgctcaccgctgctcacttcctgctgtgtagcccagctcctaacaggccacggactggtaccagtccacagcctggggtttgggagaacccctgttttagaggaatctgcggctgggatgactagatactaaagactccagagcccaagatgttctatgtctcactccttccctactaaagtcaaaatggatcccagaatatccagaagggctgagtctgagtaggagggtgaaaggtgccaagtggttccagttttcaaggccagcgggcatttggtcattgggtcaggccctcagttatactgcatgcccacttggacactctggaaagttggtctttccccacgtgccctgtgttcatggcttgaagacgaatcccttcccccaagagcagagcaacttccactctggctgatcaccccctggcctgtttctggaatctgactccacatctctgctaatggcacctcatctcccatctctctgagtcttgtcaattcctgcctggctgtcgctcctgcttgcaggcaggatccagggtctttccagtccacctccaaaatctctatctgtctccctctcattgctttttcttttctgattataaaaataatgtggccaggcacagtggctgatgcctataatctcaacactttgggatgctgaggcaagatgatcactttaggaattcaagaccagtctgggccacatagtgacatcctgtcctacaaaaaaattaaaaattagccaggaatggtggtgcacgcctttagtcgctgctacttgggaggttgaggtgggaggaccgcttgagcccaggagttcaagactgtggtgaactatggtgacaccactgcactgcagcctgggcaacagagtgagaccctgtctcttaaaaaataataataatatatgctaatcaaagggaatgtagaaactatagaaaagcatgctggatttgggttaatggattggtcacacacaatgaaatcccatgccctcctgaaacatcactcaagcacagcaaggtagtaggggggctttgttttgagagacgtgacaataatgaatca

SEQ ID NO: 33593 - DNA, 608 bp, Homo sapiens
ttctggcctggctgcacgccgggtcctgacctccaacccacagcacagtgtggtgaccaggakgatgccagaggccagaagagtgctggggatggagctgtgctttgacaatcggtgagagctgccattctggcaagtcccgctctaggccttttgtgtacatttgtttatttagtgcgaggtgaaggcaaagacatggaggcctagacaagcccaggccctttcctctcgggctgcagcacaggagctgcggggcctcagcgccggtgagtggggcccatgccttagggccacgccctgcgggtcgcgctagaagatgccacgtggcagtgggaggtgtaatacatcccctctgggggaaaggctgccagcttccaaacacttgcctgtgttagggccatggggaggaggagaggcgcctgctggggacacacgggccaggctccggcttcagacgccattggaaccacctcgtggaacatctgcagccacaacacatgaaaatgttttccttccggcagccacttttataaggatgtaataatatatgcagtgcacaaatggttctgtttttggtgggttggtattgccaccgagccgaccctgac

SEQ ID NO: 33594 - DNA, 775 bp, Homo sapiens
aaaagagagcccaggagggaatcctgccccatctgagcagccttcgtgtccctagggaagtccctaggctactgagtcctcaggagtaaagatccattgaggtctctgctgaggggcccagcatcctgggtggttctgatgcccagcaaagtgggagacctatgactagagaggacacccgcccctcagggctgcagggtgtggggtggggcagtggtcctggatggctatttggttgcggctcccagtgtgacccccatggtactgacccctgtgctaacatcccctctgcacagcttctggaaggagcaccacttcgaggccattgcgttggtggagaaggccctgcaggccgcatatggcgccagcgcccccagtgtgacctcggctgccctccggtggatgtaccaccactcacagctgcaggtaaccagcgaccctgggtgctcagcttcttcccttccagggggaccagcgtcacctttaggtgaagcccaaagcatttgatttctgaattcctctgaaatttttctttcttccaattctcataagcactcttcccactggtctttgatggtatctgagtggaggctttgtagtgagggattttcattacagggattttcttattccttaggctttctgaagtatgattatcccagtgttattgatgaggaaacygaggttcacccagctattaaagtggcagacattttaacacaggtttaactaagacccacccatctcacccttttggtttctctctcttgatgcc

SEQ ID NO: 33595 - DNA, 569 bp, Homo sapiens
cactgcaaccttcgcctcccgagttcaagcaattctcatgcctcacccaccccagtagctgggattacagatgttcaccaccgtgcctggctaattttgtagttttagtagagacagggttttgccatgttggccaggctggtcttgaactcctggcttgaagtgatctgcccaccttggcctcccaaagtgctggaattacaggtgtgagccattacatctggctggaactgctcttactactgtgagtcgttgtccacatctataatccaatgaaatgctaattttcagccagaaattcatgaaaataaagatatttgagctcatgtccccctgaattctctctatggacaccttgggagtggagggctggggatcctgggttacatacaaccctacttagtggttgtttttcatctaagtacttgctggccactttagcgtrtcattttttttttttttttttttgagaaagggtcttcctgtgtttcccaggctggatcacagctcactgcagcctcaacttcccaggctcccacctcagcctgctgagcagctggggctactgg

SEQ ID NO: 33596 - DNA, 924 bp, Homo sapiens
acaggcaccrtctgtcttggagtcacaacccatacaactttagaactgctgtcttcagggttgttttgcgcagttggagcctaacgtctagagaaaggtcaccagggagccaatggcagagctgggtggagagggctggtctctcatgcctctcagcacattactggctttgctgtgaaggtggtcagggactgtagacctgtccctctgtctgggcctcagttttcctagctgtaaaatgggggttggacaggataatcccaagtttccatgcagctttgatctgtggttctggaagtcaggtctcctgctgcccagtccaagttctttgtccttttccttgctcctccctggcttcacccaccactggggggacctcccacttttgcatcttccatcttcagagattctggacacagcctgcattctggccccttgagtcccttctgtctgaccacatgcccaaatgctcaagtcctttctccctttccgtccccactcaccataattgagcaaggtgcctgtgaatctggggaagctcaaggtgacctctgttcagagctggacatgtgggtcagtgccaaggggagggctgcgaaaactaatttcctgaggctcctgggacacacccagtgcttcctatgtctttgccctagctccctctgttcctccctgccaagaatgccaccccctccattccccaatcactgttgaaatcctgtctgccttttcaaggctcagctcagatgccagcctatgtcctacaaagccttgtaagccctccccctcactccaagatgaaatttgtctttaactcctctgcactcccttagtaccttatctgttcccctctgggggatgagttctttttggtcttagctttatccagggaggtggctttcaccgggttgtgagcactgggat

SEQ ID NO: 33597 - DNA, 771 bp, Homo sapiens
cctttttcatttgaacctcctgccatatctggtctcttttttccacatttaaattccaaaacatctaagaaaaatttgtatcaccttttagagactttagaggatttaagcctaaactttaaataacaactttaagttgttatttcctccgtgttttgctttcatgtgacacatcattctctcaccttttaaataactctatggaaaaaatcaaacttactattttattaaaaaataaagggmaggggagaaagtttatcagcaggtcaaaatgatatattacaagggacttaacaaactgaaagacaatttgagcaatggggaaagaaaaaggagataattgtttctggtctagttgcaagctggattcatttcacttgccatcagtatgtccatgttttcaccaccgtaggattctggaatctctcctttccctggtacagctaagatttccaggcttggggtgcatactactttaaccacttactttcctatcatcaaaattccatgaagttattaatgattttttgaaagttcacattctgctgattcatattaaaaataaatgaataccaaagggaaagttttccctattgttataatgacctaccaagaagaaactctctacatagaaaggaaaatatcatgggagaaaaaacagttgctaagatacctctctgtttttcagctggtccaccttcagcaccccgcggtaagttccatttctttttctactcttttctgttgttgttcttgttgttccctgcaagg

SEQ ID NO: 33598 - DNA, 771 bp, Homo sapiens
cctttttcatttgaacctcctgccatatctggtctcttttttccacatttaaattccaaaacatctaagaaaaatttgtatcaccttttagagactttagaggatttaagcctaaactttaaataacaactttaagttgttatttcctccgtgttttgctttcatgtgacacatcattctctcaccttttaaataactctatggaaaaaatcaaacttactattttattaaaaaataaagggaaggggagaaagtttatcagcaggtcaaaatgatatattacaagggacttaacaaactgaaagacaatttgagcaatggggaaagaaaaaggagataattgtttctggtctagttgcaagctggattcatttcacttgccatcagtatgtccatgttttcaccaccgtaggattctggaatctctcctttccctggtacagctaagatttccaggcttggggtgcatactactttaaccacttactttcctatcatcaaaattccatgaagttattaatgattttttgaaagttcrcattctgctgattcatattaaaaataaatgaataccaaagggaaagttttccctattgttataatgacctaccaagaagaaactctctacatagaaaggaaaatatcatgggagaaaaaacagttgctaagatacctctctgtttttcagctggtccaccttcagcaccccgcggtaagttccatttctttttctactcttttctgttgttgttcttgttgttccctgcaagg

SEQ ID NO: 33599 - DNA, 916 bp, Homo sapiens
ttattatcatatattttttagagacagtatctagctctgttgcccaagctggaatgcagcagtacaattatagctcactgcagcctcaaactcctgggctcaagcagtcctcttgcctcagcctcccaagtagctaggaactacaggtccgcaccaccatgcccaactaatttttgtcctctttttgtacagagaatgtcttggacatgttgtccaggcaggcctcaaacttctagtctcaaatgatcctcctgcctcagcctcccaaaatgctttgatttcaggagtggaccacatttcctgacccttccaataagtcttgaaacacaggcagagtggtgaacgtcccccttttactgatgaagaaatggaaagacactgagctaagactcagccacaggacagtactcatcactggcagagtcgagtcccgtcaactgcattaattcagatgctcatgtagaaagtaccatttttcaaaacacaaattcagatatgtaaaaaactgacatttttttccctacacttgacttcaatctctcattctacccaaagatggaaattttaatcaagtcaatggagtcatttctagatttttttcttggtcatttcaggtttaagctcaccattttagattccctcacccccaccccagggtgacacctatgtttggaagggctcatgttgacacagccaagtatgaaggggtccccggagaaacyctggcctgcacactgggagaatggggtggagtcactgaagttcatgcccttggcagggggaggagcctgtcctctcctgttccaggctggagcctgggattcagcctgagaggcgggaatcccatagcaggactctgactttgcagagagtccctgtttcccgttttttccttttcgcccagtaaaccctgccc

SEQ ID NO: 33600 - DNA, 1040 bp, Homo sapiens
aggaagccaccatttctaggaagccagggatacacatgcacatgtgtgtgtatgttcagatacacgcttctaacatatttccaaagatatgccccactacatgtatgatgcaccagatcatccaacgatatccaatataaaattawaaaatttttgaaccaccctccagtggtagatgatctaaataaataaatctcatgtattgaatctagagaaaaaaatattttgtaacctttaacccctgagtccataatctctttttcaaatggagaaagtacccttttgcagtatagtccttttcttactactggggtattaggttagtgcaaaagtaattgtggttttggaccatgaattttaaatcattataactaggctcaaatacatctttattaatcaaaatcagaaccattataatcaacacatttttgccaatgataaataagtttgtttattctggtagtataaaaatctgtagtggaaagcattttctgcatcctgctggttgtggaagtgttttccctgcataaagttgttgagatgtttgaagaacaggtagtcggttggcaagaggtcaggtgaatatgtcggatgaggcaaaacttcgtagcccaattcattcaacttttgaagcactggttgtttgatgtgcggttgggcattatcatgagaatttggccttttctgttgaccaatgtcggctgcaggcattgcagttttcggtgcatctaattgatttactgagcatacttcttagatgtgatggttttgctgggattccgaaagctgtagtggatcagactggcagcaggccaccaaacagtgcccatgatcttcttttggtgcaagaagctttggagtttctttttggtccaatcactgagctggttttctccagttgtcatatacaatccactttttatcgcatgtcacaatccgatcaagaaatagttcattgttgttgcatagaataagagaagatgatacctcaaaacgatgattttttttattttcactcagctcatgaggcacccacttat

SEQ ID NO: 33601 - DNA, 645 bp, Homo sapiens
gaaattataaaatatgtactctttttagtctgacttatatttggagatttggccatgttgtggtgtgtacagcagccattccttttcatttctgagtgatactccattgtatagatatgacataatttgttcatccattcacctgctgaaggaaatttgggttgttttcacaattttttattcattcacctgctaaaggaagttcaggttgtttccagtttttggttcatagaatgaaggttctatgaacatttgtgtacaaagtctttgtatgctttcatttctctggggyaaatacatagatgtgaaatggctgcatcacatgggaagtgtatgtttaattttttaagaaattaagtaatcacttttcctcttaacatgacagctagcaagtttccacctgaatttgtaactcatctccaggaaatgtgcaattcctcacgatatatttttgagatatctagtttctggtctcacttgctgttgttgttgttgttctattctacctttttctttgtccagtctctctcatccttattttctgtacatttatgtaacccagcacattagtctttctggagcaagacttagagccaccaatcagtaattaaaaaaaaaaaaatagacaggggaaagtattgaatg

SEQ ID NO: 33602 - DNA, 470 bp, Homo sapiens
aaagaaccagactcaggctgctcagagaaatcagcagggcctcctcttggaggtggaacttcaatccccattaaacgatatttccttcttcgattcccaatccaagtctttataagagaaatataggaggaatttttgtaaacatagaaaacttagcagttctagccagtaaaataatgaatgaatgctgcataaaatatgatttaaaggaataaatgggtacacagaaaggtaaaaacttttatgtcaatacgctaaaataaaaataattgtgttttatatttttawaacttattttatttataactgacaaataataattgtacctggttatggggtacagtttgacagtgtgaggtttcaatacatgtacagattttataatgatcgaatcatgatggttagcatgtcaatcacctcaaaatgttaatagttatggctttaactttaaaatatttattagcagaaag

SEQ ID NO: 33603 - DNA, 523 bp, Homo sapiens
ttatcgcacacattgcttctttgaagagaataactagtgccaagccccagcctaagcgtgagctggctgggtaagtaaacagattgctcaagagaagttcttcagggtggcctgtgaatgagctgctgaccctctcccatcttctgcaggtggctcattcaatcgccaaatcttcccccacccaccatcccaaaaacctgaccgccagtgacctcccagctgaaagacattgtgtgaaagaggaaaacacattccagcttggccactcagcaatcttaattaagataagcctgcttataaatattcaacctgtcacaaagctccataagctcctctttgcttatggaatggcttaattgcaaagtctgggtcttgagcgcctgttgatgtctcagactgatgtaaataccattaaccctgagaaaaakgttgcacccctggcagccagaagagaatatgcaaatctgatgggggaaaacagctacacattcctttgcacataaaaaagaagcagcatgcaatg

SEQ ID NO: 33604 - DNA, 551 bp, Homo sapiens
tataggattcacaaaggtgttcatcatagcaccacttaaagaagcaaaagctgaagtgacctaacggtccaccattaggrgttggctcaacatatgatggttactgcgttgagtgtaccctatgtgtccattttaaactgatgatgcaggcatattttttactgatgaaagatgttaatttgaaattaggaaataataaaagtaagttataaatgattagtaggattccatttaaggaaaactatgcattcatatttatctatctgtggaataacattttgaaaggatatacatgaaaataatatttcatgataaaaagattatgaatattctttctaccctcaaatattattacaataaccacagattatctgtgtaataaaaaagcaatacttcccttaagccacccctcctaatgccaaccaaacccctagtcatccatctacgttacatccctctccagctcctaccctaactctcctttcctgtcaggcacaacactaaaacactgtttcgggagagtcctccatccctccagctcctatgtttac

SEQ ID NO: 33605 - DNA, 640 bp, Homo sapiens
cagagakggagcgacagagagcgagcgagagagagagagagagagagagaaagagaaagacaggaggcaggtggcaggggagatctgtttgctcacatttcatggtaatggaaaaactttttccaaagggttataagtatctgtgaagccatctggtgtttcctgctgttgcatcctttagattctgtatgtttatatgtctatggcaccaaaacatcatgagcctaaacagtaatatttaaaggatgttgtactttaatgcaatcatacacaatgccaatgctttataaacatactctttaagaacgtcattagtatagagtatttgaatagttgaattacatacatattctctcattagacgaaagggaaactgataacaataaaagatggaatccttgtatgttaattggctatctggatatggccttttgtaaagtgaacattcaagtctttacctatttttaaaagttggttttcagccttaaaaaaatcgatttgtaggattctttatatattgtggatataaatttttcatatgttttcttccttttcattctactttttcattctctcaataatagttactctgataccataattttaatatggtccaatgtattaattttttccttttatg

SEQ ID NO: 33606 - DNA, 640 bp, Homo sapiens
cagagatsgagcgacagagagcgagcgagagagagagagagagagagagaaagagaaagacaggaggcaggtggcaggggagatctgtttgctcacatttcatggtaatggaaaaactttttccaaagggttataagtatctgtgaagccatctggtgtttcctgctgttgcatcctttagattctgtatgtttatatgtctatggcaccaaaacatcatgagcctaaacagtaatatttaaaggatgttgtactttaatgcaatcatacacaatgccaatgctttataaacatactctttaagaacgtcattagtatagagtatttgaatagttgaattacatacatattctctcattagacgaaagggaaactgataacaataaaagatggaatccttgtatgttaattggctatctggatatggccttttgtaaagtgaacattcaagtctttacctatttttaaaagttggttttcagccttaaaaaaatcgatttgtaggattctttatatattgtggatataaatttttcatatgttttcttccttttcattctactttttcattctctcaataatagttactctgataccataattttaatatggtccaatgtattaattttttccttttatg

SEQ ID NO: 33607 - DNA, 640 bp, Homo sapiens
cagagatggagcgasagagagcgagcgagagagagagagagagagagagaaagagaaagacaggaggcaggtggcaggggagatctgtttgctcacatttcatggtaatggaaaaactttttccaaagggttataagtatctgtgaagccatctggtgtttcctgctgttgcatcctttagattctgtatgtttatatgtctatggcaccaaaacatcatgagcctaaacagtaatatttaaaggatgttgtactttaatgcaatcatacacaatgccaatgctttataaacatactctttaagaacgtcattagtatagagtatttgaatagttgaattacatacatattctctcattagacgaaagggaaactgataacaataaaagatggaatccttgtatgttaattggctatctggatatggccttttgtaaagtgaacattcaagtctttacctatttttaaaagttggttttcagccttaaaaaaatcgatttgtaggattctttatatattgtggatataaatttttcatatgttttcttccttttcattctactttttcattctctcaataatagttactctgataccataattttaatatggtccaatgtattaattttttccttttatg

SEQ ID NO: 33608 - DNA, 640 bp, Homo sapiens
cagagatggagcgacagagagmgagcgagagagagagagagagagagagaaagagaaagacaggaggcaggtggcaggggagatctgtttgctcacatttcatggtaatggaaaaactttttccaaagggttataagtatctgtgaagccatctggtgtttcctgctgttgcatcctttagattctgtatgtttatatgtctatggcaccaaaacatcatgagcctaaacagtaatatttaaaggatgttgtactttaatgcaatcatacacaatgccaatgctttataaacatactctttaagaacgtcattagtatagagtatttgaatagttgaattacatacatattctctcattagacgaaagggaaactgataacaataaaagatggaatccttgtatgttaattggctatctggatatggccttttgtaaagtgaacattcaagtctttacctatttttaaaagttggttttcagccttaaaaaaatcgatttgtaggattctttatatattgtggatataaatttttcatatgttttcttccttttcattctactttttcattctctcaataatagttactctgataccataattttaatatggtccaatgtattaattttttccttttatg

SEQ ID NO: 33609 - DNA, 640 bp, Homo sapiens
cagagatggagcgacagagagcgagmgagagagagagagagagagagagaaagagaaagacaggaggcaggtggcaggggagatctgtttgctcacatttcatggtaatggaaaaactttttccaaagggttataagtatctgtgaagccatctggtgtttcctgctgttgcatcctttagattctgtatgtttatatgtctatggcaccaaaacatcatgagcctaaacagtaatatttaaaggatgttgtactttaatgcaatcatacacaatgccaatgctttataaacatactctttaagaacgtcattagtatagagtatttgaatagttgaattacatacatattctctcattagacgaaagggaaactgataacaataaaagatggaatccttgtatgttaattggctatctggatatggccttttgtaaagtgaacattcaagtctttacctatttttaaaagttggttttcagccttaaaaaaatcgatttgtaggattctttatatattgtggatataaatttttcatatgttttcttccttttcattctactttttcattctctcaataatagttactctgataccataattttaatatggtccaatgtattaattttttccttttatg

SEQ ID NO: 33610 - DNA, 640 bp, Homo sapiens
cagagatggagcgacagagagcgagcgagagagagagaragagagagagaaagagaaagacaggaggcaggtggcaggggagatctgtttgctcacatttcatggtaatggaaaaactttttccaaagggttataagtatctgtgaagccatctggtgtttcctgctgttgcatcctttagattctgtatgtttatatgtctatggcaccaaaacatcatgagcctaaacagtaatatttaaaggatgttgtactttaatgcaatcatacacaatgccaatgctttataaacatactctttaagaacgtcattagtatagagtatttgaatagttgaattacatacatattctctcattagacgaaagggaaactgataacaataaaagatggaatccttgtatgttaattggctatctggatatggccttttgtaaagtgaacattcaagtctttacctatttttaaaagttggttttcagccttaaaaaaatcgatttgtaggattctttatatattgtggatataaatttttcatatgttttcttccttttcattctactttttcattctctcaataatagttactctgataccataattttaatatggtccaatgtattaattttttccttttatg

SEQ ID NO: 33611 - DNA, 510 bp, Homo sapiens
gacatgtaagtccattcggagttatcaggaggtcagctcgtgggcttatcatgaagcacgtaggtagttggtgttacagtggtctgagctagatcatttgtgctgcatagcacgggttcagtacagtytttctgttttcaagtcacggtgaagcacgctttgcttgttgtatttgtttcagttatcagttctcccaccccaccttccaaccagaccgactttgtttctcatcgtgctgatgccagttgttggcagaggaatgggaccactatgattaatttgatcaggtttctcagcaccactgatattttgggccagataattctgttaggaggcggaggggggcctctcctgtgcgctggtgtttcagcagcatccctgggcttcccccactagatggcagtagcatcccacctagtcgtgatgataaaaaatgttgccagacattgacagatagcccctggaggacaaaacagcccttggttgagaagcgctgagtgagaccaacca

SEQ ID NO: 33612 - DNA, 817 bp, Homo sapiens
ttatctaaggggctgaatgaaagaccctccagcttgtgatgggtcctgtgtcactcatgcttccaaactcccagggtcagagagcaaggagggagtgggaggggttgcattcagggtgaggtgggagtgaagacagagtcagagtcagggccaagggcctgggtgatgcttcccatatttaattacccgccgtggaggccccctgctgtgccaggtgttcgtgcctaagttttgggaatgaagggagacccaagggaaggcaccagtgttggggttactcaggcagcttggggccacagctgtttaccaggaggtttggaagtagttcaatattttaacaacctctgtagtaggacttcatattccagctgagtwccgatcttggagcagggcgagggttggggctgcttggtgccctctccctcctctttgcccagcagtgtctgggatattccccacaaagatcctgcaggatggctgtgtctcaggctggtgcatcaggggctggcctcagagccaaagggtccacagtggacttgccaagcccagagtgccagagctttcctgcctcccctcccactttagccagctctcagggggccccccaccaccctgagcactgagctggaattggaggcagccagccggctgggatgtgatcattcggcctcctgagcaaggccagccctggccacagggaaacaatgaggtcccttgagtagtcaagggtctgctggggccactgggcaggacaggccctccctagcctgccctggtcttgctctgggaccttgaccctctccccttctgaggaagg

SEQ ID NO: 33613 - DNA, 511 bp, Homo sapiens
attaaatgaacaaatatattcttaaatgtgtagacagatatttatcaggctattatggggagagaggtgtaaagatagataaagaaaaaaaaaatacatgccaaggcgggaggattacttgagtccaggggtttgaggctgcagtgagttatgatagtgctactgtactgcagcctgggtgacagagtgagaccctgtctccaataaaaaaaataggaaaagaaaagaaaaaataaaaataggagtttataaaggtggaaataatatacrtggtctaatattataggaaaatgtaaaatagataatctatttatgatatcccttggaaagaaaaatctgaaggtccctataggcaaggattaaaaggtggcacacgcaaatgtacaaaccaaaatgctgatttcattatgagatgggaccatggatttttttggtctgtaataaagcgcctgtttcatatttatcttgagtgggaaagtctcgattactcactgggctatggctgcatgaa

SEQ ID NO: 33614 - DNA, 632 bp, Homo sapiens
tctccaggcaccagaggggctcagagccaaccaagcatatctccgggattttcagaagcctacacttgactcactttttgtttaaatgtatttttgtagttcctcattctggaggctgggaatcccccaagtacctggctccttcatcccagcccctctggcctccccctactttagagggctgtagattcctgcctgaagcctgggcaggaatgacccatggtatcaaggaaagcaagggaagcagcaagggaagagagggagtggggaggctgctttggtcccacagctttcactttcacctgaagcaatggctcttagggaacagggaggcagggggagggyggagctggaaagaggtaaaggggggcccttgtggtaggagtggagaaagagccagaggaggtggggtgaagggtgtgatccaggcttctcaagagcagagtttgccctcataactcccaactttggctccaggtagaggctgggctgtgacaacaatgtcagaagctatctattgagggcttcttgtgtgtcaggctctgagccaaacactgcctgttttctttgtctgatttctcacaactcccccattatacagatgggcaaattgaggctcagaaagggggatt

SEQ ID NO: 33615 - DNA, 938 bp, Homo sapiens
gatccagaacagtatttctgacgtacagcaggtgctcaatcaatacttcctggctgagtaagttgcttttgtattttgattaactttaaagtgagatatagagacctagtccagaccctgtgattcctatgaattaaaaaaaaaataagacatgatatgcatgttggtcgaggcaggtataattttacaaatttctcacgatttctatctctggttactcaatcaaacactaacttagatacctctgtgaatgggattgtgcagatggaattaaggttataaaccttaagacagggatagtttcctggattatccaggtgggttcaatgtaatcttgagtccttagaagcagagaactttctcaggatacaatcagaaagagatgtggggaaagaagagagtagaagaaataaggtaacaaggtcagtgagagcaatgcagagtgtgagcaggactgtatccaacattttgggcattgaagatggaaggagttggttatgagcccagcgatgtgggtaatccctagaagctaagaatggccctgactgcagccagtaaggaaaagagtgcttcactggtacaatgcattgaagtgaactctgccaacaacctgagtaagcatggggcaagattcttccctagagcctccagactccttgatttcagcctgtggcaccctccaccctcagcagagtacccagccaagcctgctggacatccgacctataaaatttggagatcaaaaatgagtgttttaaactgtggattttggaattatatatatatatayacacacacacacacacacacacgcatatatacatatatacacacacacacacacacgagtagtccccttcctattaagatatatacatatatatttaaattatatcctctgttctcagataaacaccatgacagtaagcaatctgcat

SEQ ID NO: 33616 - DNA, 1193 bp, Homo sapiens
tgcctaggctcttccagcttctggtggctcctgacattccttggctggtagcagtgtcactccaatgcctgcctctgtcttcacatggtcttcttccttgggtctctttgcatcttctccttttctgtctcttagaaggacacctgtgattggatttagggcccaccctaatccaggatgatctcacctcaactgtattagtctattgttacgctgctgataaagacatacctgagactgagactgggtgatttataaagaaaaagagatttaatgggctcacagttccatgtggctgagaaggcctcacaatcatggcagaagacaaaaggcatgtcttacaaaatggcaggcaagagacagaatgagcttgtgcaggggaatttctcttcataataccatcagwtctcatgaggattattcactaccatgagaatagcaaggaaacgcatgtccacatgattcaattgcctcccacacacgtgggaattgtaggagctacaattcaaaatgagatttgggtggggacacagccaaaccataacagtgctataatgaataagcttgaatgtatctttatatcattcatatctctgatatttccttagcaataaattctgagaagcagaattaactggtcaagggatatgtatcttttaagattcttttacatctgttgagaaattcaggaggtagactcccaacattaggaataaaatttcatttttccccataccatggcaagaactagggattatcttttttttaatatatttgtctatttgatgggtgaaaatgatatctttttacttaatttttatttttttcaccatttcaacaattatttaaattatttcaaaaaaaaaaagtattttaaaacaaggagagccttctgccctgctgactggatatttgaaatgttcacagagccctcgggagttttggttcttcattcaaactttcaattccatagagtttctctatcacatctcaactgacttttgtcatgctctccatatatgtagttttttaagattgccaactctatattagttgcctacagcttccacaacaacttaccccaaagttggtggcttaaaacaacagaattttattctctcataattctggaggccagcagtccaaaatcaaggtgccagcaaagttatgcttcctccaaaggttctagtgta

SEQ ID NO: 33617 - DNA, 799 bp, Homo sapiens
caccttaacaatattaaatcttccaatccatgaacatgggatgtctccctgcatctccctcagaccacgtgtctccttctctgaggccatatctctgtgtctctaagcccatgtctctgagccagtgtctacctccctcagcccatgtctctccctctctgagcctgtgtcctgtctctgagcctgtgtcctgtctctgagcttatgctccctccccaagcccacgtctctccctctctgagcttgtgtctggtctctgagcccatgtctcccccactgagcccacgcctctgtgcctcaggtgcagtgggtctctgagcccacgcctctgtgcctcaggtgcagtgggtctctgagcccacgtctctgtgcctcaggtgcagtgggtctctgagcccatgtcctgtctctgagcccacgtctctgtgcctcaggtgcagtgggtctctgagcccaygtctctgtgcctcaggtgcagtgggtctctgagcccacgtctctgtgcctcaggtgcagtgggtctctgagcccacatctgtgtgcctcaggtgcagtgggtctctgagcccacgcctctgtgcctcaggtgcagtgggtctctgagcccacgtctctgtgcctcaggtgcagtggtcatcgcctttgtggtctgctggctgccctaccacgtgcggcgcctcatgttctgctacatctcggatgagcagtggactccgtgagtaccgggaaccaggaagttgggtgctggacaagtaagtgctcccaaaacagatggtgggtgtggcaggcactgctgagg

SEQ ID NO: 33618 - DNA, 799 bp, Homo sapiens
caccttaacaatattaaatcttccaatccatgaacatgggatgtctccctgcatctccctcagaccacgtgtctccttctctgaggccatatctctgtgtctctaagcccatgtctctgagccagtgtctacctccctcagcccatgtctctccctctctgagcctgtgtcctgtctctgagcctgtgtcctgtctctgagcttatgctccctccccaagcccacgtctctccctctctgagcttgtgtctggtctctgagcccatgtctcccccactgagcccacgcctctgtgcctcaggtgcagtgggtctctgagcccacgcctctgtgcctcaggtgcagtgggtctctgagcccacgtctctgtgcctcaggtgcagtgggtctctgagcccatgtcctgtctctgagcccacgtctctgtgcctcaggtgcagtgggtctctgagcccatgtctctgtgcctcaggtgcagtgggtctctgagcccacgtctctgtgcctcaggtgcagtgggtctctgagcccacrtctgtgtgcctcaggtgcagtgggtctctgagcccacgcctctgtgcctcaggtgcagtgggtctctgagcccacgtctctgtgcctcaggtgcagtggtcatcgcctttgtggtctgctggctgccctaccacgtgcggcgcctcatgttctgctacatctcggatgagcagtggactccgtgagtaccgggaaccaggaagttgggtgctggacaagtaagtgctcccaaaacagatggtgggtgtggcaggcactgctgagg

SEQ ID NO: 33619 - DNA, 799 bp, Homo sapiens
caccttaacaatattaaatcttccaatccatgaacatgggatgtctccctgcatctccctcagaccacgtgtctccttctctgaggccatatctctgtgtctctaagcccatgtctctgagccagtgtctacctccctcagcccatgtctctccctctctgagcctgtgtcctgtctctgagcctgtgtcctgtctctgagcttatgctccctccccaagcccacgtctctccctctctgagcttgtgtctggtctctgagcccatgtctcccccactgagcccacgcctctgtgcctcaggtgcagtgggtctctgagcccacgcctctgtgcctcaggtgcagtgggtctctgagcccacgtctctgtgcctcaggtgcagtgggtctctgagcccatgtcctgtctctgagcccacgtctctgtgcctcaggtgcagtgggtctctgagcccatgtctctgtgcctcaggtgcagtgggtctctgagcccacgtctctgtgcctcaggtgcagtgggtctctgagcccacatctstgtgcctcaggtgcagtgggtctctgagcccacgcctctgtgcctcaggtgcagtgggtctctgagcccacgtctctgtgcctcaggtgcagtggtcatcgcctttgtggtctgctggctgccctaccacgtgcggcgcctcatgttctgctacatctcggatgagcagtggactccgtgagtaccgggaaccaggaagttgggtgctggacaagtaagtgctcccaaaacagatggtgggtgtggcaggcactgctgagg

SEQ ID NO: 33620 - DNA, 799 bp, Homo sapiens
caccttaacaatattaaatcttccaatccatgaacatgggatgtctccctgcatctccctcagaccacgtgtctccttctctgaggccatatctctgtgtctctaagcccatgtctctgagccagtgtctacctccctcagcccatgtctctccctctctgagcctgtgtcctgtctctgagcctgtgtcctgtctctgagcttatgctccctccccaagcccacgtctctccctctctgagcttgtgtctggtctctgagcccatgtctcccccactgagcccacgcctctgtgcctcaggtgcagtgggtctctgagcccacgcctctgtgcctcaggtgcagtgggtctctgagcccacgtctctgtgcctcaggtgcagtgggtctctgagcccatgtcctgtctctgagcccacgtctctgtgcctcaggtgcagtgggtctctgagcccatgtctctgtgcctcaggtgcagtgggtctctgagcccacgtctctgtgcctcaggtgcagtgggtctctgagcccacatctgtgtgcctcaggtgcagtgggtctctgagcccacgcctctgtgcctcaggtgcagtgggtctctgagcccacrtctctgtgcctcaggtgcagtggtcatcgcctttgtggtctgctggctgccctaccacgtgcggcgcctcatgttctgctacatctcggatgagcagtggactccgtgagtaccgggaaccaggaagttgggtgctggacaagtaagtgctcccaaaacagatggtgggtgtggcaggcactgctgagg

SEQ ID NO: 33621 - DNA, 835 bp, Homo sapiens
tagccaggcccctggcttaagaaggtcgcctaagcctaagagaagacagtcccaggagaagctggccgggaccagccaggagctgggagccacaggaagcaaaagtcagccttttcttcaagggatttccctgtctcagagcagcctttgccccagggaaatgggctctgggctggctgcctgcaccggccatgtcgacccaggacccggacacctggtcttgggctgtgttcagccactttgccttctctggactcagtttccccgtctgagaaatgagagtcgaatgctacagtatctgcagtcgcttggatctggctgttgagttgacgggttccttgaaccccacaaaatccctctccaaccacaggacccttcggctcaccaagaacagggcccaggggagtcaggcctattcgctgcacttcctgccaaactttgcccccacaagcctggtcatcagccaggcagccctcccagtgcccaagggccaccaaccccagggaaacagggccagcacagaggggccttcctcccccacagagcycccatgacatagtctgctctgggcggaagagctttgctgccagccagggatgtccagaggtcagtgcagcccctacccctgctcaggagtgggctcagagtctagcaaatgctaaggcccctcaggctgggctctgaacgaggacctggactcagagccagacagggcagcctcagacccttctctggggctcctggaccttgggccataatttctgagcctcggtttccccatctaaggaacagatgtggtcgttccgccctctcagctggatgagactgtcctgga

SEQ ID NO: 33622 - DNA, 835 bp, Homo sapiens
tagccaggcccctggcttaagaaggtcgcctaagcctaagagaagacagtcccaggagaagctggccgggaccagccaggagctgggagccacaggaagcaaaagtcagccttttcttcaagggatttccctgtctcagagcagcctttgccccagggaaatgggctctgggctggctgcctgcaccggccatgtcgacccaggacccggacacctggtcttgggctgtgttcagccactttgccttctctggactcagtttccccgtctgagaaatgagagtcgaatgctacagtatctgcagtcgcttggatctggctgttgagttgacgggttccttgaaccccacaaaatccctctccaaccacaggacccttcggctcaccaagaacagggcccaggggagtcaggcctattcgctgcacttcctgccaaactttgcccccacaagcctggtcatcagccaggcagccctcccagtgcccaagggccaccaaccccagggaaacagggccagcacagaggggccttcctcccccacagagcccccatgacatagtctgctctgggcggaagagctttgctgccagccagggatgtccagaggtcrgtgcagcccctacccctgctcaggagtgggctcagagtctagcaaatgctaaggcccctcaggctgggctctgaacgaggacctggactcagagccagacagggcagcctcagacccttctctggggctcctggaccttgggccataatttctgagcctcggtttccccatctaaggaacagatgtggtcgttccgccctctcagctggatgagactgtcctgga

SEQ ID NO: 33623 - DNA, 835 bp, Homo sapiens
tagccaggcccctggcttaagaaggtcgcctaagcctaagagaagacagtcccaggagaagctggccgggaccagccaggagctgggagccacaggaagcaaaagtcagccttttcttcaagggatttccctgtctcagagcagcctttgccccagggaaatgggctctgggctggctgcctgcaccggccatgtcgacccaggacccggacacctggtcttgggctgtgttcagccactttgccttctctggactcagtttccccgtctgagaaatgagagtcgaatgctacagtatctgcagtcgcttggatctggctgttgagttgacgggttccttgaaccccacaaaatccctctccaaccacaggacccttcggctcaccaagaacagggcccaggggagtcaggcctattcgctgcacttcctgccaaactttgcccccacaagcctggtcatcagccaggcagccctcccagtgcccaagggccaccaaccccagggaaacagggccagcacagaggggccttcctcccccacagagcccccatgacatagtctgctctgggcggaagagctttgctgccagccagggatgtccagaggtcagtgcagcccctayccctgctcaggagtgggctcagagtctagcaaatgctaaggcccctcaggctgggctctgaacgaggacctggactcagagccagacagggcagcctcagacccttctctggggctcctggaccttgggccataatttctgagcctcggtttccccatctaaggaacagatgtggtcgttccgccctctcagctggatgagactgtcctgga

SEQ ID NO: 33624 - DNA, 1587 bp, Homo sapiens
ttttttttgttttttttttttgagatggagtttcactcttgttgcccatcttggcctcccaaagtgttgggattataggcgagagagtgtgagaccagcctgggcaacatggtcaaaccctgtctcgacaaaaaatacaaaaattagttggacgtgatggtgcaagcctgtagtctcagctaagggcctgaggcaggaggatctggagcctgggagcttgaggctgcagtgagccgtgattgcaccactgcatttcagccctggcgacagagcaagaccttgtctcaaaaactgaaaaaagaaaaaaaaaaaaagttaaacagatcatgcaggctgggcgcagtggctcacacctgtaatcccagcactttgggaggccgaggcgggcggatcacctgaggtcaggagtttgagaccagcctgaccaamatggagaaaccccgtctctactaaaaatataaaattagctgggcatggtgacgcatgcctggaatcccagctactcgggaggctgaggcagaagaatcgcttgaacccgggaggcggaggttgcagtgagccgagacgcaccattgcactccagcctgggcaacaagagcgaaactccgtctctaaataaataaataaattaattaattaattaacagatcatgccatatccttttacacacagctcatttaatcttcaccaccacaagggaagtgggcatcattaccacccttcccagcacagagatgagaaaactgaagctctagacagagtgtaactctcccagttctcaaagttcctgagatgtggatcctctttccaccttccctctcctttttacctacaaggcccatgtcaaatgctacttcatgagtctctccctcctgcaggtgcccacagcaagatgcaaagccccacagcagttggcctgggactctggggctctttgacagagttaacactgttcttggcagtttcctcctcagcctgggagggtctccagagcagacgctgtatccatctgggcagtatcttctctgggcctggcctgtcataggtgcttcaggtttccccatttgaaccagataccagtcgggttaccggatgtttgcttaaaatgagtcataggcttcctgctattcctgtgctgcttccagctaggactgatcgaatcagtctggattttccttggggtgatccgcaggctcccttttccaattttacttcttgagactttccttggccctcacacagagacctcccaaagggaagaggaaggtgggcaggggaacatcttagctgatcccgtcctcatccagctgataggacattgggttttcggaactggaagggaattcttagacaacagaaattcagtggccttcaaggacctgggaggtaacaggaagtcatggggcttgtcggggcttggtggggcttggggggagttagagagtggatgttctgcctgaaggtgttcacattcgaagctaaaaatcacaaactcagcctgacagcaccccctagcaatctggattctgtcactcctatatcctgattttttttttttttttttttgagatggagtttcactctgt

SEQ ID NO: 33625 - DNA, 1587 bp, Homo sapiens
ttttttttgttttttttttttgagatggagtttcactcttgttgcccatcttggcctcccaaagtgttgggattataggcgagagagtgtgagaccagcctgggcaacatggtcaaaccctgtctcgacaaaaaatacaaaaattagttggacgtgatggtgcaagcctgtagtctcagctaagggcctgaggcaggaggatctggagcctgggagcttgaggctgcagtgagccgtgattgcaccactgcatttcagccctggcgacagagcaagaccttgtctcaaaaactgaaaaaagaaaaaaaaaaaaagttaaacagatcatgcaggctgggcgcagtggctcacacctgtaatcccagcactttgggaggccgaggcgggcggatcacctgaggtcaggagtttgagaccagcctgaccaaaatggagaaaccccgtctctactaaaaatataaaattagctgggcatggtgacgcatgcctggaatcccagctactcgggaggctgaggcagaagaatcgcttgaacccgggaggcggaggttgcagtgagccgagacgcaccattgcactccagcctgggcaacaagagcgaaactccgtctctaaataaataaataaattaattaattaattaacagatcatgccatatccttttacacacagctcatttaatcttcaccaccacaagggaagtgggcatcattaycacccttcccagcacagagatgagaaaactgaagctctagacagagtgtaactctcccagttctcaaagttcctgagatgtggatcctctttccaccttccctctcctttttacctacaaggcccatgtcaaatgctacttcatgagtctctccctcctgcaggtgcccacagcaagatgcaaagccccacagcagttggcctgggactctggggctctttgacagagttaacactgttcttggcagtttcctcctcagcctgggagggtctccagagcagacgctgtatccatctgggcagtatcttctctgggcctggcctgtcataggtgcttcaggtttccccatttgaaccagataccagtcgggttaccggatgtttgcttaaaatgagtcataggcttcctgctattcctgtgctgcttccagctaggactgatcgaatcagtctggattttccttggggtgatccgcaggctcccttttccaattttacttcttgagactttccttggccctcacacagagacctcccaaagggaagaggaaggtgggcaggggaacatcttagctgatcccgtcctcatccagctgataggacattgggttttcggaactggaagggaattcttagacaacagaaattcagtggccttcaaggacctgggaggtaacaggaagtcatggggcttgtcggggcttggtggggcttggggggagttagagagtggatgttctgcctgaaggtgttcacattcgaagctaaaaatcacaaactcagcctgacagcaccccctagcaatctggattctgtcactcctatatcctgattttttttttttttttttttgagatggagtttcactctgt

SEQ ID NO: 33626 - DNA, 1344 bp, Homo sapiens
tgcatggaaaaactggaggaatatacggcaaattgttaatattggtgtttggtgtgttttcaagtattatatctgcaatatttactattttttaaaaacagtgagcgtgtattactttggaatcagaaaaatcccaataaatatatacacctgtaaagatgtcacacttaacataacatccaaagtccttatcagggcttacagggccctgcacgacccagcccctctctctgcctaaccttgtttccttcatgctccctcttgttcrtggtggtctctttgctcctccttgatcacaccaagcacgtttccagttcacaatgtgtgcatttgacgttctctctgccaggtgcactgttcccaggtatctgcatgggtcccttctccacatcaattaggtttgctcaaatgtcataatttcagaaagaacttctgaaaattcccatctcctgaacttactttatgtttctctatagcacttacccactacattatatcatgtctacttattgtctgcctatctatctatctatctatctatctatctatctatctatctgtctatcatctgtctatccattgatgtcacccctggaagactttgcctagaatagtctctgacatacaatggaaactcagtaaatatgtgttgaatatatattatttgcttttaaacagcgaatacctgtttttacttttatttagtgaagattgagttgtagaaaatgtttgaaaacctgcagccccaacttatagagcttaaaggctttcagttactttttaaaaaacacctttcctcatctaggacagagtttttccacctcagaactatggacactttgggatggagaattctttggtttgaaagctgttctgggcatggtagggtgtttaacaaccaattcaatgctggtaacatcctctcccacccacctcattagttatgacaatcaaaaatatcttcagacattgcctaatgtccactgggagcccaaatccccttctcttccccattgagaaccactgctataggagcgttctagagtcaaatacctctccatttttctaaaaatatgtacagcatcatattgacggagacaggctaaggtttgatctactgctatgctattaggagggaatgagctgaaaattgtcatgggttcttatactttcatgagagttactcaggtctcagcacctctctacattttggttttcttgtttagtataaatgcaatccaatttaatctgcatataaacacatctattgcatattaaaatcaacatattataaacatcaggctgaatgctttcctgaagaagcaggctaaaaaaattcatgca

SEQ ID NO: 33627 - DNA, 2569 bp, Homo sapiens
tgcatgctagctatttttatcacatgctgtgtcatacacactttatatcaagcagaaaatatttcagtgcctacacggtcctaccacatgctagcaatggatcatgaacatgtcacttaacctctttgagcctcagttttcttatctgtgagactggatcataataataccaaccacataaagtggttgtatggctaaaatgaatttaagtatataacatgcttagaaaattgcctgacacatagtgatggttgcataaatattagctgttatttttatagggacctattagataagtgaatcaagtaagctgaaattgagaaaatgttttcttaaaacacacggattgcttggtttgtctttaatttttccacttttaatagatatatgggtacagagaatattatgtaggtttcttaaatctactctaaggaagacaatagtgtaagcagaatgataaatggtaagtgagacttaggtctatgcaagagaacaataggaagtggtggggactggggagaaccagagtgagcttgccctgtcttagggggcggccactacttaggccaattgtcgtatgagaatgaagatctgatgttgtcatggatttttaagaagctagaaacctgaactttttaatgaaatctcctaatttgtagatgttggcaactaaataaaaaataaattcaatacactctagaatgctgcaatgtgagtgtctgtgctacaatataaaatatacaatataaaataaaacatgcctgtaggccaacttggcccccaggtcaccagtttgtaatctctgctttatctcataacttcctctagggtgtgaactatggcctgtccacagtagacaggcaaaaatagatgttgaactaagttagattttggtgtaagaactctggagtactttccatacatcaaactgggctgaaaaaaataatccaaaggatattttccattgtcgctatttttttgtctctgtgtgcacagtagcataacatgccctgaatgcagagaaaccgtaaactaggtcatttccttrgacagtaaaattctctgaaacaaaagcagccaaaaattgatcattttcctgctaaagaagcacatgctctctccgtgagaacacacacacagtttaatacaataaaaccaagcctgacaaaaatgtaaaatgtatgcattttaaaagaggaatttttaattatattaatttaaacagaagccctaaattagttttcctgtaagaatgtgatcaactgcttagtttccctaaagacaacgtgtgacctctacgaggaatgcagttatttgtattcagtttttccccctttcccttctagatatttttccccccttcattttatagaatttaataatgggcgaagtaacaaatgagaagataaaaattcctgaacactctagggcatacatggggatataaacagatattgtagccatttccttaagttacatcatttgctggactatttgactttctaatttgaactccctgtgtattactaaatttaacttgtgtatgcgagtgtgtgtctgtcactgaattcccccaaatggtaggctctgagaataaaatgccaaattatctatttcatctgtgtttctgtccatttatgtatctgtctgcttattgatctatttaaacacgatctatcaaggaaagcatttcgacgtctttgtttcttattctttcttgtttacggagaccacattcccccccaccctcaatttcaaattgccctctcttctcgtctgcaaatgctcatggtatagatatttcctttattattccctctaaactttctttgttcccgtccctgtcttttattatttctcctgtgtcatcagaaactgactgctggatcctgccaattagcctttgtctgtcagcaccagcctcagcctcccgaagagcgagtgtgcacggcgaggcggacaggccctatttcgtatgcagcacagtgtccccacacggagatatgccattactgacaaaagagcagtagatgggctcagattagctgctgacaaacttcctgtgtgtgtgtgtgcgtgtgtgtgtgtgtgtgtgcgcgcacccggtaggaggagatagtggggggtgggcaggacagggcaggaaagagaaccataccctggaacaccaaacagcaaatctaacttgcaaagtaacttatcaattctattccaaaataccaatcattctgaaatggtttccattataaatgtggtccatctgtactggtgggcacaaatgggcaggtcgcagccacaggaataatccacagatttctgcctcttggtcgcatctgctcggccctccactgtgaactgcttctctccttccccaggttaatatttctgggcagcttccagggtgaggcaagggaggcgctcaccttgggtacgaattgggcgccaaaaaactcagtagtcaaaacaattataatatctatgatttaattaaaaaataaaaatgaatgccaaaaatccatgatgaagaaaatattaaaatttcagataaagaaaggatcagtgttggtga

SEQ ID NO: 33628 - DNA, 545 bp, Homo sapiens
ttgaagagtaattataaaaataatttatgtggctgggcgcrgtggcttacgcctgtaatcccagcactttgggaagctgaggcaggtggatcgactgaggtcaggagtttgagacctgcctggccaacatggcgaaacaccatctctactaaaatataaaaattagccgggtgtggtggtgggcacctgtaatcccagctacagggaggctgaggcaggagaatcacctgaacctgggagacggaggttgcagtgagcgagccgagatcgtgccactgcacaccagcctgggcgataaagagatttcgtctcaaaaaaataataataataatattatgtgtaattttcttattgtcccagtttagtttttttttttttcttaaaacataagggagcattgaaacagctttatagtttgttttcacatgctttggtagtttgaaagttgttttgttttgtttgtttttatagtcgtactaaatttagaaagtacctgcaaataaattctatttaatggtaaccatttatttatttgacatgtttct

SEQ ID NO: 33629 - DNA, 545 bp, Homo sapiens
ttgaagagtaattataaaaataatttatgtggctgggcgcggtggcttacgcctgtaatcccagcactttgggaagctgaggcaggtggatcgactgaggtcaggagtttgagacctgcctggccaacatggcgaaacaccatctctactaaaatataaaaattagccgggtgtggtggtgggcacctgtaatcccagctacagggaggctgaggcaggagaatcacctgaacctgggagayggaggttgcagtgagcgagccgagatcgtgccactgcacaccagcctgggcgataaagagatttcgtctcaaaaaaataataataataatattatgtgtaattttcttattgtcccagtttagtttttttttttttcttaaaacataagggagcattgaaacagctttatagtttgttttcacatgctttggtagtttgaaagttgttttgttttgtttgtttttatagtcgtactaaatttagaaagtacctgcaaataaattctatttaatggtaaccatttatttatttgacatgtttct

SEQ ID NO: 33630 - DNA, 589 bp, Homo sapiens
gacttatttaattaaaataacwtatacacaaaacaaataataagactgtcttttttattacccctttctgtagtattctatatgtccatgtactaactaaaatctgtgtacttttgataccagtaggctatttcaaaaaagcgactccttaaattgttgaagtgataaaaaacaaatctgattttgtttaaacttactaaaagctctgtcccatgcaacaacaaaaagcgagaaagaaacgaagacaagcaaaatttaaaacagtatcttcgaatcttccaaacacataaaacttccttatttaaatgttaatgtttttagctcttcagaaaaatataaagcattgtcactgaaaattgctgatttgttttcttgcaaaaaaaaaaagagtaaagattggtttgaaactgaagaacgtgtatattttcaaaatttacttgatctttacataaatatgtcctctttcaaaatccaaatattagaagtttttaaaagttataacacataccaaaaaaacaacagaaaggtaaaaatttattaccagtttagtgatgtcttaatatcacataaattagaagatttttatttt

SEQ ID NO: 33631 - DNA, 589 bp, Homo sapiens
gacttatttaattaaaataacttatacacaaaacaaataataagactgtcttttttattacccctttytgtagtattctatatgtccatgtactaactaaaatctgtgtacttttgataccagtaggctatttcaaaaaagcgactccttaaattgttgaagtgataaaaaacaaatctgattttgtttaaacttactaaaagctctgtcccatgcaacaacaaaaagcgagaaagaaacgaagacaagcaaaatttaaaacagtatcttcgaatcttccaaacacataaaacttccttatttaaatgttaatgtttttagctcttcagaaaaatataaagcattgtcactgaaaattgctgatttgttttcttgcaaaaaaaaaaagagtaaagattggtttgaaactgaagaacgtgtatattttcaaaatttacttgatctttacataaatatgtcctctttcaaaatccaaatattagaagtttttaaaagttataacacataccaaaaaaacaacagaaaggtaaaaatttattaccagtttagtgatgtcttaatatcacataaattagaagatttttatttt

SEQ ID NO: 33632 - DNA, 589 bp, Homo sapiens
gacttatttaattaaaataacttatacacaaaacaaataataagactgtcttttttattacccctttctgtagtattctatatgtccatgtactaactaaaatctgtgtacttttgataccagtaggctatttcaaaaaagcgactccttaaattgttgaagtgataaaaaacaaatctgattttgtttaaacttactaaaagctctgtcccatgcaacaacaaaaagcgagaaagaaacgaagacaagcaaaatttaaaacagtatcttcgaatcttccaaacacataaaacttccttatttaaatgttaatgtttttagctcttcagaaaaatataaagcattgtcactgaaaattgctgatttgttttcttgcaaaaaaaaaaagagtaaagattggtttgaaactgaagaacgtgtatattttcaaaatttacttgatctttacataaatatgtcctctttcaaaatccaaatattagaagtttttaaaagttataacacataccaaaaaaamaacagaaaggtaaaaatttattaccagtttagtgatgtcttaatatcacataaattagaagatttttatttt

SEQ ID NO: 33633 - DNA, 756 bp, Homo sapiens
aaactccaggcgcaccaccttaagagctcgtgacactcactacaaaggtctgcagccactcctgaagcaagcgagaccacaaacccaccagcagaaagaaactgaacacgtccaaacatctgaaggaactagctccagacacaccatctttaaaaactgtcacactcactgtgaaggtctgcggctttattcttttagtcagtgagaccaattccagacacaagaccatctcatctcaagagaccaggacgtccgggcacccctagaatgtagctgctggcagagcctgaagtctatccagctcatgctcttccctgatatccttgacagattgtgggatggttcagcctctgcaaggacatggccaatgatggggggctggttttgggggcagcactctaggcaagggaagaaataaagtgtctgggaactggcgtggtgaaggggcactttgtggagaagmtgtgttcacatttggatgtgtcgagggtggaatgatatgaggaaagtcaaagggtgcccacccccagagcctaggtgtgggcacagcactgcaccacgccttaggggagattggactctgggcagagatcccaagagaagcaggagttggagtcttgggggccagtgtgatagggaactaactttactttaaagccaatttgtcagtaagaaaaaacgaggtgcaccttgtaggagaaaaagtcacaagcttggtgtgcttgaagtcacaagccttgctgtgcttggtgagag

SEQ ID NO: 33634 - DNA, 756 bp, Homo sapiens
aaactccaggcgcaccaccttaagagctcgtgacactcactacaaaggtctgcagccactcctgaagcaagcgagaccacaaacccaccagcagaaagaaactgaacacgtccaaacatctgaaggaactagctccagacacaccatctttaaaaactgtcacactcactgtgaaggtctgcggctttattcttttagtcagtgagaccaattccagacacaagaccatctcatctcaagagaccaggacgtccgggcacccctagaatgtagctgctggcagagcctgaagtctatccagctcatgctcttccctgatatccttgacagattgtgggatggttcagcctctgcaaggacatggccaatgatggggggctggttttgggggcagcactctaggcaagggaagaaataaagtgtctgggaactggcgtggtgaaggggcactttgtggagaagatgtgttcacatttggatgtgwcgagggtggaatgatatgaggaaagtcaaagggtgcccacccccagagcctaggtgtgggcacagcactgcaccacgccttaggggagattggactctgggcagagatcccaagagaagcaggagttggagtcttgggggccagtgtgatagggaactaactttactttaaagccaatttgtcagtaagaaaaaacgaggtgcaccttgtaggagaaaaagtcacaagcttggtgtgcttgaagtcacaagccttgctgtgcttggtgagag

SEQ ID NO: 33635 - DNA, 756 bp, Homo sapiens
aaactccaggcgcaccaccttaagagctcgtgacactcactacaaaggtctgcagccactcctgaagcaagcgagaccacaaacccaccagcagaaagaaactgaacacgtccaaacatctgaaggaactagctccagacacaccatctttaaaaactgtcacactcactgtgaaggtctgcggctttattcttttagtcagtgagaccaattccagacacaagaccatctcatctcaagagaccaggacgtccgggcacccctagaatgtagctgctggcagagcctgaagtctatccagctcatgctcttccctgatatccttgacagattgtgggatggttcagcctctgcaaggacatggccaatgatggggggctggttttgggggcagcactctaggcaagggaagaaataaagtgtctgggaactggcgtggtgaaggggcactttgtggagaagatgtgttcacatttggatgtgtcgagggtggaatgatatgaggaaagtcaaagggtgcccacccccagagcctaggtgtgggcacagcactgcaccacgccttaggggagattggactctgggcagagatyccaagagaagcaggagttggagtcttgggggccagtgtgatagggaactaactttactttaaagccaatttgtcagtaagaaaaaacgaggtgcaccttgtaggagaaaaagtcacaagcttggtgtgcttgaagtcacaagccttgctgtgcttggtgagag

SEQ ID NO: 33636 - DNA, 476 bp, Homo sapiens
ggtggccatcaccaggcccggctaattttttttgtatttttagtagagatggggtttcaccatgttggccaggctcatctcaaactcttgacctcaggtgatccacccacctcggcctttcaaagtgctgggattacaggagtgaacccctgtgctcagccaatagttaattctttattttgaaatattctaggaggaggaaaaaaaaatctgaccatatccaaaggttagtagttaatagctaaatatcaacaaagaggatacagctaaagattcccwaaagtttgagtcctgggtcttatttaattggtgacttgaataacatatttgaaagtaggctcatgaatctacagatgaatcttcaaaatacctttattatgataaaagagaaatccaatgctgatgagtaggcttgacttatgatgagaaagctgttcttccaaatcaaaatgtagtgaagacattttacataaaga

SEQ ID NO: 33637 - DNA, 476 bp, Homo sapiens
ggtggccatcaccaggcccggctaattttttttgtatttttagtagagatggggtttcaccatgttggccaggctcatctcaaactcttgacctcaggtgatccacccacctcggcctttcaaagtgctgggattacaggagtgaacccctgtgctcagccaatagttaattctttattttgaaatattctaggaggaggaaaaaaaaatctgaccatatccaaaggttagtagttaatagctaaatatcaacaaagaggatacagctaaagattccctaaartttgagtcctgggtcttatttaattggtgacttgaataacatatttgaaagtaggctcatgaatctacagatgaatcttcaaaatacctttattatgataaaagagaaatccaatgctgatgagtaggcttgacttatgatgagaaagctgttcttccaaatcaaaatgtagtgaagacattttacataaaga

SEQ ID NO: 33638 - DNA, 476 bp, Homo sapiens
ggtggccatcaccaggcccggctaattttttttgtatttttagtagagatggggtttcaccatgttggccaggctcatctcaaactcttgacctcaggtgatccacccacctcggcctttcaaagtgctgggattacaggagtgaacccctgtgctcagccaatagttaattctttattttgaaatattctaggaggaggaaaaaaaaatctgaccatatccaaaggttagtagttaatagctaaatatcaacaaagaggatacagctaaagattccctaaagtttgagtcctgggtcttatttaattggtgacttgaataacatatttgaaagtaggctcatgaatctacagatgaatcttcaaaatacctttattatgataaaagagaaatcyaatgctgatgagtaggcttgacttatgatgagaaagctgttcttccaaatcaaaatgtagtgaagacattttacataaaga

SEQ ID NO: 33639 - DNA, 534 bp, Homo sapiens
ctcagtttgattactggggccataaacagctttcccgtgagagctgaggtgaacatttcttgctcattaggcctcttccagacaagcctcccttgcatgcaatgaatatgcacttgatgcccagtgaacatgcacttgatactcaatcattgttcttgacttgacattctggttgattatcagacatgtamtccatcagaacagagatgcaaactgaggatcttgaattttgttagtttcattccagagaaagctctgttggggctgggaggggtggcagaacggatgtggacggcgaatattgatgcggtgtgtgtgtatataatgttctcctgggagaggtgtttcttaaaaagccgagttggttttcaacgtgatatttaaccgaatgctgccaaattgtgctacctccccagcacgttaaaaaaatccattaataaagtgtttgttgttgtcagaatgcctattccaaagcttgggctgtgtgaagggctgactccccacaagagaccgatgacaggcgagggaggtaga

SEQ ID NO: 33640 - DNA, 496 bp, Homo sapiens
agtgatcttggcacagtaggtatgccgactggggctaccactctggtatcagaatttgtgtcagttttaacatgtgcataatctttcgtacagaaattctacccttagaaattgattaaggaaatagtaatatgaggtacacacatatatatgcaccttccacacacacggttgtttgttgcggcattgtttattacagtgaaaaggtggaaacaacgtaatgtccactgaaagcagatcggttaaataagttatggtacattcagtgaaatactactatgcagcctttaaagagaacaagggagatctttacacattcaaattaacaaattcgagagtgtgaaggaccttctacagcaaagtgttaatcaygggtgtccctgggttggggaggggacaaatttgcttacatattttacaataatatattccaaataaaaggattatttccatatttgaaaaaataagacatctgcaaggcactgacaggactttg

SEQ ID NO: 33641 - DNA, 1122 bp, Homo sapiens
tttctccatgcgaaaccttacccagaggctgtgggacagaggctaagggagggctcctattggggccagggtgaaaactggcccccatgcactcagctcctgcctttaaggctgcccctaaggcacctctagagaggtccaaatccccatggaatgtgtttgaaaacagctgggttttaggcaaactttagagacagatgtggagtctgggtacaattcggggagattccaaccctcctgaagtctcctggtgagtgactgtggggaccagccctggggtctcccctggccacctggtgacagaggaaaggcaggcaaggctgttcccatttcccagaggaaggcactggcgtgaagaggagaaacaggatgtgccccaggttgagggccaccccgaaactgccaacttcattcagctacttgcagaatggttgggccctgggtgccaccggcgccatctccccactccccagtctagccggaaggagtgtgggcgacgcaccgtggtggtgtaggcagcatccgggtcgtcctccagcacccgtgagagcccgaagtcagacaccttgcagaccaggttgctgtcaaccaggacgttgcgggcggccaggtctcggtggacatagcccaggtctgagaggtagcgcatgccggcacccactcctctcagcatgcccaccagctgcatgatggtgaactgcccgtcgtgggtctgcagggggacatggcttggacttcaggaaagcccggsgaggcgcctggtccgtgaacaggaacacctcccatctgtaggatgctctcgagttgagacggtgctttgcaatttgccaagtgcgccactacttctgaagcactttgcagttaagggttattctcctggtctcatttaccctcacagcaaccctgcgaggtacgtggggcagcaatgactgcttacccattttgtggaacgagagatggaggcccagagaggttaagctctgtgcctaagagcacccagcaaagaaactgtgggcaggagctgggaatccagccgtctccaccacagccagcatgccccccagctgggtggggcctggattcccacagaggcacccccctcagcctgtgtgcagggcagca

SEQ ID NO: 33642 - DNA, 1094 bp, Homo sapiens
gtcagggcttgagggtgtccccatgggggctggtgttacccaggacactgcagcggctagcagggcttggctgggctggcgaatgagggccccacttctcttttttgtacagggaagggaccgaggatctgagtgacatctgtaggtcagagggcatgctgaccttgaaagcaaggtgggaatggagttctatgagctgaggagtcccagctggctcgcattctagagaagcgccataaagggagtctattcattagccccagggagagagcctcccgctccctccctccccgccccccaccccaccccacccttaggagctgctcaccttcccctcgcctggggcacacacctgcttctccagggaccagacctgaagtgcaggaaggagccccgcggccttctgttaccgcagcgctctgcctgccatcgttgaatgtgtggactctttggttgctttcataaattctgttttatttcctcatcatgtttgctgaaagcttgaatgtatccacttggctgttttccaagtattctcatgtgcattttaagagtctcctgtctttaaaataatgtggaggcagctctgaatatactaaaaccattgawttgtacccttcagatgggtgattttgtggtatgtgaattttatttcaatgaagctgttaacagaaatagtacagagtccgtactgttgtgttttctggagcacctggagtcccctctgtccctggccatccctccttccccacacctcacccctgtacctcaccttccccacccccctgcctcacccctgcacctcaccctccccacgcttcccgtatcagggagcttcttaaacacagaatggggtgttaagatgattggagggcagcagcctattggaatcccgatgaacgtggaaaggtgtcagggaggggtagctgtggtgtggaggagccccacattttcgtccctgtcttgtcacaaagaaggagcccatcgctgtgattagaaggacttaggccgggcatggtggctcacacctgtaatcccagcactttggcaggctgaggcaggtggattacctgaggtcaggagttcaagaccag

SEQ ID NO: 33643 - DNA, 1094 bp, Homo sapiens
gtcagggcttgagggtgtccccatgggggctggtgttacccaggacactgcagcggctagcagggcttggctgggctggcgaatgagggccccacttctcttttttgtacagggaagggaccgaggatctgagtgacatctgtaggtcagagggcatgctgaccttgaaagcaaggtgggaatggagttctatgagctgaggagtcccagctggctcgcattctagagaagcgccataaagggagtctattcattagccccagggagagagcctcccgctccctccctccccgccccccaccccaccccacccttaggagctgctcaccttcccctcgcctggggcacacacctgcttctccagggaccagacctgaagtgcaggaaggagccccgcggccttctgttaccgcagcgctctgcctgccatcgttgaatgtgtggactctttggttgctttcataaattctgttttatttcctcatcatgtttgctgaaagcttgaatgtatccacttggctgttttccaagtattctcatgtgcattttaagagtctcctgtctttaaaataatgtggaggcagctctgaatatactaaaaccattgaattgtacccttcagatgggtgattttgtggtatgtgaattttatttcaatgaagctgttaacagaaatagtacagagtccgtactgttgtgttttctggagcacctggagtcccctctgtccctggccatccctccttccccacacctcacccctgtacctcaccttccccacccccctgcctcacccctgcacctcaccctccccaygcttcccgtatcagggagcttcttaaacacagaatggggtgttaagatgattggagggcagcagcctattggaatcccgatgaacgtggaaaggtgtcagggaggggtagctgtggtgtggaggagccccacattttcgtccctgtcttgtcacaaagaaggagcccatcgctgtgattagaaggacttaggccgggcatggtggctcacacctgtaatcccagcactttggcaggctgaggcaggtggattacctgaggtcaggagttcaagaccag

SEQ ID NO: 33644 - DNA, 733 bp, Homo sapiens
tcccctgactcgctgagcctttcctggaccgtcccccagggccgctttgactccttcaccgtgcagtacaaggacagggacgggcggccccaggcggtgcgtgttgggggccaggagagcaaggtcactgtgaggggcctggagcctgggcgcaagtacaagatgcacctgtacggcctccacgaggggcggcgcctrggcccggtgtctgccgtgggcgtcacaggtgagtgagtgtgggtggggcagggttggaagacagccctagaaaatgtgcccttctctaccattttcctatacatatttctgtcttgatggggctcacagtgaaaggaatatagcaacattatggaaagacatgtcatggagagacaggctgcaatccagcaaatgaagcaaaggcgggtgagcatgtgatagggaggcccagggctcaggtcaggaccagacagggacgcctaagtcaccctgcccatgggtacccaggggacagccaggacctgagtccaggcatgccttagcttggtgacagctttagagagaaggtgaagtgtgtcagataatcacagctggtgcaaaggccaggaggctagaaagagcatggcacgtgagaggcactgaggattgagtggggtgtcctttacggtgagtatctcatcctgaagtgtgggagcagaggaggggaccactcaccaggcctggggtctcccagggatgaggatgtggttgccca

SEQ ID NO: 33645 - DNA, 733 bp, Homo sapiens
tcccctgactcgctgagcctttcctggaccgtcccccagggccgctttgactccttcaccgtgcagtacaaggacagggacgggcggccccaggcggtgcgtgttgggggccaggagagcaaggtcactgtgaggggcctggagcctgggcgcaagtacaagatgcacctgtacggcctccacgaggggcggcgcctaggcccggtgtctgccgtgggcgtcacaggtgagtgagtgtgggtggggcagggttggaagacagccctagaaaatgtgcccttctctaccattttcctatacatatttctgtcttgatggggctcacagtgaaaggaatatagcaacattatggaaagacatgtcatggagagacaggctgcaatccagcaaatgaagcaaaggcgggtgagcatgtgatagggaggcccagggctcaggtcaggaccagacagggacgcctaagtcaccctgcccatgggtacccaggggacagccaggacctgagkccaggcatgccttagcttggtgacagctttagagagaaggtgaagtgtgtcagataatcacagctggtgcaaaggccaggaggctagaaagagcatggcacgtgagaggcactgaggattgagtggggtgtcctttacggtgagtatctcatcctgaagtgtgggagcagaggaggggaccactcaccaggcctggggtctcccagggatgaggatgtggttgccca

SEQ ID NO: 33646 - DNA, 506 bp, Homo sapiens
atcccagcagacttcaaacaagttaccaaaataatgcatttgatcaaattcccaagaaccgtttaagttcacatctggtaactaatagaataaatcrgaaacaacaaaataacagcaacaacaaaaaccatgatcatagtccaaagacatgccaagaattgcacaaatatccaaaaaatataagacactagggagcattctttctgaaaaacagatctcggaacttctgtttccaaatagtcgattaaagatcctgacagacttttctgctaacagtcatttctgctaaaatggagggtaatatttagagtatcattttaaacatatctataacctgtcaaagaagtaagaaattttaagattctagtaactaagggaaagagggaatacagagcaattagccaaactaagagcaacttacattttgaaggctgattctaggttaactggaacttcagttttcaaggcctaacaagctatagaagacaggagacaaagaccagggc

SEQ ID NO: 33647 - DNA, 506 bp, Homo sapiens
atcccagcagacttcaaacaagttaccaaaataatgcatttgatcaaattcccaagaaccgtttaagttcacatctggtaactaatagaataaatcggaaacaacaaaataacagcaacaacaaaaaccatgatcatagtccaaagacatgccaagaattgcacaaatatccaaaaaatataagacactagggagcattctttctgaaaaacagatctcggaacttctgtttccaaatagtcgattaaagatcctgacagacttttctgctaacagtcatttctgctaaaatggagggtaatatttagagtatcattttaaacatatctataacctgtcaaagaagtaagaaattttaagattctagtaactaagggaaagagggaatacagagcaattagccaaactaagagcaacttacattytgaaggctgattctaggttaactggaacttcagttttcaaggcctaacaagctatagaagacaggagacaaagaccagggc

SEQ ID NO: 33648 - DNA, 498 bp, Homo sapiens
catagctcttgcagagacagggtgaaaaatagacctaaaagactaaccactgactgctaatagtcagcaggcaggtgattggtgttagagtgatttaagaacctgatattgtttacaatgttgataaagatattaattaaatgtaaactttgataagttaggtatacatgctaaaatgattaargtaaccaatcagaataccagtataacagacaaccttccaacaagtagaaaatatggaataagaaaaatatttcacctatctaaagaaaggaagaaaagattacaaaagaaacatagaaaaggtgggagaaaagaaaggacaaaatcaggtgatagtaataatccagatttatcagtaataacaagtgcaaaaaggctaaaagaatgcaaaaataatgtctctactatttcagctacatttttaaaaaagataatgcataatatcatcaaaatatgttacctagtaataaatctagcaaaatttaggtaagagct

SEQ ID NO: 33649 - DNA, 886 bp, Homo sapiens
aaaagaaaaaacaaaaaacacaacaacacatatacacacatacttgtgcacctatgcatatgcacatatctgcatgcaaggattaaaacagaaacatgtagagacatacacacagccactccccgcccacacagacactaacaccaacacatgcatgccccccccgacacacacaaacataggcatgtgtgctcactccaggatgggtctgagtaaaaagaaaccatctctgacctagctaattttcttcttcaacttgttgttcttggcttcttcactcasgaataatcccaatcaaatgcaagaagtgtgtgagtcactaaacagggcacttaattttggttgtcttatattacatatttataccatggagattctggctactttttaaaaagtagttttaaaaggtataggtttggttctgaagtggtgttactggtgagaaagggtataggaaaactatgtacagagtcacctctcatgggatcttattctaagtgaggtgtgtgccttttaaaaatcagtcactctctataaattcagagtaattgtttttgaaatctaagctggctttttttttttttgcacaaattgacacactgattccaaaattcatgtacaaatacaagaaacccagaaaaaccaaaacaatcttaaagaagagcaaagttggaggactctcatttcctgagatcaaaagagtgtggtactgacataagggcaggcatatagacaaaacagtgtggtaacaatgtaagggcaggcatatagacaaaaggaataaaattgagtgttcagaaataaacacttatatttaccttcaattaatttttgacaagagtgtcaagaccacgcaacagagaaaagtggtttttcaaacaaatga

SEQ ID NO: 33650 - DNA, 796 bp, Homo sapiens
tagaagcattttaactttcaaagctctttcacagctatttcttttttaaaaaagtttgttggtaatcttttgtggaatcaggtttaaaaataaagctgatacctctccctccccattttattttacttatttatttttttgagacagagtctcattcctcgcacaggctggagtgcagtggcgcaatctcggctcctgcaacctccgcctcccatgttcaagcaattctcctgcctcagcctcccaagtagctgggactacaggcacccgccatcatggctggctaaattttttgtwtttttagtagagacggggttttaccatattgattaggctgttctccaactcctgacctcaaagatccacctgccttggcgtctgaaagtgctgggattacaggcgtgagccaccgcaactggcctctctgcctccccattttaaaagtaatagaatttcactttcacttctttttaacctgggtttacatgatcattacagaaaatttagaaaagatggaaaaatagaaagaaaagaagaagaattccattcctccctctgccctgaccacgtgcacatcccaccgcatcaagaaaaccatgactcatactgtggtaaattttatttccagatgatgttcttggaaaagctttggtttgcttgctggacagacctgtgatcacaatgcacatccaacttcgcactgccttttctcttttaacataacaaaatcatttttccatattggataaggttgcatattatctccactaagatgtggcattataatttgtttacc

SEQ ID NO: 33651 - DNA, 796 bp, Homo sapiens
tagaagcattttaactttcaaagctctttcacagctatttcttttttaaaaaagtttgttggtaatcttttgtggaatcaggtttaaaaataaagctgatacctctccctccccattttattttacttatttatttttttgagacagagtctcattcctcgcacaggctggagtgcagtggcgcaatctcggctcctgcaacctccgcctcccatgttcaagcaattctcctgcctcagcctcccaagtagctgggactacaggcacccgccatcatggctggctaaattttttgtatttttagtagagacggggttttaccatattgattaggctgttctccaactcctgacctcaaagatccacctgccttggcgtctgaaagtgctgggattacaggcgtgagccaccgcaactggcctctctgcctccccattttaaaagtaatagaatttcactttcacttctttttaacctgggtttacatgatcattacagaaaatttagaaaagatggaaaaatagaaagaaaagaagaagaattccattcctccctctgccctgaccacgtgcacatcccaccgcatcaagaaaaccatgactcatactgtggtaaattttatttccagatgatgttcttggaaaagctttggtttgcttgctggacagacctgtgatcacaatgcacatccaacttcgcactgccttttctcttttaacatarcaaaatcatttttccatattggataaggttgcatattatctccactaagatgtggcattataatttgtttacc

SEQ ID NO: 33652 - DNA, 1163 bp, Homo sapiens
gtacagcctatgagtataaaaaaaggagtagagaatcactttgcagcaatattttgagttggcacgcatatgcacatactcacatatcaaaaactcaaggcccatgagaaacattacccttttgctctcgaggttacagactgcttatgagggaatgaggacattttgatatgctaagaaactctattgaagacagaagccattaaataaatcagtgtaaggttaagaacaaaactgtcaattggagcacagtttaatttgctgctatgatgacatcrgccagttcatgaacttgaaccctgacaggtataatcttttaccttgtatttgttttggaaattttacagaagaaaaaattaaaataatgatgtgatgaattgctatgtaatgacacatgagctatgctgtcaaaacatttaaaagataaagtatatacatacagacaggtatcggtttggatcctaactctgctgcttcccagctgtgtgatcctagtcaagatagtgacctttctgagacttatttactaggcaattttttaaaaaaaaatggagtcttactctaccgcccaggttggaatgcagtggcgttatctcggctcattgcagcctctgcctcccaggttcaagcaatcctcccacctcagcctcccaagtagctggcctgactaatttttgtattgttagtagagatggggttttgccatgttggccaggctggtctcaaactcctggcctcaagtgatctgcccacttcacctcccaaagggctgggattataggcatgagccaccagtcacctcacagggttgtgcttaacctcacagggttgtggtgggcctctaatgagtttaaatatgcaaagcagctagtcatgcacttagcacacagcagtaactcaatatatatcagtgccatttgccttcccttgaaaatccctattgaaaattaatctccatacagcaaggatattttatgatctataacataaatattttatatgtaataattgcaattagtagtttcatattatttcaccatatctactttgttacatagttgtggttaccccagatcttgtgcttcttaatagtatgtgcagaaactcacccacacaaaatggattattttgtggctgatttaataagatttgcacaaagttac

SEQ ID NO: 33653 - DNA, 587 bp, Homo sapiens
acttgctttagacgtggttttaatgctgagtgctacttacatgagaggctgacagytccctcagccttctctgaaacgatgctggaatcactggctgagcaccacggactcagcatgtgacctgctgaaattctgggccagggtaggcagctgtgtgtcatctccatctccagggtggccaagccctgggagggaaaggatgtgattccggaacaaagctcctgacaccgatgggcctcatgatgccgaaaggcataagggaggtggccgacggccgggctgtgtgtccacaggctaccacccctcctgcccaggccagtcttgcctcctctccacagaccttgttgtgtaacctggaaggaggaatgaagaggaaaaagctaacattaaattttaacacagacacaggagaacacacacacacacacacacacatgcacacacaaggacacaagcccactgctgttcaaatctcagtcgccccagcctactcctcatttggaaaaatcacatccatccttgtcttgtggcatgccttctgggtttggtcatatttatttgtctgtcacaagttcttcttggaggat

SEQ ID NO: 33654 - DNA, 587 bp, Homo sapiens
acttgctttagacgtggttttaatgctgagtgctacttacatgagaggctgacagttccctcagccttctctgaaacgatgctggaatcactggctgagcaccacggactcagcatgtgacctgctgaaattctgggccagggtaggcagctgtgtgtcatctccatctccagggtggccaagccctgggagggaaaggatgtgattccggaacaaagctcctgacaccgatgggcctcatgatgccgaarggcataagggaggtggccgacggccgggctgtgtgtccacaggctaccacccctcctgcccaggccagtcttgcctcctctccacagaccttgttgtgtaacctggaaggaggaatgaagaggaaaaagctaacattaaattttaacacagacacaggagaacacacacacacacacacacacatgcacacacaaggacacaagcccactgctgttcaaatctcagtcgccccagcctactcctcatttggaaaaatcacatccatccttgtcttgtggcatgccttctgggtttggtcatatttatttgtctgtcacaagttcttcttggaggat

SEQ ID NO: 33655 - DNA, 587 bp, Homo sapiens
acttgctttagacgtggttttaatgctgagtgctacttacatgagaggctgacagttccctcagccttctctgaaacgatgctggaatcactggctgagcaccacggactcagcatgtgacctgctgaaattctgggccagggtaggcagctgtgtgtcatctccatctccagggtggccaagccctgggagggaaaggatgtgattccggaacaaagctcctgacaccgatgggcctcatgatgccgaaaggcataagggaggtggccgacggccgggctgtgtgtccacaggctaccacccctcctgcccaggccagtcttgcctcctctccacagaccttgttgtgtaacctggaaggaggaatgaagaggaaaaagctaacrttaaattttaacacagacacaggagaacacacacacacacacacacacatgcacacacaaggacacaagcccactgctgttcaaatctcagtcgccccagcctactcctcatttggaaaaatcacatccatccttgtcttgtggcatgccttctgggtttggtcatatttatttgtctgtcacaagttcttcttggaggat

SEQ ID NO: 33656 - DNA, 618 bp, Homo sapiens
taagtgctttgcaagtattaaatcattgaaccctcataacaatcttataaggtatgttcactaccgttcacatcttatagattaaaagactgaggcacagagagcttatgcactcattttacaggtgaaaaaactgggacacaaagtagttttcccaacatcaaaccactagctagcagcaaagcagaatttaaatcccagtagtcaggactcagcctgtttttttaacttctaaactaaactacctcaatttgtagtttcatttattttaaaaaacaatgtactggtgaaccaaataattcttgctatttactagtcaatagattgataataaaatagagattataacttagggataattttcctgcttgctttgaatctcatatcttctttaagagaattgattccatggccaaagacaatcttgattttcccaatacccattatgaaaatgatttttataattataatgtgaagtcaggtgagagagtgtagaagaaaccatatagttttgtatttattctaaaagaaaaattcataaaaacatgccaaggtttttaaatgacaacattgagatatgaagaggatttagttttcctacactaacaccaatcmatc

SEQ ID NO: 33657 - DNA, 548 bp, Homo sapiens
cccagaagctcttttccagaattgttttctactctgagcacctactctgggtggtctttacttgcctcgagttcctttatcttaaggatgattcaagagaatccctgacccccaaacctagtatctgcaattctgagaggtggcgatctttaaccaatcatctgtttatcaagttttgagcaaaagtattttgaatggacatgagaattaggcagtaaaataatgtagactgaacaaaaaatgcttgggggagaaaaaagccggagaatgagttgtgtggctatcactggaaggaaagaaagggtccaatgtatagatctgattcatctccaaatattttcccactaaagactgtggaagtaaatatattgatggactctgtaatcactgatttaaaaygtgtgatttataattacaagtttcaggtgatttctgagaatgctttttctcttctgagtgtaccaaaaagaaccccacaaaattacaagtactaatatgttttctctttgaaccttgtctcaatggtgttcaaaaactttgatgcaatt

SEQ ID NO: 33658 - DNA, 460 bp, Homo sapiens
aaaatgccaactccaactcaccttcttggtggcctcttagcatcagagaaggctacttcctgacaaaagcaattgtgttctctgtttcatcttggcttccttatgacccctttcagacttatcaggactgtgtgccactcctcagactgggctgagtcaggaamccagccggctctccatgcctgtcctccacatggcatcagaagggaggaagctacatgtggttccaatcactgcattacagactcagcctttatgcccttcattgtgtttggtttggaggccccctcgcagactttatccactagctcggttcttatgttaaatttatgtctgggttcagaacacttcacatgataaccactgattaaaatccaaaaaatgagacagaaagaagacaggataagaaggatgacacattcgaaaataagtgatcttaattcctgggctcaacattctc

SEQ ID NO: 33659 - DNA, 532 bp, Homo sapiens
tcatcacatttcttagaaaccacatatttcagtaagattgaaccataaataggagatgtctttcaaatggtcctcataaccccaataaaggaaattatctctgatcatggggtttcaaaataacaggtgcaaatgacattcataaatttagtaatttaaatccctgattccaaatactaattttgaacttgtcgttaaccattgttttaatttattattgttagaatttttgaaccatttctgtcttctttcccaccgcccccrtccagcctcttgtggaggtgctaatggcatgtctgggatgcagccgaaaggaaggcagtgggagaggagaaggaacaggaggcaggagaaatccactaattggacaatcagcactgattaattgaaagttaattgtgatagtcctttttctaggagtgtcacaattaatcttttatgagaatttctaaggttctttccagctcggaagagtcatgattccacgaggtgcaggtctccactgactcatctgtggcccccagagcttgct

SEQ ID NO: 33660 - DNA, 502 bp, Homo sapiens
tcagagttgctcagtgaggcaggcaaagcaaagaaaagggaaggtagtgcctcccytaagtccaggcagcctcacccatggcaggacagaggagaaggcaccctgcaggacagaagaaagagtatctttttgatggtgtaagtctactggaatgctaattgcacatgtggattagacactatttttaccacccccccccaaaaaaaaaacccaggttcttttgcttggcaagtaagaaatcaatctccttgagactgtaggtttgatcaacaggagttttattacttggcacaaataagcatgctgttgggagtactctccaaagccatgtctccctgagggaaagtgacaggaggacttcatggggagatggagagaagagaggacgcgtcatggcatgtggaggaggagcctcagtggtgcagacacagcgagtcatcacaccagcacataggttgcatgttatggtgatgaagctgtggctcatcccaggatggagaca

SEQ ID NO: 33661 - DNA, 641 bp, Homo sapiens
gaaagcagaagtgacagaggcagattgttttaaatccaacgccctgagtagaaatttgggcaggaatacctcacccacacccaaaggacaaaacttcctcccccttcctgctggtctcagctgctgatccaaactgaacagagagggagcagggaaaccattactcttcttttttctcacagctcttgccaagatgggaattgattccaattgtgttccagaaagaacactgtctataactcagttcacttcagcctgatgcattcccaaacctttattaagcagccctataaatggcagagtattaaatcctgaagctttccttctttatttgcttcaatccaatgtaaaagcagcactacttsgctttcccttttttccaataatttatttatattttgcctaattctatattctatctaatcagttcctgttagagtagattggattgaagctatgctgtagacttaagcatcatttcccaaattttaataagcatactgaactactgaggatcttgttaaaatacagattctagttccataggtcattggttagggactaagttcttgctttcctaacaagttgagaggggaccaaattgatggtgtgaagctgaggccctaaagccatgcttctca

SEQ ID NO: 33662 - DNA, 641 bp, Homo sapiens
gaaagcagaagtgacagaggcagattgttttaaatccaacgccctgagtagaaatttgggcaggaatacctcacccacacccaaaggacaaaacttcctcccccttcctgctggtctcagctgctgatccaaactgaacagagagggagcagggaaaccattactcttcttttttctcacagctcttgccaagatgggaattgattccaattgtgttccagaaagaacactgtctataactcagttcacttcagcctgatgcattcccaaacctttattaagcagccctataaatggcagagtattaaatcctgaagctttccttctttatttgcttcaatccaatgtaaaagcagcactacttggctttcccytttttccaataatttatttatattttgcctaattctatattctatctaatcagttcctgttagagtagattggattgaagctatgctgtagacttaagcatcatttcccaaattttaataagcatactgaactactgaggatcttgttaaaatacagattctagttccataggtcattggttagggactaagttcttgctttcctaacaagttgagaggggaccaaattgatggtgtgaagctgaggccctaaagccatgcttctca

SEQ ID NO: 33663 - DNA, 533 bp, Homo sapiens
ttgtttgtttttgtttttgtttttgagacagagtctcgctctgtcgctgaggctggagtgcagtggtacgatcttggctcactgcaaactctgcctcccggattcaagcgattctctcgactcrgcctcccaagtagctgggattacaggcgcccaccaccccacccggctaatttttgtatttttggtagagatggggtttcaccatgttggccaggctggtctcgaactcctgacctcaggtgatccgcccacctcggcctcccaaagtgctgggattaccagcatgagccactgcacccggccgtgtttatgcattttaaagctgtctaggaaaagcaaattttctcaggatacatttttatgcatcttaaagctgtttagcaaaatgtacagtccaggccactgccagaagtgaagcgccaaagtgcatgctctgctgataactgcttctgcttattttcccagttcaatagaaataaatatatatattttttttttggtggagggtaaacttcatgctctgttgcaca

SEQ ID NO: 33664 - DNA, 533 bp, Homo sapiens
ttgtttgtttttgtttttgtttttgagacagagtctcgctctgtcgctgaggctggagtgcagtggtacgatcttggctcactgcaaactctgcctcccggattcaagcgattctctcgactcagcctcccaagtagctgggattacaggcgcccaccaccccacccggctaatttttgtatttttggtagagatggggtttcaccatgttggccaggctggtctcgaactcctgacctcaggtgatccgcccacctcggcctcccaaagtgctgggattaccagcatgagccactgcacccggccgtgtttatgcattttaaagctgtctaggaaaagcaaattttctcaggatacatttttatgcatcttaaagctgtttagcaaaatgtacagtccaggccactgccagaagtgaagcgccaaagtgcatgctctgctgataactgcttctgcttattttcccagttcaatagaaataaatatatatattwtttttttggtggagggtaaacttcatgctctgttgcaca

SEQ ID NO: 33665 - DNA, 533 bp, Homo sapiens
ttgtttgtttttgtttttgtttttgagacagagtctcgctctgtcgctgaggctggagtgcagtggtacgatcttggctcactgcaaactctgcctcccggattcaagcgattctctcgactcagcctcccaagtagctgggattacaggcgcccaccaccccacccggctaatttttgtatttttggtagagatggggtttcaccatgttggccaggctggtctcgaactcctgacctcaggtgatccgcccacctcggcctcccaaagtgctgggattaccagcatgagccactgcacccggccgtgtttatgcattttaaagctgtctaggaaaagcaaattttctcaggatacatttttatgcatcttaaagctgtttagcaaaatgtacagtccaggccactgccagaagtgaagcgccaaagtgcatgctctgctgataactgcttctgcttattttcccagttcaatagaaataaatatatatattttttttttggtrgagggtaaacttcatgctctgttgcaca

SEQ ID NO: 33666 - DNA, 554 bp, Homo sapiens
gggtcttaaatgacatacctagcaattacatttttctataaaatagtaaccagaaaaggtaaaagccacacatttgcctgataatctccagaaatgtaattatagaagtcctagattctgccacaacatcaacaatgtgaagtaatgattttttcaaaaaaggatcagtcagtaagatgtgctacagactgctatatgctacagtgtttaagttaataaaccatgtttgatctagtaaattatttgatgtttattatattatattctaaaacaccacagatttttttctctaaatatttgatgctcagaaaaatatcagtactayatagtactttctatatgttattcaaaaccgtccccatacaagaccactcataatttgcacatgtaaaataactgattgcattgaatcactgtgacttttacatatatagtgggtagtactggctgtctaccagcatcctttcccatcttcctatgtactttcttgattgacttcacaaatgagcatattccattcccccagcctcagttactagttgaaatacgacctt

SEQ ID NO: 33667 - DNA, 554 bp, Homo sapiens
gggtcttaaatgacatacctagcaattacatttttctataaaatagtaaccagaaaaggtaaaagccacacatttgcctgataatctccagaaatgtaattatagaagtcctagattctgccacaacatcaacaatgtgaagtaatgattttttcaaaaaaggatcagtcagtaagatgtgctacagactgctatatgctacagtgtttaagttaataaaccatgtttgatctagtaaattatttgatgtttattatattatattctaaaacaccacagatttttttctctaaatatttgatgctcagaaaaatatcagtactatatagtactttctatatgttattcaaaacygtccccatacaagaccactcataatttgcacatgtaaaataactgattgcattgaatcactgtgacttttacatatatagtgggtagtactggctgtctaccagcatcctttcccatcttcctatgtactttcttgattgacttcacaaatgagcatattccattcccccagcctcagttactagttgaaatacgacctt

SEQ ID NO: 33668 - DNA, 554 bp, Homo sapiens
gggtcttaaatgacatacctagcaattacatttttctataaaatagtaaccagaaaaggtaaaagccacacatttgcctgataatctccagaaatgtaattatagaagtcctagattctgccacaacatcaacaatgtgaagtaatgattttttcaaaaaaggatcagtcagtaagatgtgctacagactgctatatgctacagtgtttaagttaataaaccatgtttgatctagtaaattatttgatgtttattatattatattctaaaacaccacagatttttttctctaaatatttgatgctcagaaaaatatcagtactatatagtactttctatatgttattcaaaaccgtccccatacaagaccactcataatttgcacatgtaaaataactgaytgcattgaatcactgtgacttttacatatatagtgggtagtactggctgtctaccagcatcctttcccatcttcctatgtactttcttgattgacttcacaaatgagcatattccattcccccagcctcagttactagttgaaatacgacctt

SEQ ID NO: 33669 - DNA, 915 bp, Homo sapiens
tgaaaataagcaggaacaggtgattttcaaggctgacttaggtctcctattcagctactcaacaattatatccgagctacgtgcagtggctcaccctgtaatcccagcactttggaggctgagacaagaggcgaaaagttcgagaccagcctgggcaacctagcgagacaccatctctatgaaaaatttaaaaattagcctagcatgtgtcttgtgcctgtggtcccagctactcaggaggctgaggtgagaggatcacttgagccccagaggttgaggttacagtgagctgtgatcacaccactgcactccagtctgggtgacagagtgagacactgtctcaagaaaaaacaaaaattaaaacaaacaataacaacaacaacaacaacaaaaaaaaacggcaaagttagaacacacaaaagatagtatagttccttacccatccaccacttggttttgaggagaaaagggaagtaagaagagttgaagagaagaaaaacagaacagaagagtgggaaaggaagatgaaagggtgctatggagtactatgcacctgtttagaagtggggaagtagcacaaacactagcaaaagaagaaccaccatggagttcctccttgcacatctctctcccctcctgaaggcctagggtgagcccacagcattgttccagcagtgagggagtcttcactgccycctgagactctctcacggctcttaagatacctccctgaagtccctccaaagaattcaatgtgcccctagtctaaatcagtttcctccatcataaatactcatagatgacgcaacaataaagcgttaataacgataatggcaattttgtgtgtcaaacattgtattaagcattttacctgctttattgtttgtaatgcttcaacagcttatgagaaggtat

SEQ ID NO: 33670 - DNA, 572 bp, Homo sapiens
gaatgaaggaggaaatytacaaacccttcagtccaaatcatacttctgtgaattttttacatctgcctgggtccaacgtgctgagagcgggctcaggttgccacaggcatggctggagactaggaatagagccttgctcactgacccatttcatgtctaggcttccaactgagactacagtttcattacaacctatatgcgcccataggtcctgcctgcggcaatgacgtctctcgggtcagtaaggggcacttggaacaggaatatcacccctatctggaagaacaggtggaggcttatcaccttcacagtaaggtactcactgtccacgtcaagagccaagccaaggtactgttcctccaatgagtaaacagcactgctgtagggctggcctaagtcaggcagttcaagataacctgaaggagtcgaataacatctatccagtgagtcctgcaagacttcaggctctttctcatccagcagctccctgctgagcctggaaaagtaggaaaaagtaaagaataagccagggggaatcagaaaccacacagccccagctagatttcatggct

SEQ ID NO: 33671 - DNA, 572 bp, Homo sapiens
gaatgaaggaggaaatctacaaacccttcagtccaaatcatacttctgtgaattttttacatctgcctgggtccaacgtgctgagagcgggctcaggttgccacaggcatggctggagactaggaatagagccttgctcactgacccatttcatgtctaggcttccaactgagactacagtttcattacaacctatatgcgcccataggtcctgcctgcggcaatgacgtctctcgggtcagtaaggggcacttggaacaggaatatcacccctatctggaagamcaggtggaggcttatcaccttcacagtaaggtactcactgtccacgtcaagagccaagccaaggtactgttcctccaatgagtaaacagcactgctgtagggctggcctaagtcaggcagttcaagataacctgaaggagtcgaataacatctatccagtgagtcctgcaagacttcaggctctttctcatccagcagctccctgctgagcctggaaaagtaggaaaaagtaaagaataagccagggggaatcagaaaccacacagccccagctagatttcatggct

SEQ ID NO: 33672 - DNA, 899 bp, Homo sapiens
atcccctcctcagtttcagaattctctagctttaagttaggggagggttaccccaaagtcagagagggtacatgggagagggttgtgaaggccagtagcccagagaaaatcaagggcagctgggtgcatttaggtggataagaaaacaatgaattactccatcaaaagcaaaagcacaagcacatagtaaagttgatcaccyactgttaatgtcaattcagtttaaagcactttattaaccacacatacatattttccagtgtctaattctcatcgtgttcttttccattccagacttccctgtctctttcccagagctctgttcctcttctcactgtttctacaaaagggacaataaacaattttctagccactcatcatcataaaccctgacatgctaaattatcccctgctcagtttatggaccacagtgggcccataaaactcctccctcactagcaacccaccccacacaaaattctcacttccctttttccttgcgcttcctaaaaaaagcaattgagccacacccactacctcctgtgctaggggtttgtcccctaatcctgggacactagggagctccttacctggaaggcagttgcactcaaaagtgaagtcaccagtctgccgacaggtgcctccattgacacaaggcgagggtgcacagggcacatacaggctgtcacagtactggcctgtgaagccctgaaggcactggcactggtaggaaccaggcaggttgaggcaggtgccaccatgctggcagtgtcctggaatgtcacactcattgacatcagtctcacacttctgccctgtgaagcctgtgaggcatttgcaggagaactggttggccacagtggtacaggtacttccatttgcacagggatgagacaggc

SEQ ID NO: 33673 - DNA, 1134 bp, Homo sapiens
tagggtaagaactgtactgtgtctcttttttaatatccctcacagtgcccatcaccctctaggtgcacagataattcaatatacacttatgtaaatgaattgttccacaactcacactttcagctagcccctcacagatgcataagaaagcaaagaacaaccaaagagaaggaacaatatatttaaacaagataaggggaatgaaaaagaatcttgtgtttaaaarggatagaaaggtctaaccatcttctatcccaaacaactggccaacatgagagcctgttttcttgagcatagaatggtggtaggtatttcagcctcgatggaatctgacctgctgattagttatacaaggctaaaactgactgaagtgtgtatgtaagacaacggtctgggaagagaagcactaaatttaagctcacagggaatcaaccacttaaaaaggtaaattcagatagaactttatccagatttcatttttatgcatcctctctacaagcataaacgcttatcttactcacttcccatctcatgatgctatcatcaattcttataaaatttagaaaagaataggtgatgtctcctaattagagagtctgcttctgtcacaaactgtgacagtcagtgtcagcctttgcctggaagaaaatgagtcactttttcattagtaatcaagttatgtctattttttaagagtgacccagaaattcaaggccatgagtttcagcaatacgagacagagaatcagacaccacaaacattgtatacaaatagaattaagacagaaaaattaaagtcaaggaggtacagagttacttttcaggatgactgaggtttcagaaagggcaagttgccccgtaaaatattctcaagatgtgtctggcttacacaacaagaaccagtatttcaaaatcttaaagtgacaggcagttaaacgactaaggcactaccatcgtctaggcaagagaatcttaaccaccatcaaatgttttccacacagaataggcagacctagtttattctggaaaattgagggtttggatatgtactatataatcagaggaaacaagcagtaaaggacctgagctaatttggggtaaccaaagacttggctaacagatgcttccttactct

SEQ ID NO: 33674 - DNA, 1134 bp, Homo sapiens
tagggtaagaactgtactgtgtctcttttttaatatccctcacagtgcccatcaccctctaggtgcacagataattcaatatacacttatgtaaatgaattgttccacaactcacactttcagctagcccctcacagatgcataagaaagcaaagaacaaccaaagagaaggaacaatatatttaaacaagataaggggaatgaaaaagaatcttgtgtttaaaaaggatagaaaggtctaaccatcttctatcccaaacaactggccaacatgagagcctgttttcttgagcatagaatggtggtaggtatttcagcctcgatggaatctgacctgctgattagttatacaaggctaaaactgactgaagtgtgtatgtaagacaacggtctgggaagagaagcactaaatttaagctcacagggaatcaaccacttaaaaaggtaaattcagatagaactttatccagatttcatttttatgcatcctctctacaagcataaacgcttatcttactcacttcccatctcatgatgctatcatcaattcttataaaatttagaaaagaataggtgatgtctcctaattagagagtctgcttctgtcacaaactgtgacagtcagtgtcagcctttgcctggaagaaaatgagtcactttttcattagtaatcaagttatgtctattttttaagagtgacccagaaattcaaggccatgagtttcagcaatacgagacagagaatcagacaccacaaacattgtatacaaatagaattaagacagaaaaattaaagtcaaggaggtacagagttacttttcaggatgactgaggtttcagaaagggcaagttgccccgtaaaatattctcaagatgtgtctggcttacacaacragaaccagtatttcaaaatcttaaagtgacaggcagttaaacgactaaggcactaccatcgtctaggcaagagaatcttaaccaccatcaaatgttttccacacagaataggcagacctagtttattctggaaaattgagggtttggatatgtactatataatcagaggaaacaagcagtaaaggacctgagctaatttggggtaaccaaagacttggctaacagatgcttccttactct

SEQ ID NO: 33675 - DNA, 750 bp, Homo sapiens
atccatagaactcacacgcagacttctttgtcctaccaccactgggtcatacaggatgcattttttctacagatacaaaccacatcrgcatgtgtgtgtgtgagaaacctgaatttcctttgtttcactgaagcatatgctatacatcactccagtaatgatgttgctcaagcctgctgcttcccagatccatggcattttgttttagtaatggtagtgtgtctggaattagtgggttcttggtctcactgacttcaagaatgaagccgcggaccctcgcggtgagtgttacagttcttaaaggtgatgcatctggagtttgttccttctgatgttcacacgtttggagcttcttccttctggtgggttcgtggtctcactggcttcaggagtgaagctgcagaccttcagtgagtgtcacagctcttaaggtgggatgtctggtgttgttcgttcctcccatctggagttgttcgttcctcccatctggagttgttcgttcctcttagtgggttcgtggtctcactggctggcctcaagagtgaagctgcagacctctgcagtgagtgttacagctcataaatgcagtgtggaaccaaagagtgagcagcagcaagatttattgcaaagagggaaagaacagtgtagaactggacccccgagggttgccactgctggctggggcagcctgcgtttatcccttatctggccccacgcacatcctgctgattggtccattttacagaaagc

SEQ ID NO: 33676 - DNA, 750 bp, Homo sapiens
atccatagaactcacacgcagacttctttgtcctaccaccactgggtcatacaggatgcattttttctacagatacaaaccacatcagcatgtgtgtgtgtgagaaacctgaatttcctttgtttcactgaagcwtatgctatacatcactccagtaatgatgttgctcaagcctgctgcttcccagatccatggcattttgttttagtaatggtagtgtgtctggaattagtgggttcttggtctcactgacttcaagaatgaagccgcggaccctcgcggtgagtgttacagttcttaaaggtgatgcatctggagtttgttccttctgatgttcacacgtttggagcttcttccttctggtgggttcgtggtctcactggcttcaggagtgaagctgcagaccttcagtgagtgtcacagctcttaaggtgggatgtctggtgttgttcgttcctcccatctggagttgttcgttcctcccatctggagttgttcgttcctcttagtgggttcgtggtctcactggctggcctcaagagtgaagctgcagacctctgcagtgagtgttacagctcataaatgcagtgtggaaccaaagagtgagcagcagcaagatttattgcaaagagggaaagaacagtgtagaactggacccccgagggttgccactgctggctggggcagcctgcgtttatcccttatctggccccacgcacatcctgctgattggtccattttacagaaagc

SEQ ID NO: 33677 - DNA, 750 bp, Homo sapiens
atccatagaactcacacgcagacttctttgtcctaccaccactgggtcatacaggatgcattttttctacagatacaaaccacatcagcatgtgtgtgtgtgagaaacctgaatttcctttgtttcactgaagcatatgctatacatcactccagtaatgatgttgctcaagcctgctgcttcccagatccatggcattttgttttagtaatggtagtgtgtctggaattrgtgggttcttggtctcactgacttcaagaatgaagccgcggaccctcgcggtgagtgttacagttcttaaaggtgatgcatctggagtttgttccttctgatgttcacacgtttggagcttcttccttctggtgggttcgtggtctcactggcttcaggagtgaagctgcagaccttcagtgagtgtcacagctcttaaggtgggatgtctggtgttgttcgttcctcccatctggagttgttcgttcctcccatctggagttgttcgttcctcttagtgggttcgtggtctcactggctggcctcaagagtgaagctgcagacctctgcagtgagtgttacagctcataaatgcagtgtggaaccaaagagtgagcagcagcaagatttattgcaaagagggaaagaacagtgtagaactggacccccgagggttgccactgctggctggggcagcctgcgtttatcccttatctggccccacgcacatcctgctgattggtccattttacagaaagc

SEQ ID NO: 33678 - DNA, 750 bp, Homo sapiens
atccatagaactcacacgcagacttctttgtcctaccaccactgggtcatacaggatgcattttttctacagatacaaaccacatcagcatgtgtgtgtgtgagaaacctgaatttcctttgtttcactgaagcatatgctatacatcactccagtaatgatgttgctcaagcctgctgcttcccagatccatggcattttgttttagtaatggtagtgtgtctggaattagtgggttcttggtctcactgacttcaagaatgaagccgcrgaccctcgcggtgagtgttacagttcttaaaggtgatgcatctggagtttgttccttctgatgttcacacgtttggagcttcttccttctggtgggttcgtggtctcactggcttcaggagtgaagctgcagaccttcagtgagtgtcacagctcttaaggtgggatgtctggtgttgttcgttcctcccatctggagttgttcgttcctcccatctggagttgttcgttcctcttagtgggttcgtggtctcactggctggcctcaagagtgaagctgcagacctctgcagtgagtgttacagctcataaatgcagtgtggaaccaaagagtgagcagcagcaagatttattgcaaagagggaaagaacagtgtagaactggacccccgagggttgccactgctggctggggcagcctgcgtttatcccttatctggccccacgcacatcctgctgattggtccattttacagaaagc

SEQ ID NO: 33679 - DNA, 627 bp, Homo sapiens
aacatcaattgtgaattacaagtatattacacatatacatttatgtttacctcgatattataacttgtattgatacagccttatctaagaagtgacaaactaatattttataaattgcaaaagtatctctcccacctctcccctcatctcatactgccttatttttgttgcatgaggtttttttcctgccaaatgagttagaagagtggaagagatggaaatgtagtttgcatatacagaaaaattaggtattgaaacgtatgtacacatactatatatataacatataygtatcttgtgctgtaagaataaagtgtgggcaatttatcctagcacatactttcactgtaaggaaaatatcattggggagattcaactgcaaaagtctgatctcacatttctgagattattttttgatctgatgactatgagaacaacacaaaagttcaaagtgtggaaagtttatagagcctttggggtgtcattttcttgggaatgagtaggctccaaagaagctagaactttctgggttgagacataactcctctgtagtcttcacgctgaccaactatgaagagggcatcacgacacctgacttctggccagcttcttgttttttccttatta

SEQ ID NO: 33680 - DNA, 627 bp, Homo sapiens
aacatcaattgtgaattacaagtatattacacatatacatttatgtttacctcgatattataacttgtattgatacagccttatctaagaagtgacaaactaatattttataaattgcaaaagtatctctcccacctctcccctcatctcatactgccttatttttgttgcatgaggtttttttcctgccaaatgagttagaagagtggaagagatggaaatgtagtttgcatatacagaaaaattaggtattgaaacgtatgtacacatactatatatataacatatatgtatcttgtgctgtaagaataaagtgtgggcaatttatcctagcacatactttcactgtaaggaaaatatcattggggagattcaactgcaaaagtctgatctcacatttctgagattattttttgatctgatgactatgagaacaacacaaaagttcaaagtgtggaaagtttatagagcctttggggtgtcattttcttgggaakgagtaggctccaaagaagctagaactttctgggttgagacataactcctctgtagtcttcacgctgaccaactatgaagagggcatcacgacacctgacttctggccagcttcttgttttttccttatta

SEQ ID NO: 33681 - DNA, 992 bp, Homo sapiens
accctccccagccatgtaggcctggtggctggctcttaacctcccatgccaggtgggggtgcccctgcactactgtccgtcctcaggctggctgctcccactcccatggtccctgtgttcscagcctcaccactggcagaaaaaataagcatcactggttgggcgcggtggctcatgcctgtaataacagcattttgggaggccgaggcaggtggatcacttgaggttaggagttcgagaccagcctggccaacatggtgaaaccacgtctctactaaaaatacaaaattagccaggcatggtggcacatgcctttcaaaaaaaaaaaaagcatcatttcatcattgcatcattgctgggcacagctccttcccaggcaggtctgagcttgttgcccagggtaggttcccaatactcagcaaagcctttgctacttctgtgcttccttacagtgtgggcctcacagagttgttttttttttttttttttatggagtctcactctgtcacccaggctggagtgcagtggcacaaactcggctcactgcaacctgtgcctcccaggttcaagtgattctcctgcctcaccctcccgagtagctgagattataggtgcacaacaccacgcccagctaattttcttttttatttatttatttatttatttatttatttttattgatcattcttgggtgtttctcacagagggggatttggcagggtcaaaggacaatagtggagggaaggtcagcagataaacaagtgaacaaaggtctctggttttcctaggcagaggaccctgcggccttccgcagtgtttgtgtccctgggtacttgagattagggagtggtgatgactcctaacgagcatgctgccttcaagcatctgtttaacaaagcacatcttgcaccgcccttaatccatttaactctgagtggacacagcacatgtttcagagagcacagggtcgggggtaaggtcacagatcaaca

SEQ ID NO: 33682 - DNA, 992 bp, Homo sapiens
accctccccagccatgtaggcctggtggctggctcttaacctcccatgccaggtgggggtgcccctgcactactgtccgtcctcaggctggctgctcccactcccatggtccctgtgttcgcagcctcaccactggcagaaaaaataagcatcactggttgggcgcggtggctcatgcctgtaataacagcattttgggaggccgaggcaggtggatcacttgaggttaggagttcgagaccagcctggccaacatggtgaaaccacgtctctactaaaaatacaaaattagccaggcatggtggcacatgcctttcaaaaaaaaaaaaagcatcatttcatcattgcatcattgctgggcacagctccttcccaggcaggtctgagcttgttgcccagggtaggttcccaatactcagcaaagcctttgctacttctgtgcttccttacagtgtgggcctcayagagttgttttttttttttttttttatggagtctcactctgtcacccaggctggagtgcagtggcacaaactcggctcactgcaacctgtgcctcccaggttcaagtgattctcctgcctcaccctcccgagtagctgagattataggtgcacaacaccacgcccagctaattttcttttttatttatttatttatttatttatttatttttattgatcattcttgggtgtttctcacagagggggatttggcagggtcaaaggacaatagtggagggaaggtcagcagataaacaagtgaacaaaggtctctggttttcctaggcagaggaccctgcggccttccgcagtgtttgtgtccctgggtacttgagattagggagtggtgatgactcctaacgagcatgctgccttcaagcatctgtttaacaaagcacatcttgcaccgcccttaatccatttaactctgagtggacacagcacatgtttcagagagcacagggtcgggggtaaggtcacagatcaaca

SEQ ID NO: 33683 - DNA, 992 bp, Homo sapiens
accctccccagccatgtaggcctggtggctggctcttaacctcccatgccaggtgggggtgcccctgcactactgtccgtcctcaggctggctgctcccactcccatggtccctgtgttcgcagcctcaccactggcagaaaaaataagcatcactggttgggcgcggtggctcatgcctgtaataacagcattttgggaggccgaggcaggtggatcacttgaggttaggagttcgagaccagcctggccaacatggtgaaaccacgtctctactaaaaatacaaaattagccaggcatggtggcacatgcctttcaaaaaaaaaaaaagcatcatttcatcattgcatcattgctgggcacagctccttcccaggcaggtctgagcttgttgcccagggtaggttcccaatactcagcaaagcctttgctacttctgtgcttccttacagtgtgggcctcacagagttgttttttttttttttttttatggagtctcactctgtcacccaggctggagtgcagtggcacaaactcggctcactgcaacctgtgcctcccaggttcaagtgattctcctgcctcaccctcccgagtagctgagattataggtgcacaacaccacgcccagctaattttcttttttatttatttatttatttatttatttatttttattgatcattcttgggtgtttctcacagagggggatttggcagggtcaaaggacaatagtggagggaaggtcagcagataaacaagtgaacaaaggtctctggttttcctaggcagaggaccctgcggccttccgcagtgtttgtgtccctgggtacttgagattagggagtggtgatgactcytaacgagcatgctgccttcaagcatctgtttaacaaagcacatcttgcaccgcccttaatccatttaactctgagtggacacagcacatgtttcagagagcacagggtcgggggtaaggtcacagatcaaca

SEQ ID NO: 33684 - DNA, 1186 bp, Homo sapiens
tgcatcatatcaagaggcacatgatytggatttgtcccattgtttgtgaagttatcttggtgctcgctctctctccctccctctctctcttttaattttatttcccaggaatcatacttctaaactaagtttgggaggtgccctcagatatctttattaaggtggcagccctcagatttcttaaaaaaggaaatcttgtatgttttgttcactgctatatttccaaagcttaagagagttcctggcactcaaaaagaatttgttgagtgagtgactaaatgacttcaactctgtggagttgggaagacacaggagaggaagagaaagaagaaataagaggatgaaaaggtggagcaagggaacagtagttaaggttataaagtaagtcatcagtcagtctgcacactttagcctcataaatattatccaaaacatttgtattaattgatataatcaacactgtgaaactttcaggatcatgatactcttgcttatccaaaacatttgtattaattgatataatcaacactgtgaaactttcaggatcatgatactcttgctagtatattaaacatatcttcctttttttttcttttcaaggtttattttaagttcaggggtacatgtgccagatgtgcgggtttgttacataagtaaacgtgtgtcatggtggtttgcttcacagatcatcccatcacctaggtattaagcccagtgtccattagctattcttcctgatgctttctctccccaccttccccacctctgacaggacccagtgtgtgttgttccccacagtgtgatgcgtccatgtgttctcattgttcagatcccacttataagtgagaatacgtggtgtttggttttctgttactgcattagtttttatttattttatttatttatttaaatatatatatttgttgttatatatgtgtgtgtgagatatatatatatatatatatatatatatatatatatatatatttgtttgttgttgttgttcctgcattagtttgctgaggataatggcttctagctccatccatgtccctgcaaaggacatgatctcattcctttttatggatgcgtagtattccagggtgtatatgtaccacattttctttatccagtatatcattgatgggcatttaggttgagtccatgccttgtgaccagtgctgca

SEQ ID NO: 33685 - DNA, 1186 bp, Homo sapiens
tgcatcatatcaagaggcacatgatctggatttgtcccattgtttgtgaagttatcttggtgctcgctctctctccctccctctctctcttttaattttatttcccaggaatcatacttctaaactaagtttgggaggtgccctcagatatctttattaaggtggcagccctcagatttcttaaaaaaggaaatcttgtatgttttgttcactgctatatttccaaagcttaagagagttcctggcactcaaaaagaatttgttgagtgagtgactaaatgacttcaactctgtggagttgggaagacacaggagaggaagagaaagaagaaataagaggatgaaaaggtggagcaagggaacagtagttaaggttataaagtaagtcatcagtcagtctgcacactttagcctcataaatattatccaaaacatttgtattaattgatataatcaacactgtgaaactttcaggatcatgatactcttgcttatccaaaacatttgtattaattgatataatcaacactgtgaaactttcaggatcatgatactcttgctagtatattaaacatatcttcctttttttttcttttcaaggtttattttaagttcaggggtacatgtgccagatgtgcgggtttgttacataagtaaacgtgtgycatggtggtttgcttcacagatcatcccatcacctaggtattaagcccagtgtccattagctattcttcctgatgctttctctccccaccttccccacctctgacaggacccagtgtgtgttgttccccacagtgtgatgcgtccatgtgttctcattgttcagatcccacttataagtgagaatacgtggtgtttggttttctgttactgcattagtttttatttattttatttatttatttaaatatatatatttgttgttatatatgtgtgtgtgagatatatatatatatatatatatatatatatatatatatatatttgtttgttgttgttgttcctgcattagtttgctgaggataatggcttctagctccatccatgtccctgcaaaggacatgatctcattcctttttatggatgcgtagtattccagggtgtatatgtaccacattttctttatccagtatatcattgatgggcatttaggttgagtccatgccttgtgaccagtgctgca

SEQ ID NO: 33686 - DNA, 1186 bp, Homo sapiens
tgcatcatatcaagaggcacatgatctggatttgtcccattgtttgtgaagttatcttggtgctcgctctctctccctccctctctctcttttaattttatttcccaggaatcatacttctaaactaagtttgggaggtgccctcagatatctttattaaggtggcagccctcagatttcttaaaaaaggaaatcttgtatgttttgttcactgctatatttccaaagcttaagagagttcctggcactcaaaaagaatttgttgagtgagtgactaaatgacttcaactctgtggagttgggaagacacaggagaggaagagaaagaagaaataagaggatgaaaaggtggagcaagggaacagtagttaaggttataaagtaagtcatcagtcagtctgcacactttagcctcataaatattatccaaaacatttgtattaattgatataatcaacactgtgaaactttcaggatcatgatactcttgcttatccaaaacatttgtattaattgatataatcaacactgtgaaactttcaggatcatgatactcttgctagtatattaaacatatcttcctttttttttcttttcaaggtttattttaagttcaggggtacatgtgccagatgtgcgggtttgttacataagtaaacgtgtgtcatggtggtttgcttcacagatcatcccatcacctaggtattaagcccagtgtccattagctattcttcctgatgctttctctccccaccttccccacctctgacaggacccagtgtgtgttgttccccacagtgtgatgcgtccatgtgttctcattgttcagatcccacttataagtgagaatacgtggtgtttggttttctgttactgcattagtttttatttattttatttatttatttaaatatatatatttgttgttwtatatgtgtgtgtgagatatatatatatatatatatatatatatatatatatatatatttgtttgttgttgttgttcctgcattagtttgctgaggataatggcttctagctccatccatgtccctgcaaaggacatgatctcattcctttttatggatgcgtagtattccagggtgtatatgtaccacattttctttatccagtatatcattgatgggcatttaggttgagtccatgccttgtgaccagtgctgca

SEQ ID NO: 33687 - DNA, 1186 bp, Homo sapiens
tgcatcatatcaagaggcacatgatctggatttgtcccattgtttgtgaagttatcttggtgctcgctctctctccctccctctctctcttttaattttatttcccaggaatcatacttctaaactaagtttgggaggtgccctcagatatctttattaaggtggcagccctcagatttcttaaaaaaggaaatcttgtatgttttgttcactgctatatttccaaagcttaagagagttcctggcactcaaaaagaatttgttgagtgagtgactaaatgacttcaactctgtggagttgggaagacacaggagaggaagagaaagaagaaataagaggatgaaaaggtggagcaagggaacagtagttaaggttataaagtaagtcatcagtcagtctgcacactttagcctcataaatattatccaaaacatttgtattaattgatataatcaacactgtgaaactttcaggatcatgatactcttgcttatccaaaacatttgtattaattgatataatcaacactgtgaaactttcaggatcatgatactcttgctagtatattaaacatatcttcctttttttttcttttcaaggtttattttaagttcaggggtacatgtgccagatgtgcgggtttgttacataagtaaacgtgtgtcatggtggtttgcttcacagatcatcccatcacctaggtattaagcccagtgtccattagctattcttcctgatgctttctctccccaccttccccacctctgacaggacccagtgtgtgttgttccccacagtgtgatgcgtccatgtgttctcattgttcagatcccacttataagtgagaatacgtggtgtttggttttctgttactgcattagtttttatttattttatttatttatttaaatatatatatttgttgttatatatrtgtgtgtgagatatatatatatatatatatatatatatatatatatatatatttgtttgttgttgttgttcctgcattagtttgctgaggataatggcttctagctccatccatgtccctgcaaaggacatgatctcattcctttttatggatgcgtagtattccagggtgtatatgtaccacattttctttatccagtatatcattgatgggcatttaggttgagtccatgccttgtgaccagtgctgca

SEQ ID NO: 33688 - DNA, 1186 bp, Homo sapiens
tgcatcatatcaagaggcacatgatctggatttgtcccattgtttgtgaagttatcttggtgctcgctctctctccctccctctctctcttttaattttatttcccaggaatcatacttctaaactaagtttgggaggtgccctcagatatctttattaaggtggcagccctcagatttcttaaaaaaggaaatcttgtatgttttgttcactgctatatttccaaagcttaagagagttcctggcactcaaaaagaatttgttgagtgagtgactaaatgacttcaactctgtggagttgggaagacacaggagaggaagagaaagaagaaataagaggatgaaaaggtggagcaagggaacagtagttaaggttataaagtaagtcatcagtcagtctgcacactttagcctcataaatattatccaaaacatttgtattaattgatataatcaacactgtgaaactttcaggatcatgatactcttgcttatccaaaacatttgtattaattgatataatcaacactgtgaaactttcaggatcatgatactcttgctagtatattaaacatatcttcctttttttttcttttcaaggtttattttaagttcaggggtacatgtgccagatgtgcgggtttgttacataagtaaacgtgtgtcatggtggtttgcttcacagatcatcccatcacctaggtattaagcccagtgtccattagctattcttcctgatgctttctctccccaccttccccacctctgacaggacccagtgtgtgttgttccccacagtgtgatgcgtccatgtgttctcattgttcagatcccacttataagtgagaatacgtggtgtttggttttctgttactgcattagtttttatttattttatttatttatttaaatatatatatttgttgttatatatgtgtgtgtgwgatatatatatatatatatatatatatatatatatatatatatttgtttgttgttgttgttcctgcattagtttgctgaggataatggcttctagctccatccatgtccctgcaaaggacatgatctcattcctttttatggatgcgtagtattccagggtgtatatgtaccacattttctttatccagtatatcattgatgggcatttaggttgagtccatgccttgtgaccagtgctgca

SEQ ID NO: 33689 - DNA, 764 bp, Homo sapiens
tttccgcctgtgttgctgagagtctgggtttatgtgtcaccttgggtgggacccaatctcctgtttgtgaggccaccgcaaagaggtggtgggatgcctctcctcaagagaggtgatcgtgggcttctcctgaaggagaacggtaatcccagatgagctcccaaattgttggcaataagagctcagagttgcaaagaaaatgatctccaaaagatttctcagcaaggcagatttacttmtgcagaatggtgctgcttgcactcctggtcacagtgagagcaccccgaacaaaggaggtgaagtggtttttatccctaacacagctagttcctgcttctgtgttctatccccattggctagagtccaatctaaactagtcctgattggctattttaaacaggaggggtgtgggttacagcagtgggaagagcagttgccacgagcgagggagacttttccagataaggaacaaatgcgggttacaggttgggattggtgggagaaatgtttacagaatgggtaattaggagtgggaaggtatgaggaagttgaccttaagaacaaagaacaaggaagttaaactttgaagagaaacccatcatacctaacagtcttgtaagaaaggatgacaaagtgattgaacattgggtggagctaattttccttggccaattcacttagtaagataaggagctccaaatcatatttaagttgggagtcaattgattttacttaattcttgtgaggttcagttataagattca

SEQ ID NO: 33690 - DNA, 764 bp, Homo sapiens
tttccgcctgtgttgctgagagtctgggtttatgtgtcaccttgggtgggacccaatctcctgtttgtgaggccaccgcaaagaggtggtgggatgcctctcctcaagagaggtgatcgtgggcttctcctgaaggagaacggtaatcccagatgagctcccaaattgttggcaataagagctcagagttgcaaagaaaatgatctccaaaagatttctcagcaaggcagatttacttctgcagaatggtgctgcttgcactcctggtcacagtgagagcaccccgaacaaaggaggtgaagtggtttttatccctaacacagctagttcctgcttctgtgtyctatccccattggctagagtccaatctaaactagtcctgattggctattttaaacaggaggggtgtgggttacagcagtgggaagagcagttgccacgagcgagggagacttttccagataaggaacaaatgcgggttacaggttgggattggtgggagaaatgtttacagaatgggtaattaggagtgggaaggtatgaggaagttgaccttaagaacaaagaacaaggaagttaaactttgaagagaaacccatcatacctaacagtcttgtaagaaaggatgacaaagtgattgaacattgggtggagctaattttccttggccaattcacttagtaagataaggagctccaaatcatatttaagttgggagtcaattgattttacttaattcttgtgaggttcagttataagattca

SEQ ID NO: 33691 - DNA, 604 bp, Homo sapiens
atttaatgcttcagtgggcaagttggtataacagtttaatttttcactgaaatctaaatttgctcccagactgtatatttttctatcatattagataatcaatcagagcagaaatccaattttaactccatcaacacccctctggagaaagttacacagtgagcgccctctggtctaggctgctcgaggctggcgtgtgagcccacactgggatgtgcagatgaggagtggtcccttggctsaccgaggcctccccaggaagagactggctgtggttccccaggagctgaggccactggctgggtgcagggtgggggctgccagctgtccacggtgctgggggttcccccctgtcccctcatggccataaggaagaggccaggctgcagagaagtggccagacaaagcagtgacctcagggtcttccagagaccttcctgctgcttcttgggcattggacgattctagtgtttttcatgcgaagcagacggggcctttggaccttctgtggacaggggttctggaaaacccctgcccacatgtagacagacttgtgtccccaaaccacgttctgatcttggccctgcttcttccccatggagtc

SEQ ID NO: 33692 - DNA, 604 bp, Homo sapiens
atttaatgcttcagtgggcaagttggtataacagtttaatttttcactgaaatctaaatttgctcccagactgtatatttttctatcatattagataatcaatcagagcagaaatccaattttaactccatcaacacccctctggagaaagttacacagtgagcgccctctggtctaggctgctcgaggctggcgtgtgagcccacactgggatgtgcagatgaggagtggtcccttggctcaccgaggcctccccaggaagagactggctgtggttccccaggagctgaggccactggctgggtgsagggtgggggctgccagctgtccacggtgctgggggttcccccctgtcccctcatggccataaggaagaggccaggctgcagagaagtggccagacaaagcagtgacctcagggtcttccagagaccttcctgctgcttcttgggcattggacgattctagtgtttttcatgcgaagcagacggggcctttggaccttctgtggacaggggttctggaaaacccctgcccacatgtagacagacttgtgtccccaaaccacgttctgatcttggccctgcttcttccccatggagtc

SEQ ID NO: 33693 - DNA, 604 bp, Homo sapiens
atttaatgcttcagtgggcaagttggtataacagtttaatttttcactgaaatctaaatttgctcccagactgtatatttttctatcatattagataatcaatcagagcagaaatccaattttaactccatcaacacccctctggagaaagttacacagtgagcgccctctggtctaggctgctcgaggctggcgtgtgagcccacactgggatgtgcagatgaggagtggtcccttggctcaccgaggcctccccaggaagagactggctgtggttccccaggagctgaggccactggctgggtgcagggtgggggctgccagctgtccacggtgctgggggtycccccctgtcccctcatggccataaggaagaggccaggctgcagagaagtggccagacaaagcagtgacctcagggtcttccagagaccttcctgctgcttcttgggcattggacgattctagtgtttttcatgcgaagcagacggggcctttggaccttctgtggacaggggttctggaaaacccctgcccacatgtagacagacttgtgtccccaaaccacgttctgatcttggccctgcttcttccccatggagtc

SEQ ID NO: 33694 - DNA, 569 bp, Homo sapiens
tgagcccaggagttcgagagcaactttggcaacataatgagaccccgtttttacaaaaaattaaaacaattagccaggcacagtagcacatgcctgtatcgcagctacacatgaggatcacttgagcccaggagtttgaagctacagtaagttaaaattgcactgctgcactccagcctgggtgacagagcaagaccctgtctctaaaaaactaaaaaattcctatgtaggttaactcatttatggaaaggaaaaaataaatgagttatttttctgaggctctcagagtgacagyagactagagatccctgatatagtcatcatttgatttaaatatttgttttctttccacaatgatccagcttaccttactggataatccttagacatttttttccctattacttttttttttttacttttacttacataacagtaaagggttatagtccaggattgaagcataatttataaatctataaactgtggtactattttatgaaatctggaaaacagccttggctctaaataacaggatataagcagatgatgttttcgtaagaatagca

SEQ ID NO: 33695 - DNA, 561 bp, Homo sapiens
tgtcttggcagaatcctaaggtggatcaccttcatgtgagaatggcacacctaattactgtttcacagggtaaacttctgcagccttggatttgcaggtgagttctgcatctgacaactgtttcagaatgcaggctcagcrttatattatgtaatgttctccttgcaccatttaggcaacttggcttgaccaggtgttagaaagattgtatctcatgagatcagaggttgtgcttaagtttagatggtggtaggttgtgatggtcctagagatggcctttccagcttcttatgtactgcaacaagtgagggtttctgcattcagacttttctcttctcctgattacaatgataatgtcatattattttgaggtacttctgcagtattttctttgttgagagatttttgtgcaggaaactgagcaaatacttcgttcatatttcagaatagtcagatgtggaataagttcaccaaatatgtgactttgttgttgtttaagttgcattccctgtaagaggtgttggtgcctcagcccctgaagcccaagtcatttgacttttc

SEQ ID NO: 33696 - DNA, 1289 bp, Homo sapiens
ttacagccttttttatttctacttgaaatattgtgcataagagcagtgcctcgggcgtgcactgtctaagccacggtgccctgtgttcacatagaattactgtttgtttttactgtcatgagtctatgaatccagcctgtcatgcagaagtgatcctgataatgtaagcacttactgtcttgctgcagctgattccccagtgacattttaaaaagtcagtatttggctgcagagtgctttaaatttctaaatggactatagattggaggccttagggtatttcataggaagcacatgaccctgcagtgagcacacagcaacttttgtagatctgtagccaagtcggtgaccagtatttacccttgaaattgttttggttcagaatgttaggtgttttttactttacatttaattatttggtactagtactaatttactacaaatgtctgaaaccaaatggatacttaacgaagtctrtgctgtttgtccaggtcttttatcccgactagttatggttctaatgtaaaaagcagcttctagtggtgacacagtgcatatttctcagtgtctataaattcaggtctttggttttcacttaatctgaaaatgagagtggcagttacacactcaggaacactcagaaatacataaacaagttttgcattcttctctaaacaaagcctaaacccctgaaaacaattgttttatagtaatattttaacagctatttatacgtgttatctaaactgaaaatcatattcctgatcctctgactgccacagataccccgtgattagacttagtaaggagtgaccgtcctgagagattctgggaccgtgtcctgcctggccacatgggtaacagacccatcttgtagaaccacaagagggttggttgttgtacatcgtcaaataccaggctttgtgctgaatgtgccctgaccttcacggggggcgaattggtgatgatctttaggacactaatttttttctttattatttgtaattcttttgagcaatatgcctgactatgaagcagtgggtctgacggagtcagagcggttagcctgatccagccggggtcccaggaccaccgccccagaggactatgcaatgttctttatgtgtgtgtgtgagtgtatttgtgtttccaatttattgaagcaaagagggagggtagaagataaaatagcatggtcctcatgtcacgagagctagttagtgccttgaggactgtgctaaattcagctgctttttaaattccgttacatttttagtcttagaaatgca

SEQ ID NO: 33697 - DNA, 1289 bp, Homo sapiens
ttacagccttttttatttctacttgaaatattgtgcataagagcagtgcctcgggcgtgcactgtctaagccacggtgccctgtgttcacatagaattactgtttgtttttactgtcatgagtctatgaatccagcctgtcatgcagaagtgatcctgataatgtaagcacttactgtcttgctgcagctgattccccagtgacattttaaaaagtcagtatttggctgcagagtgctttaaatttctaaatggactatagattggaggccttagggtatttcataggaagcacatgaccctgcagtgagcacacagcaacttttgtagatctgtagccaagtcggtgaccagtatttacccttgaaattgttttggttcagaatgttaggtgttttttactttacatttaattatttggtactagtactaatttactacaaatgtctgaaaccaaatggatacttaacgaagtctatgctgtttgtccaggtcttttatcccgactagttatggttctaatgtaaaaagcagcttctagtggtgacacagtgcatatttctcagtgtctataaattcaggtctttggttttcacttaatctgaaaatgagagtggcagttacacactcaggaacactcagaaatacataaacaagttttgcattcttctctaaacaaagcctaaacccctgaaaacaattgttttatagtaatattttaacagctatttatacgtgttatctaaactgaaaatcatattcctgatcctctgactgccacagataccccgtgattagacttagtaaggagtgaccgtcctgagagattctgggaccgtgtcctgcctggccacatgggtaacagacccatcttgtagaaccacaagagggttggttgttgtacatcgtcaaataccaggctttgtgctgaatgtgccctgaccttcacggggggcgaattggtgatgatctttaggacactaatttttttctttattatttgtaattcttttgagcaatatgcctgactatgaagcagtgggtctgacggagtcagagcggttagcctgatccagccggggtcccaggaccaccgccccagaggactatgcaatgttctttatgtgtgtgtgtgagtgtatttgtgtttccaatttattgaagcaaagagggagggtagaagataaaatagcatggtcctcatgtcacgagarctagttagtgccttgaggactgtgctaaattcagctgctttttaaattccgttacatttttagtcttagaaatgca

SEQ ID NO: 33698 - DNA, 1184 bp, Homo sapiens
ctggccatttcacattggctgtgcacctagcagcaggtacacgtgaatctgctgttactgcgttctgatctctcagagagacaggagtgacgcagagcgttacagcacagcccctgtgagcgttgggatgcgtctacctgactgcacaagagaagggccagaaatggtgggatcaccatcactccagtctccttggtttgggcccatggagataaattaccagtgataacagcaaagcatttctccatcaaaatatacttttggagaaagcgaggacagcacaaatgatggccaggtctggtggtggaattttctgaacctcagcagccagtgcaaccagcattccagcaattctcttcaccgagttcaaacaactgtgttgtagacagtgtacggggccaaaaaaaaatcctcctgtgtagtgacaaattgttacaggcttcagtgagcaagtaattatttaaatggagtcagtgtgagtataaatgtgacaactatttcttcacttaaaatgccaagggaaggaggatggtaagcagtgggaatttttccttctaaagagcttttttggttttgttttgtttcaattatttagattaaaaggttagaattatgtattactgtggacaaaattacaaatcactgtaatacaatacatgtgtgattggttaggttttacttatttgtgttgarttttataatattcattagtcatttgcacttgtctgcatataaaccgtcatcttaaagtggacatctaaattccaaaaactttatctcccatctgtggttctaagtttgcctcaccagacgctactctacaaaatgtagggcatttctcctactgccacctataaatagcacaggagcggccatatgtgctgctggaaccaggctttctcacagagagccctgggcacattccagaagtgagtccttctgctaacctagcaccactcagtcccaaacatgaagtgtcccgttaatgccctgccagtacagggtatcccagctccagcaggcctttacgaagaaaaaggcaatcacactaccacaaaaactgagaacctcctacctctggacttcctgcagtgcttgttaaaactaccgattctggggctcccttcagaattcttgaggtgggtccaggaatccgcatccctgaccacttccgcaggtagttt

SEQ ID NO: 33699 - DNA, 1184 bp, Homo sapiens
ctggccatttcacattggctgtgcacctagcagcaggtacacgtgaatctgctgttactgcgttctgatctctcagagagacaggagtgacgcagagcgttacagcacagcccctgtgagcgttgggatgcgtctacctgactgcacaagagaagggccagaaatggtgggatcaccatcactccagtctccttggtttgggcccatggagataaattaccagtgataacagcaaagcatttctccatcaaaatatacttttggagaaagcgaggacagcacaaatgatggccaggtctggtggtggaattttctgaacctcagcagccagtgcaaccagcattccagcaattctcttcaccgagttcaaacaactgtgttgtagacagtgtacggggccaaaaaaaaatcctcctgtgtagtgacaaattgttacaggcttcagtgagcaagtaattatttaaatggagtcagtgtgagtataaatgtgacaactatttcttcacttaaaatgccaagggaaggaggatggtaagcagtgggaatttttccttctaaagagcttttttggttttgttttgtttcaattatttagattaaaaggttagaattatgtattactgtggacaaaattacaaatcactgtaatacaatacatgtgtgattggttaggttttacttatttgtgttgaattttataatattcattagtcatttgcacttgtctgcatataaaccgtcatcttaaagtggacatctaaattccaaaaactttatctcccatctgtggttctaagtttgcctcaccagacgctactctacaaaatgtagggcatttctcctactgccacctataaatagcacaggagcggccatatgtgctgctggaaccaggctttctcacagagagccctgggcacattccagaagtgagtccttctgctaacctagcaccactcagtcccaaacatgaagtgtcccgttaatgccctgccagtacagggtatcccagctccagyaggcctttacgaagaaaaaggcaatcacactaccacaaaaactgagaacctcctacctctggacttcctgcagtgcttgttaaaactaccgattctggggctcccttcagaattcttgaggtgggtccaggaatccgcatccctgaccacttccgcaggtagttt

SEQ ID NO: 33700 - DNA, 602 bp, Homo sapiens
ggtgaaaccccgtctctactaaaatacaaaaaaataaaaataaaaacattaggccgggcacaggggctcatgcctgtaatcccagcactttgggaggctgagatgggtggatcacctgaggtcrggagttcgagaccagcctgaccaacatggagaaaccccgtctctactaaaaatacaaaattagccaggcctggtggtgcgtgcctgtaatcccagctattcggaaggctgaggcagaagaatcgcttgaacccgggaggcggaggttgcagtgagccaagattgtgccattgcactccagcctgggccacagagcaagactctgtctcaaaaaaaagaaggtggatggccaggagctgtgtgattctttgccttagattaggtttttccccttggaaatgctgtgtcttaaaactgagatttgtaacacaaggcagcatcaaactatcttcaatttccttagcatcttttaatgttcttactgcccaattaaatatttggtttttaaaatggtagtgagttatagttttttgaaataatgtgtttgtattattttataataaacatgtaaatctggtgataggattcagagctacaag

SEQ ID NO: 33701 - DNA, 538 bp, Homo sapiens
ttggcctccacctgcttatcgatgacctgctcccactcctgtctcaaacctaccaaattccaaactctcagctggccctgcacccctaaccgtaatcctgccctgggatctctatggaagtgtttctcaaactttcaggttcacgtgaatcaggtctgattcagtaggtgatggatgggggactaagatcctgcatgtctaacaaacccctagatgacgtacatagtgctgctccagggactgcgctttgaacagcgaggtcctacaccacacgtggctccccaatagtctcgacctgttcttgcttaggaactctgacaaggctcatttctttggttctcaggccaactggccttggacagagcgctcctggcttgagctccactagtgggattccaccctctgcctttggtaaggagaagtcagaaagaggcccgtctgactaacatcatactggggaaaatgtggkgcggatgacaaccaagtctcaagaaggtaggaacctatcccagaaggaagctggaggtggagacatggg

SEQ ID NO: 33702 - DNA, 600 bp, Homo sapiens
ctaaattggggccctaactaattttccttttgaggttgtgggcataagtgctgatctagaatacagtctgggtcccacactgtgtctcagtgagactgttgatgccttgagatgaccatttcagatctgaatcccatgggtgtgagggtgatgggtactccaggactggcctatgctgtgttgtgggctttggttcggctttatcaggggccaggcatatgggttctagagtacctaccatgacctagaagcatttatgatttatttgaagccacactgtttgcatgggtgttacttgtctgtacctcagagtctgaggatgttaactttggaactcgcagtcctctagaacagcttcagattatggctttttcttttgaggaagaaattattcactccagatgcatgccctgagccagacctcactgctgcactttccaaggtgctaagattgctgctctccaatgctaactttctgacacagtgctctagaaccctgcctgtggtcctgagcactgatcascttagctagaccatggttgactcttcttggagattttcacttggtcctagaatgtggcaacgtagttgtgctcgcca

SEQ ID NO: 33703 - DNA, 588 bp, Homo sapiens
tactgcattgggagcacctgctacagtgccaggcatgtggagtgcacagtaattccttatggaatgagtgartgcctcagacagagagctatctaggttctgcttgcagacttttttccttcttggggagttctattctacacaaagtagctcattccttttttctaaacattagagagttccatttgttggaaccttaattggacctattataattcttgtctggttttgtccactggagcaataaaggaaaatgcttatcttacttctggagtttcttcagctcctgggttcagccctcaactattcctcagcaggttccttcatcagaatcaggacaaagccccccacgatgaaattcccaggaatattgctgaaaggggtatttatcttccaccatgggctcaccaagaactgcccagcctggactatccctgatgacaaattagtgggcagaaaagcatgaggtgacattccatttaaaggaatgtgagggatgagctaagggaatgaagatcaaccagggggagaacacagaactgaatacttccccaaatgaaagaaccacgctctcctcattgggcaact

SEQ ID NO: 33704 - DNA, 1150 bp, Homo sapiens
tcccttgaggtcaggagttcaagaacagcctggtcaacatggtgaaaccctgtctctactaaaatacaaaaattagccaggcatggyggtggccacctgtaatcccagctactcgggaggctgaggcaggagaatcacttgaacccaggaggtggaggtttcagtgagcatgacagcaccactatactcagcctgggcaacagagtgagactttgtctcaaaaaaaaatggatttcgtagggtcagcactatcagttattgctaatcctcatggcagcaatatagggaaggaggttttctatctccactttcctgatgaaggcactgaggctctcaaagggtaaatcgcttgctgatggttatcgagctggtatactccccaaaccctgagtgttttgccctatcagctgccattagctcaaaaacctctactgtgtctccattgcctgtttataccctaactgagaaacagggagaaataggggagttctcaaagcagcccaatgagacactacccagcatttatgtctcatgttggaagagaacatctgataatgcactctgcttcacaaaagaccacagtgagcttgatgctgggtttacaggcgagggctgcctgaagctggcaggcgttggtgcttgtaggcctgtgcccagctaaaaagctggatactgttttatgcacctttaatgagcctgcagattcttccaggcctggggccatggcctgagtttcagccatagaagttcctcctcattctcctcttctttctccagagctgatgatcataatttctatactgtgggtgtcctgaatccctgattttcccccctgcctgggcaggccttaaatttgggcaaaggtcttggaagctggggctgagttcacgtgcggtaggacttgctcagccaccagctactggtaatgcacccagacagggctctggtactgtgtctgggcggagaagtaggactctgaggtcagacaggcccatttcaggtttatagcttcgtgaacttgaacaagtactgacctttcctaaacctcagcgtaaattgctcctggggagattcaagataacgcatgtggaggaaagaagtaaggatcttctatgtctgaactccaggtgataagccaaacagacaggga

SEQ ID NO: 33705 - DNA, 1150 bp, Homo sapiens
tcccttgaggtcaggagttcaagaacagcctggtcaacatggtgaaaccctgtctctactaaaatacaaaaattagccaggcatggtggtggccacctgtaatcccagctactcrggaggctgaggcaggagaatcacttgaacccaggaggtggaggtttcagtgagcatgacagcaccactatactcagcctgggcaacagagtgagactttgtctcaaaaaaaaatggatttcgtagggtcagcactatcagttattgctaatcctcatggcagcaatatagggaaggaggttttctatctccactttcctgatgaaggcactgaggctctcaaagggtaaatcgcttgctgatggttatcgagctggtatactccccaaaccctgagtgttttgccctatcagctgccattagctcaaaaacctctactgtgtctccattgcctgtttataccctaactgagaaacagggagaaataggggagttctcaaagcagcccaatgagacactacccagcatttatgtctcatgttggaagagaacatctgataatgcactctgcttcacaaaagaccacagtgagcttgatgctgggtttacaggcgagggctgcctgaagctggcaggcgttggtgcttgtaggcctgtgcccagctaaaaagctggatactgttttatgcacctttaatgagcctgcagattcttccaggcctggggccatggcctgagtttcagccatagaagttcctcctcattctcctcttctttctccagagctgatgatcataatttctatactgtgggtgtcctgaatccctgattttcccccctgcctgggcaggccttaaatttgggcaaaggtcttggaagctggggctgagttcacgtgcggtaggacttgctcagccaccagctactggtaatgcacccagacagggctctggtactgtgtctgggcggagaagtaggactctgaggtcagacaggcccatttcaggtttatagcttcgtgaacttgaacaagtactgacctttcctaaacctcagcgtaaattgctcctggggagattcaagataacgcatgtggaggaaagaagtaaggatcttctatgtctgaactccaggtgataagccaaacagacaggga

SEQ ID NO: 33706 - DNA, 1150 bp, Homo sapiens
tcccttgaggtcaggagttcaagaacagcctggtcaacatggtgaaaccctgtctctactaaaatacaaaaattagccaggcatggtggtggccacctgtaatcccagctactcgggaggctgaggcaggagaatcacttgaacccaggaggtggaggtttcagtgagcatgacagcaccactatactcagcctgggcaacagagtgagactttgtctcaaaaaaaaatggatttygtagggtcagcactatcagttattgctaatcctcatggcagcaatatagggaaggaggttttctatctccactttcctgatgaaggcactgaggctctcaaagggtaaatcgcttgctgatggttatcgagctggtatactccccaaaccctgagtgttttgccctatcagctgccattagctcaaaaacctctactgtgtctccattgcctgtttataccctaactgagaaacagggagaaataggggagttctcaaagcagcccaatgagacactacccagcatttatgtctcatgttggaagagaacatctgataatgcactctgcttcacaaaagaccacagtgagcttgatgctgggtttacaggcgagggctgcctgaagctggcaggcgttggtgcttgtaggcctgtgcccagctaaaaagctggatactgttttatgcacctttaatgagcctgcagattcttccaggcctggggccatggcctgagtttcagccatagaagttcctcctcattctcctcttctttctccagagctgatgatcataatttctatactgtgggtgtcctgaatccctgattttcccccctgcctgggcaggccttaaatttgggcaaaggtcttggaagctggggctgagttcacgtgcggtaggacttgctcagccaccagctactggtaatgcacccagacagggctctggtactgtgtctgggcggagaagtaggactctgaggtcagacaggcccatttcaggtttatagcttcgtgaacttgaacaagtactgacctttcctaaacctcagcgtaaattgctcctggggagattcaagataacgcatgtggaggaaagaagtaaggatcttctatgtctgaactccaggtgataagccaaacagacaggga

SEQ ID NO: 33707 - DNA, 1150 bp, Homo sapiens
tcccttgaggtcaggagttcaagaacagcctggtcaacatggtgaaaccctgtctctactaaaatacaaaaattagccaggcatggtggtggccacctgtaatcccagctactcgggaggctgaggcaggagaatcacttgaacccaggaggtggaggtttcagtgagcatgacagcaccactatactcagcctgggcaacagagtgagactttgtctcaaaaaaaaatggatttcgtagggtcagcactatcagttattgctaatcctcatggcagcaatatagggaaggaggttttctatctccactttcctgatgaaggcactgaggctctcaaagggtaaatcgcttgctgatggttatcgagctggtatactccccaaaccctgagtgttttgccctatcagctgccattagctcaaaaacctctactgtgtctccattgcctgtttataccctaactgagaaacagggagaaataggggagttctcaaagcagcccaatgagacactacccagcatttatgtctcatgttggaagagaacatctgataatgcactctgcttcacaaaagaccacagtgagcttgatgctgggtttacaggcgagggctgcctgaagctggcaggcgttggtgcttgtaggcctgtgcccagctaaaaagctggatactgttttatgcacctttaatgagcctgcagattcttccaggcctggggccatggcctgagtttcagccatagaagttcctcctcattctcctcttctttctccagagctgatgatcataatttctatactgtgggtgtcctgaatccctgattttcccccctgcctgggcaggccttaaatttgggcaaaggtcttggaagctggggctgagttcacgtgcggtaggacttgctcagccaccagctactggtaatgcacccagacagggctctggtactgtgtctgggcggagaagtaggactctgaggtcagacaggcccatttcaggtttatagcttcgtgaacttgaacaagtactgacctttcctaaacctcagcgtaaattgctcctggggagattcaagataacgcatgtggaggaaagaagtaaggatcttctatgtctgractccaggtgataagccaaacagacaggga

SEQ ID NO: 33708 - DNA, 594 bp, Homo sapiens
ctgaaagtgaataaacatcctgaatatcaaaacaatggtatgagagagtccttaaagaatcaggaagaacttcaggaagcagatggcattgcctcctaggtcttaagtgataggcagagtttaggaagcagtgggggaagggcactgtgggcagcgggaagagcatgagtgaaatatgctcacaggaaagtgttggttctagaacggagtggcaagcacagatgtgggaggtcatgaagagcactttcgagcagcagcctttatttagggcaaggatggctcaatcaaagatgttgctgctgaggcttctggaaaaaggcgagagccattcatagaaatagggaatttagggaggaagccaggcttggaaggagagagaggagtttggtggagagaggccagaagtggatgttttggcaaggtgtgttctcctataaactaagtgcaaaarggaacgagcatgaaactgttgaactatttcatgtcatctcactggagcttgaaagcttagggaattttttattccaaataatatatatttttttgattctaggttacagtttatttcaaataatctgaatacaatgaccagta

SEQ ID NO: 33709 - DNA, 1271 bp, Homo sapiens
attataaggtttcatgacttctacattttaagcgattgttaaaagtgcagcgttttaaggattttttggtgaaatgtgatgagtgtaatataaggatgtcatttatttccaactttttggactgcagtccaggtttttgtttgtttgtttttgttgttgttgttttgtttttcttttttttgagacggagtccaaggctggagtgcagtggcacgatctcggctcactgcaacctctgcctccagggttcaagcgattctcctgcctcagcctccccagtagctgggattacaggcacccgccaccatacctggctaatttttgtatttttattagagacggagtttcaccatgttggccaggctggtctcgaactcctgacctcgtgatctgcctaccttggcctcccaaagtattgggattataggcgtgagccactgcgcccagcctgcaacccagtttttattgttgttttttgtttgtttgttttttgagacagagtctgcctctgtcaccaaggctggagtgcagtagggcaatctcagctcactgcaaccaccgcctcctggtttcaagcaattctcctgcctcagcctcccgagtagctgggattataggcacatgccaccacacctggctaatttttgtatttttagtagagacagggttttaccatgttggccaggctggtcttgaactcttgacctcaggtgatccacccacctcggcctcccagagtgctgggattacaggcgtgagccaccgcacccggcctgcaatccagtttttaaaagtacattttacgtcctgttgagtatacacacggaagtgtgtatgtactagtgctgtgggcatccgaaagtttaagacagctcttactatgggaagtacactctgatattttctgttctgtcctagttcatttctttaaaatgctggttgcaagccactaaaatgatgtaaaggtgcttcacttggtgactcaggccatcctttttggtcctttttgartttcctgctgcctccacagtaaggtgcatcatgtggtgggctcaggcctgaagcagctccatggggtggagcagagcatcctttagtttctgagagtcccaaacaccgcactagtctcctgtaatcatcattggcactagtcatttcgtgtgctttgaagaagatgcttacagatgtttgctctttctttgttccatgagaacgctgtcctggcttatctctgctgtacctgtgaaatattccacacaaggtggcagtgc

SEQ ID NO: 33710 - DNA, 1271 bp, Homo sapiens
attataaggtttcatgacttctacattttaagcgattgttaaaagtgcagcgttttaaggattttttggtgaaatgtgatgagtgtaatataaggatgtcatttatttccaactttttggactgcagtccaggtttttgtttgtttgtttttgttgttgttgttttgtttttcttttttttgagacggagtccaaggctggagtgcagtggcacgatctcggctcactgcaacctctgcctccagggttcaagcgattctcctgcctcagcctccccagtagctgggattacaggcacccgccaccatacctggctaatttttgtatttttattagagacggagtttcaccatgttggccaggctggtctcgaactcctgacctcgtgatctgcctaccttggcctcccaaagtattgggattataggcgtgagccactgcgcccagcctgcaacccagtttttattgttgttttttgtttgtttgttttttgagacagagtctgcctctgtcaccaaggctggagtgcagtagggcaatctcagctcactgcaaccaccgcctcctggtttcaagcaattctcctgcctcagcctcccgagtagctgggattataggcacatgccaccacacctggctaatttttgtatttttagtagagacagggttttaccatgttggccaggctggtcttgaactcttgacctcaggtgatccacccacctcggcctcccagagtgctgggattacaggcgtgagccaccgcacccggcctgcaatccagtttttaaaagtacattttacgtcctgttgagtatacacacggaagtgtgtatgtactagtgctgtgggcatccgaaagtttaagacagctcttactatgggaagtacactctgatattttctgttctgtcctagttcatttctttaaaatgctggttgcaagccactaaaatgatgtaaaggtgcttcacttggtgactcaggccatcctttttggtcctttttgagtttcctgctgcctccacagtaaggtgcatcatgtggtgggctcaggcctgaagcagctccatggggtggagcagagcatcctttagtttctgagagtcccaaacaccgcactagtctcctgtaatcatcattggcwctagtcatttcgtgtgctttgaagaagatgcttacagatgtttgctctttctttgttccatgagaacgctgtcctggcttatctctgctgtacctgtgaaatattccacacaaggtggcagtgc

SEQ ID NO: 33711 - DNA, 1321 bp, Homo sapiens
gctttgttctaaggaccccttcagctgagcaaaaaggcagtcatggatcaagggtttaagaggtaaacccaaaggcgctgctctagacaggttctgcttgcttacaaagctcctagaaattcttttacatccttcaaacgatgcagggaattcatcaccaaggtccagatcaaagaacaataaaccactctgctcacacgtcctaagagctggcaggacaggaccaagacagcagaaaggaggcacaacaaagcccaccgtccagccagggaccatgcccgtttcacacaggatggagctgtgggcaggaaggcaggtggtcccagaccccacggcgggcaggcaggggacaggaggctgggacggcagtggccagaggtggacggacagtggggagaaggcgctgctcgttgttcagattccagggaggcacaccctatgcccctggagaatgcccttctcccacaccaggtccccagagatggctcaaaaccgggtctgcatcgtgctattgggcaaaggtctccggcccctccgaggagccacagtggttgcaaacgcccgagcgccggcgccgggttccacccgggggaaggaggaaggtgctgcctgggcccagggcctcccctcccacctgatggacgtgcccagcggagtcagcaccaacattttagacgacattccgcctctgaaaagaagggaaggctctataaccgcttctaaacgaatccagaagaaaacggggaagggagggagggcgagagaacgtcagagaagcagaacgccccgtgcacagcccacagcatcgccacagacacgaggagccggctggcggagcgcgcrggactgtgcaggacacccgtccttaccgctcaggagcactttgagctgcttgtcgtagaactccgcctccttgagggacacgagggcgcactccgcgcactgccgcacggggtccacaaagcacatgcgccgcagcggcaccttctggctgcagcacctgtcgcagaagcacttcccgcagcggcgacagtggtgctgggcagatgcgggaggattggcagtgaggaggggcagggaacaagcggccccgggtgtggccccggctggcctggcactccccgggccacgcctaaacgcgaggcccctgtgccggccgctgcacacgcgcacctcctgtcgccagcccctgggctccccaccacgcagcggggatccgcctcacctgggaaatgaggcccttttttcaaaatcatggatcaaaatggctgtttttcagctttctttcaactacccaagtcccactgcttaggacgccctc

SEQ ID NO: 33712 - DNA, 1321 bp, Homo sapiens
gctttgttctaaggaccccttcagctgagcaaaaaggcagtcatggatcaagggtttaagaggtaaacccaaaggcgctgctctagacaggttctgcttgcttacaaagctcctagaaattcttttacatccttcaaacgatgcagggaattcatcaccaaggtccagatcaaagaacaataaaccactctgctcacacgtcctaagagctggcaggacaggaccaagacagcagaaaggaggcacaacaaagcccaccgtccagccagggaccatgcccgtttcacacaggatggagctgtgggcaggaaggcaggtggtcccagaccccacggcgggcaggcaggggacaggaggctgggacggcagtggccagaggtggacggacagtggggagaaggcgctgctcgttgttcagattccagggaggcacaccctatgcccctggagaatgcccttctcccacaccaggtccccagagatggctcaaaaccgggtctgcatcgtgctattgggcaaaggtctccggcccctccgaggagccacagtggttgcaaacgcccgagcgccggcgccgggttccacccgggggaaggaggaaggtgctgcctgggcccagggcctcccctcccacctgatggacgtgcccagcggagtcagcaccaacattttagacgacattccgcctctgaaaagaagggaaggctctataaccgcttctaaacgaatccagaagaaaacggggaagggagggagggcgagagaacgtcagagaagcagaacgccccgtgcacagcccacagcatcgccacagacacgaggagccggctggcggagcgcgcgggactgtgcaggacacccgtccttaccgctcaggagcactttgagctgcttgtcgtagaactccgcctccttgagggacacsagggcgcactccgcgcactgccgcacggggtccacaaagcacatgcgccgcagcggcaccttctggctgcagcacctgtcgcagaagcacttcccgcagcggcgacagtggtgctgggcagatgcgggaggattggcagtgaggaggggcagggaacaagcggccccgggtgtggccccggctggcctggcactccccgggccacgcctaaacgcgaggcccctgtgccggccgctgcacacgcgcacctcctgtcgccagcccctgggctccccaccacgcagcggggatccgcctcacctgggaaatgaggcccttttttcaaaatcatggatcaaaatggctgtttttcagctttctttcaactacccaagtcccactgcttaggacgccctc

SEQ ID NO: 33713 - DNA, 751 bp, Homo sapiens
attggaatatsaaatattctggcttcagaattaatgagatgttagagaggcttgattttattgaacattttatatttttgccacctttgtgactgggaatactgagcatataatttatgtgataaaaatgagcatccgtgttcataaggtatcttgatatcattatcacctattttttgtttgctaaatgggcaagtaaaacctactcttcaaaccagaagatatataaccttgaagagataggaacaaagaggaatgatttcatactgatgaatattacgtgagcataagtaggttttattctaattattttgctagagttttgcattagggatgtttgtcatttttgaaatgacattttacttgagaaactgcttatacttttaaaaaaaactagttatacagtatgtgttggtgctcacgcctgtgatcccagcactttgagaggccaaggcaagagaataacttgagactaggagtttgagaccagcctgggtaacatagtgagacactgtctctacaaaaaaaaaattttaaaatacatcagtgtaggccaagcacagtggcccacacctgtaatcccagcactttgggaggctgaggcgggcagatcacttgaggccaggagtttgagacaagcctggccaacatggtaaagccccgtctctactaaaaaaaaaatacaaatattagcctggcatggtggcacgcacctgtgatcccagctactcgggaggcttaagcaggagaa

SEQ ID NO: 33714 - DNA, 751 bp, Homo sapiens
attggaatatgaaatattctggcttcagaattaatgagatgttagagaggcttgattttattgaacattttatatttttgccacctttgtgactgggaatactgagcatataatttatgtgataaaaatgagcatccgtgttcataaggtatcttgatatcattatcacctattttttgtttgctaaatgggcaagtaaaacctactcttcaaaccagaagatatataaccttgaagagataggaacaaagaggaatgatttcatactgatgaatattacgtgagcataagtaggttttattctaattattttgctagagttttgcattagggatgtttgtcatttttgaaatgacattttacttgagaaactgcttatacttttaaaaaaaactagttatacagtatgtgttgktgctcacgcctgtgatcccagcactttgagaggccaaggcaagagaataacttgagactaggagtttgagaccagcctgggtaacatagtgagacactgtctctacaaaaaaaaaattttaaaatacatcagtgtaggccaagcacagtggcccacacctgtaatcccagcactttgggaggctgaggcgggcagatcacttgaggccaggagtttgagacaagcctggccaacatggtaaagccccgtctctactaaaaaaaaaatacaaatattagcctggcatggtggcacgcacctgtgatcccagctactcgggaggcttaagcaggagaa

SEQ ID NO: 33715 - DNA, 751 bp, Homo sapiens
attggaatatgaaatattctggcttcagaattaatgagatgttagagaggcttgattttattgaacattttatatttttgccacctttgtgactgggaatactgagcatataatttatgtgataaaaatgagcatccgtgttcataaggtatcttgatatcattatcacctattttttgtttgctaaatgggcaagtaaaacctactcttcaaaccagaagatatataaccttgaagagataggaacaaagaggaatgatttcatactgatgaatattacgtgagcataagtaggttttattctaattattttgctagagttttgcattagggatgtttgtcatttttgaaatgacattttacttgagaaactgcttatacttttaaaaaaaactagttatacagtatgtgttggkgctcacgcctgtgatcccagcactttgagaggccaaggcaagagaataacttgagactaggagtttgagaccagcctgggtaacatagtgagacactgtctctacaaaaaaaaaattttaaaatacatcagtgtaggccaagcacagtggcccacacctgtaatcccagcactttgggaggctgaggcgggcagatcacttgaggccaggagtttgagacaagcctggccaacatggtaaagccccgtctctactaaaaaaaaaatacaaatattagcctggcatggtggcacgcacctgtgatcccagctactcgggaggcttaagcaggagaa

SEQ ID NO: 33716 - DNA, 710 bp, Homo sapiens
gaatgcggaaggtgtggcctctagctcataggcagattgtttttcaaagttcccctctggacattcatttaccattgtgtgtacaaaacaattcaaatcctaagaggggggtgtatattagaatgcagaaacaaaaactgcattgttgatttcaaacagtgttttcctgggagagcacacatttgtgtagccatcccacagtggacaaaataattccaaaaattagttgaatgaaaacaagggcacaaagatgagtggttaattatttgggccagtgaaaaatgtcctttctggaaaatctttcaaaacctatrgcacttgaatttgcatgaaagttgtattctatgaatatttctttattgaaaataaagcacttcaggctcagttcaataataacagcttacaggagagtaattgaagttatccaattctcttcccattgaaaatgacctacagtatatacacacagagatgcaggaaaaaaaaatctgttgtgcaattttattgagactgaagtaaaaaggaattggggttaggcactgtgtgagcatttaacgcacaccaaatgatgatatggtcgggaaaaattatccctttttctttacgttccttttccaaattctcatcttgttccaccccctgctgagctcctattgacttcaaagagaggtccatgggggtcctgagcaagatgagaatttggccctgca

SEQ ID NO: 33717 - DNA, 1153 bp, Homo sapiens
ctgaggaggagtgacatctctagctcagccaggataccgtgttatgttattaacatttatagctaacatcgaatagcagtttccattacaacatgattttcacataagttatttaactctgaggcaggaatcagtatctcattttcatttttctaatgaggaaacaagattagaaacattgtgttcacatagatggaaaaggacaggtctgtcttcatgtgtcactcataccaagctatcttcttaccagatgaaaaagggtcatattttatggttcagcagagtttatatcagttgtcataatggaggaatttagtgttagccgtgtttgcagtgaaagtaataggattgaaaacttgaataatttcatttaaatttagatctccttgttactctgtaggtttgtgtgaactgtagacaattttgtattaataaaaaataatgcgtatatacatacwcacctatctacatttatcttgtcctttttttcagaaccacaatggacactgccagccatagccttgttcttctccagcagctgaacatgcagcgagaatttggttttctgtgtgattgcacagttgcaattggagatgtttacttcaaagcccacagagcagtgcttgctgctttttctaactatttcaagatgatatttattcaccaaacaaggtaaggatgtgtttttgtaaataagaatttttaatattgtgatttatataagctttattatagtatcattttggaaattctttgttacggagtcacactaagaagtaaaattataattttttttttttttttttttttttttttttttttttggcgacagagtcttgctctgtcacccaggctggagtgcaatggttcagtgtcggctcactgaaacctttgcctcccaggtacaagcgattctcctgcctcagcctcccgagtacctgggattacaggcgcctgccaccacgcccggttaatttttgtatttttagtaaaggcagggtttcaccatgttggccaggctgatctcaaactcctgacctcaggggatccgcctgcctcagcctcccaaagtgctgggattacaggcatgagccaccatgcctggccaaattataataattttttatacattagtaattaaactcagtgggta

SEQ ID NO: 33718 - DNA, 1153 bp, Homo sapiens
ctgaggaggagtgacatctctagctcagccaggataccgtgttatgttattaacatttatagctaacatcgaatagcagtttccattacaacatgattttcacataagttatttaactctgaggcaggaatcagtatctcattttcatttttctaatgaggaaacaagattagaaacattgtgttcacatagatggaaaaggacaggtctgtcttcatgtgtcactcataccaagctatcttcttaccagatgaaaaagggtcatattttatggttcagcagagtttatatcagttgtcataatggaggaatttagtgttagccgtgtttgcagtgaaagtaataggattgaaaacttgaataatttcatttaaatttagatctccttgttactctgtaggtttgtgtgaactgtagacaattttgtattaataaaaaataatgcgtatatacatactcacctatctacatttatcttgtcctttttttcagaaccacaatggacactgccagccatagccttgttcttctccagcagctgaacatgcagcgagaatttggttttctgtgtgattgcacagttgcaattggagatgtttacttcaaagcccacagagcagtgcttgctgctttttctaactatttcaagatgatatttattcaccaaacaaggtaaggatgtgtttttgtaaataagaatttttaatattgtgatttatataagctttattatagtatcattttggaaattctttgttacggagtcacactaagaagtaaaattataattttttttttttttttttttttttttttttttttttggcgacagagtcttgctctgtcacccaggctggagtgcaatggttcagtgtcggctcactgmaacctttgcctcccaggtacaagcgattctcctgcctcagcctcccgagtacctgggattacaggcgcctgccaccacgcccggttaatttttgtatttttagtaaaggcagggtttcaccatgttggccaggctgatctcaaactcctgacctcaggggatccgcctgcctcagcctcccaaagtgctgggattacaggcatgagccaccatgcctggccaaattataataattttttatacattagtaattaaactcagtgggta

SEQ ID NO: 33719 - DNA, 1153 bp, Homo sapiens
ctgaggaggagtgacatctctagctcagccaggataccgtgttatgttattaacatttatagctaacatcgaatagcagtttccattacaacatgattttcacataagttatttaactctgaggcaggaatcagtatctcattttcatttttctaatgaggaaacaagattagaaacattgtgttcacatagatggaaaaggacaggtctgtcttcatgtgtcactcataccaagctatcttcttaccagatgaaaaagggtcatattttatggttcagcagagtttatatcagttgtcataatggaggaatttagtgttagccgtgtttgcagtgaaagtaataggattgaaaacttgaataatttcatttaaatttagatctccttgttactctgtaggtttgtgtgaactgtagacaattttgtattaataaaaaataatgcgtatatacatactcacctatctacatttatcttgtcctttttttcagaaccacaatggacactgccagccatagccttgttcttctccagcagctgaacatgcagcgagaatttggttttctgtgtgattgcacagttgcaattggagatgtttacttcaaagcccacagagcagtgcttgctgctttttctaactatttcaagatgatatttattcaccaaacaaggtaaggatgtgtttttgtaaataagaatttttaatattgtgatttatataagctttattatagtatcattttggaaattctttgttacggagtcacactaagaagtaaaattataattttttttttttttttttttttttttttttttttttggcgacagagtcttgctctgtcacccaggctggagtgcaatggttcagtgtcggctcactgaaacctytgcctcccaggtacaagcgattctcctgcctcagcctcccgagtacctgggattacaggcgcctgccaccacgcccggttaatttttgtatttttagtaaaggcagggtttcaccatgttggccaggctgatctcaaactcctgacctcaggggatccgcctgcctcagcctcccaaagtgctgggattacaggcatgagccaccatgcctggccaaattataataattttttatacattagtaattaaactcagtgggta

SEQ ID NO: 33720 - DNA, 1153 bp, Homo sapiens
ctgaggaggagtgacatctctagctcagccaggataccgtgttatgttattaacatttatagctaacatcgaatagcagtttccattacaacatgattttcacataagttatttaactctgaggcaggaatcagtatctcattttcatttttctaatgaggaaacaagattagaaacattgtgttcacatagatggaaaaggacaggtctgtcttcatgtgtcactcataccaagctatcttcttaccagatgaaaaagggtcatattttatggttcagcagagtttatatcagttgtcataatggaggaatttagtgttagccgtgtttgcagtgaaagtaataggattgaaaacttgaataatttcatttaaatttagatctccttgttactctgtaggtttgtgtgaactgtagacaattttgtattaataaaaaataatgcgtatatacatactcacctatctacatttatcttgtcctttttttcagaaccacaatggacactgccagccatagccttgttcttctccagcagctgaacatgcagcgagaatttggttttctgtgtgattgcacagttgcaattggagatgtttacttcaaagcccacagagcagtgcttgctgctttttctaactatttcaagatgatatttattcaccaaacaaggtaaggatgtgtttttgtaaataagaatttttaatattgtgatttatataagctttattatagtatcattttggaaattctttgttacggagtcacactaagaagtaaaattataattttttttttttttttttttttttttttttttttttggcgacagagtcttgctctgtcacccaggctggagtgcaatggttcagtgtcggctcactgaaacctttgcctcccaggtacaagcgattctcctgcctcagcctcccgagtacctgggattacaggcgcctgccaccacgcccggttaatttttgtatttttagtaraggcagggtttcaccatgttggccaggctgatctcaaactcctgacctcaggggatccgcctgcctcagcctcccaaagtgctgggattacaggcatgagccaccatgcctggccaaattataataattttttatacattagtaattaaactcagtgggta

SEQ ID NO: 33721 - DNA, 1153 bp, Homo sapiens
ctgaggaggagtgacatctctagctcagccaggataccgtgttatgttattaacatttatagctaacatcgaatagcagtttccattacaacatgattttcacataagttatttaactctgaggcaggaatcagtatctcattttcatttttctaatgaggaaacaagattagaaacattgtgttcacatagatggaaaaggacaggtctgtcttcatgtgtcactcataccaagctatcttcttaccagatgaaaaagggtcatattttatggttcagcagagtttatatcagttgtcataatggaggaatttagtgttagccgtgtttgcagtgaaagtaataggattgaaaacttgaataatttcatttaaatttagatctccttgttactctgtaggtttgtgtgaactgtagacaattttgtattaataaaaaataatgcgtatatacatactcacctatctacatttatcttgtcctttttttcagaaccacaatggacactgccagccatagccttgttcttctccagcagctgaacatgcagcgagaatttggttttctgtgtgattgcacagttgcaattggagatgtttacttcaaagcccacagagcagtgcttgctgctttttctaactatttcaagatgatatttattcaccaaacaaggtaaggatgtgtttttgtaaataagaatttttaatattgtgatttatataagctttattatagtatcattttggaaattctttgttacggagtcacactaagaagtaaaattataattttttttttttttttttttttttttttttttttttggcgacagagtcttgctctgtcacccaggctggagtgcaatggttcagtgtcggctcactgaaacctttgcctcccaggtacaagcgattctcctgcctcagcctcccgagtacctgggattacaggcgcctgccaccacgcccggttaatttttgtatttttagtaaaggcagggtttcaccatgttggccaggctgatctcaaactcctgacctcaggkgatccgcctgcctcagcctcccaaagtgctgggattacaggcatgagccaccatgcctggccaaattataataattttttatacattagtaattaaactcagtgggta

SEQ ID NO: 33722 - DNA, 473 bp, Homo sapiens
gcccttttattaattcagctgctttctcaattagatattaggcctaattttcagcacagtctgtccttcagctgcattcgaagacaatctcttcaaatcagctttcatatcatgcctgagggcttttattgcacttaacgaccaactaatcccactgtccttataattaccatggtcttcaatatctcccaaatgttactgtattagccagtgcatgccttcccatgtgtattccagatcaattcactacaaggcagtcagtacgtgaactgcacattttggtcaatggcagacggcacatatgatggtggtcccataagattatgttttttctgtacttgttctatgtttagatacacaaatacttgtattttttgttttacagttgcctacagcattcagtatagtaatctgctgtacagattygtagcctagcagcgataagctatactacatagcttagctatgtagta

SEQ ID NO: 33723 - DNA, 833 bp, Homo sapiens
tctaggaagcaatttctgccttgcctcacaggagtacttggggagggctgccagaggcactgggaaaaggccacagggagaaggaaacctccacctgaactttgtagcaattccaaccaaacgagaagtctcctggccagaactcgggggtgggcttgaatccagggtacagactccacaggcagggaaggacgagagccctacytgcttttgcgctgggaggcgggtagcctggggcaagttctcagccctgctcacccactgcctggaaacagactccgtgctgttgcaaggggcacggtgggagtgagatcggccttttggattgcatgggagctgggtgaggcctgtggctgccatctttccccaacttccctgacaacctgcatgacacagcagaggtagccataatcctcctgggaacataactccattgacctgggaaccacaccagcctcagcaagacccacccaaggagagtttgagctcagacacgcctagccctgcccccacctgatggtccttccctacccactctggtagctgaagacaaagggcataaattcttgggagttttagggccctgcccaccacctgaccctccccatactaccacagctgatactctcttgaaagcaccaccttctggcaggaggccaaccagcacaaaaatagtgcatcaaacaaccaaaactaaagaccctcacagagtccatttcatccctctgccacctccacaagagcaggtgctcatatccacagctgagagacccacagatggttcacatcacagggctctgtgcagacaacccacagtaccaatccagagccta

SEQ ID NO: 33724 - DNA, 833 bp, Homo sapiens
tctaggaagcaatttctgccttgcctcacaggagtacttggggagggctgccagaggcactgggaaaaggccacagggagaaggaaacctccacctgaactttgtagcaattccaaccaaacgagaagtctcctggccagaactcgggggtgggcttgaatccagggtacagactccacaggcagggaaggacgagagccctacctgcttttgcgctgggaggcgggtagcctggggcaagttctcagccctgctcacccactgcctggaaacagactccrtgctgttgcaaggggcacggtgggagtgagatcggccttttggattgcatgggagctgggtgaggcctgtggctgccatctttccccaacttccctgacaacctgcatgacacagcagaggtagccataatcctcctgggaacataactccattgacctgggaaccacaccagcctcagcaagacccacccaaggagagtttgagctcagacacgcctagccctgcccccacctgatggtccttccctacccactctggtagctgaagacaaagggcataaattcttgggagttttagggccctgcccaccacctgaccctccccatactaccacagctgatactctcttgaaagcaccaccttctggcaggaggccaaccagcacaaaaatagtgcatcaaacaaccaaaactaaagaccctcacagagtccatttcatccctctgccacctccacaagagcaggtgctcatatccacagctgagagacccacagatggttcacatcacagggctctgtgcagacaacccacagtaccaatccagagccta

SEQ ID NO: 33725 - DNA, 564 bp, Homo sapiens
ttttttttgagacagagtcttactctgtcacccagactggagtacagtggcgccccagctcactgcaacctccacctcccaggttcaagcaattctcctgcctcggtctcgcgagtagctgggataacaagcgcctgccaccacgcctggctaatttttgtatttttagtagagacggggtttctccatgttggccaggctggtcttgaactcctgacctcaagtgatccacccacctcagcctcccaaagtgctgggattacgagtgtgaaccaccgcacccggcccaaataatatatttttaaaagatattatactatttgcaatttgaggttaagctttacaagcatctgttttgtcttttttgttgttgtttttttagacagagtctygctctgtcacccaggctgtagtgcagtggcacaccctctgctcactgcaacctctgcctcccaaggttcaagcgtttcttgcacctcagcctgctgagtagctgggatcacaggcatgtgccaccacacctggccaatttttttgtatttttagtagagacaggctttcacc

SEQ ID NO: 33726 - DNA, 564 bp, Homo sapiens
ttttttttgagacagagtcttactctgtcacccagactggagtacagtggcgccccagctcactgcaacctccacctcccaggttcaagcaattctcctgcctcggtctcgcgagtagctgggataacaagcgcctgccaccacgcctggctaatttttgtatttttagtagagacggggtttctccatgttggccaggctggtcttgaactcctgacctcaagtgatccacccacctcagcctcccaaagtgctgggattacgagtgtgaaccaccgcacccggcccaaataatatatttttaaaagatattatactatttgcaatttgaggttaagctttacaagcatctgttttgtcttttttgttgttgtttttttagacagagtctcgctctgtcacccaggctgtagtgcagtggcacaccctctgctcactgcaacctctgcctcccaaggttcaagcgwttcttgcacctcagcctgctgagtagctgggatcacaggcatgtgccaccacacctggccaatttttttgtatttttagtagagacaggctttcacc

SEQ ID NO: 33727 - DNA, 564 bp, Homo sapiens
ttttttttgagacagagtcttactctgtcacccagactggagtacagtggcgccccagctcactgcaacctccacctcccaggttcaagcaattctcctgcctcggtctcgcgagtagctgggataacaagcgcctgccaccacgcctggctaatttttgtatttttagtagagacggggtttctccatgttggccaggctggtcttgaactcctgacctcaagtgatccacccacctcagcctcccaaagtgctgggattacgagtgtgaaccaccgcacccggcccaaataatatatttttaaaagatattatactatttgcaatttgaggttaagctttacaagcatctgttttgtcttttttgttgttgtttttttagacagagtctcgctctgtcacccaggctgtagtgcagtggcacaccctctgctcactgcaacctctgcctcccaaggttcaagcgtttcttgcacctcagcctgctgagtagctgggatcacaggcatgtgccaccacacctggccaatttttttktatttttagtagagacaggctttcacc

SEQ ID NO: 33728 - DNA, 564 bp, Homo sapiens
ttttttttgagacagagtcttactctgtcacccagactggagtacagtggcgccccagctcactgcaacctccacctcccaggttcaagcaattctcctgcctcggtctcgcgagtagctgggataacaagcgcctgccaccacgcctggctaatttttgtatttttagtagagacggggtttctccatgttggccaggctggtcttgaactcctgacctcaagtgatccacccacctcagcctcccaaagtgctgggattacgagtgtgaaccaccgcacccggcccaaataatatatttttaaaagatattatactatttgcaatttgaggttaagctttacaagcatctgttttgtcttttttgttgttgtttttttagacagagtctcgctctgtcacccaggctgtagtgcagtggcacaccctctgctcactgcaacctctgcctcccaaggttcaagcgtttcttgcacctcagcctgctgagtagctgggatcacaggcatgtgccaccacacctggccaatttttttgkatttttagtagagacaggctttcacc

SEQ ID NO: 33729 - DNA, 778 bp, Homo sapiens
aaataaactgaatcaatatatttggggatatttttgaaagtaaatattgttaatttgataagatgattcacaaaatcaaaaaaatgtcttgtcaggtcattgtgagacaacttcaaaaaaaattggctgatcttaataaacagtgtgaggcttcactaaaggttacatcacattctcactctctgaggcatcaatagaggctacatcacattatcacattaatctcaaaggtgagatacaggatttaatgaggaaatgatttcaaatcaaaagtcaagtgtgtgttaaatgtaacatgccaacagtgagtctataactggttaaataatataaattgttttatgatactactatccacgggaagacttcttttatatgttcattataattagttttattacaattttattatctttataatgtgcttatttttaaaactgtggctgtcattctgcaatgtttttctttttttttcagattaaacagtaaagtttattgtgaacatttgcttctttttccattttaaagttaaacaagaagaaaaggcaaaatgaaaagaaataaccamaaatttacttcccaagataggatgtacagaactaaaatgataaaagtcatataacaatggtaccctaaaccacccacttcacagcatagtgcagagatgtcctggcagtgcttctggtgtgtgggatgggggtagaatcccatgcatgagaaggggacaggtcctttcttcacaagaccagtctttgctccagaaatgaatccttatcat

SEQ ID NO: 33730 - DNA, 537 bp, Homo sapiens
gcagcaaaagccatcttacaacacatcagctcactgaaatatgggagcaagatgagaaacggaagaacttcaagcccagtatcaatgcttcccatcctttccttctctttgttctttccttctgtattctactgattcagtttcccactgtttcaggtttttttttttgtttgtttgtttgtttgtttttgagatggagtctcactctcgtgcccaggctggagtgcaatggcacgatcgtggctcactgcaacctccgcctcccgggttcaagtgattctcctgcctcagcctcccaagtagctgggactacaagcgcatgccaccacacccagctaatttttgtatttttyagtagaaatggggtttcaccatgttggccaggctggtctcaaatccctgacctcaggtgatctgcccgcctcagcctcccaacatgttgggattataggcgtaagccaccacacccagcctcccgctgtatcagttcttctcaattctacctttattgcacactttacattttagggtccttac

SEQ ID NO: 33731 - DNA, 453 bp, Homo sapiens
tcaaaacaacttatgatcatagcaaaaataattaacaagaggaaagatgggcatyagaataaggttgataaagggcagcgatggaagagaaagttgtatcaagagttccagaggctgtgaggcaagccccttccccactctcaggccattctaacctaccatcttcaatggtatcaggtgctcacacctataaagcccacctctaaatctgactctgccttggggaccttgtcctgcattcctgcacatcctgtgggatacactgtgatgccccacacgtaggagatgctcagcagatgtctagtgaaatgaattgttgacccagctcatttctaacaggcagcctttccagagaatgacagcgaatgtgtactctctgtgtttgaagactgtgtgatgttaattgaagtgcctgcaagtcaaaataagaatgacagtttattttaaaaaaat

SEQ ID NO: 33732 - DNA, 453 bp, Homo sapiens
tcaaaacaacttatgatcatagcaaaaataattaacaagaggaaagatgggcatcagaataaggttgataaagggcagcgatggaagagaaagttgtatcaagagttccagaggctgtgaggcaagccccttccccactctcaggccattctaacctaccatcttcaatggtatcaggtgctcacacctataaagcccacctctaaatctgactctgccttggggaccttgtcctgcattcctgcacatcctgtgggatacactgtgatgccccacacgtaggagatgctcagcagatgtctagtgaaatgaattgttgacccagctcatttctaacaggcagcctttccagagaatgacagcgaatgtgtactctctgtgtttgaagactgtgtgatgttaattgaagtgcctgcaagtcaaaataagaatgacmgtttattttaaaaaaat

SEQ ID NO: 33733 - DNA, 645 bp, Homo sapiens
cacagcagggtgccaatttgatttcaagcgacagccctgcaggcaactgtctttttgggctgacttggctggataccagaaccatccccacccctacaaactagccaggtgccctcatatgtggtacaacctacacaattagtggtgtttagagcagtttgtcccagttcatgacagccagctgtgcccatctctttccaactccctgctctactgactctattttatgaactacttgttgatctcaaataccctcacattactgctactgcctggtcagcttccccttcccttgttccacctaaattcctacatgacctttacaacccaactcacacattgagttgtgaaatctttctgggctttctccctgcccctgaaagatcaatcactccttctccacacattatcactttgtataaccattgtgtatgtgtgtgtgtgtgtgtgtgtktgtctggatatgtctcttcccacctatattaagaacacttgcaagacttttgttcatttttatcatttcaatacctagcagaaaatctggcatatagcagacatgaattttaactacccagagagatacaaagttgaaattaaaattatttttgctcttaatgataagaagatttagagggaattttccat

SEQ ID NO: 33734 - DNA, 1875 bp, Homo sapiens
tgttgcttttgaaactgcatcgtagagagtattccctgatatcagcaagaaggggctgggacctgagggttattgtatttctacatgcagactatactgcagcctgcttgatgctggcatcggcttgcttcgtgcttaaaccgcttattaaagtctagacgcaacataaaagcacgtaaattggttccagccatctctagtaaaaacttcagctggagctrggaagtgattggagcatctcttggtgtaattaaaattgactcttaaagtttctttagcttaattggtaacactttctttggaggttggtgaaagcgtcttgctgggaaggttaaatgcatttctgtgtataagaacagaattcaaatatagttttatggacacatttacagttatgttctacccgggtggtcttttttccctgtatcttttctatttaagatttatgctgtcattcaccacagtctaaatgtgttttgataaaaggaaaaaaaatgaaccgttgctgacgcatttcaaacagacagttggtaatattttgaagctttcagtaaattgaactgcagtttggcttaacccgagctccttctttcccccaaacccttcacttagagtctagcgcttaagctttgtttgttatccagaaattaaagtagctactactatttggctgtgtccaaaggtaggaaaccaggcattttctaagatagccacgcctttgctgtgaccgaatgcctttgacccccattatttgagaatgaatgtgtttatgtgcgtggatatgtttatatgtgctgggacttctcttctttggcattgcttcttgagggtcttgtcagtgtgatacattctgataggcaaaaggcctaggctttccatttttggagagtaatcatggacgaagcttccaattctctggactgtccttaattcagacttgggagaggacctgctttaatttacatttgtgaacattgactcttcatgatttccagggcaaggatttgatccttattgtaggaatctattttgatccatccctatagagcagagggactaccttccttgaaatcagttcaatattatctctttgtgtgtatgtggtgttgcaaaacaatgttatgaagaccataaaggaaataaaaatcactctgattctaggatccaaatgcaacaactgcttatatttctgtgttttttttcctaatacttgtctacaggcttatatagtttcagtttttgttatataggtataatttttaaccaataatcttttaaaaaataccgagttaatttttctcattaagtacgtacttgttatagaacatttaaaaatataacaaagtgtagtaccaattgctcaaacacaatgcttgctaagattttagtgtttatttcttcaaacttttatatatgccttgctttgcctcttctatgtgcaatatgaacaagaattgtattcatattgcatatataattatgatttctgtctttttatttcacatgattttaataatatattattataaatttttgataaatatttaaatggttacataataatatgctacattaacaggctgtaatttgctttagcattcttttactagaagataatgttccattttattttttgctattgtaatgctacaaatgggcaggataattctaaattcagatttgtttgttttctgcatccagaattatttcctttccatagattccaaaagatgaacttatatcatcaaaaggagtgaaaagatttaaggctcttgataatattgccaaatgtatttccaaaatgttctatcaatttacagtcttattagcaacatacagagctaccattattggttatggccaatgatgttagtg

SEQ ID NO: 33735 - DNA, 1875 bp, Homo sapiens
tgttgcttttgaaactgcatcgtagagagtattccctgatatcagcaagaaggggctgggacctgagggttattgtatttctacatgcagactatactgcagcctgcttgatgctggcatcggcttgcttcgtgcttaaaccgcttattaaagtctagacgcaacataaaagcacgtaaattggttccagccatctctagtaaaaacttcagctggagctgggaagtgattggagcatctcttggtgtaattaaaattgactcttaaagtttctttagcttaattggtaacactttctttggaggttggtgaaagcgtcttgctgggaaggttaaatgcatttctgtgtataagawcagaattcaaatatagttttatggacacatttacagttatgttctacccgggtggtcttttttccctgtatcttttctatttaagatttatgctgtcattcaccacagtctaaatgtgttttgataaaaggaaaaaaaatgaaccgttgctgacgcatttcaaacagacagttggtaatattttgaagctttcagtaaattgaactgcagtttggcttaacccgagctccttctttcccccaaacccttcacttagagtctagcgcttaagctttgtttgttatccagaaattaaagtagctactactatttggctgtgtccaaaggtaggaaaccaggcattttctaagatagccacgcctttgctgtgaccgaatgcctttgacccccattatttgagaatgaatgtgtttatgtgcgtggatatgtttatatgtgctgggacttctcttctttggcattgcttcttgagggtcttgtcagtgtgatacattctgataggcaaaaggcctaggctttccatttttggagagtaatcatggacgaagcttccaattctctggactgtccttaattcagacttgggagaggacctgctttaatttacatttgtgaacattgactcttcatgatttccagggcaaggatttgatccttattgtaggaatctattttgatccatccctatagagcagagggactaccttccttgaaatcagttcaatattatctctttgtgtgtatgtggtgttgcaaaacaatgttatgaagaccataaaggaaataaaaatcactctgattctaggatccaaatgcaacaactgcttatatttctgtgttttttttcctaatacttgtctacaggcttatatagtttcagtttttgttatataggtataatttttaaccaataatcttttaaaaaataccgagttaatttttctcattaagtacgtacttgttatagaacatttaaaaatataacaaagtgtagtaccaattgctcaaacacaatgcttgctaagattttagtgtttatttcttcaaacttttatatatgccttgctttgcctcttctatgtgcaatatgaacaagaattgtattcatattgcatatataattatgatttctgtctttttatttcacatgattttaataatatattattataaatttttgataaatatttaaatggttacataataatatgctacattaacaggctgtaatttgctttagcattcttttactagaagataatgttccattttattttttgctattgtaatgctacaaatgggcaggataattctaaattcagatttgtttgttttctgcatccagaattatttcctttccatagattccaaaagatgaacttatatcatcaaaaggagtgaaaagatttaaggctcttgataatattgccaaatgtatttccaaaatgttctatcaatttacagtcttattagcaacatacagagctaccattattggttatggccaatgatgttagtg

SEQ ID NO: 33736 - DNA, 1875 bp, Homo sapiens
tgttgcttttgaaactgcatcgtagagagtattccctgatatcagcaagaaggggctgggacctgagggttattgtatttctacatgcagactatactgcagcctgcttgatgctggcatcggcttgcttcgtgcttaaaccgcttattaaagtctagacgcaacataaaagcacgtaaattggttccagccatctctagtaaaaacttcagctggagctgggaagtgattggagcatctcttggtgtaattaaaattgactcttaaagtttctttagcttaattggtaacactttctttggaggttggtgaaagcgtcttgctgggaaggttaaatgcatttctgtgtataagaacagaattcaaatatagttttatggacacatttacagttatgttctacccgggtggtcttttttccctgtatcttttctatttaagatttatgctgtcattcaccacagtctaaatgtgttttgataaaaggaaaaaaaatgaaccgttgctgacgcatttcaaacagacagttggtaatattttgaagctttcagtaaattgaactgcagtttggcttaacccgagctccttctttcccccaaacccttcacttagagtctagcgcttaagctttgtttgttatccagaaattaaagtagctactactatttggctgtgtccaaaggtaggaaaccaggcattttctaagatagccacgsctttgctgtgaccgaatgcctttgacccccattatttgagaatgaatgtgtttatgtgcgtggatatgtttatatgtgctgggacttctcttctttggcattgcttcttgagggtcttgtcagtgtgatacattctgataggcaaaaggcctaggctttccatttttggagagtaatcatggacgaagcttccaattctctggactgtccttaattcagacttgggagaggacctgctttaatttacatttgtgaacattgactcttcatgatttccagggcaaggatttgatccttattgtaggaatctattttgatccatccctatagagcagagggactaccttccttgaaatcagttcaatattatctctttgtgtgtatgtggtgttgcaaaacaatgttatgaagaccataaaggaaataaaaatcactctgattctaggatccaaatgcaacaactgcttatatttctgtgttttttttcctaatacttgtctacaggcttatatagtttcagtttttgttatataggtataatttttaaccaataatcttttaaaaaataccgagttaatttttctcattaagtacgtacttgttatagaacatttaaaaatataacaaagtgtagtaccaattgctcaaacacaatgcttgctaagattttagtgtttatttcttcaaacttttatatatgccttgctttgcctcttctatgtgcaatatgaacaagaattgtattcatattgcatatataattatgatttctgtctttttatttcacatgattttaataatatattattataaatttttgataaatatttaaatggttacataataatatgctacattaacaggctgtaatttgctttagcattcttttactagaagataatgttccattttattttttgctattgtaatgctacaaatgggcaggataattctaaattcagatttgtttgttttctgcatccagaattatttcctttccatagattccaaaagatgaacttatatcatcaaaaggagtgaaaagatttaaggctcttgataatattgccaaatgtatttccaaaatgttctatcaatttacagtcttattagcaacatacagagctaccattattggttatggccaatgatgttagtg

SEQ ID NO: 33737 - DNA, 1875 bp, Homo sapiens
tgttgcttttgaaactgcatcgtagagagtattccctgatatcagcaagaaggggctgggacctgagggttattgtatttctacatgcagactatactgcagcctgcttgatgctggcatcggcttgcttcgtgcttaaaccgcttattaaagtctagacgcaacataaaagcacgtaaattggttccagccatctctagtaaaaacttcagctggagctgggaagtgattggagcatctcttggtgtaattaaaattgactcttaaagtttctttagcttaattggtaacactttctttggaggttggtgaaagcgtcttgctgggaaggttaaatgcatttctgtgtataagaacagaattcaaatatagttttatggacacatttacagttatgttctacccgggtggtcttttttccctgtatcttttctatttaagatttatgctgtcattcaccacagtctaaatgtgttttgataaaaggaaaaaaaatgaaccgttgctgacgcatttcaaacagacagttggtaatattttgaagctttcagtaaattgaactgcagtttggcttaacccgagctccttctttcccccaaacccttcacttagagtctagcgcttaagctttgtttgttatccagaaattaaagtagctactactatttggctgtgtccaaaggtaggaaaccaggcattttctaagatagccacgcctttgctgtgaccgaatgcctttgacycccattatttgagaatgaatgtgtttatgtgcgtggatatgtttatatgtgctgggacttctcttctttggcattgcttcttgagggtcttgtcagtgtgatacattctgataggcaaaaggcctaggctttccatttttggagagtaatcatggacgaagcttccaattctctggactgtccttaattcagacttgggagaggacctgctttaatttacatttgtgaacattgactcttcatgatttccagggcaaggatttgatccttattgtaggaatctattttgatccatccctatagagcagagggactaccttccttgaaatcagttcaatattatctctttgtgtgtatgtggtgttgcaaaacaatgttatgaagaccataaaggaaataaaaatcactctgattctaggatccaaatgcaacaactgcttatatttctgtgttttttttcctaatacttgtctacaggcttatatagtttcagtttttgttatataggtataatttttaaccaataatcttttaaaaaataccgagttaatttttctcattaagtacgtacttgttatagaacatttaaaaatataacaaagtgtagtaccaattgctcaaacacaatgcttgctaagattttagtgtttatttcttcaaacttttatatatgccttgctttgcctcttctatgtgcaatatgaacaagaattgtattcatattgcatatataattatgatttctgtctttttatttcacatgattttaataatatattattataaatttttgataaatatttaaatggttacataataatatgctacattaacaggctgtaatttgctttagcattcttttactagaagataatgttccattttattttttgctattgtaatgctacaaatgggcaggataattctaaattcagatttgtttgttttctgcatccagaattatttcctttccatagattccaaaagatgaacttatatcatcaaaaggagtgaaaagatttaaggctcttgataatattgccaaatgtatttccaaaatgttctatcaatttacagtcttattagcaacatacagagctaccattattggttatggccaatgatgttagtg

SEQ ID NO: 33738 - DNA, 572 bp, Homo sapiens
tggcatagaaaggcccagtatagaaagtgagaggtacatgatatagttgagctgaagtgctgtcaggttacatcacatacatctggttgcagcaacaatgctgtagtggaaagtgggggtggtggtaagagaccctaggaagtgcacaagaggagtcagacatggtgtgcatgtattataacctcatgtgtgctttccctgtttaattaggtagatttggagcctgggtggatgcagcatctatttaatcttgatgtttttctttgtgaacccacacctcactttctttcagtgaaggtgtcccccattcactacctccacctcttatgtcctccaggcctggccaatgagaacattgcatttccccaaccaaagtgattgactcagggacggggatgtgatacagccagaatcgagagaaccaatcaaggctttcccaggactaatggggaaaaaacaccttttctttttctatttgraagatgtaagactgtagcttcaggggtaccactcagagcttgaaaaaaaaatgaataaagcaggagatggagctgagatccagagaaaaacca

SEQ ID NO: 33739 - DNA, 572 bp, Homo sapiens
tggcatagaaaggcccagtatagaaagtgagaggtacatgatatagttgagctgaagtgctgtcaggttacatcacatacatctggttgcagcaacaatgctgtagtggaaagtgggggtggtggtaagagaccctaggaagtgcacaagaggagtcagacatggtgtgcatgtattataacctcatgtgtgctttccctgtttaattaggtagatttggagcctgggtggatgcagcatctatttaatcttgatgtttttctttgtgaacccacacctcactttctttcagtgaaggtgtcccccattcactacctccacctcttatgtcctccaggcctggccaatgagaacattgcatttccccaaccaaagtgattgactcagggacggggatgtgatacagccagaatcgagagaaccaatcaaggctttcccaggactaatggggaaaaaacaccttttctttttctatttggaagatgtaagactgtagcttcaggggtaccactcagagcttgaaaaamaaatgaataaagcaggagatggagctgagatccagagaaaaacca

SEQ ID NO: 33740 - DNA, 607 bp, Homo sapiens
gtcccctgtctcatgacctctctgactcagtatctctcggtgacatcactttcttcttcttttttttttttaaccttttattttaggtgcaggtttgttacgtagacaaactgtgtgtctcgggggtttggtgtacagattatttcgtcacccaggtaataagcttagtacccggcaggtagtttttgatcctcgccttcctcccaccctccaccctcaagtaggccccggtgtttgttgttcccttctttgtgaaagacattcttttctgaccagctttttctctcttttctatgccacgtcataacttcatcttgcacgtggctttggcttacgtgagcctgtggcaatttgacagctccaataaaattacttcctggcaattcattccttgttgttgagtccaaattgccaaaggaaagactctggttggcccagctcatctttgtrtgccagctcctgagtatgtgatggcaaacctatgtgctggctgtcttgaggtcaggcttctgaaatctctgtgcgtgtgtggggtgcagctcatgagtttacagagcaaagactacagatggagcacactccccagaaaggcctgtggccgggccga

SEQ ID NO: 33741 - DNA, 819 bp, Homo sapiens
tcattcaacacatttttatcaagcaatctcaatgagtcagatacaggggagacatcaaaatttgaggggcaggctgggcacgatggctcatgcctgtaatcccaacagtttaggaggctgaagcaggctgatcacttgaggtcaggagttcgagaccagactgaccaacatggtgaaaccccgtctctactaaaaatacaaaaattagctgggcatggtggcaggcacctgtaaccccagctgctcagagacggaggtaggaaaatcgcttgaacccaggaggcagaggttgcagtgagccgagaccacgccactgcactccagcctgggcagtcagcctaagcaagactccatctcaaaaacaaacaaacaaacaaacaaacaaacaaaccaaaaaacaaatygaggggcaaatgtggcttcttagaacaatttccccggtgactccctgagatgcaagtcttatcccccaacagacttgtgaagggtcaggcatttaaccctcatcatttgcaggatgtttttgcttgacaacgctatgaaatttatttattctgtcagaatggaggaaagatgtttttaaatacataatctccacctctacgtaaaaatctggcttgtatcttcacagcacaaaattcaacattggacaccccctcaatagttttggaggatctatatcacttcaatttctgaaatgatttaaatatgaacatatatttatatataaatagaatcacactaagatatacataaaagcaaatacaggtgccaaggcaggaaaggcggaggcagatggtgtatggagaggagaaaagg

SEQ ID NO: 33742 - DNA, 1035 bp, Homo sapiens
gatcaggaggtcgaggtcagttctgggagctctgtggtctccatgtcataatggttctttccgtcrgaataggtcttccccttcaagacctctatgagctgctgtaggcgcttggcaaaagaaagtccttggggaagttttgtggtagatgagggtgtaggtgggggtgggggtgggggtgggggtaaaggtgagggtgggggtgggggtgggggcgggggtgaaggtgggggtcggggctgggctgccggtggtcggggtggaagtggtcgagggggcggttggaaataccaaggaaggtgagcagagagagggtgggagaaggggggtcgaatcgggggcggtcgagtggtgggaggtggaggggtggccgattgaatcatacgcaaagcgttagaaccaatcttggaggcgatccagttcagatagggccaggtggccgtgtagattccggggcgcttggcacgggcacagcctaccccccagcttgtgattcccacgaccacacaggcgctttccttgctgtctttgcacatgagaggcccgccgctgtccccctgtccagaaggacacagaggtcactatctgcctgagccactcttcccctgcccagaggggtcagaaggctctgggaggacaatttccacagtcacatggtctcctgctgctgtaaacgcaagtggttgtagtaaagtttgagggggtgtcaggggcttcatgtgggatgtgaggagggtgtgaattgtcagggctttccttgcagtgagatgagcaaacccacgtgtccacaggggcacatggcaggggcagccggtggctgtcaccgctcatccccactgtgagagtaggtgctagaaaagggaccggggaagcagtcactagagaagggccctgggcagagcagtggagatagtggagcttggggatccaaaaggaggatgttctcaggggccgggagagtcctggagggacccaggggcccagaagccagaaggaaggttacctggcaggtgtcgatcttgcctacaggatacc

SEQ ID NO: 33743 - DNA, 1035 bp, Homo sapiens
gatcaggaggtcgaggtcagttctgggagctctgtggtctccatgtcataatggttctttccgtcggaataggtcttccccttcaagacctctatgagctgctgtaggcgcttggcaaaagaaagtccttggggaagttttgtggtagatgagggtgtaggtgggggtgggggtgggggtgggggtaaaggtgagggtgggggtgggggtgggggcgggggtgaaggtgggggtcggggctgggctgccggtggtcggggtggaagtggtcgagggggcggttggaaataccaaggaaggtgagcagagagagggtgggagaaggggggtcgaatcgggggcggtcgagtggtgggaggtggaggggtggccgattgaatcatacgcaaagcgttagaaccaatcttggaggcgatccagttcagatagggccaggtggccgtgtagattccggggcgcttggcacgggcacagcctaccccccagcttgtgattcccacgaccacacaggcgctttccttgctgtctttgcacatgagaggcccgccgctgtccccctgtccagaaggacacagaggtcactatctgcctgagccactcttcccctgcccagaggggtcagaaggctctgggaggacaatttccacagtcacatggtctcctgctgctgtaaacgcaagtggttgtagtaaagtttgagggggtgtcaggggcttcatgtgggatgtgaggagggtgtgaattgtcagggctttccttgcagtgagatgagcaaacccacgtgtccacaggggcacatggcaggggcagccggtggctgtcaccgctcatccccactgtgagagtaggygctagaaaagggaccggggaagcagtcactagagaagggccctgggcagagcagtggagatagtggagcttggggatccaaaaggaggatgttctcaggggccgggagagtcctggagggacccaggggcccagaagccagaaggaaggttacctggcaggtgtcgatcttgcctacaggatacc

SEQ ID NO: 33744 - DNA, 1091 bp, Homo sapiens
tgcatcattttactttacttatggtatttttgccctgcaaaggtgttttcattttatatatagtcaagataatcctccaggtttcagccaaactcatcatatttttccagtacttactgtttgggttttttttacatttatcaaattggaatttatccttatatatggtgtgggaagtggccccgatattatcttttcatatcattaccgagttactgagtactgctcatcaaatatttcttctgctgttagaaatgttgtcctttactgcatactaaactttcacatgtaattgtgtctatttctggattttctattttctgccattagtctctcttttcatgcactgacaccttactgttataattatagaggacttatgtgatttttaaatatctgacaagttaaccttccactcattgcacctttatttaaagcttttctctggctatctttgcttgtttttctgccgaactttgtaaacagtttgcctgcctctataaataacaacaacaagaacacgaaagacaaaagcagatataattttatgggaacttaagaaaaaaatatatgtaattgagattttttttaatcccaaggtaatatatctttttttagtttattttggggatttttaaattatttwaaaattataattcatgttaaattaactgatttagtctagcttacagtggtagtggctggagaaacaagatagcccagcccctggtgagatacttcttgctcttagcagagaagtggcaaaacacacagaccctggtgtcacgcagaccttctttgaatctctggtttgctgccccccagctgtgctgcgctgggcaagtttcttaagctctctgtgccccgaggccctcatctagagagtggggctcatatgcctcatcctcttcccagctggttttcctcgctgggtgagtcgcaggatctaagctctctctagtcgttttcattgtcatgctccagttgtgagccttttaaagttccattttcaaagcagatacacattttgggaagaacagtcaagaggtagagttcttttccttcacagcacaaaatttattctacctcca

SEQ ID NO: 33745 - DNA, 1218 bp, Homo sapiens
gccctcagtgctggtggctccatgaggtacttctttctgtagtgggtgtgagattcatgagtgagatgcccccagccctgctccagggcagccttgccagtttctggaatgttctccatttccagtctgcagcttccttctgcccaggagtggcttccctgtctggctgtcattcagctcaattctgtacttaacttcaaaatgtgcataaaatcctaaaatgggacgtttctcagttgacgtcctccacctccagctcctctcacatggaagcaggtgggggcctcacggtgttctagagtttgcagggggcagagagcagcatcctcaccgcagatatcctgttacaggactatgggattaagagcttgaagtttcatttaaatcacaatgaaaacaactatggcctggtgcggtggctcatgcctgtaatcctagcactttgggaggcaraggaaggcagatcgtgaggtcaagagatcgagaccatcctggccaacatggtgaaaccccatctctactaaaaatacaaaactcagctgtgcatgtgacatgcacctgtagtcccagctactcaggaggctgaggcaggagaaccacttgaacctgggaggcagaggttgtagtgagccaagattgggccactgcactccagcctgggcaatagagcgagtctcaaaaaaaaaaaaaaaaaaaaaaaaaaaaaaaaaaaaaaacaattacaagccccaattcagcgtgctcccaggagactgtctgacttggggctctggagtttctgaggcccacagggtgagcagggaacccggccaatctctccctcctgggtccctctcaggcaggccatggtgacctggccccaggcagacgctggcagctcagaggcgtgtgggacctgcagacctcaggggttgctggacagtcctgagataggccttgcttttggccaaggcacctgaagagtgaaaacactctgtgcatagaggaacaggatggggagagcatggcaggcccttctccagttcagggccatcccctccagatccagagcaagctcgggaggggaggagtcgatgtcccaggatttgtgactcggacatcggggttgggggatgtgggtgatgttcacctgccgtggaagaacccggaggattagggtggcaggcggcagggccctgagtcaggcttgaagacgtcgggtttagaggcagcgggcaa

SEQ ID NO: 33746 - DNA, 586 bp, Homo sapiens
ctttatttagaatactattaaaatattttcattaacgataacttaatggaaaaccctttacattttcatctggtgagtatttatcaatcgccaacatggcatgtattcctgggctaggtgctggggagggggtccttgtcttaaagtgaatgcaaagtcttcttgctggcctccggatgctcacattttggtgattaagacagagctgtttcataaccacgtggcccggtcactcgtctgcctgttatttttttcaatcattcacttcctattctttcatcgtgtcatttgttagctgcacacatctgtgggaggccatcctagccagggcacctgtgcccagcattcagagtcggctgtttttaagacggtcaccttcgcaggcgttcacagcagatctgtgagcagagatgataacgccatgctgagggctccgtggggctcgcctgggggagcgggcgaggtgaagcgaggctgtgagcgtgaggagggcygcattaaacagctgacatgcgggcctcagggccagctctgctgggctgcacttgatctgtcttccgcatctactaactcatcgccgacaaac

SEQ ID NO: 33747 - DNA, 586 bp, Homo sapiens
ctttatttagaatactattaaaatattttcattaacgataacttaatggaaaaccctttacattttcatctggtgagtatttatcaatcgccaacatggcatgtattcctgggctaggtgctggggagggggtccttgtcttaaagtgaatgcaaagtcttcttgctggcctccggatgctcacattttggtgattaagacagagctgtttcataaccacgtggcccggtcactcgtctgcctgttatttttttcaatcattcacttcctattctttcatcgtgtcatttgttagctgcacacatctgtgggaggccatcctagccagggcacctgtgcccagcattcagagtcggctgtttttaagacggtcaccttcgcaggcgttcacagcagatctgtgagcagagatgataacgccatgctgagggctccgtggggctcgcctgggggagcgggcgaggtgaagcgaggctgtgagcgtgaggagggccgcattaaacagctgacatgcgggcctcagggccagctctgctgggctgcrcttgatctgtcttccgcatctactaactcatcgccgacaaac

SEQ ID NO: 33748 - DNA, 1075 bp, Homo sapiens
tttgcatgtgcaggtcacaatagggtttgcgctcctataagaatctagtgccacggctgatctgataggaggcggagctcgggcagtaatatttcctgccactcacctcccgcagtacggctggtaccgaccgtggcccagggattgggaacccccggtttgtaggatgcaggagaagggaggctcccaggagaaggaagcttcagccatgggcggatgacctggaacctgggttgggggacaggctgccaggcccagtgtctgcagcggtcagccccttctgctctgtaggatgcacctggcagagaagatggatgaccttggacaggacccaggttatgctgtgcccatgagtttcccggggatgccacgaccaagtacaacaaactggggtgggcacaggcaggagtgaaatccattctctccctgtcctggggcctgaagcctgagaccaaggtgggctgcactccctgcaggggctctagggaggacctttcctgccccctcgctcttctggcggtggccgtgacccttggtgccaacctctctacctccatcttcactgtccctcsctgccttcttctctgtgtccacaggtcttctaaagacaccagtcattggacttagggcacatctgattaatccaggatgacctcatctcaagatccgtaacttgattacatttgcaaagacccttgttccaagaaaggcacagtcccaggttcacagtgagcctgttgtgggggcccccattcagcccattacacagcttgtgggctgtgctaagagtgaatcaggcctgccttcccagtctcccctgcttccttctctggaaattggcatgaaccgtgtgccaggccggcttgtaggcttgcagggagggtgggtggattcgcgcctggttgccagcagcccccggcaagggactggtgaattcttgaactgtgggtcattcccagaggcttttgtactccatcctgtgtaccccatcctgcttggaatgtcccttgtccccagcaagatttggggttcggttaggagggacatttgtgctaggagtggtgctggctcctca

SEQ ID NO: 33749 - DNA, 1075 bp, Homo sapiens
tttgcatgtgcaggtcacaatagggtttgcgctcctataagaatctagtgccacggctgatctgataggaggcggagctcgggcagtaatatttcctgccactcacctcccgcagtacggctggtaccgaccgtggcccagggattgggaacccccggtttgtaggatgcaggagaagggaggctcccaggagaaggaagcttcagccatgggcggatgacctggaacctgggttgggggacaggctgccaggcccagtgtctgcagcggtcagccccttctgctctgtaggatgcacctggcagagaagatggatgaccttggacaggacccaggttatgctgtgcccatgagtttcccggggatgccacgaccaagtacaacaaactggggtgggcacaggcaggagtgaaatccattctctccctgtcctggggcctgaagcctgagaccaaggtgggctgcactccctgcaggggctctagggaggacctttcctgccccctcgctcttctggcggtggccgtgacccttggtgccaacctctctacctccatcttcactgtccctcgctgccttcttctctgtgtccacaggtcttctaaagacaccagtcattggacttagggcacatctgattaatccaggakgacctcatctcaagatccgtaacttgattacatttgcaaagacccttgttccaagaaaggcacagtcccaggttcacagtgagcctgttgtgggggcccccattcagcccattacacagcttgtgggctgtgctaagagtgaatcaggcctgccttcccagtctcccctgcttccttctctggaaattggcatgaaccgtgtgccaggccggcttgtaggcttgcagggagggtgggtggattcgcgcctggttgccagcagcccccggcaagggactggtgaattcttgaactgtgggtcattcccagaggcttttgtactccatcctgtgtaccccatcctgcttggaatgtcccttgtccccagcaagatttggggttcggttaggagggacatttgtgctaggagtggtgctggctcctca

SEQ ID NO: 33750 - DNA, 1075 bp, Homo sapiens
tttgcatgtgcaggtcacaatagggtttgcgctcctataagaatctagtgccacggctgatctgataggaggcggagctcgggcagtaatatttcctgccactcacctcccgcagtacggctggtaccgaccgtggcccagggattgggaacccccggtttgtaggatgcaggagaagggaggctcccaggagaaggaagcttcagccatgggcggatgacctggaacctgggttgggggacaggctgccaggcccagtgtctgcagcggtcagccccttctgctctgtaggatgcacctggcagagaagatggatgaccttggacaggacccaggttatgctgtgcccatgagtttcccggggatgccacgaccaagtacaacaaactggggtgggcacaggcaggagtgaaatccattctctccctgtcctggggcctgaagcctgagaccaaggtgggctgcactccctgcaggggctctagggaggacctttcctgccccctcgctcttctggcggtggccgtgacccttggtgccaacctctctacctccatcttcactgtccctcgctgccttcttctctgtgtccacaggtcttctaaagacaccagtcattggacttagggcacatctgattaatccaggatgacctcatctcaagatccgtaacttgattacatytgcaaagacccttgttccaagaaaggcacagtcccaggttcacagtgagcctgttgtgggggcccccattcagcccattacacagcttgtgggctgtgctaagagtgaatcaggcctgccttcccagtctcccctgcttccttctctggaaattggcatgaaccgtgtgccaggccggcttgtaggcttgcagggagggtgggtggattcgcgcctggttgccagcagcccccggcaagggactggtgaattcttgaactgtgggtcattcccagaggcttttgtactccatcctgtgtaccccatcctgcttggaatgtcccttgtccccagcaagatttggggttcggttaggagggacatttgtgctaggagtggtgctggctcctca

SEQ ID NO: 33751 - DNA, 1075 bp, Homo sapiens
tttgcatgtgcaggtcacaatagggtttgcgctcctataagaatctagtgccacggctgatctgataggaggcggagctcgggcagtaatatttcctgccactcacctcccgcagtacggctggtaccgaccgtggcccagggattgggaacccccggtttgtaggatgcaggagaagggaggctcccaggagaaggaagcttcagccatgggcggatgacctggaacctgggttgggggacaggctgccaggcccagtgtctgcagcggtcagccccttctgctctgtaggatgcacctggcagagaagatggatgaccttggacaggacccaggttatgctgtgcccatgagtttcccggggatgccacgaccaagtacaacaaactggggtgggcacaggcaggagtgaaatccattctctccctgtcctggggcctgaagcctgagaccaaggtgggctgcactccctgcaggggctctagggaggacctttcctgccccctcgctcttctggcggtggccgtgacccttggtgccaacctctctacctccatcttcactgtccctcgctgccttcttctctgtgtccacaggtcttctaaagacaccagtcattggacttagggcacatctgattaatccaggatgacctcatctcaagatccgtaacttgattacatttgcaaagacccttgttccaagaaaggcacagtcccaggttcacagtgagcctgttstgggggcccccattcagcccattacacagcttgtgggctgtgctaagagtgaatcaggcctgccttcccagtctcccctgcttccttctctggaaattggcatgaaccgtgtgccaggccggcttgtaggcttgcagggagggtgggtggattcgcgcctggttgccagcagcccccggcaagggactggtgaattcttgaactgtgggtcattcccagaggcttttgtactccatcctgtgtaccccatcctgcttggaatgtcccttgtccccagcaagatttggggttcggttaggagggacatttgtgctaggagtggtgctggctcctca

SEQ ID NO: 33752 - DNA, 1075 bp, Homo sapiens
tttgcatgtgcaggtcacaatagggtttgcgctcctataagaatctagtgccacggctgatctgataggaggcggagctcgggcagtaatatttcctgccactcacctcccgcagtacggctggtaccgaccgtggcccagggattgggaacccccggtttgtaggatgcaggagaagggaggctcccaggagaaggaagcttcagccatgggcggatgacctggaacctgggttgggggacaggctgccaggcccagtgtctgcagcggtcagccccttctgctctgtaggatgcacctggcagagaagatggatgaccttggacaggacccaggttatgctgtgcccatgagtttcccggggatgccacgaccaagtacaacaaactggggtgggcacaggcaggagtgaaatccattctctccctgtcctggggcctgaagcctgagaccaaggtgggctgcactccctgcaggggctctagggaggacctttcctgccccctcgctcttctggcggtggccgtgacccttggtgccaacctctctacctccatcttcactgtccctcgctgccttcttctctgtgtccacaggtcttctaaagacaccagtcattggacttagggcacatctgattaatccaggatgacctcatctcaagatccgtaacttgattacatttgcaaagacccttgttccaagaaaggcacagtcccaggttcacagtgagcctgttgtgggggcccccattcagcccatyacacagcttgtgggctgtgctaagagtgaatcaggcctgccttcccagtctcccctgcttccttctctggaaattggcatgaaccgtgtgccaggccggcttgtaggcttgcagggagggtgggtggattcgcgcctggttgccagcagcccccggcaagggactggtgaattcttgaactgtgggtcattcccagaggcttttgtactccatcctgtgtaccccatcctgcttggaatgtcccttgtccccagcaagatttggggttcggttaggagggacatttgtgctaggagtggtgctggctcctca

SEQ ID NO: 33753 - DNA, 1075 bp, Homo sapiens
tttgcatgtgcaggtcacaatagggtttgcgctcctataagaatctagtgccacggctgatctgataggaggcggagctcgggcagtaatatttcctgccactcacctcccgcagtacggctggtaccgaccgtggcccagggattgggaacccccggtttgtaggatgcaggagaagggaggctcccaggagaaggaagcttcagccatgggcggatgacctggaacctgggttgggggacaggctgccaggcccagtgtctgcagcggtcagccccttctgctctgtaggatgcacctggcagagaagatggatgaccttggacaggacccaggttatgctgtgcccatgagtttcccggggatgccacgaccaagtacaacaaactggggtgggcacaggcaggagtgaaatccattctctccctgtcctggggcctgaagcctgagaccaaggtgggctgcactccctgcaggggctctagggaggacctttcctgccccctcgctcttctggcggtggccgtgacccttggtgccaacctctctacctccatcttcactgtccctcgctgccttcttctctgtgtccacaggtcttctaaagacaccagtcattggacttagggcacatctgattaatccaggatgacctcatctcaagatccgtaacttgattacatttgcaaagacccttgttccaagaaaggcacagtcccaggttcacagtgagcctgttgtgggggcccccattcagcccattacacagcttgtgggctgtgctaagagtgaatcaggcctgccttcccagtctcccctgcttccttctctggaaattggcatgaaccgtgtgccaggccggcttgtaggcttgcagggagggtgggtggattcgcgcctggttgccagcagcccccggcaagggactggtgaattcttgaactgtgggtcattcccagaggcttttgtactccatcctgtgtaccccatcctgcttggaatgtcccttgtccccagcaagatttggggttcggttaggagggacatttgtgctaggagtrgtgctggctcctca

SEQ ID NO: 33754 - DNA, 921 bp, Homo sapiens
ttagagaatcgtcaaccccttggggaggttggctgggccccgtcagggcagctgtgagcaaggaagactcacagggcatcctgcctccgaggtccttcctcagtgccgcatggtggaagctgtggcaccaaccaaatatttcctgcggcctgtgcttgaagagacctacaccaactccctccgagtgactgacacctccccggaggcgcaaaatggagacatcctcttttttctgtgtgtgcaaacagaaagaaggccgggcgtgcagacgactcgggagaacagatgccccgcttggcacctcgcttggcagcctgtgttctcccaggctctgagcctgtccaggctgtggggagcgcagagagtggaagccaggaggggcctcccaaagacctcacccctagggattctctgtctctgccagcagtgccgtgcacagggttggcagaacattcaggccagaggaagaggcacctggggttggcaccatggggttggcagaacattcaggccagaggaagaggccccggctcccgacccccayggcagtggcagaggccctgccctactccacactcgtgctgcacagctgagaagggttcaaacacgttgacatgacccagcctggagtgggaaggctgtgcaggtgctcctggaatccttgcagggagccaggatctgctgctctcggccaggccctggctttgccgctctctgttcctgtgtaacagatccagcaaaccctcctgagtgtggcctctggatggggcaaggcatagagggaaacacaggggagggccttggcctggttccccccagccacagccttggtgtggagaaagaggagggggaggagaggagcccctgagggccagagcctgcaccgggcagagtggccaccatgggctctgttctggtaag

SEQ ID NO: 33755 - DNA, 514 bp, Homo sapiens
cagatcgcttcctctggctgggctggctgcggtgcgttcgccttcgcagcaccactggaactgttcttccaggcaggggcgtcttttcccccatatctgtgaatgtgcacggggctgggttggggacagaaaccgacagactgagggacagctagaaagtctggaaggagaagaatgagatacaaaatagaggacaggttggacttagagactagcagtagagaaaaagggtgaactagcaggagatgcagcagaagagcacatggattgaaaagggctctccagagacgacggggagcaaagcagggagggggtaccttgacyaggggtagcagaagtggtgtggaaaagggagatacatcagatagagtgaggggaataaaagaactgggaccacaaaaggcagaaagacctggtgccaggagcaaaaaagagcaatgtgacagggaagggacttagtaagtggaaggagccatagctcaggaagggggttgtgacagggagagtcagcggg

SEQ ID NO: 33756 - DNA, 532 bp, Homo sapiens
ggcatggcagccctggagccctataaaaccactggcagccccaatgcctcagcaccttttttttttttttgagacagagtttcgctcttgttgcccatgctggaatacaatggcgcgatctcagctcactgcaacctccgtctctatctgctcccgcccgcctctgctttccaaagtgctataggcgtgagccacagcgcctggccgcctcagcacatgtttaagtgtagcccagtggttctcaaacggagacarttttgcccctggggcatctgacaatgtctggagtcattttaaattgtcagactgggcaatgggggtgctactggcatcgtggtggaggccaggggtgctgcaaacataacacagtgtgcacaatggcccctaggagacgcccagcgccggcagtgctgtgccaaagcgccacggccagctacactggatgctgactaaaggctatcttaatattttgcagttagatggacacatttccccccagatgtgaaattctattctctatcttccccattgc

SEQ ID NO: 33757 - DNA, 538 bp, Homo sapiens
ctctgaggggtggccccaacgtgtctctgttggtcaggctggctgatgcccagggccaagcccagcacccacagggagacaaacccaaggggcacggaagccacggccatggcaatggaccatgtgggtgagcagagaaactggatttggcargcggggactgacgggggacacggggcttggcttggagggcccagggcacagccaggcaccaaggatggggtctggggctgctgaagccccaccgtggggtcctaactgggtaggcgagggagtgaggatgagaaccagggacggagaactggggtcccagagcccacagagagtaggggaagggctggggctaccaggcaaaaacctgggtgaggggctctcagcagaacagtctctccccaatgacaacctgtgtggggccctggaagccagacagaggaggcctggggctctgaggctcactgccggggctggctcagcccacactgggcaggaagacctccagtgtcctcatggttgtcctttctaattacaaagacttttg

SEQ ID NO: 33758 - DNA, 831 bp, Homo sapiens
tcagtcacaaaaatcacaaaatactgggtattctctgttgtagttttcatctttagagcttttatggtgtgtgtgtgtgtgtgtgtgtgtgagagagagagagagaaacagacagacaaagagagattgagagagagagaaaaagagaatgagacaaagtccttccccccaaaaagagggttttatgtttactttttttgttttcaggaaacttcctaatcttgagctgttctagatagaccttgacagttccagaaggaagactttcggatagtcagggctttcctctagagatgcttatttccttgagcagctctctgcctagcaggatrgaagcaggttttctgaatcattggatcatctcagactctcttcagacctgaaataatgtggcccgaggcagagcacaaggagagaaggatcttaggtcacagtttacatcagtctctcatggataattttatttattttattaaggagggggaaaaaaggaggaaggtggttattttggaagggaagagggatatgtatgtaaattttaagggaaacagtttttcaatttgtaggattcagatcttttcaaagtattataatactacattacattattaaaattattgacaatcctaagaatattaaatatatttttactcaaatatcaaatcaggtactcaaaatatgaataggcttttttgtttttaaaaaaacgattcttggctgggcagagtggctcatgcctgtaatcccagcactttgggaggctgaggcaggcagatcacctgaggtcaggagttcaagactagcctggccaacatggtgaaacaccgtctc

SEQ ID NO: 33759 - DNA, 831 bp, Homo sapiens
tcagtcacaaaaatcacaaaatactgggtattctctgttgtagttttcatctttagagcttttatggtgtgtgtgtgtgtgtgtgtgtgtgagagagagagagagaaacagacagacaaagagagattgagagagagagaaaaagagaatgagacaaagtccttccccccaaaaagagggttttatgtttactttttttgttttcaggaaacttcctaatcttgagctgttctagatagaccttgacagttccagaaggaagactttcggatagtcagggctttcctctagagatgcttatttccttgagcagctctctgcctagcaggatggaagcaggttttctgaatcattggatcatctcagactctcttcagamctgaaataatgtggcccgaggcagagcacaaggagagaaggatcttaggtcacagtttacatcagtctctcatggataattttatttattttattaaggagggggaaaaaaggaggaaggtggttattttggaagggaagagggatatgtatgtaaattttaagggaaacagtttttcaatttgtaggattcagatcttttcaaagtattataatactacattacattattaaaattattgacaatcctaagaatattaaatatatttttactcaaatatcaaatcaggtactcaaaatatgaataggcttttttgtttttaaaaaaacgattcttggctgggcagagtggctcatgcctgtaatcccagcactttgggaggctgaggcaggcagatcacctgaggtcaggagttcaagactagcctggccaacatggtgaaacaccgtctc

SEQ ID NO: 33760 - DNA, 831 bp, Homo sapiens
tcagtcacaaaaatcacaaaatactgggtattctctgttgtagttttcatctttagagcttttatggtgtgtgtgtgtgtgtgtgtgtgtgagagagagagagagaaacagacagacaaagagagattgagagagagagaaaaagagaatgagacaaagtccttccccccaaaaagagggttttatgtttactttttttgttttcaggaaacttcctaatcttgagctgttctagatagaccttgacagttccagaaggaagactttcggatagtcagggctttcctctagagatgcttatttccttgagcagctctctgcctagcaggatggaagcaggttttctgaatcattggatcatctcagactctcttcagacctgaaataatgtggcccgaggcagagcacaaggagagaaggatcttaggtcacagtttacatcagtctctcatggataattttatttattttattaaggagggggaaaaaaggaggaaggtggttattttggaagggaagagggatatgtatgtaaattttaagggaaacagtttttcaatttgtaggattcagatcttttcaaagtattataatactacattacattattaaaattattgacaatcctaagaatattaaatatatttttactcaaatatcaaatcargtactcaaaatatgaataggcttttttgtttttaaaaaaacgattcttggctgggcagagtggctcatgcctgtaatcccagcactttgggaggctgaggcaggcagatcacctgaggtcaggagttcaagactagcctggccaacatggtgaaacaccgtctc

SEQ ID NO: 33761 - DNA, 590 bp, Homo sapiens
gccccacgttctgccgtacctgcccccaggttggctgcatgtgccagggagtagtagaagtgccctgctcaacaggaaatgactctttccccgccacagtaaactgggccatctgctgcccttttggtttgctgcctcgattttgcaggttggagacattaaggcatgaagaaaccaagtgacacgcttcaattcagagcctaaagaagagtagtgacacatgtcggacagctgccgtgttcagcacagtccagagcgcgccatatatatgaacttgttgttctcacctcarccctgagaggtggatttcagtgtgtctttggatggcaagcattaagagaagagtcctaacacacagcctcaggtgcttcctctctatggtgggtttcttctccaaaccaagactgcttccctggtgtgccataaaaccaccaggttggtcacagctcttttggggcatagtatgtaagggaaatttcacccatgtggtagccaagaagtgtcaaaaaggacaaaaaagtcagaagaaaccaagccatctgggactaccagatgattcctggcaggaaaggctggctggtgttgtgatg

SEQ ID NO: 33762 - DNA, 786 bp, Homo sapiens
tgtagtcctgtagcataaagtcaggtagtgtgatgcctccagctttgttctttttccttaggacagccttggctatttgggctttttttttttttttttttcggttccatgtgaattttaaaatagttttattctagttctgtgaagacattggtagtttaatagaaatagcattgaatctataaattgctttgggtagtatggcctttttaacaatattgattstttctatccataaacgtggaatgttttttccacttgcgtcatctctcatttctttgagcagtgttttgtagttctcgtagaaatcttttagctccctgcttagctgtgttcctaggaattgtgtgtgtgtgtgtgtgtgtgtgtgtgtgtgtgtgtgtgtgtgtagtgaatgggactgcattcctaatttagctcttggcatgactgttgttggtgtataggagtgctagtgatttttgtttttgtatggtttttttttttttttgagatggagtcttgctctgttgcccaggctggagtgcaggtcatgatcgattctcctgccttagccccccaagtagctgggattagaggcacacaccaccatgcctggctaatttttatattttcgtagagatggagtttcatcatgttggccaggctgctctggagctcctgacctcacataatctgcctgcctcagcctcctaaagtgctaggattgcaagcatgagccactgtgcccagccacggtatacattgattttgtaccttgattttgtgtcctgagactttggatgc

SEQ ID NO: 33763 - DNA, 1231 bp, Homo sapiens
gccccggtgtgtgatgtcccccttcctgtgtccawgtgttctcattgttcagttcccacctatgagtgacaacatgggatgtttggctttttgtccttgcgatagtttgctgagaatgatggtttccagcttcatccatgtccctacaaaggacatgaactcatcattttttatggctgcatagtattccatggtgtatatgtgccacattttcttaatccagcctatcattgttgaacatttgggttggttccaagtctttgctattgtgaatagtgccgcaataaacatatatgtgcatgtgtctttatagcagcatgatttataatcctttgggtatatacccagtaatgggatggctgggtcaaatggtatttctagttcttaactagatttcttaatactcaggaaccactgagctaaattattgatagtggacccattttccaggaaatataatttaagtcttccaagaacggttttagttggaaaagtcttgtatgtatctcaacatgatacatacagtaccagtcaaaattaagatccctatgtgtaatatatttataagctatggattagcaactgtgagtttgtgtccagttgtgtgatcatgtatctccatatcactttccttcagtgtttggtaacaccacgccaggttcagggagaaggcaggatgtgcttggctttattagttctgaaattaggaaaggaaggctcgcattggatgttgtaaatcacagaaaagtctccttcctgatgtgcaggttatgggtaacagacagaacacaagacggagggaggtatttttatggtaagattggggcgtgtggtgtcttcaattccaggtgttatgagtcagttgcttagaaggcaggacagtgaggttgtaggtggatgcctgatacagtcatggagggaaggtgtggggtcaccttgtagagtgcttgcatgaagggcttgttactcaagcttcaatcagagaagcacctcttatgggattctccatgtcagggaggtggagagcacgccaccacactgaatgcaggcttctcaggagccctgtgaacctggtgcccctccagacagtgctccagtcactgtctttttctggactcccctcgccccaatcagaggcacccttgatgggtgcctgaccagctgtagcactaaatcagggagggccactcatgatagaataagctatctgctcaatactgtatgcatttta

SEQ ID NO: 33764 - DNA, 1231 bp, Homo sapiens
gccccggtgtgtgatgtcccccttcctgtgtccatgtgttctcattgttcagttcccacctatgagtgacaacatgggatgtttggctttttgtccttgcgatagtttgctgagaatgatggtttccagcttcatccatgtccctacaaaggacatgaactcatcattttttatggctgcatagtattccatggtgtatatrtgccacattttcttaatccagcctatcattgttgaacatttgggttggttccaagtctttgctattgtgaatagtgccgcaataaacatatatgtgcatgtgtctttatagcagcatgatttataatcctttgggtatatacccagtaatgggatggctgggtcaaatggtatttctagttcttaactagatttcttaatactcaggaaccactgagctaaattattgatagtggacccattttccaggaaatataatttaagtcttccaagaacggttttagttggaaaagtcttgtatgtatctcaacatgatacatacagtaccagtcaaaattaagatccctatgtgtaatatatttataagctatggattagcaactgtgagtttgtgtccagttgtgtgatcatgtatctccatatcactttccttcagtgtttggtaacaccacgccaggttcagggagaaggcaggatgtgcttggctttattagttctgaaattaggaaaggaaggctcgcattggatgttgtaaatcacagaaaagtctccttcctgatgtgcaggttatgggtaacagacagaacacaagacggagggaggtatttttatggtaagattggggcgtgtggtgtcttcaattccaggtgttatgagtcagttgcttagaaggcaggacagtgaggttgtaggtggatgcctgatacagtcatggagggaaggtgtggggtcaccttgtagagtgcttgcatgaagggcttgttactcaagcttcaatcagagaagcacctcttatgggattctccatgtcagggaggtggagagcacgccaccacactgaatgcaggcttctcaggagccctgtgaacctggtgcccctccagacagtgctccagtcactgtctttttctggactcccctcgccccaatcagaggcacccttgatgggtgcctgaccagctgtagcactaaatcagggagggccactcatgatagaataagctatctgctcaatactgtatgcatttta

SEQ ID NO: 33765 - DNA, 1231 bp, Homo sapiens
gccccggtgtgtgatgtcccccttcctgtgtccatgtgttctcattgttcagttcccacctatgagtgacaacatgggatgtttggctttttgtccttgcgatagtttgctgagaatgatggtttccagcttcatccatgtccctacaaaggacatgaactcatcattttttatggctgcatagtattccatggtgtatatgtgccacattttcttaatccagcctatcattgttgaacatttgggttggttccargtctttgctattgtgaatagtgccgcaataaacatatatgtgcatgtgtctttatagcagcatgatttataatcctttgggtatatacccagtaatgggatggctgggtcaaatggtatttctagttcttaactagatttcttaatactcaggaaccactgagctaaattattgatagtggacccattttccaggaaatataatttaagtcttccaagaacggttttagttggaaaagtcttgtatgtatctcaacatgatacatacagtaccagtcaaaattaagatccctatgtgtaatatatttataagctatggattagcaactgtgagtttgtgtccagttgtgtgatcatgtatctccatatcactttccttcagtgtttggtaacaccacgccaggttcagggagaaggcaggatgtgcttggctttattagttctgaaattaggaaaggaaggctcgcattggatgttgtaaatcacagaaaagtctccttcctgatgtgcaggttatgggtaacagacagaacacaagacggagggaggtatttttatggtaagattggggcgtgtggtgtcttcaattccaggtgttatgagtcagttgcttagaaggcaggacagtgaggttgtaggtggatgcctgatacagtcatggagggaaggtgtggggtcaccttgtagagtgcttgcatgaagggcttgttactcaagcttcaatcagagaagcacctcttatgggattctccatgtcagggaggtggagagcacgccaccacactgaatgcaggcttctcaggagccctgtgaacctggtgcccctccagacagtgctccagtcactgtctttttctggactcccctcgccccaatcagaggcacccttgatgggtgcctgaccagctgtagcactaaatcagggagggccactcatgatagaataagctatctgctcaatactgtatgcatttta

SEQ ID NO: 33766 - DNA, 1231 bp, Homo sapiens
gccccggtgtgtgatgtcccccttcctgtgtccatgtgttctcattgttcagttcccacctatgagtgacaacatgggatgtttggctttttgtccttgcgatagtttgctgagaatgatggtttccagcttcatccatgtccctacaaaggacatgaactcatcattttttatggctgcatagtattccatggtgtatatgtgccacattttcttaatccagcctatcattgttgaacatttgggttggttccaagtctttgctattgtgaatagtgccgcaataaacatatatgtgcatgtgtctttatagcagcatgatttataatcctttgggtatatacccagtaatgggatggctgggtcaaatggtatttctagttcttaactagatttcttaatactcaggaaccactgagctaaattattgatagtggacccattttccaggaaatataatttaagtcttccaagaacggttttagttggaaaagtcttgtatgtatctcaacatgatacatacagtaccagtcaaaattaagatccctatgtgtaatatatttataagctatggattagcaactgtgagtttgtgtccagttgtgtgatcatgtatctccatatcactttccttcagtgtttggtaacaccacgccaggttcagggagaaggcaggatgtgcttggctttattagttctgaaattaggaaaggaaggctcgcattggatgttgtaaatcacagaaaagtctccttcctgatgtgcaggttatgggtaacagacagaacacaagacggagggaggtatttttatggtaagattggggcgtgtggtgtcttcaattccaggtgttatgagtcagttgcttagaaggcaggacagtgaggttgtaggtggatgcctgatacagtcatggagggaaggtgtggggtcaccttgtagagtgcttgcatgaagggcttgttactcaagcttcaatcagagaagcacctcttatgggattctccatgtcagggaggtggagagcacgccaccacactgaatgcaggcttctcaggagccctgtgaacctggtgcccctccagacagtgctccagtcactgtctttttctggactcccctcgccccaatcagaggcacccttgatgggtgcctgaccagctgtagcactaaatcagggagggcyactcatgatagaataagctatctgctcaatactgtatgcatttta

SEQ ID NO: 33767 - DNA, 539 bp, Homo sapiens
agcacttataaggccccctggcaagagggttttagaaaagctgtggttgggatagagctctgcgtgagggggcaggaagaggcttgcagagagaggagaaagaaaagagagagggtgcagagaggcagcagctagggaccccagggagggctcctggaggaggtagccacattgagaggcagctcagctggcaggaggggtagacacatacatcgcagtggccctgccttatctgtaagtatgcacagcatcagcggtgcgggcatggctaggaagaccagctttagtaagagttcccaggtacaccttctggggttgcsgatgggactgacaaaacagtaatgaagtattagccaggttagtggaagcatggcagccttcctgagaggtgctgtgcccgcaccgccacagattccaccgtggctcctcctggaggaggagggagcgctggggaggcaccactggccacacaagccggaggtgagcagagacctggacgtgagtttggggcttgcaggggctgggctggcttggaggtg

SEQ ID NO: 33768 - DNA, 599 bp, Homo sapiens
ctctcctgccaccaccatgtgaaatgtgccttttaccttccatgatgattgtgaggcctctcgatccatgtggaactgtgagtctattaaacctctttcttttgyaaattgcctagtcttgggtatgttttcatcagcagtgtgaaaacagactaatataggtagcaatagacaactacactattcattaatatcagaaaagctttaatctgtttttatcagtttaaacttatttgaggatatgatattattattattattattattattttttgagatggagtctctctctgttgctcaggctggagtgcagtggcacgatcttggctcactgcaacctctgcctcccaggttcatgcgattcttgtgcttcagcctcccgagtagctgggattacaggcacgtgccatcatgcctggctaatttttgtatttttagtagagatggggttttaccacattggccaggctggtcttgaactcctgacctcaggtgatctacccacctcagccccccaaagtgctgggattacaggtgtgagccaccatgccaggctgagggcatgctatttttatatcttgaaaaaccaattattaaca

SEQ ID NO: 33769 - DNA, 606 bp, Homo sapiens
cccacagcaaccccgttctctctacttgacaatgagctgaggcccagagggggtgaacggctggcccagggtcacacaggtagaagatggcagagccagggtgagcccaggtgtgtctgacacccatgcccacrgccggtgatcactgtgccctggtcctctgtgtgtgtcccttcagaagggtggctgtcaggtggcaggaacatgcctgaccagagctctgaacagggatgctgagcaggtgcgggctgaataaacactcacggaagatggcccagtgtgtgaaggcctggggaccagagtgtcaggaggtttaaatttcagccgagttcctgaacggacatccaggcagcgtgaagaggcccctgatctaggtgccgggttctttaatgagctgacttcccaccgcgggaatcacactgcatgctcggtcctctgagctgaaaggggtatgattccaagcctggtggaaaccatgacctgggctgtgagtgaccacacagactgttagaatatttctcctgagctcactgcatgctggggctgggccaggccctgtacacacaatattgcctgtgagtctcagacatgtgcactgcagagctg

SEQ ID NO: 33770 - DNA, 606 bp, Homo sapiens
cccacagcaaccccgttctctctacttgacaatgagctgaggcccagagggggtgaacggctggcccagggtcacacaggtagaagatggcagagccagggtgagcccaggtgtgtctgacacccatgcccacagccggtgatcactgtgccctggtcctctgtgtgtgtcccttcagaagggtggctgtcaggtggcaggaacatgcctgaccagagctctgaacagggatgctgagcaggtgcgggctgaataaacactcacggaagatggcccagtgtgtgaaggcctggggaccagagtgtcaggaggtttaaatttcagccgagttcctgaacggacatccaggcagcgtgaagaggcccctgmtctaggtgccgggttctttaatgagctgacttcccaccgcgggaatcacactgcatgctcggtcctctgagctgaaaggggtatgattccaagcctggtggaaaccatgacctgggctgtgagtgaccacacagactgttagaatatttctcctgagctcactgcatgctggggctgggccaggccctgtacacacaatattgcctgtgagtctcagacatgtgcactgcagagctg

SEQ ID NO: 33771 - DNA, 792 bp, Homo sapiens
tgctgatcaaagaagagccaccgtggccaatgacagccacagaaaacagtttctgagctggtggagtcctgaggtctcaagaggaagcctggtccgattacactaaatgctgtgttcttcaacacacatgggacacacgggtgaaggagagatgggacatgcacctcttggtcccctgacacactcagggcattagtgcacacgtttccctctctccagaggtgtggtgggcagaataatggtccccctagtggccttgccctaatccccagaacctgtgaatttgtgaccttacacggtgctatggtttcaatgtttgtcccctctgggactcatattgaaactcagttcccaatgtaacggtactgagaggtggggcctttaagaggtagctgagtcatgagggcagagccattcgtggattaacagactaataggttatcacaggggtggggtcgttaccacgaaagtgggcctgttataaaagccagtctggctctctctacaccccccctccctgtgatgctttctctcatgttatgacacagtgcatggccctgacctgaagccrgccagatgcatctgcctggtcttggacttcacagcctccagaactaaaagaaagacattcattttctttataaatttcccagtctcagctattcagttgtagcaactgaaaatggactaagacacatagcaactaggactttgcacatgtgactgagttaaggatcttgagatgaggggatcatcttgtatcatccaagtcagtcctaaaagtaatcacaa

SEQ ID NO: 33772 - DNA, 792 bp, Homo sapiens
tgctgatcaaagaagagccaccgtggccaatgacagccacagaaaacagtttctgagctggtggagtcctgaggtctcaagaggaagcctggtccgattacactaaatgctgtgttcttcaacacacatgggacacacgggtgaaggagagatgggacatgcacctcttggtcccctgacacactcagggcattagtgcacacgtttccctctctccagaggtgtggtgggcagaataatggtccccctagtggccttgccctaatccccagaacctgtgaatttgtgaccttacacggtgctatggtttcaatgtttgtcccctctgggactcatattgaaactcagttcccaatgtaacggtactgagaggtggggcctttaagaggtagctgagtcatgagggcagagccattcgtggattaacagactaataggttatcacaggggtggggtcgttaccacgaaagtgggcctgttataaaagccagtctggctctctctacaccccccctccctgtgatgctttctctcatgttatgacacagtgcatggccctgacctgaagccggccagatgcatctgcctggtcttggacttcacagcctccagaactaaaagaaagacattcattttctttataaatttcccagtctcagctattcagttgtagcaactgaaaatggactaagacacatagcaactaggactttgcacatgtgactgagttaaggatcttgagatgaggggatcatcttgtatcatccaartcagtcctaaaagtaatcacaa

SEQ ID NO: 33773 - DNA, 700 bp, Homo sapiens
tgcaccaggccgtctggacacccctgcatgacaccaagtgcctgggcctcaagtcgagtcgggkggcgggaggcactgctgtcccaaccagggggcctcagctctaccaggcacacaaaggaccttcctggggtgccctctctgcccgtccgcttccccatttataaaaacaaaaagcagtcatggtcgacacaaagagctctccatgcgggcacatctgctccgcaggggacacttggcgatgtctggtgacctttttgattgtcacattaggggcagggtgctcctggcatccccaggggtggaggtggggaggctgcggaacaccccacagagcacagaggtccccaccccagccaatgagcggagaacgtcttgagcattcactgtgccaagggggagacctgagtgttccctgctgtcccacgggcctgaagccggcaggcaggctggcacctaagtgccaccaacaccctgggaagttctgggtggaactctggcacagtcaggtttccagcagacggttccctggtttgctcaccttgaaccactggcctgatccccagaggacacacccctggaacgggtcctccaacctgtgtctagacagaatttatcatgcgtgtgcccctctcctgctgcccccagaagccgctgagctgataggcctttctcagcacccacccaccctcctccaaaa

SEQ ID NO: 33774 - DNA, 540 bp, Homo sapiens
acaacacaccacgctgcttagacagacgggccgcctctagtatcgaaacgagcctcgctactttcatgcacgtggtgcctcggaaccatggctaacgttctctaaatgactacagaagaatcaacaaaaacattttctaaaaaaacaataaagaagtaacagaaaacgttaactcctgggcagttcttattgtttgttccaggggacrcaaaagggagggccccacggggtgttcccacacgacgcagggttgccacagcccgtccttccgtccatggacttctcggacagcgtttggtggggaaggatcccgcagtcaacacaggcagctcattaggctgtcaggaaggcagccctgacgggcacactccatgcaaagggaatctgctcagggcagcagccacgtctctgctgtgacctgacactcaggtagggcaggccccatctgcccagatgcacgtccttcccgcccacaggtcacagcagggcttggctcctcacacatgcagggctgggtaggacatacccagacattggcag

SEQ ID NO: 33775 - DNA, 580 bp, Homo sapiens
cattttttatgcaccagtgttgatgttattgattaattaacttaaattttcacttgctctgagatattgggcaagttacttaagcctccatttcctcatttgtgaaatgmgggcgtaataatttttaacttttaggccttgtacatgtacatgagagtttaaacagaataactaaacagaaaagcatagcatacagtacaatgtctggcatttttattaagtatccaaatataaaatataatttctttacttccttggggttcccaattgctctttttcagagataattctccttgtcagagaaagcaaaactaacaaaataagtgggaatcctttcatttaatcattaattttctgccttggtaccctgaggtaaacccagccttccatgttgtgcttcaatttttccttcaaagttttgtaaatctctgcttattttaatcttttttttttttttttttttttggagacatttttcgctccgtccccaagctggagtgcagtgggcgcgatctctgctcactgcaacctccgcctcccctggggttcaaacgattctcctgcctcaccctccagatta

SEQ ID NO: 33776 - DNA, 571 bp, Homo sapiens
tgagagtttgaggacaagaaagatgaagcttggaggtcacagctggatctgcttgttgcatttccagctgtgcagcacgtctcagagattcttgaagaatgaagacatttctgctctcagctccgggggtgaggtgtgcctggcctctgcctccaccctcctcctcttcaccaggtgcatgcatgccctctctgagtctggactttgcttcccctccaggagggaccaccctcccygactggcctgggatatctttacaagcaggcactgtatttttttattcgccatctgatccccatgcctagcagagtgctggcacttagtaggtcctcaataaatatttattaaatgatgagatgatggaatcacctggtattctagctgagcctcatcactgcctgccctcttctgacctcaggggtctttggatagtcagccacatctatggtctccaaggcccctttctcatcgccgctgctatgggagcctcaatgagagaaccagggattctgtacatcatgtagccctggatctggcgctggtgctccgtctctaaggcccttgtcctgtc

SEQ ID NO: 33777 - DNA, 612 bp, Homo sapiens
tcctgacctcaggtgatctacctgccttggtctcccaaagtgttgggattacaggtgtgagccaccatgcctagcctgcatttctttctaagagcccaagatgaagcttagaagaaaagacactagcatgccaggatagtccatattgtgctgtaagtgaaggcagcatggagaagtcttggcaatataggtaacaaggtcaggggcagccacaggtctgaataggtggaaagatgagagctgctgggtatagtatcaaagggttaggcaaacaatagaaccaataagtgtgcgtgtttggaaaggacagaagaagaaaacaaaataaacaaaaccaaaaccaagtacagcattgggccccagggattagaaagtcaagcaggagctagcacggccaatgcactttgcttctttcactggaaaagtccaaaatatattttcctattagtacacagagatcttctgcatttgatttttaaaatttaacacagctacataatattccacatttgtgtatgtacaaaacracttcttcattcttatttaaagatgcataggatctcctagtgaaagatacaatttatttaaccagttcctacttatgggtcatca

SEQ ID NO: 33778 - DNA, 612 bp, Homo sapiens
tcctgacctcaggtgatctacctgccttggtctcccaaagtgttgggattacaggtgtgagccaccatgcctagcctgcatttctttctaagagcccaagatgaagcttagaagaaaagacactagcatgccaggatagtccatattgtgctgtaagtgaaggcagcatggagaagtcttggcaatataggtaacaaggtcaggggcagccacaggtctgaataggtggaaagatgagagctgctgggtatagtatcaaagggttaggcaaacaatagaaccaataagtgtgcgtgtttggaaaggacagaagaagaaaacaaaataaacaaaaccaaaaccaagtacagcattgggccccagggattagaaagtcaagcaggagctagcacggccaatgcactttgcttctttcactggaaaagtccaaaatatattttcctattagtacacagagatcttctgcatttgatttttaaaatttaacacagctacataatattccacatttgtgtatgtacaaaacgacttcttcattcttatttaaagatgcataggatctcctrgtgaaagatacaatttatttaaccagttcctacttatgggtcatca

SEQ ID NO: 33779 - DNA, 594 bp, Homo sapiens
taaaacactttgtatggtgcctggtacatgaaatgccctcaatgaatatcaacagtaataattattatcatcatggtcattgtcatcataattgttattataattaaggcccccggatagggagaaggtggtagattggagagtttggggaatactaggcatttgtaaaacaaagctggtacagtctggatctgataattcatcacttactaaatttgacccatcatttttgcttttaatgaaaatatattcaatattggaactaattactattaaattggcctcgttattaagcatcaagggatcaatggtggactcagtgggttatcgtcattgaataaaatgtctcaaggagaaaaaaaaagttgaattaatacacaatcctggagccaattgaaaaatccctaataacaccggctgttgctgacaattaattctaggagtctgtaaatcatgaaagagctttggaggcagaaaccaagttagaagaagaaatgaagaattcaactcatgctggctctctcagaggttctataaccaagagggagttagggagatttraggaaacctattactccaacgaggggtatgggg

SEQ ID NO: 33780 - DNA, 574 bp, Homo sapiens
aagctactcttaacaaatgaaaaaaatcaatgtttgaagaatctgtggtggtctgacactaaagtgacctgaaaagatttgtcccagccattctacaactcagggcatcaagagagaggagaacactccaatttctcccaggctcaagtaatttcagttttctgattagcttggtgcagctctcaggaactctgttaggcagatgacttgtcacaccaaacacaggacgagctcatcactggtcaggaagccaactcagtcagagagattggcttgcctccccctaatcaatgccatccacaaaacactaagagtcacaaccactgccaagccagctcttgctcctccatgactagttttgagcagcgggatcactcagtctgtcagaagctattagactcggattggctgattttgagaaagagggtggggggatttttttcaaggacaagctgaacacatagaagrgaaaacacagtggccctagcccagcatccacggctgaggagaggaattagatgactcgaagaagaaagacaactgacaaaatgatgtttttagctgtgttagggta

SEQ ID NO: 33781 - DNA, 618 bp, Homo sapiens
gatcttcaataataaactgacgctgaacaaccctatttttttttttttttgagacagggtctcactgtgtaacccagactggagtgcaatggcacgatcttggctcactgcaacctctgcctcccaggcccaagcgattctcctgactcagcctcccaagtagctgggattcaggcgcacaccactactgcccagctaatttttgtatttttggtagagacagggtttcaccatgttggccaggctggtcttgaactcctgacctcaaatgatccacccacctcagcctcccaaagtgctaggattacaggcgtgagctacagcgcctgaccaacacaattttttttaaaaaaaagcacractatgactcgaaaattcagagaagaactaaaggggatcagtaaacgtgaaaatatgttcaatcttcacacttatcaaagaagtgcaaatgagttctttttaactatatgacagaaacaattgaaaatgtttataacagctagtgtagcaagcagatgaacaggtcctcatctccatgttaaaggaaactaaacctcactgtggtcatctaagacttcaggacttccctcttcactggctcttcacatctttaaaaaa

SEQ ID NO: 33782 - DNA, 1071 bp, Homo sapiens
aaggcatatgcttgtttacccatgctacttctgtctaaggcccaaggtgaggccatcctaccccagccactctaaatggcctggccacctgtgcagatgggtgcccggtggggctgggccctcgattcgcatcaggcaagctcatctccatgccttgcgtgctccccagcttgtcaagcctccatctgtttcgttcttcactccggcatcccatgtaccttcctcaatctggatttggggacatgccctctggccttcatgagccacaactgtagaggatataagaaaatcaaagtttatttctctatttttctggagcactccttcccaaaacaggataaatacatgaagatgtaagacctaatatgtcttaaaatgtctatggttttttctctactcttgatagatagtctgagaatgtcttagttcattttctgttgctgtgacagaagactacagactgggtaatgtatacagaaaataaatttatttcttttagttctggaggaagataatcaatgtcagcaggcttcccaatggaagccaagagcagggattccagaatcccaagaggaaccaatttccaacctcaaggcctgggaagttcaaggtcgaggggtcatatctggttggcttctggtgacagcgttcatcccgtgtaatagcatggcagaaaactggaagggcaggcaakcgcttgaaaaaagagatggggcaaagggggctgatccactttataacaaccagcgcctcatgagaaccaactcagtctctagagaacagtgttaatgcacgcatgagggtgtgcccccatgacctaatcacctctgaaggttcccattacctctcactcagtactgttgccctggggaccaaattcaccctgagtttcggaggggtcaaaccacatccaaaccatagcagggaggatgtaggccttgagggtggaaatggtttcctctcgggtttctggaatatttgctgttggcttccatgctctgttgctatagggaaacccactgacattaattctctatcttccatgtgtggcctggttttcttctgaaagct

SEQ ID NO: 33783 - DNA, 1071 bp, Homo sapiens
aaggcatatgcttgtttacccatgctacttctgtctaaggcccaaggtgaggccatcctaccccagccactctaaatggcctggccacctgtgcagatgggtgcccggtggggctgggccctcgattcgcatcaggcaagctcatctccatgccttgcgtgctccccagcttgtcaagcctccatctgtttcgttcttcactccggcatcccatgtaccttcctcaatctggatttggggacatgccctctggccttcatgagccacaactgtagaggatataagaaaatcaaagtttatttctctatttttctggagcactccttcccaaaacaggataaatacatgaagatgtaagacctaatatgtcttaaaatgtctatggttttttctctactcttgatagatagtctgagaatgtcttagttcattttctgttgctgtgacagaagactacagactgggtaatgtatacagaaaataaatttatttcttttagttctggaggaagataatcaatgtcagcaggcttcccaatggaagccaagagcagggattccagaatcccaagaggaaccaatttccaacctcaaggcctgggaagttcaaggtcgaggggtcatatctggttggcttctggtgacagcgttcatcccgtgtaatagcatggcagaaaactggaagggcaggcaagcgcttgaaaaaagagatggggcaaagggggctgatccactttataacaaccagcgcctcatgagaaccaaytcagtctctagagaacagtgttaatgcacgcatgagggtgtgcccccatgacctaatcacctctgaaggttcccattacctctcactcagtactgttgccctggggaccaaattcaccctgagtttcggaggggtcaaaccacatccaaaccatagcagggaggatgtaggccttgagggtggaaatggtttcctctcgggtttctggaatatttgctgttggcttccatgctctgttgctatagggaaacccactgacattaattctctatcttccatgtgtggcctggttttcttctgaaagct

SEQ ID NO: 33784 - DNA, 1982 bp, Homo sapiens
atattttatttatttaacattacacacaacacatatgttacaggtattttctttaacaccacgtgtaacatatctgttctaggcgtttgacaaatttcgactcaatcctcagaacaaccccattttacagattaggaaattgaggtttacatagactaagcaactttcccaggtttattaagtgatgaaacggaatctgaaatctagacatttttgttccagaacccatgctcttaaccagtgcattgagctgcctattttctcacacctatagcaacatgaaattgacaaatattttgatcatagccaacttggtaagtaaaaaaagaaaaaaatctaattttagtttgcattttctgtactatgaccaaggttgaacatttcttcaaatgtttaagaaatatgtttttcccttatgtgaactgtttttaattgttgtctttttttccttttatctattgactttcttattggtttatagaagctctttacatattaagcagtccttctgtgatatggaatgcatgcatttttctattcttttatgtctttcaactttatgggttttttaacatcacataattaaaaaacatttatgtagtcaaaatgtgcacattttttggtatgtatttgtgtctatgtgtgtgtgcatatttaacatgctgagaagttctggccgtcctgagatttaaataattctcttttgtcttcttctagtacttttatcagtccattgaagtctttcatccatctggagattttttttttctgtaaaatgtgagggagggattccgttttttcccatacaccattaattgtataatctatcttctcctttcactggacatttttcctttataatatagtaaatgtcctcatgtgtttgggatcctccaaatgtgtgtatgatctgtgtatgaatgtaggtggatcactttaaaaattcttgtaatttaacacattttaccaactgatagagctagtcactcaactaatctttttggtgagaacttttgaatcagcatatctggtttctcaaaacatccagttgatgtcttttatgaggataattaacatcttgatgttgtctagctttccttttctaaaacatggcatgtatatacatattttaagtcttctttatatctagttccattttaatttttaaaaagtagagcttgaacatttcttaggtttattagtagatattttaatcatttttattatagcttctaataaattttgttttaatatataaaacctattgacttccatatgccaacttcatgtctatactcttagtgaattctatcattatttgtaatagtttttcggttaattttcttggaatttccagatatataattatataatctgcaaataataataattgcatactttctcaattttcatatatcttatttctttctcttctttatgttggtatytctaggataatgttcaataatagtaacaatagtagatctctttgccttgtcttaactttaacaggaatgtttatagatattatcttattaattataatgctgacctttgggatgagataaatgcattttatcatattaagtatcctgtcatttttgagcagttgcaaaaataaaaatatggctgttgagatttatcagtgcttttccagcataaataaagatgattatatgatttgccttttgatctaataatatggggaattacattaatagatttcctaatgttgaaacatctgtgcgtttctggaaaaaggtaagttgtgtttctatttttcattaaatttcctaaagattttgctttatgaatgtgtatgctttgtggtttgtgttacgggatctttggggtgtcacttttctggccagaaacctgtggctggtggtgcctttgcccgagttttgctcgggcccgctgggctcattctgcctactcagcctggcaggctgtgctcggatcatgctaccagcctggatcct

SEQ ID NO: 33785 - DNA, 1982 bp, Homo sapiens
atattttatttatttaacattacacacaacacatatgttacaggtattttctttaacaccacgtgtaacatatctgttctaggcgtttgacaaatttcgactcaatcctcagaacaaccccattttacagattaggaaattgaggtttacatagactaagcaactttcccaggtttattaagtgatgaaacggaatctgaaatctagacatttttgttccagaacccatgctcttaaccagtgcattgagctgcctattttctcacacctatagcaacatgaaattgacaaatattttgatcatagccaacttggtaagtaaaaaaagaaaaaaatctaattttagtttgcattttctgtactatgaccaaggttgaacatttcttcaaatgtttaagaaatatgtttttcccttatgtgaactgtttttaattgttgtctttttttccttttatctattgactttcttattggtttatagaagctctttacatattaagcagtccttctgtgatatggaatgcatgcatttttctattcttttatgtctttcaactttatgggttttttaacatcacataattaaaaaacatttatgtagtcaaaatgtgcacattttttggtatgtatttgtgtctatgtgtgtgtgcatatttaacatgctgagaagttctggccgtcctgagatttaaataattctcttttgtcttcttctagtacttttatcagtccattgaagtctttcatccatctggagattttttttttctgtaaaatgtgagggagggattccgttttttcccatacaccattaattgtataatctatcttctcctttcactggacatttttcctttataatatagtaaatgtcctcatgtgtttgggatcctccaaatgtgtgtatgatctgtgtatgaatgtaggtggatcactttaaaaattcttgtaatttaacacattttaccaactgatagagctagtcactcaactaatctttttggtgagaacttttgaatcagcatatctggtttctcaaaacatccagttgatgtcttttatgaggataattaacatcttgatgttgtctagctttccttttctaaaacatggcatgtatatacatattttaagtcttctttatatctagttccattttaatttttaaaaagtagagcttgaacatttcttaggtttattagtagatattttaatcatttttattatagcttctaataaattttgttttaatatataaaacctattgacttccatatgccaacttcatgtctatactcttagtgaattctatcattatttgtaatagtttttcggttaattttcttggaatttccagatatataattatataatctgcaaataataataattgcatactttctcaattttcatatatcttatttctttctcttctttatgttggtatttctaggataatgttcaataatagtaacaatagtagatctctttgccttgtcttawctttaacaggaatgtttatagatattatcttattaattataatgctgacctttgggatgagataaatgcattttatcatattaagtatcctgtcatttttgagcagttgcaaaaataaaaatatggctgttgagatttatcagtgcttttccagcataaataaagatgattatatgatttgccttttgatctaataatatggggaattacattaatagatttcctaatgttgaaacatctgtgcgtttctggaaaaaggtaagttgtgtttctatttttcattaaatttcctaaagattttgctttatgaatgtgtatgctttgtggtttgtgttacgggatctttggggtgtcacttttctggccagaaacctgtggctggtggtgcctttgcccgagttttgctcgggcccgctgggctcattctgcctactcagcctggcaggctgtgctcggatcatgctaccagcctggatcct

SEQ ID NO: 33786 - DNA, 1617 bp, Homo sapiens
ggggagtttattaaggaggattgactcacacgatcacaaggtaaagtcccacaatagaccatctgcaagctgaggagcaaggaagccagtctgagtcccaaaacctcaaaagtagggaagccagcagtgcagccttcagtctgtggtcgaaggtccaagagtccaaaagctgaagaacttggagtccgatgtttgagagcaggaagcatccagcatggtagaaagatgtaggccagaacactaagccagtctagtccttccatgctcttctgcctgcttttatcctrgccgtgctgacagctgattagatggtgcccacccagattgagagtaggtctgcctctcccagtccactaagtcaaatgttaatctccttggcaacaccctcacagacacacccagggacaatactttgcatccttcaatccaatcaggttgaaactcaatattaaccatcagtgggtatgttctttgtaaggacagggaaaggcccagaggagctgcagagcagcaccgagctccggccatcggttgtgaaagctggatcccatgtgttcatgggcacagacacgtgtctgtgtgtgagtgtgtgcatgcgtgtgtcagagagaaaaagagagaggagggagggaggaagatggatggggttgagatggcgatgaaaaggggagacaggctgagcatgggacagagtgacaggctagcacctcaccatttctgtgttacctacaaaacggtgaccttagtagagtaaaatttgcctgagaacttcaccctgtctcccaggctgagtctagcactcagcctcctggggggcgggtagcagagtcttaggtgtgccccagaggtggtggaaggtggcagcacctccagctggaggaggcctcctaattaggcgcaacctgagctgtcacctcctccgaccccatcagcccatgctgattgccaccaggtgcatgactctggggcacacctctcactcacctagctcctggtggggaagcaaatcccatgtggcttcctcccgcgcctgcgtttgggtgggggaaccggcctgcaccatcctaccctttcagggccccaggagactgggccccagcgcactttgccttcctgctcgcccagttcaacagagtctgcagcctcgaatccagatcacagagggccaggctacagtgacctttctggattctgtaccttgacgttttcatgccgagaaagcaaacaggaaagacgccttttgaacgctgtagtcaaagtttccgctaagaccactgcagaaagctcagcttctcagacctcaggcaagcttgaaagtactttcctctaccattttaaagagaaagggagttgtgcttcactcgcggtcattaacccaacaacttgggctagtctcagagggacacttgctcttctgagcacagcccaggaaaaggcagaaagaaattattcgagtggaccccaaggaaaatacgctgttgggatgcacatcctaggtagtgcgcggagcagatggtcagctcctgttggctgagagctccagagctcccagaataccaatctgattgtgtggcctcccgccattgatcacccttcagttgattcccacagctcctg

SEQ ID NO: 33787 - DNA, 579 bp, Homo sapiens
tcctggtttctcctagactcccggcacctcatgcactttttccctttgttcatttttaatatgataacttttcaatactaacagggacacaaatatgyacataacacattatgccatgtcttatatctttcttgagttgacgttctatgagatatattatcacatcaacacatgagttaaaattgtcctattatccatacctttcaatgctgtccatgttgttaaattatagcagctttctattttgatttataaatggacaggaatatatcagtaagacactaccagagtagtgcagtgaatatgcatgcattcttacatgtttacagagagagataggaaaataaaaggaaaggaatgggatggaaagaaaaggaaagaaataaataaatgaaagaaaagaaaatgaaagaataagaaaggaaagggaaggaatgccagcctttccctaaagacacatgacacaacttgagaccaaaagtcatagcattataaacagaatccctacgtttataactctttctgtttgatttttaccctcagaaggaagattacaaaaaacaatgcaactgaaattca

SEQ ID NO: 33788 - DNA, 1054 bp, Homo sapiens
atgctgtaggaccgccttgtaacaaagtccttttggttctataataactaaattccttggatggaatccaagatggacctggcttatatgaaattaaattctgtagcatgcaatggttacagtaaactttcaatatgtattatattcactatgaatttcagaaaccaaacaataataagtgacaatttttatggtgtaaattttagtttctgctgccacagaaactaccacaactttggggtaggcagtaagcttttagatacaatcctctgatggaaacaaccgcttcagacaaaaaaaaatctagcgttattaaaccataggttgaaaaagggaggaactagccagccattacctgtaaggggtaagattgttgagagggggaggagtatcacaggtattgtatgtttctaagacaggcactgggagagagtttctgtcaaaaagcttctggtcttgaatggtggaacttctgaaggcttttcgggtgttgattccttgcagtgacactgagagaagatggaaggcgttagaaaatggacgacaggctatttgagcaaacactgagtcacaccagtcggagaggcctcagctgctgcacttcttggctgtggctgtccgcagccaggctttttttttccctccccctctggggaagccccacaaggctgtcagcagcccagtcgyttcacgactgaacaaaatgaggcaacacaaaggtttactatgtggccagatctagcaggcctctccttaggaggaatgaatcttccaagtacttttatggtagcaaaatacgattgagggaggggaaatttgagaaagaaggaattgggggaatgggagaaaggagtgcatgggggtgtggtggagctaaaaaggttctttccagcactcaggcttgtgtgatttcaaagcagaactctataggtctctgtgatttctctcctcacgtttttttttttttaaataaatcagggaaaaaaaattctacaaaactgctcagcagagcctgcaaatgctgagctcagctttcttaccttcttcttccttg

SEQ ID NO: 33789 - DNA, 611 bp, Homo sapiens
ggaaaggtagggatggttaatggtacaaaaaatagttagaaataatgaataatagctactatttgatagcacatcagaatgactatagtcaataataattcactagcacattttaaaataacctaaagagtatactggattgtttgtaactcagaggataaatgcttgagggaatgaatatgccattctccaygatgtgcatatttcactttgcatgcctgtatcaaaacatctcatgtatcccataaatatatacacctactatgtacccagaaaaatcaaaaatttttaaaaaatcaattaagagttattggagtttaaatttacaatttaaatttaggtaagactttgtgagatagtgattgaatttgaggagcaattaatatagctaacagtggacacaatgctgagtggggctgtgtgtcttctcctttgggggaagagtcagaacttcctctcttgccaatttgtgtagaaaggttcatgtggaaactgagtagctaaagtggtggactgtttcatttattaatttattgcctctcatctctaaatgcagccttccatgtatactctatgataaacaacaggattggtttaagtatttcttcaag

SEQ ID NO: 33790 - DNA, 611 bp, Homo sapiens
ggaaaggtagggatggttaatggtacaaaaaatagttagaaataatgaataatagctactatttgatagcacatcagaatgactatagtcaataataattcactagcacattttaaaataacctaaagagtatactggattgtttgtaactcagaggataaatgcttgagggaatgaatatgccattctccacgatgtgcatatttcactttgcatgcctgtatcaaaacatctcatgtatcccataaatatatacacctactatgtacccagaaaratcaaaaatttttaaaaaatcaattaagagttattggagtttaaatttacaatttaaatttaggtaagactttgtgagatagtgattgaatttgaggagcaattaatatagctaacagtggacacaatgctgagtggggctgtgtgtcttctcctttgggggaagagtcagaacttcctctcttgccaatttgtgtagaaaggttcatgtggaaactgagtagctaaagtggtggactgtttcatttattaatttattgcctctcatctctaaatgcagccttccatgtatactctatgataaacaacaggattggtttaagtatttcttcaag

SEQ ID NO: 33791 - DNA, 1723 bp, Homo sapiens
tggcaactgcaaatctgtttcctgtctctcctggtttgcctgttacagacatttcccatcagtggaatcacacaatatatgttgttttgtgtctagcttctttcatttaacaaaatgttttcacggctcacccgtgtggtagcatacatctgtgcctcattctttttgatggcggcataatattccattgcacagaggagccacattttgccagcccgttcatcagtagacgggcagtgccttgtttccacttcttgactatcatgaataatgttgctatgaacattcatgggaaggttttatgtgaaggtatgttttcatttctcttgggtacatacctagaattggaattgttagatmacatggtaattccatgtttaaccattttgagaaacttccaaactgctttccaaagcagctgcaccatttcatatccccaccagcaatgcatagattctgaacttctctttccacaaacttttgttattaaaaataaattgtttaaagaagggaaaaaacagctctccataataaaacacactgctcttctgaaatctcccttggcgtgtgtctatgagttgatttacagtgtgggtgcaagtccacaagccagcagacacacagggccacagaagggacactgccatgctggcccactaccacgttcacaccgaaggtgactttgcctggctgtggactcagcgaagctgggacaccctcagaggcgactgtccacccaaccctcaccatgcagagacagagaccagcacacttggtctcctccacccagataagctcttggagaggtggccctggcacctgtgaaaatgtaaatggctgtcggcctttgacggtgctgctgacgggtgaccagagttctctcgcggctgcacgttttcccatgagcgccgaggcaggttcaatatggacagctcctccagcccctgcaggtaacccagcccgagctcccacttcctttgtaccaagcagaaacaagggcatggaaaagggaggggtgttttcacatctgaatggcaacattcccgtccaacaccccggactatatcttcaaacagatctgtctgagaagacagtgattgcattgagcccagcgtgctgtcagctgcttgaagccagtttcggcacacgggtattaggttatagaagaaaccttgttgtaaggatcgtcagggaggaagtcactgtatttacttgaagtttgcacagcttcatcagtttcagtggaaataactaaaaatagttaaagacattagttaaaattaaagaaaaggggacgagaaaacaagctacagcctgagagaaaacatttacaaaccacatgcccgacaaaagactcacagaatatattccttaaactctcaaaactcaacagtaaaaacaaacaatcaatccagtgagaaaatgggcagaagagacatttcaccagagaggctgtacacagggaaataaacacaggcaaagacatctaatgtcctctgccagggggaactgcacatttgactcacgatgaaatgtcactacgcacccatcagcatggcggaaataaaaaataacggcaacattaaatgctaacgaggtcatgaagaaacgagatcactcatacactgttggcgggaatctaaaacggggcagccacggtggagacggtgtagcagtgttttgcaaaaccaagcacgtgctcacctacaacccgcaactgcat

SEQ ID NO: 33792 - DNA, 597 bp, Homo sapiens
agagggccacaaactctgggtgctggccccgtgcctggctctgggggcagagacacacgggcccttagggctgagaactcaggtggaggggtctggggtgggagggttagtggcaaggaatgcacgggaagaacacagtcagcggccatggacctggatcctgttcacgcacctcaggcccacacggtgggcaggacgggttagagccgccacctgggtccaatcggccgggtgggggcagcccaggaaggtgttcccaggagcagaccccaggttccctgttgcagccsatcccgtggcccgcaggctgcctaatctccctgctgcagctcccatttgcttggcctgcagaaggttttcaaccacagccgagcaaggtccttaggcaccttcaaggctgagacattcgcccctgatccactgactgtgggctctcgggagagcggccacacccctctcaccatcaacagtcacctgggcctggccctcatgggagacagactcggccagcacctcccactgccccctagttgggaggaaccccactctcacctggggctcccgtctgcaagctccaggtggtaggaccgacctggg

SEQ ID NO: 33793 - DNA, 597 bp, Homo sapiens
agagggccacaaactctgggtgctggccccgtgcctggctctgggggcagagacacacgggcccttagggctgagaactcaggtggaggggtctggggtgggagggttagtggcaaggaatgcacgggaagaacacagtcagcggccatggacctggatcctgttcacgcacctcaggcccacacggtgggcaggacgggttagagccgccacctgggtccaatcggccgggtgggggcagcccaggaaggtgttcccaggagcagaccccaggttccctgttgcagcccatcccgtggcccgcaggctgcctaatctccctgctgcagctcccatttgcttggcctgcagaaggttttcaaccayagccgagcaaggtccttaggcaccttcaaggctgagacattcgcccctgatccactgactgtgggctctcgggagagcggccacacccctctcaccatcaacagtcacctgggcctggccctcatgggagacagactcggccagcacctcccactgccccctagttgggaggaaccccactctcacctggggctcccgtctgcaagctccaggtggtaggaccgacctggg

SEQ ID NO: 33794 - DNA, 825 bp, Homo sapiens
aagtataaccacctactcctacactataacatgggaaaggtagctttagatgaaatatgagtaacccttagaggagacaaagaattttgcaaggggggaaaagtcccatctcaactagttgcatgttctaccagaaaagggaactattggaaatctcccttttggcatcttccagctgggtgaaaaaggagaggatgatggcagaacaatcataaacacccatagttaattatctccaacaataaatagtgatatagcagaaaggaagaaaaaaatagaaaataattaggacaagagtctctaagggagggaaagtggagaagaagcatgtgtagtgcctgaagggaagtaacctacatgtacttcctatgttgtttatttttttcccagaagataagagagaggagcttgggaggaagagaaattgctactggggagaaatgggcaaatatggaaagggaaacataaaacaagctaatgacattgaaatagagaactcaacaaacaaaaccaaattccagattactttctttaaagcaarcaaagaatctgggctccatgttgattagaagaaataatccaaagcccaagaatacttctcagtgtaatgaatataaactccaatagattaagattttagcacagaaaacatttactaaaatttcagaagagagtagagtgtggatcctcctccaactgtacacagccacagttgagctctttcttcctccttgaatctaaggtaatagaaaagcaagtggaattcactcacactatagcacagcgaagagaaggcctaaacaaaactgctgtattttaaaagat

SEQ ID NO: 33795 - DNA, 964 bp, Homo sapiens
cttgagcccaggaattcgagatcagtcttggcaacatagtgaaatgacacctcttctctacaaaaacaaaaataaaaaaattagctgagcatggtggcacacractcaagtgggaggatcacttgagcctgggaggtggagcttgcagtgagccgagatcacaccacactgtactccagtctgagcgacacagtgagaccctgtctccaaaaatagctagctagctagctagatcgaggttttctatgggtagggtgaggattgactgggaaagtgcttgagagaactttctggagtgatagaactgttttgagttgagcctttataaaaactaaatagtgtatctaaaaatctctgcatttcacatgtaaagtataactaaaaaagtccaatgcatattagaaaacattttctgtattttagtaagtgaaaatcttataatgcaatttaatgaaattatagtttttggatttaatccacattttagttgtgtgtgtttttaaattttattatgcagtacattagaactgaaataaaagctttcacatttgctttcactcgtctagcacgttcagagttccagtgtatatggaccagttatgtggtaaatgcaattaaactggttatgctgtggactctgaatcacctcagttattattcatgaattttctctagatatttaagttgtttaatgatagcttatagtaatggaattctttcttcatgtaagtttgcctactttatccgctactaggagctgtatacataggctcacatgatgggatggtgaatttcaaagaagagatgatgtcaaattacttgacgttgtctataatgtcagttaattttctaagtgtccttcgattttactgttgatacttggttaggttttaagcatcctttatcttgtgttttttctttttgtcttttttgagatggagtcttgctctctctctcccaggct

SEQ ID NO: 33796 - DNA, 616 bp, Homo sapiens
aaaggaaagaaagagagaatccacatgagtaagcaagcactagaatgggaagttttcttcagtttatatgccaatcactggtggcccggagtctgagttttagtcggccatgcaaataaggaactaaggtagaaggccagattgaagactccctgtgagtatcttgaatccctgatacatggtaactcatttagaatgaaggtcctagctttggcctaaagtagatacgaagaaggacgaagaggaggcrgtgaaggagaaggagaactctcttgataattcttaaacaaaaatttgccctcatgtttgaaacaaaatttatcatacccttgtccactccccacccaaacttaaagtataatttaaagtagttatagattgctaaggcctctagttatctgaaagtagcctagaaatcctttctgaagacaatttaaatgtagcctaaaaattaccccaacaatttcaaaggatcaaagatcaaaagaatttaaaaaattattatacaaatgaggaaataagctgccatgtatacgtgtaggcagaaccaacataccacagaattaaacaccaaagaacaacagatattggacttatgacacagagactataaatc

SEQ ID NO: 33797 - DNA, 606 bp, Homo sapiens
ggakgacataattggtgtctggaaggagaaactcagaactacctttattataatttattataattattgtgccctatgggaagctttcttctgaaaaggttcagtgtgatgggcccaaaaacagactctggcaaagactgcttggttttaaaccccaactatgccacttacgaactgtgggacctttgtcaaaataattccactctctggacctcactttcctgatgtactgcatggagatgatgataatcatttatccctcccagtggatgagaggacttagtgagtcccttagaacagcgtctggcttgtataaagactcagtaaatgttccctgttctactgctgcactgtgagcctgcccccgagctgaaggcagcctgcagacctgcttgctttactccatctggcattgttagatttttttttaaaaaaattagttgccaacattctaaaatcgctagatttcatgaaaaaatctgattttttttccccttatgaaaatcagaagacctggcaaacctggggctagctatgtcttccgtagtggtaacatttagtcaaatctgcaaaccagaagatggaagttatctccagtttaccctg

SEQ ID NO: 33798 - DNA, 606 bp, Homo sapiens
ggaggacataattggtgtctggaaggagaaactcagaactacctttattataatttattataattattgtgccctatgggaagctttcttctgaaaaggttcagtgtgatgggcccaaaaacagactctggcaaagactgcttggttttaaaccccaacyatgccacttacgaactgtgggacctttgtcaaaataattccactctctggacctcactttcctgatgtactgcatggagatgatgataatcatttatccctcccagtggatgagaggacttagtgagtcccttagaacagcgtctggcttgtataaagactcagtaaatgttccctgttctactgctgcactgtgagcctgcccccgagctgaaggcagcctgcagacctgcttgctttactccatctggcattgttagatttttttttaaaaaaattagttgccaacattctaaaatcgctagatttcatgaaaaaatctgattttttttccccttatgaaaatcagaagacctggcaaacctggggctagctatgtcttccgtagtggtaacatttagtcaaatctgcaaaccagaagatggaagttatctccagtttaccctg

SEQ ID NO: 33799 - DNA, 1204 bp, Homo sapiens
cgagagtccactgtggtcagggcccaaattgctggaagaagggagtggtggctctgtgcgagctctccccgaaccacctgcccactatttctacggccacagagactgaggcacagagaggggtggccatctgcctggagtcatggggtgaggcaggggtcactctgtcccctgaggcctttaccctgaaagtgatccttgccctgagcccatcccataaccccatgggcttcctgttagtccagcacctgcctccagagttgggggcttttgaggcaagggagggcaaacttgccctgagaatcctagtcctactgcatgcagcctttatttcctgatcccacaggaactccaggagtcaggagccctccctgtcaacagcctcttctcccctaccccacacctaccctcccccaaacccagcctctgctcactatgtcttccttgacaccccaattggttttcatcattttttttttaaagattgaactgcatttcagacatttgcatttcatgtcagaaaatgtgaattcagcagccgccaggatgaatgccagtcgccaggtgctgagggtgaaggcgagggccggtgtctccagctgtggggcaggacaaagtccctgtgatgccagctgccaccaggacccagggacaggcgagagggccccagaagaatgccgagctcacgttacttggcagaaagaaaatgattcaattttgttctattcaccgaaacacatgttcttgtccaaagctaatttcctgctgcccccagcttgattgtgtctctgtttcgtctctcactctgaacaccgtcctcttcttaagaatcttgggattctgaactgcttttctatttccagaattccacattgcgattttcatttttctgtctctggaaggatgtgccagttgcctttacaaagggggcctgagaggctggaggagacgggcaggagggagacttttctctgggtggycttttgtggattttgaattttgaaccatataaatgtactttctgatttaatgaaaaacatttaaaaattaaaaaattgtttccacttaaaaataatacctttcgggaccctgctcccctgtctctcccccttgtccctctctcccttgtagctagagccttcactgcctccctttttacggctcctctgccttcacccaaggctgctccgacaaggatcccccc

SEQ ID NO: 33800 - DNA, 547 bp, Homo sapiens
gtcatctacattgggtatttctcctaatgctatccctccactagtcccccatcccctgacaggccccggtgtgtgatgttcccctccctgtgtccatgtgttctcattgttcaactcccacttatgagtgagaacatgcggtgtcaaacacccattttagggacctaacaccctttctagcataaagtagaagctcaataagtattatttgaatatgaatagaaataaaagtatgggagtgaggagctatttatttatgttgtgcctctgtgttttttttcctcttttatccttctaactttatttgattctagcatattgtcatttacctattctcataaatctaaagctgaactgacttaggatragggtatagttcccaagagtgatttttagatagacatattatgcttgagagagcggtccataattcctctatagagataacacttctcactacttaaaatctactgcctgaaattctaatatattcttatatttcccattatgacatcttagtttttattttcctataagccacaaaagt

SEQ ID NO: 33801 - DNA, 632 bp, Homo sapiens
tttctatctaaaatccaactagaagttttactgttataaggaagtaaaatgggtccagcttaatttttcctaagtgattatcagatgtctctaaataattggatggttcatcttgtcctcattgatatttactcattttgatatttattctatgacatttattctatctttctctatgtatgtatttatcaacacacacacacatacacttctatacagaragaaacatctagatgtatttccctcttccactaatatttctgtctatgctcacaacagtaacacttcatttaaattatgataactagttataggtttaattgtttgtagattcagtttcttcactccaccagtactcttattttttaaaagtttattagatatggaatcttattccagataaacttttgaatcctattgttatgatacaaatagtgtttgtgtttaaatttagtaactgtgtgactatcataatttaagtagacatattttaggccttatacgtttctggtaatttcttcattcatttttttaaatttaaaagtatagctgttaaagcactgtaggtatagtggtaagaaaacagacctttatggaccttatatgtagtaagtaataaacgatattaatac

SEQ ID NO: 33802 - DNA, 632 bp, Homo sapiens
tttctatctaaaatccaactagaagttttactgttataaggaagtaaaatgggtccagcttaatttttcctaagtgattatcagatgtctctaaataattggatggttcatcttgtcctcattgatatttactcattttgatatttattctatgacatttattctatctttctctatgtatgtatttatcaacacacacacacatacacttctatacagaaagaaacatctagatgtatttccctcttccactaatatttctgtctatgctcacaacagtaacacttcatttaaattatgataactagttataggtttaattgtttgtagattcagtttcttcactccaccagtactcttattttttaaaagtttattagatatggaatcttattccagataaacttttgaatcctattgttatgatacaaatagtgtttgtgtttaaatttagtaactgtgtgactatcataatttaagtagacatattttaggccttatacgtttctggtaatttcttcattcatttttttaaatttaaaagtatagctgttaaagcactgtaggtatagtggtaagaaaacagacctttatggaccttatakgtagtaagtaataaacgatattaatac

SEQ ID NO: 33803 - DNA, 1104 bp, Homo sapiens
gcatgccatgtgctagcctctgtgtgagatgctgggtacaaagatgaataagactactggctccttgtacaatgcctggcagtggcaagaggcactcagtgaatgctttctgaattaatgacataatccctgcctctaaggagctctatcctgtgggaaagaaagacacctaattggggcataccatgtgcccaaaatagtgaatttgagtgagagtgagtatggagaggaactgtcggcatgtttcagatgctttcgtgagtccttaacatggtgtcgaggtcacactgtcctgtccagtgacacctcctggctctgtcagaattgttattcaggcctctctttccaggccctcatagttaagcctgtgacactgtgtttgaacttctattaataggcctagtcagcatctcagcagattgcatcttaacatcaaacagccagaatccccaacaatgacttcttggcgcaaagccaatcctcaagcatcaaarccatattccttgcaaatcagctccacgtgatgataaataatggcatcaggattccaaaccaattatctcatagggaaaggcatattcttcaagggcacactgggctttatttaaaaaaaaaaaacagtaacattgctgatgctagccctgaaatgtcaacaatggacacagccagctaatgagaggaataaccagaaaaaggtgtataattcatgtcccccacattacactaacatggaaaagttcaagaaaatacgtgtttaggcacaattttaaagtgcctgacctgagcccccactggaaaaattactggaaccccatctttgtctggaacggtgcagtggagtagaagcatgtgcttttcaattcagatctcaacacttgaattagctatgtgattttacacaaatcattctctaagccccaatctctgcacctgtaaaatgagagatattaagctctacctcatgtatgttttatggatagcaatagcatgtcaacactccaataaataggagctttatggttaattagaactagtatgccaaacactatactaagctctttataaacattattttagttctcatgccaaccctgtgaggtaggt

SEQ ID NO: 33804 - DNA, 884 bp, Homo sapiens
aaagtaaatataaggccaggtgcggtggctcacgcctgtaatcccagcactttgggaggccgaggcaggcggatcacctgaggtcagcctgaccaacatggagaaaccccgtctctactaaaaacacaaaattagccggtcatggtggcgcatgcctgtaatcccagctactcaggaggctgaggcagaagaattgcttgaacccgggaggtggattgcagtgagctgaaatcgggccattgcactccagcctgggcaacaaaagcgaaactccatctcaaaaaaaaaaaaaaaaaaaaaaagaaaagaaaagaaatataatctttggccaaagaaaaataaaagctctacctaatcagtctgcagaaatgcctagaaaataaaccatcttctaagtatatcagcgattttaaagatgatraagtatgaggaagggggggagttgtctatgagaaaaagtatataattttacaacattttatgtttattaaaagggagcatgggttaaaaccaccatgagaattaggtcatcaaaccatgaacaatagactaatattcccccaaaattcctacgttgaaattctaattcccaatatgatggcattaggagatggagcctttcataagtgattagtgattcatgaattggtgaatgagattagtgctcttatcaaagacgtgcaagagatccactgcaagagaaatcaattgcaggagaagacacagagagaagacagccattgtctgtgaaccaggaaatggtctcaccagatactgattctgatagtgacttaatctcagctttccaagcctctagtactgaaagaaataaatttatgttgtttataacctacccagtttatggtatttttgtaacaaaaatt

SEQ ID NO: 33805 - DNA, 527 bp, Homo sapiens
cagggttatttcaagcatcaagtgggatcctttaggcacagcactcagcccagtgactggcacatatggtaagctctctctgttctcctcttttctcctcctgattcagagaatgacttaaggatctgtgatgtgtgccaattttcaatgccctggataaataatggggagatgaagtactgttgccagaaatttgcactagttttaattcattttatctgtttagcaatgagatatctcaaagtaactgaatraatttatgtcatatatatatacatacacataagtatgtttcttgagagctgacaggcttagtttttgttccctgatgctgtggtagaggccactgtgttctgatttcttgagtgatggctgccagctctccaagtgtcacagttggtgaggcatccatgggggtgagcaccaaggatgtgtggccagtcagcatctgcaagcccattttgtctattctccttatttttataatatgttttattcatttttaggtttatcatttaatttattat

SEQ ID NO: 33806 - DNA, 592 bp, Homo sapiens
gaatgttcatgcactcttatatacagcatttgaaacaaaacaaaacaaacataaaattaaacctgacatcttgggaatgakaaattctaagggtgcccaacatatagtaagtgctccctaaataagctgaatggatgaaagagtaaataactaggtagatcatggagcctctgatatctgagtaatacggaagtgttcataaaaaagggaagcctcagtgagacatataaatccaatgaaatatgttaagtctcaaaaagggagcagataattacttttgctttatgtttttcaatggagtaataaataatagaagaattctggtctcttctctggaagctgtcgtttacttggtgaagttttcctgttttttcctaataaatgatatcagttttaatgccgtgctgcccaaagataacatctgatatgcccttagagtcagttatacaaagaaatataggtttagctctgggcttctcatccttgaaactgtagacatttgggactggataattctttactgtgaggagtcgtgcattgtaagatgtttagcagcattccctggcctctaacaactagatgccagcggcat

SEQ ID NO: 33807 - DNA, 780 bp, Homo sapiens
ggaaacaatgaaacaaattaaacaaatgcatgattccttaaattttgttgacwcgggatttagttacatataagactcttttcccccagccagattaaccctgctctgtatatgtaatacgcatcttccccccaaatttcacaataataattttatgaaaatcagtatgtaagttgctgcattggcatgaaaggctactaatgtgatatctttcaaagataaagtgaacgtttttgtaaaaagccaccacactggaggcatttaacaatattcatcttcctatggcattactaccctagatgtactttgcaatattaatcaagccttgtcttacttcaggcttcctagaaatagagcacaaggcagggattctttcttgctcggtgatttattgaggaagtgctctcagaagaaattggtaagatgctaaggagaacagcaaaggacaggagaagggggctgagcagagatggggatctaactggaatctggcctttgctgattaccagagcagctctgggtgcgaatggtgaagtgctgttctattgacaaactccactcaagtgacattccatgcagcactgccaaattctgtcccataactctgctagctcttcaacaagaagtaacttgaggcagcacagttacagaaaacagcacaagaaccaaggatactaaacagtgacttaaatgtttttagataagaggaagcaatgagatactatagggttttaatttctgtgcaatggaaaactagtattaaatatttattaattagga

SEQ ID NO: 33808 - DNA, 780 bp, Homo sapiens
ggaaacaatgaaacaaattaaacaaatgcatgattccttaaattttgttgactcgggatttagttacatataagactcttttcccccagccagattaaccctgctctgtatatgtaatacgcatcttccccccaaatttcacaataataattttatgaaaatcagtatgtaagttgctgcattggcatgaaaggctactaatgtgatatctttcaaagataaagtgaaygtttttgtaaaaagccaccacactggaggcatttaacaatattcatcttcctatggcattactaccctagatgtactttgcaatattaatcaagccttgtcttacttcaggcttcctagaaatagagcacaaggcagggattctttcttgctcggtgatttattgaggaagtgctctcagaagaaattggtaagatgctaaggagaacagcaaaggacaggagaagggggctgagcagagatggggatctaactggaatctggcctttgctgattaccagagcagctctgggtgcgaatggtgaagtgctgttctattgacaaactccactcaagtgacattccatgcagcactgccaaattctgtcccataactctgctagctcttcaacaagaagtaacttgaggcagcacagttacagaaaacagcacaagaaccaaggatactaaacagtgacttaaatgtttttagataagaggaagcaatgagatactatagggttttaatttctgtgcaatggaaaactagtattaaatatttattaattagga

SEQ ID NO: 33809 - DNA, 780 bp, Homo sapiens
ggaaacaatgaaacaaattaaacaaatgcatgattccttaaattttgttgactcgggatttagttacatataagactcttttcccccagccagattaaccctgctctgtatatgtaatacgcatcttccccccaaatttcacaataataattttatgaaaatcagtatgtaagttgctgcattggcatgaaaggctactaatgtgatatctttcaaagataaagtgaacgtttttgtaaaaagccaccacactggaggcatttaacaatattcatcttcctatggcattactaccctagatgtactttgcaatattaatcaagccttgtcttacttcaggcttcctagaaatagagcacaaggcagggattctttcttgctcrgtgatttattgaggaagtgctctcagaagaaattggtaagatgctaaggagaacagcaaaggacaggagaagggggctgagcagagatggggatctaactggaatctggcctttgctgattaccagagcagctctgggtgcgaatggtgaagtgctgttctattgacaaactccactcaagtgacattccatgcagcactgccaaattctgtcccataactctgctagctcttcaacaagaagtaacttgaggcagcacagttacagaaaacagcacaagaaccaaggatactaaacagtgacttaaatgtttttagataagaggaagcaatgagatactatagggttttaatttctgtgcaatggaaaactagtattaaatatttattaattagga

SEQ ID NO: 33810 - DNA, 780 bp, Homo sapiens
ggaaacaatgaaacaaattaaacaaatgcatgattccttaaattttgttgactcgggatttagttacatataagactcttttcccccagccagattaaccctgctctgtatatgtaatacgcatcttccccccaaatttcacaataataattttatgaaaatcagtatgtaagttgctgcattggcatgaaaggctactaatgtgatatctttcaaagataaagtgaacgtttttgtaaaaagccaccacactggaggcatttaacaatattcatcttcctatggcattactaccctagatgtactttgcaatattaatcaagccttgtcttacttcaggcttcctagaaatagagcacaaggcagggattctttcttgctcggtgatttattgaggaagtgctctcagaagaaaytggtaagatgctaaggagaacagcaaaggacaggagaagggggctgagcagagatggggatctaactggaatctggcctttgctgattaccagagcagctctgggtgcgaatggtgaagtgctgttctattgacaaactccactcaagtgacattccatgcagcactgccaaattctgtcccataactctgctagctcttcaacaagaagtaacttgaggcagcacagttacagaaaacagcacaagaaccaaggatactaaacagtgacttaaatgtttttagataagaggaagcaatgagatactatagggttttaatttctgtgcaatggaaaactagtattaaatatttattaattagga

SEQ ID NO: 33811 - DNA, 780 bp, Homo sapiens
ggaaacaatgaaacaaattaaacaaatgcatgattccttaaattttgttgactcgggatttagttacatataagactcttttcccccagccagattaaccctgctctgtatatgtaatacgcatcttccccccaaatttcacaataataattttatgaaaatcagtatgtaagttgctgcattggcatgaaaggctactaatgtgatatctttcaaagataaagtgaacgtttttgtaaaaagccaccacactggaggcatttaacaatattcatcttcctatggcattactaccctagatgtactttgcaatattaatcaagccttgtcttacttcaggcttcctagaaatagagcacaaggcagggattctttcttgctcggtgatttattgaggaagtgctctcagaagaaattggtaagakgctaaggagaacagcaaaggacaggagaagggggctgagcagagatggggatctaactggaatctggcctttgctgattaccagagcagctctgggtgcgaatggtgaagtgctgttctattgacaaactccactcaagtgacattccatgcagcactgccaaattctgtcccataactctgctagctcttcaacaagaagtaacttgaggcagcacagttacagaaaacagcacaagaaccaaggatactaaacagtgacttaaatgtttttagataagaggaagcaatgagatactatagggttttaatttctgtgcaatggaaaactagtattaaatatttattaattagga

SEQ ID NO: 33812 - DNA, 560 bp, Homo sapiens
aggaaaagcatattttcatagaataatcctaaaatacttatgagatgattgcacaagattgaataattgaagattatcaaaagactcacaagatttcacagtgtgtatttgagtaaggttttaatacaggtgaaggatacattaggacacagagcacagatgatcacagaggggtctagggcttccaggcacagccccccagggtccattttaatcactcggtacaggacacattttatcttcagattatatacgatcaccgtaagtgtgagtccaggtatataatttattgaggggtctttcatacccaccagccatgtagctaaacccaggctgtataccctgttagaccaggtacaaactatcagtctatacagtcctaaacaatgtagacaagctaatacaggctgcctccaggggaatttcgagctttaaatagcacattkcacattataaagtcctcagtagcacatttcattcttaccttgaccagacttcaagcatcccaggagacaaacagagggctaccccaggatagctgcaaggtaacgctaccttat

SEQ ID NO: 33813 - DNA, 516 bp, Homo sapiens
ttgctggatcatatggtagttctatttttggtgttttgggagatctctatgctgttttccatagtggctatattaatttacatttccatcaacaatgtacatggtttcccttttctccacatcctgaccagaacttggcatcttttatcttttttactgtagccattctaacaggtctgaggtggttataatttgcrtttttctcatcattagtgatgttgaattttttttcatatacctgttggccatttgtatgtcttcttttgtgaaatatttaatcagattctttgtccattttttaatcagattatttgttttcttgctgttgagtagcaggagatccttatatattttttatattaaccccttatcagatgtatagtttgcaaatattttcttgaataccgtaggttgtttcttctaccagcattttttcatagtaaaaagttacaaacaatatataggtaatagggcaatggagatgtcatataattgaataccatagagaagttaaaa

SEQ ID NO: 33814 - DNA, 532 bp, Homo sapiens
caggtcaaggctgcagtgagccatgatcaggccactgcaytgcagccttagtgacacagcaagatacacacacacacacacacacacacacacacacacacacacacacacacacggtgttttggctataagtaacaagaataacaaaatacaacaaggaatatctttaaggagtcattcatttattctacaaacattttcctgtcacttactatattccaggtcctgttctaggtgctggggatatggcaatgaataaaacagatcaaccccctcaccactcctgaaaatccaagaaaaactctggctttatagattttatgatctgtggggagagatttattatcttacagaacaagaaatccagagataggtggtcctgggctggtggatagaggctcaacactatcttaaaggaccttattctttccatctcttcactctgccatcctcagtgtgtcggcttttttctcaaccttgtaacctcatagttgtaatatggctgccactgctccaggaggcacatcacata

SEQ ID NO: 33815 - DNA, 532 bp, Homo sapiens
caggtcaaggctgcagtgagccatgatcaggccactgcactgcagccttagtgacacagcaagatacacacacacacacacacacacacacacacacacacacacacacacacacggtgttttggctataagtaacaagaataacaaaatacaacaaggaatatctttaaggagtcattcatttattctacaaacattttcctgtcacttactatattccaggtcctgttctaggtgctggggatatggcaatgaataaaacagaycaaccccctcaccactcctgaaaatccaagaaaaactctggctttatagattttatgatctgtggggagagatttattatcttacagaacaagaaatccagagataggtggtcctgggctggtggatagaggctcaacactatcttaaaggaccttattctttccatctcttcactctgccatcctcagtgtgtcggcttttttctcaaccttgtaacctcatagttgtaatatggctgccactgctccaggaggcacatcacata

SEQ ID NO: 33816 - DNA, 522 bp, Homo sapiens
ttgggaggccgaggcaggtggatcacttgagggcaggaattcgagaccagcctggccaacatggtgaaatcctgtctctactaaaaatagcaaaattagttgggcatggtggcgcacacctgtaattccaactacttgggtggctgagacaggagaattgcttgaacctggaggtggaggttcagtgagccaagattgtrccactgcactccagcctgggcgacagtgcgagactccatctcaaaaaaataaaataaataaaaatttaaaaaattacctggatgtggtggtggtgtgcacttgtagtcctagctgcttgggaggctgaggtgggaggatcatttgagcccaggaggtggaggctgtggtgagctatgatcgtgccactgcactccatcctgggagacacagcaagaccctgtctcaaaacaacaacaacaacaacagcactcactccctgggctataaagaggcttagcccccacccataattccacacagctcaacctccctataaacaca

SEQ ID NO: 33817 - DNA, 548 bp, Homo sapiens
gattagtgatgctgagcatatttttatgtttgttggacatttgaacatcttcttttgagaattgtatattcatgccatttgcccacattttgataagattatttgtttcttttctaactgatttgtatgagtttttgtatattctggatattagtcctttgtcagatgtttattttgtgaawattttcttccattctgtggtttatctgttcgctgactaattcttttgttgtgcagaagctttttagtttaattatatcccacctatttatttttgtttttttttttacatttgattttttgagattttaccacatatttatcccctccattcctgttgtttcttacatctctgtgcttctctcatcaaggatcaacatctttctgcataaataactcaaattagtatttttttctggtctgatagtctgttagatttttttgtcaaagatgttcataaacctaagttgtttataacattaagttgtgatttataaccttttctgagtatggaactttagactggtgatttttttcagtactctcga

SEQ ID NO: 33818 - DNA, 1233 bp, Homo sapiens
ttcaacaatggtaacatttagaagaatgctgccatattgggctttgcttcttgctcatttgatttttcctacaatgatactgatgctttgggtctccttctcccatgcttgacacactttttacaaagtaagctctaaatcatagcaaacaaaatgcagactatagcgaaagggcttaccatagaatgcaaaggatgagtatcacgaagtttgcctatataccgtccatgttaatgggtcaaaagagaagacgcctttggcagcttaatagggttgaaaggcatctaagagcattgagtccctttctgttttgttttgttttgttttttaaacaaaagcccttggcaaaatkataattaaaaaatgcttgtttgatgtcatttcatgtgtgtgcctgtgcatgtatggatccaacagccagcaatattcttaatattcttgaagtcaggaacaacaaaacagtacctattctcaccactattaattttggtctggaagtgatggttcgcacaattagaccaaaaaaaattgaagtcgaaaatatgagaaaggagaaggtaatattgtgattacgtgtggatgatatgattgtacagcttagaaaacccccacagaaaattcacctggtgtacgataataaaagcttaacactcactgagtgcccaggccccattctaagtctcttaatactcgtatactatctaactataataataaaagttagcattgatggagtacttaccatgcacacgtgtactacttaagtgcttgctattcttacaccatacaaccacaacggtaagattctcataggcactgagtgtctattacgtgccagaccctgttgaaatactttaatgctcataacaattaagaggctttaaatcctatttctgttacataatataaattaacatattactacaaatgtatttctataatatactttatagtgtaattatacttatgtaatatgttacatattaaattgcatataatttatattacattatatagtttatatgttataggttattaatattgttatattttatattactacatatttatatttatatattcatgtgttacaattatacatgtacaaagtgatatgatattgtatattgttatatataatttatatcatattatatgacaatatattatattttattatatggattaaggctacataacttcaatttaaatgtataacttttatatcatttt

SEQ ID NO: 33819 - DNA, 1930 bp, Homo sapiens
attgacagtcaaagaaataagaactattaaagttggctatccaacattgcattctaagattgtggagattagggatggggttaaaataggaagaaaaacaagtctttaaaagtttcccaggtaaaatatttacaaattgagtttattctttatttttaaaatgctgaatgagttctttctaaaagtaggtacattgaaatgaatagagacaagaacaatttgttaaaagttttttgtaaagtatttggttgccctgtgaaacaaagaatcagcaatgagtggtgtatttgttcactattttattgaactcctataatatgctggacacagcacagagcactaggaatacaaagtcaaaatataatgtgtggctccttatctcagggagtaaccaacaggtagacaatatacatgtaacacatattacagtaaatttagatacgtctcctgaaggagtttatgtaccaggtacagtgaagtcacaaagagaagtatctccctcagtcaagagaaggacttcagaaaagaacaccagatattagtttataactgcaagctagtcctttgtggatgatataaaaataaatttttataaagtggaaaaaaaaattattattcccagtatctgaaacctcaaggtagaagaattcctccactgacatacttgagggcaaaagacaagaagcatgtttgtgcaaaaagtttcatgctcattatgaaaggtgtacaatttccttcttccattatttactttgttttgtttgtgtgtgttttgttttgttttacacttaggtatcctttatgaagccatagagataggcctgagagctcttttgcatgtagagatgggcctgaggaacttaggtacctttttttaaaaaaataatggtagggtttcactgtgttgcccaggctggtctcgaactcttgagctcaagcagtctgcctgcctcagcctcccaaagtgctgggattatagggatgagccaccgcacccagccttaggtacccttttgatttggttccagagagggctcttttagttaggaaggccattaatgttagtgttacttcttggtaaattgatcactcctttgtttcactgagcatccaaatcatgctgacaaagttagtctttattcaaggataaaacctatgctggttttatcagttcccccctttctttctccctctagcatttcgtatttctttgttgttgtttctgctccatgcctgggtatgcagcttcccaagaatcacattaaaactatttctggttgttttcttttccgaacaaatgtgacattttcttcatctccttgattttgagctgaagaaggcaaactgtcaaaaataatgaggccagatggatttgaacactgaatagcagtctgaaacagtgctcagagactttgcctttacaatcattattacagaggcaatgagggaaagctccttggtggccatgaaatgaagagaaactgaaacagctcttaggggattagggaaagtcccaggcataggtagcactgacttgttcatgtatttattcactcagcattgtgtggagtgctagatgctgtgatgcaaagaaaaataagtcatggtcctaaccttttttggaatastgtttggaagacaaacatgtaaactgactcctgatgcttcagggtttctatataagaactattattccttcagcaaatatttattcctcctctattatattccagattcttttcaaaagacatcctgtatgaatacttttaaacacacactatctctagcaagactaccaaaatattacttggtggacatctatggaatttgcttccataaatattagaatgggctttctattactgttattaggtaagagtagatggttcttcaagaaggatgcaggttaagggagactgttagttctcac

SEQ ID NO: 33820 - DNA, 510 bp, Homo sapiens
tgcctcggcctgcccagtagctgggaatacaggtgcccaccaccatgcctggctaatttttgtatttttagtagagacagggtttcaccgtgttagccaggatggtctcsatctcctgacctagtgatctgcccgcctcggcctcctaaagtgctgggattacaggcgtgagccaccgcacccgaccccacaggttttatttttcataaggtaagctattaagggatgtctacacctacacacacacacacacacacacacacagcacctccagtcagcacacaggaacacaaagacacactcacatatatggacggcagacgccagtcccgccacatgcaagcacacaccaaatcacattctccctcctcacagagtcatactcctttcagtgaaaccagaacgtcctcccgagaaagtctccagagtggaatttccatccccagaggtcacggggaatcaggtctctcctctgcccgctgaccttccactgaggagtctgcgatttac

SEQ ID NO: 33821 - DNA, 510 bp, Homo sapiens
tgcctcggcctgcccagtagctgggaatacaggtgcccaccaccatgcctggctaatttttgtatttttagtagagacagggtttcaccgtgttagccaggatggtctccatctcctgacctagtgatctgcccgcctcggcctcctaaagtgctgggattacaggcgtgagccaccgcrcccgaccccacaggttttatttttcataaggtaagctattaagggatgtctacacctacacacacacacacacacacacacacagcacctccagtcagcacacaggaacacaaagacacactcacatatatggacggcagacgccagtcccgccacatgcaagcacacaccaaatcacattctccctcctcacagagtcatactcctttcagtgaaaccagaacgtcctcccgagaaagtctccagagtggaatttccatccccagaggtcacggggaatcaggtctctcctctgcccgctgaccttccactgaggagtctgcgatttac

SEQ ID NO: 33822 - DNA, 325 bp, Homo sapiens
tttccgaggcgggaaacttactgaggcagcgcctgcacacagaactgcagttcccctggaagatgctctgaggcccagacgtagaaggacagcagcctgtcaacagcagggccgcccttggcaactcggctctgtgtcccyaaaacactcccgagagctcagggaggccccggggatctcccctaatcacttcctgagagcaaacggccttcctacgaatggccaggtgtcaggatggccccacagctgcaccatcctcctcacgggccccccactgtggctggtcctaggtggctgagctgagggagcgctgtggttcgctgtc

SEQ ID NO: 33823 - DNA, 666 bp, Homo sapiens
gacgcagtgatgaagctgaatgcccgtctacccagtgttgaatgcacgtctgcccggtgtgtgatgcagtgatgaagctgaatgcacgtctacccagtgttgaatgcacgtctgcccggtgtgtgacgcagtgatgaagctgaatgcacgtctacccagtgttgaatgcacgtctacccggtgtgtgatgcagtgatgaagctgaatgcacgtctacccagtgttgaatgcacgtctacccggtgtgtgatgcagtgatgaagctgaatgcacgtctacccagtgttgaacgcacgtctgcccggtgtgtgatgcagtgatgaagctgaatgcccgtctacccagtgttgaatgcacgtctacccggtgtgtgatgcagtgatgaagctgaatgcacgtctaaccggtgttgaatgcacgtctgcccggtgtgtgacgcagtgatgaagctgaatgcccgtctamccggtgttgaatgcacgtctgcccggtgtgtgacgcagtgatgaagctgaatgcccgtctacccagtgttgaacgcacgtctgcccggtgtgtgatgcagtgatgaagctgaatgcccgtctacccagtgttgaacgcacgtctgcctggtgtgtgatgcagtgatgaagctgaatgcccgtctacccagtgttgaacgca

SEQ ID NO: 33824 - DNA, 666 bp, Homo sapiens
gacgcagtgatgaagctgaatgcccgtctacccagtgttgaatgcacgtctgcccggtgtgtgatgcagtgatgaagctgaatgcacgtctacccagtgttgaatgcacgtctgcccggtgtgtgacgcagtgatgaagctgaatgcacgtctacccagtgttgaatgcacgtctacccggtgtgtgatgcagtgatgaagctgaatgcacgtctacccagtgttgaatgcacgtctacccggtgtgtgatgcagtgatgaagctgaatgcacgtctacccagtgttgaacgcacgtctgcccggtgtgtgatgcagtgatgaagctgaatgcccgtctacccagtgttgaatgcacgtctacccggtgtgtgatgcagtgatgaagctgaatgcacgtctaaccggtgttgaatgcacgtctgcccggtgtgtgacgcagtgatgaagctgaatgcccgtctaaccrgtgttgaatgcacgtctgcccggtgtgtgacgcagtgatgaagctgaatgcccgtctacccagtgttgaacgcacgtctgcccggtgtgtgatgcagtgatgaagctgaatgcccgtctacccagtgttgaacgcacgtctgcctggtgtgtgatgcagtgatgaagctgaatgcccgtctacccagtgttgaacgca

SEQ ID NO: 33825 - DNA, 666 bp, Homo sapiens
gacgcagtgatgaagctgaatgcccgtctacccagtgttgaatgcacgtctgcccggtgtgtgatgcagtgatgaagctgaatgcacgtctacccagtgttgaatgcacgtctgcccggtgtgtgacgcagtgatgaagctgaatgcacgtctacccagtgttgaatgcacgtctacccggtgtgtgatgcagtgatgaagctgaatgcacgtctacccagtgttgaatgcacgtctacccggtgtgtgatgcagtgatgaagctgaatgcacgtctacccagtgttgaacgcacgtctgcccggtgtgtgatgcagtgatgaagctgaatgcccgtctacccagtgttgaatgcacgtctacccggtgtgtgatgcagtgatgaagctgaatgcacgtctaaccggtgttgaatgcacgtctgcccggtgtgtgacgcagtgatgaagctgaatgcccgtctaaccggtgttgaaygcacgtctgcccggtgtgtgacgcagtgatgaagctgaatgcccgtctacccagtgttgaacgcacgtctgcccggtgtgtgatgcagtgatgaagctgaatgcccgtctacccagtgttgaacgcacgtctgcctggtgtgtgatgcagtgatgaagctgaatgcccgtctacccagtgttgaacgca

SEQ ID NO: 33826 - DNA, 666 bp, Homo sapiens
gacgcagtgatgaagctgaatgcccgtctacccagtgttgaatgcacgtctgcccggtgtgtgatgcagtgatgaagctgaatgcacgtctacccagtgttgaatgcacgtctgcccggtgtgtgacgcagtgatgaagctgaatgcacgtctacccagtgttgaatgcacgtctacccggtgtgtgatgcagtgatgaagctgaatgcacgtctacccagtgttgaatgcacgtctacccggtgtgtgatgcagtgatgaagctgaatgcacgtctacccagtgttgaacgcacgtctgcccggtgtgtgatgcagtgatgaagctgaatgcccgtctacccagtgttgaatgcacgtctacccggtgtgtgatgcagtgatgaagctgaatgcacgtctaaccggtgttgaatgcacgtctgcccggtgtgtgacgcagtgatgaagctgaatgcccgtctaaccggtgttgaatgcacgtctgcccggtgtgtgaygcagtgatgaagctgaatgcccgtctacccagtgttgaacgcacgtctgcccggtgtgtgatgcagtgatgaagctgaatgcccgtctacccagtgttgaacgcacgtctgcctggtgtgtgatgcagtgatgaagctgaatgcccgtctacccagtgttgaacgca

SEQ ID NO: 33827 - DNA, 666 bp, Homo sapiens
gacgcagtgatgaagctgaatgcccgtctacccagtgttgaatgcacgtctgcccggtgtgtgatgcagtgatgaagctgaatgcacgtctacccagtgttgaatgcacgtctgcccggtgtgtgacgcagtgatgaagctgaatgcacgtctacccagtgttgaatgcacgtctacccggtgtgtgatgcagtgatgaagctgaatgcacgtctacccagtgttgaatgcacgtctacccggtgtgtgatgcagtgatgaagctgaatgcacgtctacccagtgttgaacgcacgtctgcccggtgtgtgatgcagtgatgaagctgaatgcccgtctacccagtgttgaatgcacgtctacccggtgtgtgatgcagtgatgaagctgaatgcacgtctaaccggtgttgaatgcacgtctgcccggtgtgtgacgcagtgatgaagctgaatgcccgtctaaccggtgttgaatgcacgtctgcccggtgtgtgacgcagtgatgaagctgaatgcccgtctacccagtgttgaacgcacgtctgcccggtgtgtgatgcagtgatgaagctgaatgcccgtctacccagtgttgaacgcacgtctgccyggtgtgtgatgcagtgatgaagctgaatgcccgtctacccagtgttgaacgca

SEQ ID NO: 33828 - DNA, 666 bp, Homo sapiens
gacgcagtgatgaagctgaatgcccgtctacccagtgttgaatgcacgtctgcccggtgtgtgatgcagtgatgaagctgaatgcacgtctacccagtgttgaatgcacgtctgcccggtgtgtgacgcagtgatgaagctgaatgcacgtctacccagtgttgaatgcacgtctacccggtgtgtgatgcagtgatgaagctgaatgcacgtctacccagtgttgaatgcacgtctacccggtgtgtgatgcagtgatgaagctgaatgcacgtctacccagtgttgaacgcacgtctgcccggtgtgtgatgcagtgatgaagctgaatgcccgtctacccagtgttgaatgcacgtctacccggtgtgtgatgcagtgatgaagctgaatgcacgtctaaccggtgttgaatgcacgtctgcccggtgtgtgacgcagtgatgaagctgaatgcccgtctaaccggtgttgaatgcacgtctgcccggtgtgtgacgcagtgatgaagctgaatgcccgtctacccagtgttgaacgcacgtctgcccggtgtgtgatgcagtgatgaagctgaatgcccgtctacccagtgttgaacgcacgtctgcctggtgtgtgatgcagtgatgaagctgaatgcccgtctacccagtgttgaaygca

SEQ ID NO: 33829 - DNA, 488 bp, Homo sapiens
taaaaaagcttttttcttcctttgggaattttattcagatttatttactctctctcctccttcccacagcaaaatagaggctatcaaatgtttcatacctaagaatggagggcagctccctgggctggagtgctacttgcacaagagagtttttctaagaragtagtgggaaagtgggactaaagacttgtagcaaacaagttgtgggtaattccaaatgtgggctgaggggccttagatttttgtattgataggtaaagagagccacaccaataacagacaaacagagagccaaatcatgagtgaattcccattcacaattgcttcaaagagaataaaatacctaggaatccaacttacaagggatgtgaaggacctcttcaaggagaactacaaaccactgctcaacgaaatgaaagaggacacaaacaaatggaagaacattccatgctcatggataggaataatcaatatcgtgaaaatggtca

SEQ ID NO: 33830 - DNA, 544 bp, Homo sapiens
acagcacatcctaatttgcagtagccaaatttccaatactgaagtacatttcaagtacttaacagtcatgtggctagtggctacctcctcggacagcccaattctagaactatggtcctcaaggtgctgtctccagattggctgtatcaacatcacctgggaacttgctaaatgtgcaaattcttgggcaccatcccaaaccccctaaatcagaacctcaggtggttaaacacagcaattcatgtttaagcaagccccttcagttatttctgatacatgtcaaagtttgagaaccattgctctacmcaactgcctctgcatcccaatccaaataaacccagagcagccattgcggactagccctgaggacgaagagcctctgctcttgagataagcaattcttggctaaatgaagctggctttctcttgtatggaaatatcctagtcctagctatggttccatttcttgggattatggaatttccagacacaatttaaacatggtttaatttgtcattttgtttaaggaaaaggaaaaaaatcc

SEQ ID NO: 33831 - DNA, 526 bp, Homo sapiens
atgtaatatatttctgaattgatctcttactattttaaatgaacagggcagtaggagaggacaaataaagaatcaactcaatagtactaagcaccttgacaattttagtttaatagtaataactacattttatccagtgattgctacagccccagcactgtgctaagtatgcattttacatctgttacctcatttaatactcacaacaaacctgtgagataggtgttattacttgcattttatgcagaggaggaaactgagactaaaagaggttaagtaatgggcctacagtccacagraagttgtggagctgggatctgaacctgtccggcgtgatctgaaagctgtttaactatttactgtactataaggcctccacctttaataataaaatggtttcatcatttggttactttcatgctcagaaaggaatatatcccacagcaatagctaaaaataaaagccatattttggcctagagtaagtgacttaaagtattttgtatgcaatttggcatccttttgca

SEQ ID NO: 33832 - DNA, 1060 bp, Homo sapiens
cctgttcaaatattaataggaatttcaagatggcaaagtgcatgaagccaagcacaggacgctatgcagttgcacaggtcaaatgcccatgaagctggccctggaatgaccttcaggcccatctgctgagatgctcctctcagccactgtgctgccaatcctcccctcctgcactggagcccaggaaagctgggggactcgctgctctcctgggcactgctggaggaagggatgcaggttattgctactcctaaatccacgcaaaacttttaggatttgtatcatctccccttcctctggaacaccaggcagcatctcacttcccagcccacctgcagctctcatctgccccccaaatcccaatgtgtgtctgctcaggcccagcagggaacacctgtgctttactcatgccttttcctttgtctgagttgtctcaagaatcttgcttttgcaaaaattgcatctrttcaactcaaattccttttctttgatttttggtgtgatcatctctttccagaagcaataaatgccaatgcctggtggggggaagagcagccaatgcaggaatgctaggataaaacaaggtgacttttctttcttttttcttttttttttttttttgagatggagtctcgctctgtcacccaggctggagtgcagtggcacaatctcggctcactgcaaactccgcctcccaagttcacgtcattctcctgcctcagcctccgagtagctgggactacaggcgcccgccaccatgcccagctaattttttgtatattttttagtagagacggggtttcaccgtgttagtcaggatggtctctaactcctgacctcgtgatccgcctgccttggcctcccaaagtgctgggattacaggcgtgagccactgcacctggctgctaaaacaaggtgatttttcaaaaaattattgcacaatgtgcaatgagccctatatcatcatcctttcaaaatattctacacaggttatttccaaagacaaagaaactcagtggggattgcatgggagaaactgtgttgcgcactcctatgaagg

SEQ ID NO: 33833 - DNA, 766 bp, Homo sapiens
aaatttgtattcactgagaaaacttttctgaaagaacagcaaagaaattttatcatatcaaaggggcaactcccaccccaattgctaaaatcaagaatctattgacattagagacagtgaaagaagaaataataaaatgtctgtgtagatgcaataacagagaaaatgcagaaaagacaggatacaatgtaatttcaaagagatctgtaactgttagatttctagaaggctaaggagacaaattgaggaagaagcaacattggaagagaaaatgtgggagacatcaacggcagatacaagaagtagtcgctaaaagcgaaggcaggattgatatggtttggctctgtgtctccacccaaagctaatcttgtagctcccataattcccacgtgttgtgggagggacccggtgggaaatgactgaatcatggggactggcctttctcatgctgttctcctgatagtgaatggatctcacaagaactgatggcttaaaaacgggagtttaggccagtctcrgtggctcacgcctgtaatcccagcactttgggaggccaaggcgggtggatcacctgaagtcaggagttcaagaccagcctggccaacacggtgaaaccccgtctctactaaaaatacaaaaaattagctgggcgtggtggcaggtgcctgtagtcccagctactcgggggggctgaggcaggagaatggtgtgaacctgggaggcggagcttgcagtgagcagagattgcgccactgcactccagcct

SEQ ID NO: 33834 - DNA, 547 bp, Homo sapiens
ctgaacaccagaatgctgtccaaggaaccatcgttaaataaaacaacctgaaaataaggcaawtctcacgtatacaagcacactcacacgaaacctgttacttttaggatcattaaattattcactattttaacaaacagctgtaaaataacattacagtgaagaaaaatgtgcacaaacttcagaaacacagtttagattgtctatgaacacaggtccttaatttgtattttttcacatatgtacagtctcttgattgtaaagagaccacatggctcaaggggttaacttctcattttctccttccaactcggagctcaagatttaatcaaaaccatttagcctatttaaattgctccaggttttgcttagtaaagggcagcagaggaagactgctcttcatcaaattctccaggaaacaaataatacacttgcttccaccatcattaatgagttggtggaaaaagtcctcagattaacgttttcaagggtgaaccgcagttagcagggtttgccgaagaaatattattctaaaactagatagaag

SEQ ID NO: 33835 - DNA, 547 bp, Homo sapiens
ctgaacaccagaatgctgtccaaggaaccatcgttaaataaaacaacctgaaaataaggcaaatctcacgtatacaagcacactcacacgaaacctgttacttttaggatcattaaattattcactattttaacaaacagctgtaaaataacattacagtgaagaaaaatgtgcacaaacttcagaaacacagtttagattgtctatgaacacaggtccttaatttgtattttttcacatatgtacagtctcttgattgtaaagagaccacatggctcaaggggttaacttctcattttctccttccaactcggagctcaagatttaatcaaaaccatttagcctatttaaaytgctccaggttttgcttagtaaagggcagcagaggaagactgctcttcatcaaattctccaggaaacaaataatacacttgcttccaccatcattaatgagttggtggaaaaagtcctcagattaacgttttcaagggtgaaccgcagttagcagggtttgccgaagaaatattattctaaaactagatagaag

SEQ ID NO: 33836 - DNA, 597 bp, Homo sapiens
atttcagaagccacaaatgaacggrtaagagtataacagcataacagataagactccatacttcaaagccagattattactgagtttgtgatcttggacaagttatgaattttatgaacaatactgcctcattaattagctaccatcaatgagcaagccaattaattataaaccaatcagggattctataaagcctgttttaaaagcagtagcctgggcaaaaaacaaaaccaaaaaatgctcagattagagatggcagtatcccaccgaccaaacatgcagaaaaagaaccatgcctgtgtcactaagcattctggatctatcttcctaataacataaataagattttagtagtgttttgtcttgctcccacccccccaaggaaggagagatgaataaaaaaaagaaactgaaaatttcacccattaaagatagtcctaaaccattgtcgatagaaagcaggttttgtgttccagataccatatgaaaatactttcttcaaacttttcattatcatcaaagactaaatcaactattatacacaagtgatatctctaacaattaccgaaatcagtaaaacatagtgaatgctatttt

SEQ ID NO: 33837 - DNA, 639 bp, Homo sapiens
accttatgacttaaaatctaggagccataagaatgttatactcaactactaaaaataaatgacttctatatggcaaaaaaatactataagcaaagacaataaatatggatgaaaaatttgcaacatgtatcacaaacagctaatctctcttttatatcagagcaccagaaaataacaaaaagctcaacaactgaatagaaaaataggcaaaattcctgaatacatggttcatacacagaaacacatatggctcttaaaatatatttaaagttcaaaccattcatagtaagagaagcaaatcattaatcattaatggcactgagacatttgttatcaggctggcaaaattcaaaagtttgattatacactattttgtcaagaatgaggaaaataattctcttgtattttgctggtaggaatgtaaaatagtgtatctcctacagaaaggaatatggcagtatcttaacaattacagatatatctaccctttggcccacaattctacccctaagaatctatcctacagatatatctccacttgtatcaactracataagcttattccttccagcactgtaagagcaaaagattagaaacaatatccagctggttaaatacactatagtacctccacagaat

SEQ ID NO: 33838 - DNA, 902 bp, Homo sapiens
acctgcctcggcctcccaaagtgctgggattacaggtgtgagccaccgcgcctggccaacttctgttgtttacaaactacccagtctatggtcttttgttatagcagccagaacaaactaagacagggaccaaacccaccttggttcaaatcccaactttgcaacttcctagctgtgtragcaagttgccttccctccgtgaacctcaattacttcatctgtaataggggataataggatctcctaagcttgttctcatgattaactgagatgaggtaggcacatctccaggcagtggacatagcacagtaaatggcagctgttattgttattaggaggtatgtgtaagaacacttcgtctctaagtagttaatttggagactgaaacattttcgacatgagcagatgcccagtggcgctaatgacaatctgtgggcaaaaaaaaaaatctctgcaggatacatctaggattaaatcaaatgaggtaattcatggatagaaagtgctcagaccagtgtctagcacggactgggtggtgctccaaaaatgagagctccccctgatatttacaattcaacaagctttcttatggagacttaaaatggtttgagcacactgtaaataaccatggtttacaggagatattttttcaggaattcatctcatgttctccatcaagggacccctatcttgtgcaaccaatttatctctctttacaaaccttattaggttctgtctgtgtactttcaagaaaagttactttttggcaagcttgaatgggaaaagggatatgattgctttaaaactagagatctggtgtgtgaggttgccatggagacgatttaatgtaaactttattttacagcatgcccagctaagtaattggtcagaagggaagggga

SEQ ID NO: 33839 - DNA, 902 bp, Homo sapiens
acctgcctcggcctcccaaagtgctgggattacaggtgtgagccaccgcgcctggccaacttctgttgtttacaaactacccagtctatggtcttttgttatagcagccagaacaaactaagacagggaccaaacccaccttggttcaaatcccaactttgcaacttcctagctgtgtaagcaagttgccttccctccgtgaacctcaattacttcatctgtamtaggggataataggatctcctaagcttgttctcatgattaactgagatgaggtaggcacatctccaggcagtggacatagcacagtaaatggcagctgttattgttattaggaggtatgtgtaagaacacttcgtctctaagtagttaatttggagactgaaacattttcgacatgagcagatgcccagtggcgctaatgacaatctgtgggcaaaaaaaaaaatctctgcaggatacatctaggattaaatcaaatgaggtaattcatggatagaaagtgctcagaccagtgtctagcacggactgggtggtgctccaaaaatgagagctccccctgatatttacaattcaacaagctttcttatggagacttaaaatggtttgagcacactgtaaataaccatggtttacaggagatattttttcaggaattcatctcatgttctccatcaagggacccctatcttgtgcaaccaatttatctctctttacaaaccttattaggttctgtctgtgtactttcaagaaaagttactttttggcaagcttgaatgggaaaagggatatgattgctttaaaactagagatctggtgtgtgaggttgccatggagacgatttaatgtaaactttattttacagcatgcccagctaagtaattggtcagaagggaagggga

SEQ ID NO: 33840 - DNA, 592 bp, Homo sapiens
tgactgcctaagtcccttctcgttctaaaattctgcccttctcttggtgctcaataaatatttgtggaatggataaatgaatagatgtgtatgcacataggcaatacacattttcttagcagacacacatataaaaataagaatataatatgcagatagatagatagatagatagatagatagatagatagatagatagatagatttgctaagcaaaggaacattgtaagcaacaaaagcacctagcttcagggaactgaatgtaaaaacacttatacacattaataacattgttttataattacgtcacatgccaattaagcaaaaacacaactgctccatatcattagttattctgtgtccaaattattgaggacttgyaatatatcttaaaacattttatcaggacataagcagggctcttggtgccctcagtaccactacaccaagcactcaggcacggtgcacctacagaggaggctgcacacagcataggtatctggtggccatgattcattcacatctttctcacatgccaaaaaggcgggagagggatggtaaagagagaactgaccatgtggtaaccagaaaa

SEQ ID NO: 33841 - DNA, 514 bp, Homo sapiens
actcagcaaatatttgttgaatgaatgaaagaatggctgagtaaatattcaagagtaaaccaaattacaatgcattctatcaacaaaacccatgccaatgccccaggaaaggagaaaggtacagttttcagcttgaatattaattaccaaaaatatacactcttggccaggcatggtggctcatgcctgtaatcccagcacttggggaggccgagatgggaggatcacctgagtgcaggagtttgaaactagcctggacaacatagagagaccttgactctacaaaaaaaaattaaaaaattagccaagtgtggtgatgcacacctgtagttgcagctactcagcagtggtgggggtggggtgagggtgaggcagagtattgcttgagcccaggaattcgaggctgcagtgagctgtgatcacaccactgcactccatcctggctgacagagcaagatcctgtctcaaaataaatgaacacacacacacacacacaygcacacacacacacaca

SEQ ID NO: 33842 - DNA, 514 bp, Homo sapiens
actcagcaaatatttgttgaatgaatgaaagaatggctgagtaaatattcaagagtaaaccaaattacaatgcattctatcaacaaaacccatgccaatgccccaggaaaggagaaaggtacagttttcagcttgaatattaattaccaaaaatatacactcttggccaggcatggtggctcatgcctgtaatcccagcacttggggaggccgagatgggaggatcacctgagtgcaggagtttgaaactagcctggacaacatagagagaccttgactctacaaaaaaaaattaaaaaattagccaagtgtggtgatgcacacctgtagttgcagctactcagcagtggtgggggtggggtgagggtgaggcagagtattgcttgagcccaggaattcgaggctgcagtgagctgtgatcacaccactgcactccatcctggctgacagagcaagatcctgtctcaaaataaatgaacacacacacacacacacatrcacacacacacacaca

SEQ ID NO: 33843 - DNA, 514 bp, Homo sapiens
actcagcaaatatttgttgaatgaatgaaagaatggctgagtaaatattcaagagtaaaccaaattacaatgcattctatcaacaaaacccatgccaatgccccaggaaaggagaaaggtacagttttcagcttgaatattaattaccaaaaatatacactcttggccaggcatggtggctcatgcctgtaatcccagcacttggggaggccgagatgggaggatcacctgagtgcaggagtttgaaactagcctggacaacatagagagaccttgactctacaaaaaaaaattaaaaaattagccaagtgtggtgatgcacacctgtagttgcagctactcagcagtggtgggggtggggtgagggtgaggcagagtattgcttgagcccaggaattcgaggctgcagtgagctgtgatcacaccactgcactccatcctggctgacagagcaagatcctgtctcaaaataaatgaacacacacacacacacacatgcayacacacacacaca

SEQ ID NO: 33844 - DNA, 514 bp, Homo sapiens
actcagcaaatatttgttgaatgaatgaaagaatggctgagtaaatattcaagagtaaaccaaattacaatgcattctatcaacaaaacccatgccaatgccccaggaaaggagaaaggtacagttttcagcttgaatattaattaccaaaaatatacactcttggccaggcatggtggctcatgcctgtaatcccagcacttggggaggccgagatgggaggatcacctgagtgcaggagtttgaaactagcctggacaacatagagagaccttgactctacaaaaaaaaattaaaaaattagccaagtgtggtgatgcacacctgtagttgcagctactcagcagtggtgggggtggggtgagggtgaggcagagtattgcttgagcccaggaattcgaggctgcagtgagctgtgatcacaccactgcactccatcctggctgacagagcaagatcctgtctcaaaataaatgaacacacacacacacacacatgcacrcacacacacaca

SEQ ID NO: 33845 - DNA, 1100 bp, Homo sapiens
tgtctgacctcctcaggcaagtggcatgtggaagaaggaccccggcctagagtcaggagacctgggtctttggcctcgttctgccattccctcactgtgagatcctaggcttctctccatgtctttctagacctcagttcctctgtctgcacaaaagggacatgaggattgatctttgatggccttctccgttaaaaattagagatgctggctgggcatggtggttctcgtctgtaattccattcgccacagtgggaggatcgcttgaggccaggagttgaagaccagcctgggcaatatggttagactcctatctctacaaaatatttttaaaattatctgggtgtggtggtgcatgcctgtagtcccagctactcgggggctgaggcgggagaattgcttgagcccaggagtttgaggctgtagtgaactgtgatagtgcctgccactttactccagcccgggcagtagagtgagaccctgtcttaaataaataaattaaaaagatgctttaaatttaagttttaggttttagattatgtcttcactctgtgtggtccacttagaccggaatccagaagaaaaatgtcagggacactccctaggacttctggcaaaggcaggagccagaatgaatgaatttcctgtgcccaggcccccctgctgtccctggctcctagcccttggcccaagcatggctctcagcctagacaaggccttcctaggrggcctaggagccctgcgggaggcagagtgcagataaaggctcggagtccgtccatgtggaaaacctgggtctgcggcgatcgtgaaccacatgggcagaggggccagacctggggttcctatgatgggaacatgatgtgactgtggaggccagtcaaggctcctgccagcggtgagtggaacagataaagaaatcagtcatcagaggagagaagtaccccagaccggagtgggaggtcacatatcggctccctgtgctgccctccagaggggaactggggcagaggggcctcctcattccacgaggctggctgggctcaattcaaggaacccttgtcctcccacctctgttggaatcctcactgcagcccact

SEQ ID NO: 33846 - DNA, 1100 bp, Homo sapiens
tgtctgacctcctcaggcaagtggcatgtggaagaaggaccccggcctagagtcaggagacctgggtctttggcctcgttctgccattccctcactgtgagatcctaggcttctctccatgtctttctagacctcagttcctctgtctgcacaaaagggacatgaggattgatctttgatggccttctccgttaaaaattagagatgctggctgggcatggtggttctcgtctgtaattccattcgccacagtgggaggatcgcttgaggccaggagttgaagaccagcctgggcaatatggttagactcctatctctacaaaatatttttaaaattatctgggtgtggtggtgcatgcctgtagtcccagctactcgggggctgaggcgggagaattgcttgagcccaggagtttgaggctgtagtgaactgtgatagtgcctgccactttactccagcccgggcagtagagtgagaccctgtcttaaataaataaattaaaaagatgctttaaatttaagttttaggttttagattatgtcttcactctgtgtggtccacttagaccggaatccagaagaaaaatgtcagggacactccctaggacttctggcaaaggcaggagccagaatgaatgaatttcctgtgcccaggcccccctgctgtccctggctcctagcccttggcccaagcatggctctcagcctagacaaggccttcctaggaggccyaggagccctgcgggaggcagagtgcagataaaggctcggagtccgtccatgtggaaaacctgggtctgcggcgatcgtgaaccacatgggcagaggggccagacctggggttcctatgatgggaacatgatgtgactgtggaggccagtcaaggctcctgccagcggtgagtggaacagataaagaaatcagtcatcagaggagagaagtaccccagaccggagtgggaggtcacatatcggctccctgtgctgccctccagaggggaactggggcagaggggcctcctcattccacgaggctggctgggctcaattcaaggaacccttgtcctcccacctctgttggaatcctcactgcagcccact

SEQ ID NO: 33847 - DNA, 604 bp, Homo sapiens
tgcaaaagtgtaagatgatttgcatcctctggcacctgcacacttctgccactaaacttcgtaataacataagcctccttgtgcttatttgtttgtgtgaagccaaagctatttgagaaagtggtttcccagtcattcgtggctctagtggcacatggcacctcactggaaaaggggcgtcatacctctcatagggttgtaaaggatcaagaagtgggccaagtaggaaccgattccctccttccctgatatctgatgaccactgaactgcagaacttaatgytgacttaaatacagccttttgttttggcattaagctatagatgtttcccaagaaggttttaaaactcttagacaatcactagaaattaaaatgggcaggaccaatagagtcagtgcctactgaaaaggaatcagaaacccagaaaagtcatgccttgctcaagtccactgccagttaatgccaaagctctgccctgctcactccacacacagcacaccctcaaaggagaagcagaactagttccttctttcttcctgttctcaggaaagggaggccatgccttctcacttcctcttcaccctgccctaggagctggaaatc

SEQ ID NO: 33848 - DNA, 604 bp, Homo sapiens
tgcaaaagtgtaagatgatttgcatcctctggcacctgcacacttctgccactaaacttcgtaataacataagcctccttgtgcttatttgtttgtgtgaagccaaagctatttgagaaagtggtttcccagtcattcgtggctctagtggcacatggcacctcactggaaaaggggcgtcatacctctcatagggttgtaaaggatcaagaagtgggccaagtaggaaccgattccctccttccctgatatctgatgaccactgaactgcagaacttaatgctgacttaaatacagccttttgttttggcattaagctatagatgtttcccaagaaggttttaaaactcttagacaatcactagaaattaaaatgggcaggaccaatagagtcagtgcctactgaaaaggaatcagaaacccagaaaagtcatgccttgctcaagtccactgccagttaatgccaaagctctgccctgctcactccacacacagcacaccctcaaaggagragcagaactagttccttctttcttcctgttctcaggaaagggaggccatgccttctcacttcctcttcaccctgccctaggagctggaaatc

SEQ ID NO: 33849 - DNA, 582 bp, Homo sapiens
atttaatgacaaatattccatattggttgctgaacaccagaatgctgtccaaggaaccatcgttaaataaaacaacctgaaaataaggcaawtctcacgtatacaagcacactcacacgaaacctgttacttttaggatcattaaattattcactattttaacaaacagctgtaaaataacattacagtgaagaaaaatgtgcacaaacttcagaaacacagtttagattgtctatgaacacaggtccttaatttgtattttttcacatatgtacagtctcttgattgtaaagagaccacatggctcaaggggttaacttctcattttctccttccaactcggagctcaagatttaatcaaaaccatttagcctatttaaattgctccaggttttgcttagtaaagggcagcagaggaagactgctcttcatcaaattctccaggaaacaaataatacacttgcttccaccatcattaatgagttggtggaaaaagtcctcagattaacgttttcaagggtgaaccgcagttagcagggtttgccgaagaaatattattctaaaactagatagaagaaacaa

SEQ ID NO: 33850 - DNA, 582 bp, Homo sapiens
atttaatgacaaatattccatattggttgctgaacaccagaatgctgtccaaggaaccatcgttaaataaaacaacctgaaaataaggcaaatctcacgtatacaagcacactcacacgaaacctgttacttttaggatcattaaattattcactattttaacaaacagctgtaaaataacattacagtgaagaaaaatgtgcacaaacttcagaaacacagtttagattgtctatgaacacaggtccttaatttgtattttttcacatatgtacagtctcttgattgtaaagagaccacatggctcaaggggttaacttctcattttctccttccaactcggagctcaagatttaatcaaaaccatttagcctatttaaaytgctccaggttttgcttagtaaagggcagcagaggaagactgctcttcatcaaattctccaggaaacaaataatacacttgcttccaccatcattaatgagttggtggaaaaagtcctcagattaacgttttcaagggtgaaccgcagttagcagggtttgccgaagaaatattattctaaaactagatagaagaaacaa

SEQ ID NO: 33851 - DNA, 455 bp, Homo sapiens
aaaaawacaaaaaaattagctagacgtggtggcacatgcctgtaatcccagctacttgggaagctgaggcaggagaatcgcttgaacccaggaggtggaggttgcggtgagccaagattgcaccattgcattccagcctgggcaacaagagcgaaactccgtctcaaaacaaaaccaaacaaaaaacctatagtctataatggctttaaagtagtttgtagatttaagttcacttctaacaaaatgctgaaatcaagtgcacagtatgcaattcaagaaaccaaaagaaagaattgaggctacgtatagcacttgatcaataaaagtaaaaatggtgcttaagaaggaaggcttagctcaaaaagagaggataccaacagatcagggttcttaatctcaacactattagaaattctctgctgtttggtgctttcctctgcattgtaagatgttta

SEQ ID NO: 33852 - DNA, 455 bp, Homo sapiens
aaaaatamaaaaaaattagctagacgtggtggcacatgcctgtaatcccagctacttgggaagctgaggcaggagaatcgcttgaacccaggaggtggaggttgcggtgagccaagattgcaccattgcattccagcctgggcaacaagagcgaaactccgtctcaaaacaaaaccaaacaaaaaacctatagtctataatggctttaaagtagtttgtagatttaagttcacttctaacaaaatgctgaaatcaagtgcacagtatgcaattcaagaaaccaaaagaaagaattgaggctacgtatagcacttgatcaataaaagtaaaaatggtgcttaagaaggaaggcttagctcaaaaagagaggataccaacagatcagggttcttaatctcaacactattagaaattctctgctgtttggtgctttcctctgcattgtaagatgttta

SEQ ID NO: 33853 - DNA, 513 bp, Homo sapiens
cccctgatcaaagagcccatgaatgtgggttgattcactgaggcaaatccagatatgcttggcctcatgtcctgtgttctttccacgactcgtcattggcactcgcaaggaaaccaggccccagccactgcccaggagctctgctgggtgccgagtggggctttgccagcgagatacacaagacttgtgtctacttggttcatagctgtgtccccatggtctggtccaggcttggcaccgagtaggtcgttaataaatattttaaaatgaataaataggcagcagagagctcaagcagggatgagcaagaatagcgagttagcatgaagaatgaaatgaaaaccccatgagtctgaagtgcagaggttttaaaatgcacagccctcaatgggaagcactgactcgtcacagaagtacaamaaaaaaaaaaaatctgggcaatgccgaggcaggaaaaaccatttagcatgaaataggaagggaggaggaactagcagcaggcattgcacagaa

SEQ ID NO: 33854 - DNA, 514 bp, Homo sapiens
cgtgagtgtgtgtgcatacatgcgcatgtgaacagtccatggagcttaatcccctggaggagggattctacagcatcacatgtagaaggcattctgctcagagaatggcctccatttttccgggaacgcacctgttcgttcctctatcagaggcaccagctacggctgcggctgccccgtccttggtgaatgtacaacgacgcttcttggcatgagatgcagacaggcccacactttgggaaaggggccagaacccgagatgtatgtatgtatttcctcgctaagaagaaaccgcaggtctaaccatgatgtcatwagaatgattgtttagaggcctggaatgagaccatctaattaccagtccaacctgactcactggtcctttcaaatccaatagtgtttcttaaaataaatgctgaaaatgacttcattcagggaaaggcaggttgtggccatttaattatggctacagattaatgaatgaataaaatatactctggctaaattgtgggaa

SEQ ID NO: 33855 - DNA, 2197 bp, Homo sapiens
gtctttttatgaagtagatggagaagttgttattggactcttttttttattttgagactgagtttcactcttgttgcccaggctggagtacaatggcatgatctcagctcactgcaacctctgcctcccgggttcaagtgattctcctgcctcagcctcccgagtagctggcattacaggcatgtgtcaccatgcccggctaattttgtattttttagtagagatggggtctctccatgttggtcaggctggtcgcaaactcccgacctcaggtgatccgccttggcctcccgaagtgctgggattacagaagtgagccactgtacctggccttttggactaattttttagattaaaaaacattctgtgcgtcagacaccagcggcccagtagaaaaagccagaggtgctgatgacttctaaggtggcgctccctgcagctgcgactcaggtcctgcgttagtgtctgcacctgtgaccatcaggatgagctggggccccgggtgcttctgtggtcaggctgggacagtgaaaggcaggtttgagctgctgaagagggagcccttgcatccagggctctcaagaggcaaaggcccgcctggcagtgtcctggggcaggagcatggaaggctgtgtcatgtgcggagacagcggtgatgggggaggtttggggtgcggtgagggggagactccctccatggtggaagcccttggagttgccagatggctggtcaatgctgatgccaatgtggaaatggggcgctgttgtttgtggggtggctggaccctgcatggagaagtgaattcagttttggctttctcagctgttggctgaaggccatggcccctcatgaagtcttcctgcaagcttgaggactttgttctcactcacagggagcccggtcagctcttagacaggagggctgtggtgtaccctggaggtgtttcctgtctctctagaagctggccatggggagaactgaggggtaggtggggaggggccacgcggacccctgcagcctctttgatcttgtattcagaaggtatgagtgtgcatttctatggggcgaggagctatagcatccaccagattctatggatggagctttcgtggatccagagggtgccatgttcttccgaagcctggagaggctcctgagcggggcaaacttctccatcgcccttggccagagatccaaccactcaatcctaagctcctcatcagcaaggtgggatgcagcccccggcattgacctcctgggtgtccccagccctccagccccagacaaagggggaagattctagcctcatcccaaggtgggtgggcactccacatacccagcagcctgcagagatccttggtggtcccagcctcccagtccctgctctgaaagcttgatgaagacctcccctgcataaaaggtctctcttggggcagtcgtctgactccagcgatggttctgtcctsgtgccttcctgggggtcgaggcctggcctcggggtgggattggtctctaggttcaggttagtgcccctacttttacctatgagagcccattgccactgcttgccatgctagaacaggccactgctccaacgaggaaaacccatttttgacgtccatcatgttaattagcacagcctctagggttgatggggacggaaccacagaagcaccatggggtcctccctgaactggagcctctgtgaccacctgctagagggagattcttgactagggccaaggctaagcccagaggggagcaatggcacattgtcagcccgcagtgtttgcaagtgaaatgtagacagggcaggctggctgcggggaggggcttgtttgtttgtttttaatcccgatttagtcttcccaaaggcaggcacatggaagcatcctcacccccgctgcttcccgtggcggccctcacagaaggcgcgtctgtctggcatcttggccgtgaatcagagctgcttgtgatgaatcagagctgctcgtgcagccctttgcagaggcataaatccgcaccacccttgttaattggttaggttttgacattcctgacagctctgcccgccgcagatggtgtaattgctgggtctaacgagaaggttgagcaccttcccgtttgtcaccccgtcattctccagcacggctggattctgccctgtgactgttatgcctggcacggatctcagct

SEQ ID NO: 33856 - DNA, 2197 bp, Homo sapiens
gtctttttatgaagtagatggagaagttgttattggactcttttttttattttgagactgagtttcactcttgttgcccaggctggagtacaatggcatgatctcagctcactgcaacctctgcctcccgggttcaagtgattctcctgcctcagcctcccgagtagctggcattacaggcatgtgtcaccatgcccggctaattttgtattttttagtagagatggggtctctccatgttggtcaggctggtcgcaaactcccgacctcaggtgatccgccttggcctcccgaagtgctgggattacagaagtgagccactgtacctggccttttggactaattttttagattaaaaaacattctgtgcgtcagacaccagcggcccagtagaaaaagccagaggtgctgatgacttctaaggtggcgctccctgcagctgcgactcaggtcctgcgttagtgtctgcacctgtgaccatcaggatgagctggggccccgggtgcttctgtggtcaggctgggacagtgaaaggcaggtttgagctgctgaagagggagcccttgcatccagggctctcaagaggcaaaggcccgcctggcagtgtcctggggcaggagcatggaaggctgtgtcatgtgcggagacagcggtgatgggggaggtttggggtgcggtgagggggagactccctccatggtggaagcccttggagttgccagatggctggtcaatgctgatgccaatgtggaaatggggcgctgttgtttgtggggtggctggaccctgcatggagaagtgaattcagttttggctttctcagctgttggctgaaggccatggcccctcatgaagtcttcctgcaagcttgaggactttgttctcactcacagggagcccggtcagctcttagacaggagggctgtggtgtaccctggaggtgtttcctgtctctctagaagctggccatggggagaactgaggggtaggtggggaggggccacgcggacccctgcagcctctttgatcttgtattcagaaggtatgagtgtgcatttctatggggcgaggagctatagcatccaccagattctatggatggagctttcgtggatccagagggtgccatgttcttccgaagcctggagaggctcctgagcggggcaaacttctccatcgcccttggccagagatccaaccactcaatcctaagctcctcatcagcaaggtgggatgcagcccccggcattgacctcctgggtgtccccagccctccagccccagacaaagggggaagattctagcctcatcccaaggtgggtgggcactccacatacccagcagcctgcagagatccttggtggtcccagcctcccagtccctgctctgaaagcttgatgaagacctcccctgcataaaaggtctctcttggggcagtcgtctgactccagcgatggttctgtcctcgtgccttcctgggggtcgaggcctggcctcggggtgggattggtctctaggttcaggttagtgcccctacttttacctatgagagcccattgccactgcttgccatgctagaacaggccactgctccaacgaggaaaacccatttttgacgtccatcatgttaattagcacagcctctagggttgatggggacggaaccacagaagcaccatggggtcctccctgaactggagcctctgtgaccacctgctagagggagattcttgactagggccaaggctaagcccagaggggagcaatggcacattgtcagcccgcagtgtttgcaagtgaaatgtagacagggcaggctggctgcggggaggggcttgtttgtttgtttttaatcccgatttagtcttcccaaaggcaggcacatggaagcatcctcacccccgctgcttcccgtggcggccctcacagaaggcgcgtctgtctggcatcttggccgtgaatcagagctgcttgtgatgaatcagagctgctcgtgcagccctttgcagaggcataaatccgcaccacccttgttaattggttaggttttgacattcctgacagctctgcccgccgcagatggtgtaattgctgggtctaacgagaaggttgagcaccttcccgtttgtcacccygtcattctccagcacggctggattctgccctgtgactgttatgcctggcacggatctcagct

SEQ ID NO: 33857 - DNA, 514 bp, Homo sapiens
aaggctctccamatctctcagttcctcactggcatttccaccgccattttctactctcacacttagaaaatctgctagagggaagaggaggtagaataaccccatgtccccaccacacacatcccttctgagcgaggaagacaaggaagagaaaggcagccgaatcaggactgcccctggagccctgaagaggatactctcaggaactccccacatgtggcccataaggagctgacatttgccatattgtgcccacataagggccctgcacagaagtgggcaaggaccagggagcctgagtgactcgaatcgtctcctgcctgcaccttgtgcattgccacacctcccctccaccctaggacctcagcagacacacccatgtgccagcaagcttctccatccctgtgggcttctctggctgccacgggcacatggcatgcatgatgaggccttgtctaaccacacccaagagcgaggacatgggcaaggaggatcgtttcctccctaactcctc

SEQ ID NO: 33858 - DNA, 578 bp, Homo sapiens
gaaggctggggccttcataagcaaagagtagccggcgggagatgcaggaggcagaccaggtggcgaggattctcttcaacgcactgactgctctgaagaggcagaacctggagcaggagagccaggaagggccggggccacttggccaggttggtgggatactcagcattggcctggtttctgtgtgatctcttcctacagagctgctaaccctggtgagccagaagatgtgtgtggtcgtgtaccccgaggtggagcggggctcagggacagaggaggctaatgaggacatggaggagcagcagcagcccatgtaccaacccactcccacgaaggacaaggacgtggcggggcagccccagccctgaggaccaccattccctggctactctctccttcctcccccttttatcctacctccctgccttggtccygccaacacatgcgagtacacacacacccctctctctgcttttgtcaggcagtggtaggactttggtgtgggtggtgagaaattgtaaacaaaaactgacattcatacccaaagaaccagcctctcaccccagggtccatgtccc

SEQ ID NO: 33859 - DNA, 615 bp, Homo sapiens
cacattttgattatgaattaattgcaattactaaacaaagttactttgcaagaggaaagtttacaggagtttgattccatactccgagggtttccaatgggacgtccgtacaaggctgcacacttcccgtagtccttaaacggattatatctgcttgtcatgattggctttttttcaagaaaagatctagcacaagttaagagagattctgtgaatcttgaaaaagcttcagaggcccggtctttgaggtgaggacacagttaatctatatggaaagaaacctaagacttttagtccacttgacaggtggttacagggtctcccccaacacacactcttgtccaggtaattcctgaataaggtggttgatgttgttggatgtaaaacctctgctctttaaggttacctcctccccaaccccctccacacacacagtgagtaactcagctgtgcaaagtatgyccataacaccttgcagaaagactaaaaaaattactaggggagcggactgacttctgtgtgtgtgcagaggagctgagaagcagcttctttagcgaaaggtgtgtgtgtgtgtgtgtctcagatccttggtgaggagccctggggagtggactc

SEQ ID NO: 33860 - DNA, 844 bp, Homo sapiens
aagaaaaaaaaagtatttgaagcccatagggtcacgaggagaatcccgtcgagtatttcagagacctgctttcaccttgacattagtttattagtgttaccactctccaactgccattatcaagcccacatttttattttttcatctagttcatgagaacatcatgtgagactctgtaaaatgtcttcctaaaatcaaaatacatcaaggtcttacaattcaattaaaacaaaagtacataatttttaaagctttttattataatttcagttacatttattacaatttcaagtacaaagaactccttaaacttggaaattgactatggagttcatttcctaaaaacattatagctctaacatgcagtttataagcataatttgtgtcatttatttaatacatacaccaaaaataaaaaatatatatgtatttggccgggcacactggctcacgcctgtgatcccagcactttgggaggccgaggtgagcagatcacttgaggtcaggagtttgagaccagcctggccaacgtggtgaaaccctgtctctactaaaagataaaacttagctggctgtggtggtgtgagcctataatcccagttacttgggaggctgaggcaggagaatcgcttgaacctgggaggyggaggttgtattgagatgagatggcgccactctactccagcctgggtgacagagcaagactccatctcaaaataaacaaacaaataaatatatatatataaataaatactctctgattctgctaattcctctaatcttaaacattcctcttttaggaaagtggaccataaaggctgttactgccaatggaaggcatctg

SEQ ID NO: 33861 - DNA, 598 bp, Homo sapiens
atagggtgagtaatggggagtatggtcagagctcagagaaacagcaaatgccaatcatgtaaagccccatgggacttgatgaagagtttagattttgtcttaagtgtaatgsaatacataccgtgaggtgaataggctgcaatagagcaaaaatgcaggagatcagagagttggctaccacagagtccagatgggtgagctggtggagtagttaaaagggattggattccggatatttgaaagaccaagataactgggatattgtgtatgagagaaagaagcagagggtgagcttaagatttttgttctaagcatctggtggatgaaggagccatttactggcctaggagatgtcaggaaaggaacaggtttggagttcagaaaaatcaagagttcagtagtcaacatgtcaagtctcagatccattttacacatcccagtaaacatgtgcctgaagtagtttgtgtctggggttgaggcagtgcaggttacagctgctggtaggttgatagagttgatgatgggtggatatagaattgctcttcaaactgtttccttttttcagtgtgaaaaatacaaagcgttttgctaaatgcat

SEQ ID NO: 33862 - DNA, 1063 bp, Homo sapiens
ccgtgagccacaggattccggctcctgaggagctagatccagatggcagctaagtgggtttatgttctggacccttatttgaggccaggtgaagggatgcccagaaagccccatgcttcaccagaacccaggaggcaatgaggacctgtctcccgtcggctgccagggaagtagggaggtgagtgggcgctgacatagcatccctctcttttgtgttcctggagggtcataaggtgttcttccaagacagacaaagcatctgtgcttcaggccttgcctacatggcttattaggtaagtgcggactgccagggatttgtggcagagctgttcccctgtacttctttggacttgtagtgtgactgatgtctccacataacagataatcacatcacctctcagtgttactccccagctgttttgcctccccctgtcctgtcccctctgtgggtcgacagatgctgttgtgtgaatcaggctgttcttggggcctgttttctgtctgcctcctctttatatctgacatgtaaacatggctgtcattggtttgagaatcctggttcaggctctccctgtacatatttggagccactggactgtggcagatactgcctcattatttgtagatggctgtgttttttgtttatttgtttaaaaaacaaatttgtggtataatataacatcaaatttaccattttaactctttatttattattattattattattatttttttttgtagaggcagggttttggtatgctgcccaggctgatcttaaacttctgagctgaagygatctgcgcgccttggccttccaaagtgctgggattacagttgtgatccaccacacccattttagccatttctaagtgtacagctcagtggcattaggcacattcacattgctgtgcaaccattaccaccatccatctccagaactacttcttcccaaactgagactccgtgctaagttgttaaaaaaccccaagtcctcatttcctcatccccccagatcctggtgaccaccattcttttggtgcctaaatttggacctcatataagt

SEQ ID NO: 33863 - DNA, 604 bp, Homo sapiens
ttagaaacaaaataagagatccccttcttcaccagctgttaatgttttccatagggtgaggagggaggcaaacgtcttgtttctgtggtggtggctggaagtttggagactttgttggagggacagtatgagtcacagaagaacaagacaccttgtattgtgtgacagtggagtgtgaacaagctttgcacacgtgtgggcggccctcgctggtgaatgctgcctgtaaactgataagggaagagttggggtttccagggagcttggagcagaggtagctagagagagcctcagggtgggagcctctagaatgggtaagctcagtgagcctggcaggtggtggggtggcctgtgcgccccaagtggggtgcaggggtagatggggggacagctaatgagcaaggtgtccacttcattcctctgggttgatcagtcaacatcaaactgtgatgtcckttaaaaagtcatctggccaggcatggtggctcacacctgtaatcccagcactgtaggatgccaagacaggaggatcacttgaggccaggagtttgagaccagcctgggcaacatagcaaaagctctgtccctgctaaaaattgaaaaa

SEQ ID NO: 33864 - DNA, 659 bp, Homo sapiens
ctgctttctagaagcagagggagcagcgggttacgtatgtttgtgactcctgcagttagcatgccttccctctggctcaacagtgtaggtagtgttctcttaggtgaccttttctggtgaggggctggacaagggcgtgactgctcccctaggtgctgggtgaatatgttactcgatagatatttactgagcaccaacggtaagtcaagctcttgagtaaagtagggaacatacgctatgccaggcctctgccctcgtggagcagatgttctagtggggaggttacattgactggatgaaagggagaatgcatgaattgcacccagccctgtcatttcctccttcctcttcttcaccttcatcatgatcccatgaaagtgtttccgagtggtttcccatctcctccaaggcatgaggagaggttggtcttctgcctcactggcagctttattttattttattttattattttattttttggggggggggacagagtcttcttctgtcacccagactggagtgcagtggcgcgatctcggctcactgcaacctctgcctcccrggtttaagcgattcttgtgtctcagcctcccgagtagctgggactacaggcacatgccaccatcacgcccggctaatttttgtgtttttagtagaga

SEQ ID NO: 33865 - DNA, 601 bp, Homo sapiens
aaaaaaaaaaaaaaaaatatatatatatatatatrtatgtatatatatatatatgtatgtatgtatatatatatatgtatgtatgtatatatataaaacataaaataaaaaataaaaataatttatagagaaagttcttattttctctcatgcttttgaaatatttcatctgagtgggaaactgtccagagaatatgggatatgaaagaagaaaacaatttcttctgacttctaatttcccagtgactaaatattttatactagaatacctgcacagtcaaagtaatctcaagatataaattagctatcttaaaaagtgactcccgaagtaaccatttagcttgaaaggaatatatctttatcttggaacaaagaataacttaaggatattaatataaattatgaacaattctcattatggtcagaaggaactattactattttgttgctatttttagcatccaaatcacataattctttaaaatgaaattataacagtagaagcattagcttaagtcgacttaggcaatataaatagtgtgagttaaagaaaatgtttaaaggtaccactttttagattattgccaaaatctgagaaata

SEQ ID NO: 33866 - DNA, 601 bp, Homo sapiens
aaaaaaaaaaaaaaaaatatatatatatatatatgtatrtatatatatatatatgtatgtatgtatatatatatatgtatgtatgtatatatataaaacataaaataaaaaataaaaataatttatagagaaagttcttattttctctcatgcttttgaaatatttcatctgagtgggaaactgtccagagaatatgggatatgaaagaagaaaacaatttcttctgacttctaatttcccagtgactaaatattttatactagaatacctgcacagtcaaagtaatctcaagatataaattagctatcttaaaaagtgactcccgaagtaaccatttagcttgaaaggaatatatctttatcttggaacaaagaataacttaaggatattaatataaattatgaacaattctcattatggtcagaaggaactattactattttgttgctatttttagcatccaaatcacataattctttaaaatgaaattataacagtagaagcattagcttaagtcgacttaggcaatataaatagtgtgagttaaagaaaatgtttaaaggtaccactttttagattattgccaaaatctgagaaata

SEQ ID NO: 33867 - DNA, 525 bp, Homo sapiens
ccagctactcactggataacatccagggatcaaggatcagaagttatataacaagcacatatcccacaatgcacgcacatgcacgtgcacatgcacacacacacacacacacacacacacatctttctttggcaacaggccttggctttcataaccacattctacttggatttgcttgggaattttaacagctacaattaatgaatgtctatgcctcatattcctatttccctgaaaactgggccagctaactgaagaggcttaggcagagggaaactaggatatctgaccttggaccttgcaaaaccaaagacggataggawggaatctggaatttgccaaaggatgcagctgagaaagtattttcaatatttagcattttcaacatatttaacatgttttccaagaaacagccaggctactcactaaagcccataaaaaagccaaggtttagggaacttgcctgaggtcagagggaaactgaatgccagagccaggaccaggctcaagtcttaacggccccag

SEQ ID NO: 33868 - DNA, 594 bp, Homo sapiens
tgagagtcccagaccccctcttccaaccagcaagtgagttcacttttcccaccctggcagaaattattccctggcaagattaaatctaaagaactctggtcttgggtcatcagatacagctaagggcagaggtgctataattaaaacaaaaaatgactaaaaatccacatattggatggtaaagcccagagctctcttctctcatatractcccaaaacactggcagccaagtttatatcttccctcaagagaagaaattggaagaccagcccaaaagaaaaatctatagttgctggaatttaagacaccctcacaaaaaggccaatgcaccccctacaatcctacaccagtcagtaaacaccaacttcaaaagttagatcatcatatcagcattttagtgcatcattcttaaatgtagaaaaccaaggagcatttgtcaaaattctatcattctctcaaggccctctcaaatgtcaccttctccaagaggtttttcatgagtcatcaatttagtgtggcattaactataatctatcttgttgtgtagtcattgtaaatatcttcacatctgttaggcgggtggctctctcctt

SEQ ID NO: 33869 - DNA, 640 bp, Homo sapiens
ttatcaaaatggaatctttaatatgtggaaaacaaaggaatgaatgaaagatggatctcacgtctgctgtgactgggaaatggacagggccactaaaataagtggaagagttagaaagacatgctgttttgataaggagatgatgaatttggatttggataagttgagttatagaagccaattccatttaggttaaaaatgcaagcatgtaattggggatataggtctatacctccgaaaagaggctgagatgagagataaagctattttggagtcatcttagtagtgccaaatatttcatcagcagcgactttcaagtaaacatatacagttagtgaatcctggacttccttttataagatttctcacacttaaaatgacttattcaatgcctgtctcctcccactcaactgtaagtttcatgaggacggtattgctctatccttaggaaggaagccactacagtgtaggaagtctgggaacagggtggtatggaaagccaagtcttaggctgttaagtgaagaatwactccttttctccactagcagtattagcagccatgccaaagaaattcccattgtatggtgagtcaccattgttcccccagtggaatgaacaaatgattttaaatcactcaat

SEQ ID NO: 33870 - DNA, 2469 bp, Homo sapiens
ttttaaaaatagatgatgctaaagatcatatagctatatgatcatatatatatcatatggctttatatttatattatatgatatttgcttcatacttatatttattatattatatataaatatatatatctatcatatggctttagatttcattggaatattaaaaacagtgatagaacagtgtcctaaaattattttatttcattttttacaatacacaggaaatcttactcttaaaaaaaaatggaaaaaactggtctttgagatacgtaaaagagaacatgtgagcaaatatgaggaccactggacagaatgcacaaattctcatcttgttaagatgttaacatcttaccttaggaggatgctaaagtataaagtaatgtgtagactctatrttttattaaatcaatctctcttaggtgataaacattacctaagcaatagagtatgaatttatgttagttttttctaaatgtttgctttatattttatgtcaaaacaaataacttgcatgaaagttgaacaccaaatgtctccttaagaactcagtgaaagagcaactcttttaatgtttcaaaaaagcaattttaaaaaagtgcaagaaacaaaacctgtgaactttgaatgtactgataagttattgagaaaaaaatttgcttttataatgtcattactatttagtttggaaatgactcccagtgataacagaaaatgctttgtataaacagagtacacattcctcagattaaacagcttctgagacttatgatgctgacagtaataaaagcttgtaataatatatctgttataattctgaacatccagtactgtaataagctgactcttttgttgcaggtttctactcaaccatgagaaaactatcatgagtgaagcgaggagggcttgtctccatctagtggtcagtataataatattaaatattactattattctaaaatcaaaatatgtacatgttattttcttaattgtagtgagaaatgatactaatcataatagtactgttattttctaatcacgtatatcaaacttgacaagtaaataatccgatagaagatacataatcttgaagtagacatattgaaatacatagtttgagtacactgtcaaaagtctgtgaagctatttccctgctgcaaaaaagaaaaaagatgagaacacaggagagtaaggatggcctcaaaattttatattctgacatatttaaactttttacaaaatcacccaagagaaaaacgtttggcctatcaggggagaagatcttctataaactacggacttaatgtgtaagcaactcagaacaggggtccacccagaacaggaagaaataaaagtctttgttttcaattaggccatttatggcacaatcaaaactgtgcatagtttttcaatggaactcgtggagctagagagtagaaggacggttaccagaggaagggtagtcaggagctgagaaggaagtttgaaaggctaatgggtacaaaaaatagaaagaatgaataagacctagtatttgctagcacgactggatgaatatagtaaaaactaatttaattgtacattttaaaataactaaaagagtataattggattgtttgtacatagaggaaaaatgcttgaggtgatggatactccatttaccatgatgtgattatgatgcattgcatgcctgtatcaaaatatctcatgtaaatcataaatagatacaaccactatgtacccgcaaaaattaaaaattaacattttacaaaactgtatatagttttgttttacagcctagaagttgtttgtttcaagggcctaaaatgtgtggcaaaaggggtttttttatacctacttaaaaatttcaaaatattgaaaatcaaggcaacaccacccctttactttcgttagcaataaaaataggttgatctcatgttaatttttccagattaggtttttttttaatatcatggtatatgaaaagtcatcctattagcctccacagatctttggccagttttcccttggcatcaatcaccaggaggaaaatacaggagattagtcaacagaataaattaatgagattagaggtttgcctcaaattcagaaaaggactttatattatgcaaaaaggtaacatggtgtggagtgatgatagaggccagttaacattagctcattacattagtaatggtgtcatatacagactgtatgaggcttttcatgtcataagagtgtttattttataagttaaacttggcttaaataattaaaagatttctcacaactaggacaagtttccaatgccaacagatcatggccaatgacttctatgatttcttcctccctctgggaaactggaaactgttgcaactttgttaggagaaaaatgtctaggcatatttgggaaaaccttaaaaagagcaactcccgaagacaaatataatttctattgataaagagaaaagg

SEQ ID NO: 33871 - DNA, 2469 bp, Homo sapiens
ttttaaaaatagatgatgctaaagatcatatagctatatgatcatatatatatcatatggctttatatttatattatatgatatttgcttcatacttatatttattatattatatataaatatatatatctatcatatggctttagatttcattggaatattaaaaacagtgatagaacagtgtcctaaaattattttatttcattttttacaatacacaggaaatcttactcttaaaaaaaaatggaaaaaactggtctttgagatacgtaaaagagaacatgtgagcaaatatgaggaccactggacagaatgcacaaattctcatcttgttaagatgttaacatcttaccttaggaggatgctaaagtataaagtaatgtgtagactctatattttattaaatcaatctctcttaggtgataaacattacctaagcaatagagtatgaatttatgttagttttttctaaatgtttgctttatattttatgtcaaaacaaataacttgcatgaaagttgaacaccaaatgtctccttaagaactcagtgaaagagcaactcttttaatgtttcaaaaaagcaattttaaaaaagtgcaagaaacaaaacctgtgaactttgaatgtactgataagttattgagaaaaaaatttgcttttataatgtcattactatttagtttggaaatgactcccagtgataacagaaaatgctttgtataaacagagtacacattcctcagattaaacagcttctgagacttatgatgctgacagtaataaaagcttgtaataatatatctgttataattctgaacatccagtactgtaataagctgactcttttgttgcaggtttctactcaaccatgagaaaactatcatgagtgaagcgaggagggcttgtctccatctagtggtcagtataataatattaaatattactattattctaaaatcaaaatatgtacatgttattttcttaattgtagtgagaaatgatactaatcataatagtactgttattttctaatcacgtatatcaaacttgacaagtaaataatccgatagaagatacataatcttgaagtagacatattgaaatacatagtttgagtacactgtcaaaagtctgtgaagctatttccctgctgcaaaaaagaaaaaagatgagaacacaggagagtaaggatggcctcaaaattttatattctgacatatttaaactttttacaaaatcacccaagagaaaaacgtttggcctatcaggggagaagatcttctataaactacggacttaatgtgtaagcaactcagaacaggggtccacccagaacaggaagaaawaaaagtctttgttttcaattaggccatttatggcacaatcaaaactgtgcatagtttttcaatggaactcgtggagctagagagtagaaggacggttaccagaggaagggtagtcaggagctgagaaggaagtttgaaaggctaatgggtacaaaaaatagaaagaatgaataagacctagtatttgctagcacgactggatgaatatagtaaaaactaatttaattgtacattttaaaataactaaaagagtataattggattgtttgtacatagaggaaaaatgcttgaggtgatggatactccatttaccatgatgtgattatgatgcattgcatgcctgtatcaaaatatctcatgtaaatcataaatagatacaaccactatgtacccgcaaaaattaaaaattaacattttacaaaactgtatatagttttgttttacagcctagaagttgtttgtttcaagggcctaaaatgtgtggcaaaaggggtttttttatacctacttaaaaatttcaaaatattgaaaatcaaggcaacaccacccctttactttcgttagcaataaaaataggttgatctcatgttaatttttccagattaggtttttttttaatatcatggtatatgaaaagtcatcctattagcctccacagatctttggccagttttcccttggcatcaatcaccaggaggaaaatacaggagattagtcaacagaataaattaatgagattagaggtttgcctcaaattcagaaaaggactttatattatgcaaaaaggtaacatggtgtggagtgatgatagaggccagttaacattagctcattacattagtaatggtgtcatatacagactgtatgaggcttttcatgtcataagagtgtttattttataagttaaacttggcttaaataattaaaagatttctcacaactaggacaagtttccaatgccaacagatcatggccaatgacttctatgatttcttcctccctctgggaaactggaaactgttgcaactttgttaggagaaaaatgtctaggcatatttgggaaaaccttaaaaagagcaactcccgaagacaaatataatttctattgataaagagaaaagg

SEQ ID NO: 33872 - DNA, 2469 bp, Homo sapiens
ttttaaaaatagatgatgctaaagatcatatagctatatgatcatatatatatcatatggctttatatttatattatatgatatttgcttcatacttatatttattatattatatataaatatatatatctatcatatggctttagatttcattggaatattaaaaacagtgatagaacagtgtcctaaaattattttatttcattttttacaatacacaggaaatcttactcttaaaaaaaaatggaaaaaactggtctttgagatacgtaaaagagaacatgtgagcaaatatgaggaccactggacagaatgcacaaattctcatcttgttaagatgttaacatcttaccttaggaggatgctaaagtataaagtaatgtgtagactctatattttattaaatcaatctctcttaggtgataaacattacctaagcaatagagtatgaatttatgttagttttttctaaatgtttgctttatattttatgtcaaaacaaataacttgcatgaaagttgaacaccaaatgtctccttaagaactcagtgaaagagcaactcttttaatgtttcaaaaaagcaattttaaaaaagtgcaagaaacaaaacctgtgaactttgaatgtactgataagttattgagaaaaaaatttgcttttataatgtcattactatttagtttggaaatgactcccagtgataacagaaaatgctttgtataaacagagtacacattcctcagattaaacagcttctgagacttatgatgctgacagtaataaaagcttgtaataatatatctgttataattctgaacatccagtactgtaataagctgactcttttgttgcaggtttctactcaaccatgagaaaactatcatgagtgaagcgaggagggcttgtctccatctagtggtcagtataataatattaaatattactattattctaaaatcaaaatatgtacatgttattttcttaattgtagtgagaaatgatactaatcataatagtactgttattttctaatcacgtatatcaaacttgacaagtaaataatccgatagaagatacataatcttgaagtagacatattgaaatacatagtttgagtacactgtcaaaagtctgtgaagctatttccctgctgcaaaaaagaaaaaagatgagaacacaggagagtaaggatggcctcaaaattttatattctgacatatttaaactttttacaaaatcacccaagagaaaaacgtttggcctatcaggggagaagatcttctataaactacggacttaatgtgtaagcaactcagaacaggggtccacccagaacaggaagaaataaaagtctttgttttcaattaggccatttatggcacaatcaaaactgtgcatagtttttcaatggaactcgtggagctagagagtagaaggayggttaccagaggaagggtagtcaggagctgagaaggaagtttgaaaggctaatgggtacaaaaaatagaaagaatgaataagacctagtatttgctagcacgactggatgaatatagtaaaaactaatttaattgtacattttaaaataactaaaagagtataattggattgtttgtacatagaggaaaaatgcttgaggtgatggatactccatttaccatgatgtgattatgatgcattgcatgcctgtatcaaaatatctcatgtaaatcataaatagatacaaccactatgtacccgcaaaaattaaaaattaacattttacaaaactgtatatagttttgttttacagcctagaagttgtttgtttcaagggcctaaaatgtgtggcaaaaggggtttttttatacctacttaaaaatttcaaaatattgaaaatcaaggcaacaccacccctttactttcgttagcaataaaaataggttgatctcatgttaatttttccagattaggtttttttttaatatcatggtatatgaaaagtcatcctattagcctccacagatctttggccagttttcccttggcatcaatcaccaggaggaaaatacaggagattagtcaacagaataaattaatgagattagaggtttgcctcaaattcagaaaaggactttatattatgcaaaaaggtaacatggtgtggagtgatgatagaggccagttaacattagctcattacattagtaatggtgtcatatacagactgtatgaggcttttcatgtcataagagtgtttattttataagttaaacttggcttaaataattaaaagatttctcacaactaggacaagtttccaatgccaacagatcatggccaatgacttctatgatttcttcctccctctgggaaactggaaactgttgcaactttgttaggagaaaaatgtctaggcatatttgggaaaaccttaaaaagagcaactcccgaagacaaatataatttctattgataaagagaaaagg

SEQ ID NO: 33873 - DNA, 676 bp, Homo sapiens
catagtagargttatttgttccttgaaagctttataaagctcacttattaaattttctagccttaatgttggagaaaggggtcgggacactctagaatactgaaataatagctttaattgtgccaaggtttaatagttattattttttaagttttctattccttcccaacataatttttggtaattcttctataaattatgcattgtatctaaatattaaaatgtattggatgaaagttattaataatattcataaatgatttcaaaagttgccattggatctataatcatgtcctattatcatttcatttgttatttatttatatcttttttccactttatcagtcttgtaaaaagaaccagattttagttcctgatactattgttcctttgttttcattttatgaatttttgcttttacatatgtaacatcctttcttctttctttcagcttattccactctttttctattttcttgaattaaatctatattcatttaatttccaagcacttttattttccaataaattcatttatctttccctttacatattacttattaaacagttttattttcagtctcattttagagagggaggatcttgttttctttctccctttaccactgtgtcaccatgtcttcttatgtgatagtttgccacttcctccactaaa

SEQ ID NO: 33874 - DNA, 1016 bp, Homo sapiens
ggatcccatcggttaatgagacgagcttcaactaactggcrgaggctcggagggtggggcacccacgttacattttctccttgcccacaactctttgaattttagtctggttgtcaattgttctagcatctcttccccctagtgtgctgtttctcccctcataaaaacagctacagagctgaggtctgaaatatctggagtatataaagatggtgaggattggaggggttcatggtgctctctcagcccttgcttatgaacccagcctctctcttctcaacccccacctctgtccccagaagttctcagtagcttcaataacaaaggcagattttccacctgttaacctggaagaatctgcaaagaagcatgagtgtaaacggacttagaagaagtggaattcaagagtaatgtttctgtcacgatgcctccctcacaccccatgtcactgaccataggcacccagagtgctgcagggttcaggacagaagctcaaatctcagaagccaactagacatctgtggatttgaaggcagggataatgaggacaccactcggtcagttcttcctacaaacagtagttggtggaaacctaccttttatagggatgtcttcccacctatttatctagatgagaaagcttttagaataaaagtaagattttcttttataaaacaaattttaaaaactctttgttcacaactttcttcttctcatagttaaatcatggccattggaagcactacggtgtttcttacttctctgatttgcactttattaatagggaaagagattgccttggtctgggttccctcagaaactgaccctgagatgagggtttgggaggaaaaagtacatttgggaggagtgtggcaggcagagtggggaaggcagcctgtacagggcacatgcttgtgtcaccaagttgggggtgactagtgcttgttcctcagggagaccttgggaaatggtataaaatacgtaaccacggaattatcccctagaggaggattgag

SEQ ID NO: 33875 - DNA, 1016 bp, Homo sapiens
ggatcccatcggttaatgagacgagcttcaactaactggcggaggctcggagggtggggcacccacgttacattttctccttgcccacaactctttgaattttagtctggttgtcaattgttctagcatctcttccccctagtgtgctgtttctcccctcataaaaacagctacagagctgaggtctgaaatatctggagtatataaagatggtgagsattggaggggttcatggtgctctctcagcccttgcttatgaacccagcctctctcttctcaacccccacctctgtccccagaagttctcagtagcttcaataacaaaggcagattttccacctgttaacctggaagaatctgcaaagaagcatgagtgtaaacggacttagaagaagtggaattcaagagtaatgtttctgtcacgatgcctccctcacaccccatgtcactgaccataggcacccagagtgctgcagggttcaggacagaagctcaaatctcagaagccaactagacatctgtggatttgaaggcagggataatgaggacaccactcggtcagttcttcctacaaacagtagttggtggaaacctaccttttatagggatgtcttcccacctatttatctagatgagaaagcttttagaataaaagtaagattttcttttataaaacaaattttaaaaactctttgttcacaactttcttcttctcatagttaaatcatggccattggaagcactacggtgtttcttacttctctgatttgcactttattaatagggaaagagattgccttggtctgggttccctcagaaactgaccctgagatgagggtttgggaggaaaaagtacatttgggaggagtgtggcaggcagagtggggaaggcagcctgtacagggcacatgcttgtgtcaccaagttgggggtgactagtgcttgttcctcagggagaccttgggaaatggtataaaatacgtaaccacggaattatcccctagaggaggattgag

SEQ ID NO: 33876 - DNA, 1016 bp, Homo sapiens
ggatcccatcggttaatgagacgagcttcaactaactggcggaggctcggagggtggggcacccacgttacattttctccttgcccacaactctttgaattttagtctggttgtcaattgttctagcatctcttccccctagtgtgctgtttctcccctcataaaaacagctacagagctgaggtctgaaatatctggagtatataaagatggtgaggattggaggggttcatggtgctctctcagcccttgcttatgaacccagcctctctcttctcaacccccacctctgtccccagaagttctcagtagcttcaataacaaaggcagattttccacctgttaacctggaagaatctgcaaagaagcatgagygtaaacggacttagaagaagtggaattcaagagtaatgtttctgtcacgatgcctccctcacaccccatgtcactgaccataggcacccagagtgctgcagggttcaggacagaagctcaaatctcagaagccaactagacatctgtggatttgaaggcagggataatgaggacaccactcggtcagttcttcctacaaacagtagttggtggaaacctaccttttatagggatgtcttcccacctatttatctagatgagaaagcttttagaataaaagtaagattttcttttataaaacaaattttaaaaactctttgttcacaactttcttcttctcatagttaaatcatggccattggaagcactacggtgtttcttacttctctgatttgcactttattaatagggaaagagattgccttggtctgggttccctcagaaactgaccctgagatgagggtttgggaggaaaaagtacatttgggaggagtgtggcaggcagagtggggaaggcagcctgtacagggcacatgcttgtgtcaccaagttgggggtgactagtgcttgttcctcagggagaccttgggaaatggtataaaatacgtaaccacggaattatcccctagaggaggattgag

SEQ ID NO: 33877 - DNA, 1016 bp, Homo sapiens
ggatcccatcggttaatgagacgagcttcaactaactggcggaggctcggagggtggggcacccacgttacattttctccttgcccacaactctttgaattttagtctggttgtcaattgttctagcatctcttccccctagtgtgctgtttctcccctcataaaaacagctacagagctgaggtctgaaatatctggagtatataaagatggtgaggattggaggggttcatggtgctctctcagcccttgcttatgaacccagcctctctcttctcaacccccacctctgtccccagaagttctcagtagcttcaataacaaaggcagattttccacctgttaacctggaagaatctgcaaagaagcatgagtgtaaacggacttagaagaagtggaattcaagagtaatgyttctgtcacgatgcctccctcacaccccatgtcactgaccataggcacccagagtgctgcagggttcaggacagaagctcaaatctcagaagccaactagacatctgtggatttgaaggcagggataatgaggacaccactcggtcagttcttcctacaaacagtagttggtggaaacctaccttttatagggatgtcttcccacctatttatctagatgagaaagcttttagaataaaagtaagattttcttttataaaacaaattttaaaaactctttgttcacaactttcttcttctcatagttaaatcatggccattggaagcactacggtgtttcttacttctctgatttgcactttattaatagggaaagagattgccttggtctgggttccctcagaaactgaccctgagatgagggtttgggaggaaaaagtacatttgggaggagtgtggcaggcagagtggggaaggcagcctgtacagggcacatgcttgtgtcaccaagttgggggtgactagtgcttgttcctcagggagaccttgggaaatggtataaaatacgtaaccacggaattatcccctagaggaggattgag

SEQ ID NO: 33878 - DNA, 1016 bp, Homo sapiens
ggatcccatcggttaatgagacgagcttcaactaactggcggaggctcggagggtggggcacccacgttacattttctccttgcccacaactctttgaattttagtctggttgtcaattgttctagcatctcttccccctagtgtgctgtttctcccctcataaaaacagctacagagctgaggtctgaaatatctggagtatataaagatggtgaggattggaggggttcatggtgctctctcagcccttgcttatgaacccagcctctctcttctcaacccccacctctgtccccagaagttctcagtagcttcaataacaaaggcagattttccacctgttaacctggaagaatctgcaaagaagcatgagtgtaaacggacttagaagaagtggaattcaagagtaatgtttctgtcacgatgcctccctcacaccccatgtcactgaccataggcacccagagtgctgcagggttcaggacagaagctcaaatctcagaagccaactagacatctgtggatttgaaggcagggataatgaggacaccactcggtcagttcttcctacaaacagtagttggtggaaacctaccttttatagggatgtcttcccacctatttatctagatgagaaagcttttagaataaaagtaagattttcttttataaaacaaattttaaaaactctttgttcacaactttcttcttctcatagttaaatcatggccattggaagcactacggtgtttcttacttctctgatttgcactttattaatagggaaagagattgccttggtctgggttccctcagaaactgaccctgagatgagggtttgggaggaaaaagtacatttgggaggagtgtggcaggcagagtggggaaggcagcctgtacagggcacatgcttgtgtcaccaagttgggggtgactagtgcttgttcctcagggagaccttgggaaatggtataaaatacrtaaccacggaattatcccctagaggaggattgag

SEQ ID NO: 33879 - DNA, 768 bp, Homo sapiens
tgttgatctgtgaccttacccccaaccccgtgctctctgaaacatgtgctgtgtccactcagggttaaatggattaagggtggtgcaagatgtgctttgttaaacagatgcttgaaggcagcatgctcgttaagagtcataaccactccctaatctcaaatacccagggacacaaacactgcggaaggccgcagggtcctctgcctaggaaaaccagagacctttgttcacttgtttatctgctgaccttccctccactattgtcctgtgaccctgccaaatccccctctgcgagaaacacccaagaatgatcaattaaaaaaaaaaaaatcaaacttttcattccctctttacagtgttgatgatctctatctgaaagtcttgagtgaatgcctttctggttaatcagtcaccattggctgwgggcaggggctcacacctgtaatcccatcactttgggagaccgaggtaggagtttgagaccagcctgggcaacattgcaagaccctgtctctattttattttatttatttattttttttgagatggagttttgctctggttgcccaggctggagtggaatggtgtgattttggctcaccacaacctccgcctcccaggtttaagtgattctcctgcctcagcctcctgagtagctgggattacaggcatgtgccatcatgcctggctaattttgtatttttagtagagatggggtttctccatgttggtcaggctggtctcgaactcccgacctcaggtgatcca

SEQ ID NO: 33880 - DNA, 599 bp, Homo sapiens
attttaatttttttaaatgagctaaaaatttttttaaagagtcaaaaaattacaggaatagcctgatagttgcaagggagcaggatggcactgacaaggtatttcctcttcacccttcctatcctcaagccccatcacacacacatgcatgcacacaccccatttcatgaggtgttgaaggaactagtgacactcagaaaaactgttactcaatgttcttaaagaagcccatgtcttgcagaataagattccaattatgcaacttagaatcactgactatttttaattgaattgaccaatttccatagtcaattacacaaactagtcgttttgatattacaacttcactgtgaaggtctcgtgactatttcactcttgacccaggtagttgcccagagagctccctacagatctccctgtctaagcctcatccagaaggaaagcttaccagggtaaggcttgagaccatgattctactcaaaaggtaaattggttagcatcatcttttgagckcaagaaaccccaagataacactgacaaccacgatgaatttcttctaagccaaggtgcaaagtgagatggcacaatgtgaagcgacc

SEQ ID NO: 33881 - DNA, 574 bp, Homo sapiens
agaaaaactaaaatagacttttgaatcaagacacttgagcttaaaaaatgtcatttctaactaaaaaaagtgacctccattgcatgaaggtttctgatttattgtattcataaaatagtgtagtaagtatatgaatataacttattttaaatgtgatgctgaggagtggggatggggaagcattttttattggaagtgagataagataggtgattaaatgttccaaagataattaaaatttttttwcctctgatgtctgttttctttcatttacttgtgtcagcatagtttcccgatgctacacattatctttcttcatttttaaagagttttttctggcatttttacaaggcgttactagttgttgccttgttaacctctcattctcaccgtgattctgacattgagatgttcaaccagttgaggaatctttcccagagcttataaattagtgtgttgccaagaataatgtatgcgtacattaaaatcatttatcctccctttattaaggttactgtttaaaaaggtcaaggccctgctgggagggaatgtccgcatgatgctgtctggaggg

SEQ ID NO: 33882 - DNA, 2221 bp, Homo sapiens
gaaaatgataaatccaaattaatatcaacttataaaaccataaaaataatatcttgtgagattccaagtatatgtcaaattaacagtgcatgatgacagaaacaaaagtcaaaatgaggggaaatggagataaagtgttctaagacacagtttccctcctgtgatctaagatggcttctccagctcttaccgtcatatccatatatctcttcctcttaaagctgcttttcagaagtttgaatacatcacctctgccttcattccagtaacatgaccttaacctaggtgcaagggaggttgggaaatgtagtcttcatctgagaagacaagtaaaacttaaggtttctatatttaaagaaagaagtgaagagtggatatattcagaaggtggggtgggagtgagggtggtaactatcagtttctgccacattgccccagttcctgtgtacaattgatttgtacaggtgtaaaaattctaggtgtgggcagactgcatgatgccgacagaccaactagtcaatggacattttagccttttgaggattcaaatatggcctttatactacacacagatactatcttgaaaggctttgctaaaagtttcagccatgaaatctttaatcctaaactgaccactatttcaccaaatgaggatagagaattagtgcaaagctcagtggataatatttgagttgtattcagtagtgggaaggaaagaagtagccttgttggtggtaaagaatatgtgaacttactctactggcataagaaagttctcatgggaatggcaaaaactatcactaatgaacagtccatttgtaggatactatggtgtcccttagatatagtatagcagcagatattatagcctaagaaataaagttccagagtgctaagggcagtgctttggggaatagagcaaatgctagaactagttaactggttgctgtttggctctaaataatcaaggatattcaagaaaaaaattttcaaatggactggatgcattcactggaaaatattttccatgaagaagactttttggaagagatcccaaggatcctatgtaatacactggtggaattctgtcacctcacactggcaagaggatgccactagctttactcattatttcttgacattcagagggaagcctaaactgccttgtgttggaagcagctcaatgtgggatgacagcctcagctgcagttggctaaattgaaaggcgaattctaagttgaagatttccctggcagcctgacataataatgggagtcaggaaaagcactctgacccattttttccctgaaacataggggcataaggttgactacttgcttaaataaacagagaagggaaataggggaaatgaggaaaaaataaaactataacttcctatctcaaaactgttatcttttcacagaagttgaagagggagtaaaaatgggactatttcaagcacaggatataattgcatgatgaaatgaggggaaaggggttaaaaaggaagacaagagggaggtaaaaagggggacttctaggagtgcatgtgctatggacatggtgctggctaaaagactccttaatggaaacagccaagcaaaatttcccatcatcctctaaatatgagagtattcaaggctctgwgtaagagcaaaattttcaaagttgtgaactgagcctacataatctggaaggagtctgatgtgcatgcaactgctgggttacactaataaacaaatatgtaattatgaattgtgatacttcttctgaagaaagaaacagggtgctgtaaccatgaatacttgataggttactttagccagagtggtcagagaaggtttctctgaggacatagaaattttagctaagctctcaaagtcgagaagtcagccattcaaggagctggtcaaaacgtttaggcagaggttggagcaaatgcaaagaccctgaggagcaactgggctcagtatattaaaaaaagagcagtaagcccagtgtggctaaagcagagtaagagagaaagattatgatgcagagacaagcaggggccacattacgcagggccttgtaggccatggtaagtgtgatggttaattttatgtgtcaacttgactgggttaagaaatatccagatagctgataaaacattggttctgggagtgtctttgagggtgtttctggaagagattagcatttgaatcagtaaactgactaaagt

SEQ ID NO: 33883 - DNA, 2221 bp, Homo sapiens
gaaaatgataaatccaaattaatatcaacttataaaaccataaaaataatatcttgtgagattccaagtatatgtcaaattaacagtgcatgatgacagaaacaaaagtcaaaatgaggggaaatggagataaagtgttctaagacacagtttccctcctgtgatctaagatggcttctccagctcttaccgtcatatccatatatctcttcctcttaaagctgcttttcagaagtttgaatacatcacctctgccttcattccagtaacatgaccttaacctaggtgcaagggaggttgggaaatgtagtcttcatctgagaagacaagtaaaacttaaggtttctatatttaaagaaagaagtgaagagtggatatattcagaaggtggggtgggagtgagggtggtaactatcagtttctgccacattgccccagttcctgtgtacaattgatttgtacaggtgtaaaaattctaggtgtgggcagactgcatgatgccgacagaccaactagtcaatggacattttagccttttgaggattcaaatatggcctttatactacacacagatactatcttgaaaggctttgctaaaagtttcagccatgaaatctttaatcctaaactgaccactatttcaccaaatgaggatagagaattagtgcaaagctcagtggataatatttgagttgtattcagtagtgggaaggaaagaagtagccttgttggtggtaaagaatatgtgaacttactctactggcataagaaagttctcatgggaatggcaaaaactatcactaatgaacagtccatttgtaggatactatggtgtcccttagatatagtatagcagcagatattatagcctaagaaataaagttccagagtgctaagggcagtgctttggggaatagagcaaatgctagaactagttaactggttgctgtttggctctaaataatcaaggatattcaagaaaaaaattttcaaatggactggatgcattcactggaaaatattttccatgaagaagactttttggaagagatcccaaggatcctatgtaatacactggtggaattctgtcacctcacactggcaagaggatgccactagctttactcattatttcttgacattcagagggaagcctaaactgccttgtgttggaagcagctcaatgtgggatgacagcctcagctgcagttggctaaattgaaaggcgaattctaagttgaagatttccctggcagcctgacataataatgggagtcaggaaaagcactctgacccattttttccctgaaacataggggcataaggttgactacttgcttaaataaacagagaagggaaataggggaaatgaggaaaaaataaaactataacttcctatctcaaaactgttatcttttcacagaagttgaagagggagtaaaaatgggactatttcaagcacaggatataattgcatgatgaaatgaggggaaaggggttaaaaaggaagacaagagggaggtaaaaagggggacttctaggagtgcatgtgctatggacatggtgctggctaaaagactccttaatggaaacagccaagcaaaatttcccatcatcctctaaatatgagagtattcaaggctctgastaagagcaaaattttcaaagttgtgaactgagcctacataatctggaaggagtctgatgtgcatgcaactgctgggttacactaataaacaaatatgtaattatgaattgtgatacttcttctgaagaaagaaacagggtgctgtaaccatgaatacttgataggttactttagccagagtggtcagagaaggtttctctgaggacatagaaattttagctaagctctcaaagtcgagaagtcagccattcaaggagctggtcaaaacgtttaggcagaggttggagcaaatgcaaagaccctgaggagcaactgggctcagtatattaaaaaaagagcagtaagcccagtgtggctaaagcagagtaagagagaaagattatgatgcagagacaagcaggggccacattacgcagggccttgtaggccatggtaagtgtgatggttaattttatgtgtcaacttgactgggttaagaaatatccagatagctgataaaacattggttctgggagtgtctttgagggtgtttctggaagagattagcatttgaatcagtaaactgactaaagt

SEQ ID NO: 33884 - DNA, 546 bp, Homo sapiens
caaagaaaaaaagaagaggaccagcatatccagttttgttttacgtgatctgaaattttatctgatctctcagtagattgttaccaaaatcctgatattagaaagaagtctctatccattcacatataacatgatagtctatgtagaaatttgcaagaaatctacaaaaaagcaccagaattaatacatgagtttatcaaggtcacgggatacaagatcagcatttaaaaatcaatcatatgtctatacattagcaatcaactactggaaatcaaaattttaaaaaataatacggtttaaaaattacatagtctggacatggtagctcacacctgtaatcctagtactttcagaggcaaaggcaggaagatctcttgagcccaggagtttgagacctgactgggcaacatagggagaccctgtctctataagaaatttaaacrttagccaggtatggtggcatgcacctatagttccagctactcaggaggcagagcccaggaggctgaggctgcagtgagccgtaatggtgcctctgcacttcag

SEQ ID NO: 33885 - DNA, 967 bp, Homo sapiens
agtatgttttgttcactggcctgcacaaatgacttggggaagccacctttccttatatcccaccctctacccgcagttattcctgtgctagcaaatgtctcatctgtgtccagcttcgattgggtaacttttgtttgtttgttggtttgttttaagagatggggtcccagtatgttggccaggctggacgcaaactcctgggctcaagggatgctcctgccttgggtgtccagagcagctgggactacaggtgtgcaccatgtctgactgcttctactgggagcatattttcagaacaaaaaatcaggacacattgggtgatacaggctaaaatgggataaaatattttaaacggagatcatatccatatctccccaaaactccaggtgatttatgtccttccgtaagtatccctggataactgtcttcttcccacccataggtacaccgactctgcgcccctaagtcaagggtctggcttccctctcctctacagggcaaaccagttctgcccacagaccctcttctttcagcttttgacagagcctccgccacccyagcttagcctcagacactgggggcaaatgccagggcccacgcagggggagtgcctcaccaacacataagtgtacacattcagccttccagaccccgagtgtgcgttctctgtgcagacgcctcctaacatgaacagccagtgggaggtcagtctttgaactcaaataacgaaggcatgccagggtctgggcagctgaaggcctattcccaagaagcggggacagggaaggaagtgtgtgatgactccccagcacagcccaagcacggccaaccctagatgacaggggcaacacagcagggcctttgtccgcttctctatcccaagtgcccggaagactcagcgactgcccgtagcggacgcttactcactctttgagaatatgtgaataaacaaactctgcacaagccc

SEQ ID NO: 33886 - DNA, 600 bp, Homo sapiens
tgcatgtgaagaggatcaggaaaaataactaatgggtatagacttaatacctaggtggtaaaataatctgtacaacaaatccttatgacacaagtttacctatataacaaacctgcacatgtactcttgaacttaaaattaaaayttaaaaaatctttaattgatcatacctatctgctacaacaatatgtaaataaattgacttttaaattttgtttgtaatacctaggactatgtggttcaagtattaaaaagaatttcctctatatgaatacaccattattattactaagacatgaattaaagcaagatatatacattataaattttgataaatatttattaagcagaaagaaatcaattgtattggaaattcctctattaatggggatgattatgacaaattacatgaaagaaagagtgttcagtatcgattctatttcttttttgtgtttatacacattaaatgcccagaaaatgtgttcacaaaatagctacatagaaatggaagcttcttttttaaacattgttattcaaatcattattgcaactgactatggaacaaaaacatcaaaaatattttttaatgttttgaattat

SEQ ID NO: 33887 - DNA, 600 bp, Homo sapiens
tgcatgtgaagaggatcaggaaaaataactaatgggtatagacttaatacctaggtggtaaaataatctgtacaacaaatccttatgacacaagtttacctatataacaaacctgcacatgtactcttgaacttaaaattaaaatttaaaaaatctttaattgatcatacctatctgctacaacaatatgtaaataaattgacttttaaattttgtttgtaatacctaggactatrtggttcaagtattaaaaagaatttcctctatatgaatacaccattattattactaagacatgaattaaagcaagatatatacattataaattttgataaatatttattaagcagaaagaaatcaattgtattggaaattcctctattaatggggatgattatgacaaattacatgaaagaaagagtgttcagtatcgattctatttcttttttgtgtttatacacattaaatgcccagaaaatgtgttcacaaaatagctacatagaaatggaagcttcttttttaaacattgttattcaaatcattattgcaactgactatggaacaaaaacatcaaaaatattttttaatgttttgaattat

SEQ ID NO: 33888 - DNA, 608 bp, Homo sapiens
actctggaaactgatgattaccaagcccctgaagcataagtccagaagaggaatgaacaagctagcctagagcaaaataggactgccaccgcctccatactagacagcagaatgcaacctatgatcattacttggctctttgcagccccttcgcagtgtaccccagacactgatgtctccttccatctccatgctgttgagtcacttctctcaaaccctgacagtgaacatttggcttgctagtcccagaataagactgcacagctcttcattctctctctttccaaaccaaattactgatctgttcctttgttaaattgctttggtgcctgatgatctatacatttaggtgtaatcttctcccccagcaacttctccakatctttttatttcctaaacagaatgctggtgcaagctgttaataaatattttcacaccattacacatgatatgatcttatgagttgatatggcacctatggtatatcttatagtataacataacacaacataatatatttgagagttagtcataataagtttattatgaatgatttatagccccaagtaaatatgtacatgattaataataattgttattatgaaatg

SEQ ID NO: 33889 - DNA, 608 bp, Homo sapiens
actctggaaactgatgattaccaagcccctgaagcataagtccagaagaggaatgaacaagctagcctagagcaaaataggactgccaccgcctccatactagacagcagaatgcaacctatgatcattacttggctctttgcagccccttcgcagtgtaccccagacactgatgtctccttccatctccatgctgttgagtcacttctctcaaaccctgacagtgaacatttggcttgctagtcccagaataagactgcacagctcttcattctctctctttccaaaccaaattactgatctgttcctttgttaaattgctttggtgcctgatgatctatacatttaggtgtaatcttctcccccagcaacttctccagatctttttatttcctaaacagaatgctggtgcaagctgttaataaatattttcacaccattacacatgatatgatcttatgagttgatatggcacctatggtatatcttatagyataacataacacaacataatatatttgagagttagtcataataagtttattatgaatgatttatagccccaagtaaatatgtacatgattaataataattgttattatgaaatg

SEQ ID NO: 33890 - DNA, 623 bp, Homo sapiens
aggtgcttctggtttcatcaaataagaaggctaatgaacaatgagagaggggaagaaagagagggaatgtgtgtgtgatttagctgaaaaaaaaaacaccaaaaaaacaaaaaaacactactgctttctctttgggagacattggtgctggaacctgtatttagcaatggttctgtttgaaatcctctacccgcagctctgagttccagggattcatttctttccccaaatccagcctactttgcggggtaggatcaggtcagctgagtcatcttaacaaaagtcactgcattttacttttctaagtcaccccycttggccttccagggactttcctttattttgacaccatttcagcaaaaaccattgaacagggataactcttttccgtggagtatttgactgctttcctcaaagtctcctctactcctagggaaggaaggagactgtgaacatgagttggagcaggcagttttatggaataggttgatccgtcaggccttttgtgtgtgtaggctatctgtctcatagcatgggaactgatggactctgctcccaggacatactggtgctgttatctggtgaagtgcagctgatactttagctctgagatgaattttact

SEQ ID NO: 33891 - DNA, 568 bp, Homo sapiens
acacctattttcactttttgggtatacacgtgggtgtggaattgctaggtcttgtggtaattctatgtttaacttactgaggaagtccaaactgttttccacagtggctgcaccattttacactccattagcaatgtatgagggttccagtttctccacatactggccaacacttactttctgttttttttttttttaattaaattttatagccaccctagtgtatcttattgtggttttgatttgcattttgctgatggctaatgacaggcatctttacctgtgatttttgaccattcgtatatcttctttgaagaaatggctgttcaagtgctttgcccactgtttaattgggttgtctttttgttgttgaaagcagtcttttgattatgaaattaatttatgtattcttctctagggrgcttatttggaaatatatacttggtaatataaaaatttatttcggaatataaaataaaggactggacttcattactttttaagtaaacttttattggatgcttccttttaatgtatttttttttgtagaaatgaaattgttttaatt

SEQ ID NO: 33892 - DNA, 1095 bp, Homo sapiens
tggggaaagccacgcagggatacgtgcacaacagcacagtctgtgccctgcccagcatgtggacacagtgactcccctgagctcctagagagcccctcccagtaactggcatcacagtttcctgagctgtctacttgggctgattgtagctcctgagaactggccacacccctggcagcctcgtgagccagtgtaggtcttgaggggcacattgggagccccacgaggttggaggaagtggtacagtctcagccctgcagagccatccctgagcacccaccactcccacggtgagaaaccttgctgggggggcagggggtgcctgtgaagccttgtcccctgacccacaggagcccaggggcaggagggtgagcagcaaactgcagccaccactccagcacccagcgaaccctcttcatgggaccyattcatctctgctcatggggcaccttttgccaaattagacacacttttgcctatttatttcatacactgtcaaaagtgttttccttgtctttaattcggtcacagctctctctgtagaagttgtcaaaatagcagaagtcaaatctggtaatatttatgactaaagatggcgaggagccatgtgagaaccaacctgctgcctaggaaagaccaacgagaagtgctgcgggttccaccccatatcccctgggccactgcttgggacccctgatgggtggataatctcagaacccatcaggcaccaaatctagaagggttccattatggctgccctaactcccaccccacatagaagtcctacttggctcagctctgagcagataaggagaaataaagactgaccattattgaatcttatccctttctacacatttgggctccttccacctctcaaccacctgtgatacaagcaataggattgtccccatcatgcagatgaagaaaccaaggcccagggaggcccagaaggccactcagagtcacacagggcttggctgtgcagccggggtttgccgcaggcccctgactccagagctggcgccttcggaaccacatgatggtgtctgcagcatattcaggaggagaagagcggatctgcacagagcagta

SEQ ID NO: 33893 - DNA, 977 bp, Homo sapiens
tgcatggatatgtgaacaaaatgatgtgcttgagagggaatggtgtctataaaacygccggtattatcagattcattttgtgtggttatgtttcctgaggagaaagagacgtattactgtttacttttggtttttatgtttatctgttataatagcatatggtatatctggtatatctaactgctcaagtcttaaatgtcttaaaaatattgattaatagatcctttaaataatatgattctaagactcatctgttctgatcatcataatactacaggggaaccacaagtcatcaaatggcatgaaactcaaaactacagaatgtaatctgggagacttataggcccaattttaataaaccacataatgtttttaaaatgtataatttcattgttaacatttgagaaattcagtatattgcacataaatatctggattcccagcctttcttgaatagcctgaacgtctgctgacgcgagacacctatgcctgcatggcatcagttagctggagctgaatgtgggtgtgttgaccgcagtcgccatcacacccttttgtctttccctcaccgcactcctatgtatattttgccaatatggcactgtcagtgtttggtgtggtatccctgctgtaaatcaagctaatccataggcatcacttcatgtgctgctctttatttatttactgaaatggagttgaaaatatttgttgaggttaaggaaaaactatgttctttgttgcactttaaacattctaaatattttggattagagaaaagaaaagggagcttatactaagtttttattttcctgaaaataatccataacttaatgttctatgtactgaaggagtttgggtgttcacaaatacacatatttatcaaaattcaatgaatgaatacttaacatttgtgcatttcattgtatgtaaatgtaatataaagtggaagcaaatgttgaactataattaatcatatg

SEQ ID NO: 33894 - DNA, 977 bp, Homo sapiens
tgcatggatatgtgaacaaaatgatgtgcttgagagggaatggtgtctataaaaccgccggtattatcagattcattttgtgtggttatgtttcctgaggagaaagagacgtattactgtttacttttggtttttatgtttatctgttataatagcatatggtatatctggtatatctaactgctcaagtcttaaatgtcttaaaaatattgattaatagatcctttaaataatatgattctaagactcatctgttctgatcatcataatactacaggggaaccacaagtcatcaaatggcatgaaactcaaaactacagaatgtaatctgggagacttataggcccaattttaataaaccacataatgtttttaaaatgtataatttcattgttaacatttgagaaattcagtatattgcacataaatatctggattcccagcctttcttgaatagcctgaacgtctgctgacgcgagacacctatgcctgcatggcatcagttagctggagctgaatgtgggtgtgttgaccgcagtcgccatcacacccttttgtctttccctcaccgcactcctatgtatattttgccaatatggcactgtcagtgtttggtgtgrtatccctgctgtaaatcaagctaatccataggcatcacttcatgtgctgctctttatttatttactgaaatggagttgaaaatatttgttgaggttaaggaaaaactatgttctttgttgcactttaaacattctaaatattttggattagagaaaagaaaagggagcttatactaagtttttattttcctgaaaataatccataacttaatgttctatgtactgaaggagtttgggtgttcacaaatacacatatttatcaaaattcaatgaatgaatacttaacatttgtgcatttcattgtatgtaaatgtaatataaagtggaagcaaatgttgaactataattaatcatatg

SEQ ID NO: 33895 - DNA, 1572 bp, Homo sapiens
tggaactgtcatctcctatgataatagtgtcttcttctggaatacctcctaaaggacctgcctgaggctgttttctagttaacttttttttttttttttttttagtaagtagaagaattatactctgaaacagcaatcaatagtatggtagatacagaaagcagtaacatagtctttcattatcaattattatgtactgtaaataattgtatgtactatacttttgtatgactggcagcacagtaggtttgtttacatcagtatcattcattgtgctatgatgtcatgatggctatggcatttctatgcaatgggaacttttcagctccactataatcttatgggatcacctkgtatatgcagtccatcaatgatcaaaatgttatgtagtgcatgactgcacctactccaaaactacagaagtggaatttagagtcatgggaagctggataatgaccatcaaagttggtcttacatgaggtaggacctggtccaatttgaagtaagaaatcagggaactttccttcaacacttatttccttccatggtctaagacatttcaaaattctgagcatggttttccatttatcacagagtttaagttactattcagtgttgaaattcctggccctcaatggcattatgaatcagctgttcatagaactcaactttcttgaatgggccatttcccaggtcttctacagctgttttgctcatttttaatcccttcatttgccagcttaatatttgctagctgctgttattggggaattcagtttttcccccatgtccctatcttttgccagtttttctcttcattcctcaaaatcagtagttctcctttctcaaaggttgcctatgaatcatccatgatttgtatatcaccctttgggaaacacgaatattttcagaaccctcatttctctgtcgttaaatgaggtcaataatgactgctgacgtttcctttgactctgaagggcgtggtcaggctagatgagaaaattcttacagaatgtggtgtgctgtgctgctgtcgccactttgctgggagactgaagctcagacagctaagcgatttgccagggctgtgcaacccatctgtggtgggaattccagaattccaacctggagaatctgacttactcttttggagaacattatatttgataaactggaatcattgttttgagtgctcccatggctctgtaggccaaaacagtagaacttatgacagtagtttggtcttcaggaactccacttaaccccaaactaccctccagttttcagagagcactggggaaaagggagggatgagtgtgtattgaattatctgaattctgccacttatgcctaagagatatgtatgagagaatctttacattttgtacacattattctaaaattccttttagtccttaaacaactctcagggggaaaatagtacagaattaaaataaaagttcttaacatttgtccctgaatatatttttagaaaaagtatacttgaaatctgatcacctataaggaaagatttatcaggagagtttaaatttttatatttactcatattaa

SEQ ID NO: 33896 - DNA, 1572 bp, Homo sapiens
tggaactgtcatctcctatgataatagtgtcttcttctggaatacctcctaaaggacctgcctgaggctgttttctagttaacttttttttttttttttttttagtaagtagaagaattatactctgaaacagcaatcaatagtatggtagatacagaaagcagtaacatagtctttcattatcaattattatgtactgtaaataattgtatgtactatacttttgtatgactggcagcacagtaggtttgtttacatcagtatcattcattgtgctatgatgtcatgatggctatggcatttctatgcaatgggaacttttcagctccactataatcttatgggatcaccttgtatatgcagtccatcaatgatcaaaatgttatgtagtgcatgactgcacctactccaaaactacagaagtggaatttagagtcatgggaagctggataatgaccatcaaagttggtcttacatgaggtaggacctggtccaatttgaagtaagaaatcagggaactttccttcaacacttatttccttccatggtctaagacatttcaaaattctgagcatggttttccatttatcacagagtttaagttactattcagtgttgaaattcctggccctcaatggcattatgaatcagctgttcatagaactcaactttcttgaatgggccatttcccaggtcttctacagctgttttgctcatttttaatcccttcatttgccagcttaatatttgctagctgctgttattggggaattcagtttttcccccatgtccctatcttttgccagtttttctcttcattcctcaaaatcagtagttctcctttctcaaaggttgcctatgaatcatccatgatttgtatatcaccctttgggaaacacgaatattttcagaaccctcatttctctgtcgttaaatgaggtcaataatgactgctgacgtttcctttgactctgaagggcgtggtcaggctagatgagaaaattcttacagaatgtggtgtgctgtgctgctgtcgccactttgctgggagactgaagctcagacagctaagcgatttgccagggctgtgcaacccatctgtggtgrgaattccagaattccaacctggagaatctgacttactcttttggagaacattatatttgataaactggaatcattgttttgagtgctcccatggctctgtaggccaaaacagtagaacttatgacagtagtttggtcttcaggaactccacttaaccccaaactaccctccagttttcagagagcactggggaaaagggagggatgagtgtgtattgaattatctgaattctgccacttatgcctaagagatatgtatgagagaatctttacattttgtacacattattctaaaattccttttagtccttaaacaactctcagggggaaaatagtacagaattaaaataaaagttcttaacatttgtccctgaatatatttttagaaaaagtatacttgaaatctgatcacctataaggaaagatttatcaggagagtttaaatttttatatttactcatattaa

SEQ ID NO: 33897 - DNA, 1572 bp, Homo sapiens
tggaactgtcatctcctatgataatagtgtcttcttctggaatacctcctaaaggacctgcctgaggctgttttctagttaacttttttttttttttttttttagtaagtagaagaattatactctgaaacagcaatcaatagtatggtagatacagaaagcagtaacatagtctttcattatcaattattatgtactgtaaataattgtatgtactatacttttgtatgactggcagcacagtaggtttgtttacatcagtatcattcattgtgctatgatgtcatgatggctatggcatttctatgcaatgggaacttttcagctccactataatcttatgggatcaccttgtatatgcagtccatcaatgatcaaaatgttatgtagtgcatgactgcacctactccaaaactacagaagtggaatttagagtcatgggaagctggataatgaccatcaaagttggtcttacatgaggtaggacctggtccaatttgaagtaagaaatcagggaactttccttcaacacttatttccttccatggtctaagacatttcaaaattctgagcatggttttccatttatcacagagtttaagttactattcagtgttgaaattcctggccctcaatggcattatgaatcagctgttcatagaactcaactttcttgaatgggccatttcccaggtcttctacagctgttttgctcatttttaatcccttcatttgccagcttaatatttgctagctgctgttattggggaattcagtttttcccccatgtccctatcttttgccagtttttctcttcattcctcaaaatcagtagttctcctttctcaaaggttgcctatgaatcatccatgatttgtatatcaccctttgggaaacacgaatattttcagaaccctcatttctctgtcgttaaatgaggtcaataatgactgctgacgtttcctttgactctgaagggcgtggtcaggctagatgagaaaattcttacagaatgtggtgtgctgtgctgctgtcgccactttgctgggagactgaagctcagacagctaagcgatttgccagggctgtgcaacccatctgtggtgggaattccagaattccaacctggagaatctgacttactcttttggagaacattatatttgataaactggaatcattgttttgagtgctcccatggctctgtaggccaaaacagtagaacttatgacagtagtttggtcttcaggaactccacttaaccccaaactaccctccagttttcagagagcactggggaaaagggagggatgagtgtgtattgaattatctgaattctgccacttatgcctaagagatatgtatgagagaatctttacattttstacacattattctaaaattccttttagtccttaaacaactctcagggggaaaatagtacagaattaaaataaaagttcttaacatttgtccctgaatatatttttagaaaaagtatacttgaaatctgatcacctataaggaaagatttatcaggagagtttaaatttttatatttactcatattaa

SEQ ID NO: 33898 - DNA, 538 bp, Homo sapiens
atattatgataaggracactttactcacaaatctcgaatgctggaaaagagccctatccccatgttatctgttaccatgttatccccatgctttcgtctgctgcccttattatcctctgtgagttggttgccttaagatcctcctcctgatgtctcccagcagcgtgacctagattcttgatcagtgtccacaccgaacattcactccaaactgtgcagcaaacattttatagactcaagccacataataggtccataacatcagcataatattaaatggaatgggagagatttttgcagagagaaaaatggtgctaatgcagtgtgatacacttggtgtagtggaaaggcaagcactttacagttagggtcccagtgtagggtaattgtgtcttctgttgcccagaaaataaatacagttaaacatattaataaggaccacccagatatttttttcctccagcattgaaaccaattgccatttctttgttgagcatcagatgtttgaaacatatatatgtgaccattataatgacat

SEQ ID NO: 33899 - DNA, 538 bp, Homo sapiens
atattatgataagggacactttactcacaaatctcgaatgctggaaaagagccctatccccatgttatctgttaccatgttatccccatgctttcgtctgctgcccttattatcctctgtgagttggttgccttaagatcctcctcctgatgtctcccagcagcgtgacctasattcttgatcagtgtccacaccgaacattcactccaaactgtgcagcaaacattttatagactcaagccacataataggtccataacatcagcataatattaaatggaatgggagagatttttgcagagagaaaaatggtgctaatgcagtgtgatacacttggtgtagtggaaaggcaagcactttacagttagggtcccagtgtagggtaattgtgtcttctgttgcccagaaaataaatacagttaaacatattaataaggaccacccagatatttttttcctccagcattgaaaccaattgccatttctttgttgagcatcagatgtttgaaacatatatatgtgaccattataatgacat

SEQ ID NO: 33900 - DNA, 538 bp, Homo sapiens
atattatgataagggacactttactcacaaatctcgaatgctggaaaagagccctatccccatgttatctgttaccatgttatccccatgctttcgtctgctgcccttattatcctctgtgagttggttgccttaagatcctcctcctgatgtctcccagcagcgtgacctagattcttgatcagtgtccacaccgaacattcactccaaactgtgcagcaaacattttatagactcaagccacataataggtccataacatcagcataatattaaatgraatgggagagatttttgcagagagaaaaatggtgctaatgcagtgtgatacacttggtgtagtggaaaggcaagcactttacagttagggtcccagtgtagggtaattgtgtcttctgttgcccagaaaataaatacagttaaacatattaataaggaccacccagatatttttttcctccagcattgaaaccaattgccatttctttgttgagcatcagatgtttgaaacatatatatgtgaccattataatgacat

SEQ ID NO: 33901 - DNA, 2306 bp, Homo sapiens
aagagacagagtgaacagacctgaggtgctacatgcatgaatacttgctactggtttccttttatcttcctgaggcagttaccataggcatgatcaatcctcctcagaaccagcctttgcccttgtgttacccggcatgagggtgccctactgttctgctcctccttcccctctctagcaaatgcctccaggaattagggatgcaatttcattttcttagttcactcaccttttaactatgcccattactattccattttattctaaccaatgaattatattctactttcattaagggctttcctatccaggaaactcaagtgggtccaaatttcccacaagcacctcatttacccagcagcgttttgtttagaaattagctcttctatacatagggcatgccgagataactgaagcttatttatttaagttatgcttactttagaaatacaaatattaaaatacaccaattttgtattaagctaaaatatagtaaatgtgggctgtgttttagttagggttgctataataaataccatcgactgggtagcttaaacaacaaacattaatttgtcacgattctggaggctgggtaacccaagatcaaggtgtgggccaattcagtttctggtgagggccctccccctagtttgcagatggccatcttctttttgtattcttgcatggcagagagaaaaagggctattcttcttcttcttataaagacatttcatcatgggggctccaatattatgactaaattacctcccaaaggccccacttccaaataccatcacatatagggcttcaacatttgaaatttggtggggggacacattcagtccacagcattgagtgacaaatctttaaaaattggtgcatctttttagccttcttttatataattcattgagcctaattaaaagtttttaaatttataatttagagttattatacctagcaatccagtgatacctagttgatgagaagttaaactagaaattattgtcagttctgtactagttacttattaaaggcttgttgaataaatcattgaatgatcgaatgaatgatgcatgattcttccctggggtttcttctaactctagaattgtatgattctatgattagcaaatcctttgggaacaaatcttctttcaacaaagttggtctaaggtcctccaggaaggtggaggtgccagtatccttagttgtggactgatgtaattacagctaaggaycatagtttagtttcttttgttggccttgctagagcagcccagttgtggctggggtaagggaacaatagctgagtcccgaagttgacatgctttagccagaatttttacataggcggaacagcgtaattggaaggggatctagcaagtttgtcttggagctgggcatacataaaaacatattgttttttacttagcacatgtgcttcttactggaggtgttaggatttatgaaaattatggagtgctaacatcttcctgatcacactgtgctaccaacataaccccatttccgaagagttaaaattaagccttttagaatcatatgtaaactatgagagtaggttcttactaagggtttctgaggatagcataagaggaatattcaggtgctttagtgcaatgacttgttttagatatagataattatataggtaatctttacagatgtataactatataatatataatgggatatattatatgtattttggctttacttcttcatttataagatatttattgtatatatttgctcaggtaactactgccaataatcaataagtgggacagatatggttttgtgacctcatgaagtgtacagaaaagattaaatatgtaaggtgttcctataccaaagatggaatcattttaaacctaccattgcaaagaaaaatagtttttaaacaaagctgtttttcaaatacaggatcttggtagattaaaagatttatgttgatattacaatattgttaaagaaaatgctgagttttaggtgagatattcaaggtgtgtagctttctatgtaatttccttaacttgaaccaactgttattaagaccttttgaggccaaccatttaaacaccactaggtaacacaaaaaacaatgatatctgtgacattgtatgtatcaaaaattaaatgttataaggacaaccagtgcactaagtaggatacacttgtgatggccttgtttgtgcttattttcttgttttgttttaattctttacattttggagaaaataggagaagattcatgggttggttaccaaaagggaaatgtgaat

SEQ ID NO: 33902 - DNA, 1251 bp, Homo sapiens
tattccttagtgtctctgggtttgtttgtttgtttttctgagacacaatcttgttctgtctcccaggctgaagtgcagtggcgtgattacagctcactgcagccttgacctcctgggctcaagtgatcctcctgcctcagcctcccaagtagctgggaccacaggcgcaggccaccatgactggctaactttttaaaaaagatttttgtagcgacagggccttgccatgtttcccaggctagtctgggtattgtaagttctcactttggagattgattggttttattggtctgcatagggatcatttattagcagtagctacaggaggtccatctcaatgttattaggttacattttctgtactgtaagcaatataaaagaaaatatttcattttatttgtattttctgctcttaactataatattttacatatttagatgtgagaaaatgtaatgctgtcaggtcatttcttaaagtatggccttgtgtgatcctaaaacattactgagatagtttaagtttcaggtaaatggtggatgattgttacaatcagtattactcaatatattaagtctacattaggcctcaaaatcttaggtctgcatttgattttagacacatatattatgstgtgagtcatttttctataaatcaggtaaaatgtaggtacatcttgatgttatacgaaactgtatttttctaccatagcagttactaaatatacaaatgatatccttcaagaaagaaatgataaaacttttaaattcttttatgagtgtgtttttatcttaatctacatatactgttaatagttttcttattcgattagaggaaatttttttgggctaagtttcctataaaaggcagatgtttttaagagtacagattgtgtataataatgaaatgtatctgtgcaagtaacattctgatttgtactttaattgctgtttatatacagtgtgaattaagaataaaacagtgaggtgagggagggaagaaggaatgaggaatataattagcatactcagtagtttggaaatgtaactgttttaattaacagctttgtggtggcaaaacaaacgtgctttgggaaagctaagaataactaggattgtggcatcctccttgggaaaaagttgtttataatcttaatgttttatttccttttggctgacagacaaaagaaaacaaagtatatgaaatatttgtgtcagaagatatttatatgttcagttttaccaattttatgc

SEQ ID NO: 33903 - DNA, 1320 bp, Homo sapiens
ctctcctgtcatctgccagggctccccactgactgaacccaactagagacagatgttaagagagagccttttgatgtcaagtacctagatcagcagccttgggcagagaacargggcaagtatagagaatgggttttgaggagtaaacaggagctatctggcataaaatagccaactttttattttattttttttttttgagacagagtttcattcttgtcgcccaggctggagtgcagtggcgtgatctcggcccaccgcaacctccacctcctgggttcaaacaatctcatgcctcagcctcctgagtagctgggattacaggcgtgtgccaccacacaaggctaatttttgtatttttagtagagacggggtttcaccatgttagccagggtggtctcaaactcctggcctcaggtgatctgcccaccttggcctcccaaagtgctgggattataggtatgagacaccatgcccagccccaatattctttttgaattaaataatcaaaataacccagaagaggaaaacatagataatatgcaaaatattgatatccatttactttatgggcttacataattattttttaattgacctaagcccaaacacaaaattaaaaaagaaaatctgaagatggcattgttcctcaccctcttctgtacataagtcctaagttcttccttaaactcccatgagggcatagcagtgaacatctcagagtggggacagaaaactattcctaaagatgaacatggccccagacccacaaaacgccagactttggacttggtctgaaatagtggaggttttctgttaagtcctagcttgtttccaaggaatgacactgtaaatcaggtcatggaatgggaagctgacatttactgacccttggcatgtgccaggctccatgacatacattcatgtaagttatcacttttactcctctcagcaaacctgtactgtgaccaatatggtcacatgaatgtatgccatggagcctggcacatgtcaggtttgctgagaggagtaaaagtgattactctttaagaaacagaaactccaagagtttaatttggagtttaaggaactttctcaaggtcaatgatagagtctggaattggagctaggtctgcttggctacatcgtggcacagcctcacttggctgcaagatggtaaaggagtcattatctattatcagaggtctctcacctgtcccagaaatatggctttccccttcccctctctctcattcccttatcttccattcattcccttagttatatatttaacaagtatttattcagtacctactgtgt

SEQ ID NO: 33904 - DNA, 1320 bp, Homo sapiens
ctctcctgtcatctgccagggctccccactgactgaacccaactagagacagatgttaagagagagccttttgatgtcaagtacctagatcagcagccttgggcagagaacaagggcaagtatagagaatgggttttgaggagtaaacaggagctatctggcataaaatagccaactttttwttttattttttttttttgagacagagtttcattcttgtcgcccaggctggagtgcagtggcgtgatctcggcccaccgcaacctccacctcctgggttcaaacaatctcatgcctcagcctcctgagtagctgggattacaggcgtgtgccaccacacaaggctaatttttgtatttttagtagagacggggtttcaccatgttagccagggtggtctcaaactcctggcctcaggtgatctgcccaccttggcctcccaaagtgctgggattataggtatgagacaccatgcccagccccaatattctttttgaattaaataatcaaaataacccagaagaggaaaacatagataatatgcaaaatattgatatccatttactttatgggcttacataattattttttaattgacctaagcccaaacacaaaattaaaaaagaaaatctgaagatggcattgttcctcaccctcttctgtacataagtcctaagttcttccttaaactcccatgagggcatagcagtgaacatctcagagtggggacagaaaactattcctaaagatgaacatggccccagacccacaaaacgccagactttggacttggtctgaaatagtggaggttttctgttaagtcctagcttgtttccaaggaatgacactgtaaatcaggtcatggaatgggaagctgacatttactgacccttggcatgtgccaggctccatgacatacattcatgtaagttatcacttttactcctctcagcaaacctgtactgtgaccaatatggtcacatgaatgtatgccatggagcctggcacatgtcaggtttgctgagaggagtaaaagtgattactctttaagaaacagaaactccaagagtttaatttggagtttaaggaactttctcaaggtcaatgatagagtctggaattggagctaggtctgcttggctacatcgtggcacagcctcacttggctgcaagatggtaaaggagtcattatctattatcagaggtctctcacctgtcccagaaatatggctttccccttcccctctctctcattcccttatcttccattcattcccttagttatatatttaacaagtatttattcagtacctactgtgt

SEQ ID NO: 33905 - DNA, 1320 bp, Homo sapiens
ctctcctgtcatctgccagggctccccactgactgaacccaactagagacagatgttaagagagagccttttgatgtcaagtacctagatcagcagccttgggcagagaacaagggcaagtatagagaatgggttttgaggagtaaacaggagctatctggcataaaatagccaactttttattttwttttttttttttgagacagagtttcattcttgtcgcccaggctggagtgcagtggcgtgatctcggcccaccgcaacctccacctcctgggttcaaacaatctcatgcctcagcctcctgagtagctgggattacaggcgtgtgccaccacacaaggctaatttttgtatttttagtagagacggggtttcaccatgttagccagggtggtctcaaactcctggcctcaggtgatctgcccaccttggcctcccaaagtgctgggattataggtatgagacaccatgcccagccccaatattctttttgaattaaataatcaaaataacccagaagaggaaaacatagataatatgcaaaatattgatatccatttactttatgggcttacataattattttttaattgacctaagcccaaacacaaaattaaaaaagaaaatctgaagatggcattgttcctcaccctcttctgtacataagtcctaagttcttccttaaactcccatgagggcatagcagtgaacatctcagagtggggacagaaaactattcctaaagatgaacatggccccagacccacaaaacgccagactttggacttggtctgaaatagtggaggttttctgttaagtcctagcttgtttccaaggaatgacactgtaaatcaggtcatggaatgggaagctgacatttactgacccttggcatgtgccaggctccatgacatacattcatgtaagttatcacttttactcctctcagcaaacctgtactgtgaccaatatggtcacatgaatgtatgccatggagcctggcacatgtcaggtttgctgagaggagtaaaagtgattactctttaagaaacagaaactccaagagtttaatttggagtttaaggaactttctcaaggtcaatgatagagtctggaattggagctaggtctgcttggctacatcgtggcacagcctcacttggctgcaagatggtaaaggagtcattatctattatcagaggtctctcacctgtcccagaaatatggctttccccttcccctctctctcattcccttatcttccattcattcccttagttatatatttaacaagtatttattcagtacctactgtgt

SEQ ID NO: 33906 - DNA, 624 bp, Homo sapiens
ctaatctccctcatttctgatttggacagttctacttgcagagaggattcattatgcttgtctgttattaatgtcccttcatacaatgaggctgtttgtgtgacatactaaaattcatgcttgaaaaggaataaaattataacctgggtgataggtgataggtgcaccaaaatctcagcctttgccattacacaattcatccatgtaaccataaaacacttgtacaccaaaagctattgaaataaaaaaaaagaaaaaaagaagagtgaaatcataaaccatgtgctgttatatcatagatagtatttgtgcatctccacacacccatcatctgtttctaaacacaagcacacatatgtgcatacattcattcagcaaakattaattgagttactattgtttgtcagtattgattattgattgggcagtaaacacagccttttccctgtggccaatcatgatccctgttcagctgaattactagagcaattatagttgtctacattctttcagatgttccaaggattctgctggcatagtcttttgagttaaaatgatgctttaacattaatagaatgggcattggatgtcttctttaaaaggcagagcagatatcctgaaaac

SEQ ID NO: 33907 - DNA, 624 bp, Homo sapiens
ctaatctccctcatttctgatttggacagttctacttgcagagaggattcattatgcttgtctgttattaatgtcccttcatacaatgaggctgtttgtgtgacatactaaaattcatgcttgaaaaggaataaaattataacctgggtgataggtgataggtgcaccaaaatctcagcctttgccattacacaattcatccatgtaaccataaaacacttgtacaccaaaagctattgaaataaaaaaaaagaaaaaaagaagagtgaaatcataaaccatgtgctgttatatcatagatagtatttgtgcatctccacacacccatcatctgtttctaaacacaagcacacatatgtgcatacattcattcagcaaatattaattgagttactattgtttgtcagtattgattattgattgggcagtaaacacagccttttccctgtggccaatcatgatccctgttcagctgaattactagagcaattatagttgtctacattctttcagatgttccaaggattctgctggcatagtcttttgagttaaaatgatgctttaacattaatagaatrggcattggatgtcttctttaaaaggcagagcagatatcctgaaaac

SEQ ID NO: 33908 - DNA, 1213 bp, Homo sapiens
tgcagaaatcagatcacaatacacccctgcctaacactctctaatgagtcctactgcacttagagcaaaatccacaatttgctcagctactatgagcctgctcttgcctgtcttctagtcttcacctcccacctctctacgcatgactctctcagctctaaccacaccggccttctttctattccaggcgcataaggaactgatacccacctcaggacatgactatgtcccactcactccttcgtacattgtcatctcactgtcctcttgttatccttcagatgtcagctcagatgctgcctcctcagacaggcttctgctgaccgcccccctctcttactctaggcatcttattaccctcttctgttttctgtatagcatgtatcccattctgaaaaagtacctcatttattttcgagcctacatgtttattatctctttccgtgctccccacaacccagtctccaaatgtaagctccgtgagagtcaggactttgtgtgttctgtttcgctggtgtgtccctagtgcctagaacttcctggcacataatgagcattcagtaaacatttcacatatgactggctaactgctgagtaaggaaatgagtgaatgaatgaacaatggattaaaaatgtagatactttatcttagacaaaatttggcaacagtagaaatcaagacctttctctgtccagcttatgtgactctgttcaaaattatctcaattgtgtacaatattttgagctacaaacatttttctcctcaaaatctcatttttttcttttatttaggggaaggaaaaggcatagcagttgtttcctgaagcagttgttcccacatacacaagttgacacctcttttagcttttctgaccaagtttcaataatcatacacagaattttagaaataccttcttctggccatcctcccttgactcctgcttttccagtgggagatggagctgggaggtggtggtagaagaagggagagtgttgggggagtgagggaaggacctgtgtgaaaaggattggatttgaccatttagggaagggggacaatatgaaggccctgaaaaccagctattaatgatggggctcatttctgcacaggtaaatatatcagcactcatgccactaagatattttataaaaatgcttcctgaaacaaagtagttacttctaagtttccctagggaataactttttwaaaaat

SEQ ID NO: 33909 - DNA, 561 bp, Homo sapiens
ggagtccttagctcttcctcacattgggtatccttcctaggactgcttgaatattttcaggacttggtggcttcatgtaatttagaatttcttaactctccatgataaccaaaataacagagtttaccctagttttctgacactggcatccttaatttcctttccaaactttcttcatgaaagtagaaagaaaattttacctaaccttgacccacaaaaaggggtgactaagtaactgagatttctgggcttagcttaacatagacatggaaactgctctcttccacctttagggtgtacacggtgtagctttgtagttaggctgttttggtccaaatcctggctctgcttcttattaggtcttacagcttggaccatttttaaaaactttttttgtgccttggtttcctcatctataaaataggatgataataataataattttatacagatgtagcaaggattctgtmagctaatacttgcaacttatttacttcccaagacttgcttttctttgtgttctttggatttttcctccctttccctcccttccttccttcc

SEQ ID NO: 33910 - DNA, 569 bp, Homo sapiens
cttgaacctggaaggcggaggtttctgtgagctgagatcatgctactgcactccagcctgggtgatggaccgagattctatctcaaacataaataagtaaataaataaataaataaataaataaataaataaataaaacataaattcagctccatgactgctcctgcagagcagggctacccactacgcagtgagtggcattactactatttaattgcagaacactatcattaccccaacaagaaactccatgctcacccatcaacagtcattctccattgcccaccctacccctaggccagggcaaccagtaatctactttctgtctctatggacttgcctattctggacatttaatgtaaatggaataatgtaatatgtgtcctcaaggtgtatccatgttgtagcatatatgagtacttcattcttttytattgtagaaaaagagtccattgtataaataataccacattttgtttatccatttgtcagttgacatttggcttgtttctactttttgactattatgaatgatggttctatgaacatttgtgcataagtttttgtat

SEQ ID NO: 33911 - DNA, 627 bp, Homo sapiens
tgaagacatttcaatctccaaactgctatacctatagatgatttggcccatgaatatttgtttgctccttgaagttccaggttcttcaaaaataatggataggccaggtgtggtggctcatgactgtaatcccagcactttgggaggcccaggcaggcagaytgcttgagctcaggagttcaagaccagcctgggcaatatggcgaaaccccgtctctacaaaaaaatacaaaaattagccgggcatggtggcgcaggcctgtggtccccgctacttgggaggctgaggtgggagaattgtttgagcctggaaggcagaggttgcagtgagcacagatcatgccactgcactccaacctgactgtcagagtcagaccctgtctcaaaaacaaacaaacaaacaaacaaaaacaaagtggataaacaggatctaacaaaactacatatgcaaataatctttgactcagcaatctacttacaggaatgtaatctaaagatatatcacacgatataaaaacacatattcatgaggttatttattacaacattttttggtaattgtaaaataatgaaaactacctatctaaacataaatgactgaataaattaggatatatacaatgtaat

SEQ ID NO: 33912 - DNA, 627 bp, Homo sapiens
tgaagacatttcaatctccaaactgctatacctatagatgatttggcccatgaatatttgtttgctccttgaagttccaggttcttcaaaaataatggataggccaggtgtggtggctcatgactgtaatcccagcactttgggaggcccaggcaggcagactgcttgagctcaggagttcaagaccagcctgggcaatatggcgaaaccccgtctctacaaaaaaatacaaaaattagccgggcatggtggcgcaggcctgtggtccccgctacttgggaggctgagrtgggagaattgtttgagcctggaaggcagaggttgcagtgagcacagatcatgccactgcactccaacctgactgtcagagtcagaccctgtctcaaaaacaaacaaacaaacaaacaaaaacaaagtggataaacaggatctaacaaaactacatatgcaaataatctttgactcagcaatctacttacaggaatgtaatctaaagatatatcacacgatataaaaacacatattcatgaggttatttattacaacattttttggtaattgtaaaataatgaaaactacctatctaaacataaatgactgaataaattaggatatatacaatgtaat

SEQ ID NO: 33913 - DNA, 627 bp, Homo sapiens
tgaagacatttcaatctccaaactgctatacctatagatgatttggcccatgaatatttgtttgctccttgaagttccaggttcttcaaaaataatggataggccaggtgtggtggctcatgactgtaatcccagcactttgggaggcccaggcaggcagactgcttgagctcaggagttcaagaccagcctgggcaatatggcgaaaccccgtctctacaaaaaaatacaaaaattagccgggcatggtggcgcaggcctgtggtccccgctacttgggaggctgaggtgggagaattgtttgagcctggaaggcagaggttgcagtgagcasagatcatgccactgcactccaacctgactgtcagagtcagaccctgtctcaaaaacaaacaaacaaacaaacaaaaacaaagtggataaacaggatctaacaaaactacatatgcaaataatctttgactcagcaatctacttacaggaatgtaatctaaagatatatcacacgatataaaaacacatattcatgaggttatttattacaacattttttggtaattgtaaaataatgaaaactacctatctaaacataaatgactgaataaattaggatatatacaatgtaat

SEQ ID NO: 33914 - DNA, 627 bp, Homo sapiens
tgaagacatttcaatctccaaactgctatacctatagatgatttggcccatgaatatttgtttgctccttgaagttccaggttcttcaaaaataatggataggccaggtgtggtggctcatgactgtaatcccagcactttgggaggcccaggcaggcagactgcttgagctcaggagttcaagaccagcctgggcaatatggcgaaaccccgtctctacaaaaaaatacaaaaattagccgggcatggtggcgcaggcctgtggtccccgctacttgggaggctgaggtgggagaattgtttgagcctggaaggcagaggttgcagtgagcacagatcatgccactgcactccaacstgactgtcagagtcagaccctgtctcaaaaacaaacaaacaaacaaacaaaaacaaagtggataaacaggatctaacaaaactacatatgcaaataatctttgactcagcaatctacttacaggaatgtaatctaaagatatatcacacgatataaaaacacatattcatgaggttatttattacaacattttttggtaattgtaaaataatgaaaactacctatctaaacataaatgactgaataaattaggatatatacaatgtaat

SEQ ID NO: 33915 - DNA, 874 bp, Homo sapiens
caggcctgcaaaaacaaaacgaaacaccccccaaaatttctattttcctttcattgtttcggcttccctgggagctaggtagggatggggaggaatgggagaaggagacagtttctgcagcatcagaagaagaaactgaggcccaggcacagaggcaacttgcctcagagtatatgatgccttggctggggatggggtagtagacctagttcccaggccatcccaacttggacccacgagatgtcccctgccccagtccggctctcagggttttttgtactgtgtcaaaggatgtagagggcttcactttccctggaaatgtgctttagattgctttttgggggaatcttgcaaactgggatgtttggacttctctcctgccctatgctgaatttggagggagccattttctgtctgggaaatgctttagatcttggagccactggggatgttgaagaattgaaaaaggccaggtggggaccctcaggtacccacagtgcttctccccggtgaggaggcaccagtgaggaagtggggtctgatatctggtgttacctgagaaaaaggtgggacggaaaaagaagagccttctaactggtccagtaaggccactctgggacaaatcacagagtcatccaaggtggcagttatcttagctataaggtggttttcagtgggaacttttcactgaggaccttcrttggttgccagcagtggaagttcaagctctttcctgccctgttgtagggtggaaagaccctcttggaggaaggagggggaagcagtgctggccctctctggagaagtccctaagcctctaagggcctgctgttgtcaccctcaggacacgccacctttgagctgggagccacct

SEQ ID NO: 33916 - DNA, 1319 bp, Homo sapiens
gagctttagtctacctgctgctctaggagagacctacacagccccctgagctcagaaaacaaaaagccagactcccagactagggttcaatagacaagtggctctgagaacaggatacactggaatcagcagaatccaaaagacaagcattgctttgacagcatcacagtaatttattttttccaaaatctttaaaattctatttgtagtttagtcaaaagtgcagagcgttttgtttgtccatagtttcctgtatttattttttcagtagataatacattcacatggtccacagtcaaaagatgcaaaaggctattcagtgaaaactctccctcctacccctaccctccagctacccattttcttcccagaggctgtggctggtggcttgtgtccccttcccacagatagtctaagaacatccaggtccttcagctgaaacccttgggcacagatgggttgcagaatctagaacttttcccattttagacaggtaataaagtgcatacagcctgtattccacaacaccagcgggctccgcccagggtgagcagtcagccagtttgccccagactgttccagttccatgtccagggaaccccttcaatcccaggcaaaccaagacagtaggtcctgctagctgtgggctgtaatgtattcacactaacagggacaattaaaaactgcaaatggcttcacatccttttagctctggttttgctaccaaataaatttgccacaaaccaaagaaaaaagttttggtttccagagccttttggatttgggaattgtggatgaggggctggggacctatacacaatatacatatatatttttaatctgcttgaatggaaacacagtgttgggcacattgtttttgcactcaatttatcttagtggctttccacatcagtacatagaaatcctgccctttcctttttactgctgcattggacttcaacacacgggtgaacatttaggatgtctctagttttctgttattacaaacacacatagttttacaagcagctaacaacatggggagggggcagaggaggaatggaatcattctttttttttttttattggagayggagtctcactctgttgctcaggctggagtgtagtggtgcgaacttggctcactgcagcctccacctcccaggctcaagcaattctcctgcctcagcctcccgagtagctgggattacaggtgtctgctatcacacccagctaaagtttttatatttttagtagaaatggagtttcaccatgttggacaggctggtctcgaactcctgacctcaggtgatccaccc

SEQ ID NO: 33917 - DNA, 1934 bp, Homo sapiens
tttatttatatcatcatctgagagaccatgtagtaatacataacatattcaaattgcctgccatacagactgcaaaagcctgagttttctctctccctctacaaaaggcaaacaacaaatcctcaagggtcttgtaaatgttacaggaagtttgtaagctaagtagatttttgcaatgctaacgatttttctttcttgccgagactcatttacttactcaaaatagcaacattccttttccttatatatatttcattttccttctccaaagccagagtttaagtacacaattctgaaaattgtcaatcagcctgattctccctgtggctaagctactccataattataagctagacatcctcttaggtcactagggtctcaagtctgtgaatatttataaaatagtctccccagtgagcaaataaatgttaatgcttctaccaaacgtgattaacaaaaaaacttattctcatgaagaagtgcataattgtaataagatcagaaattaactcaaactccaataacaattaacttagaattgtttttagtgtaggaaatattattgcaagctttaatctgtragttatagtgtttctaagacaaaaacctcaaaaagcattaacacgcggttctcgaaggtttctgccggaactccatttatgcatacaactaattcacttatcctaccacatgtattcattcaaaacacatgttgaattccttttataagcaaagaatccagtatacagaagtaaataccactggcatggtccctagcctcatagaaattaaagtcaccaagtcgcctcctggcagagacagatagtcaacaagaagtattacaaatattgtttctccccaaggctgagccccagcctcactcccagcagcttccgcctgctgagttgaaggtacccatgttgtctgagcagctattcaactttttattacactgatggaggtactgggcaaggtagtagaaagaaaaagaaaagccagaaaatctagaaatgttaatgatatttagagtagaaataacagagctacttctgggaggaaaagagctgctactataagacaggaaacagctctatatactctgggttttgaccaatgttgctgaccacgatggaaaaacaaggactactgaatttatccccctgccatgaacaactagaaaaatggaaaaaacatgaaacaatggctttgtgttttctcaagggcaggcagtcaaaattttggggtttttttgaataaaatgccagatttcctcgaatgtgagctttaatggttggccttgtttgtgttatagttggacagctactagccatcagagatttagagccaaagtgcaatactcaccttgcctcagacaaaatattcactgcatatttgtgcaaaaggaacacctttactctggcagaaggaatattgcaattacagggtacagagatacaaagtggccattcttagacatttacacagagccagagagaaataatgaatactactctaagaattcttgatgggttcactaaactgaagaagctgaagaaatgaagccttctagcaactcagcttccatggatatcatatttcttaagaaattaggatctctggatgaagaaggtgatcaatggcagacaagttgggactacttcaaggcctttggtgcatttcaacatctgagatcagactgctgaagattcagctgccaccatgagtcaattgggtaagcacacataggaaaaagaatgctacttgaaatttgggaaaggtaggtaagtttcctagcaggcattgggactgagaaaacaagaggctgagtcatttttagagcatgccacagaaatgatgcccatgtgaatgacaaacataagagagaaatgctgctctctaagcaggagggactgggctgtactaggtattatgca

SEQ ID NO: 33918 - DNA, 1934 bp, Homo sapiens
tttatttatatcatcatctgagagaccatgtagtaatacataacatattcaaattgcctgccatacagactgcaaaagcctgagttttctctctccctctacaaaaggcaaacaacaaatcctcaagggtcttgtaaatgttacaggaagtttgtaagctaagtagatttttgcaatgctaacgatttttctttcttgccgagactcatttacttactcaaaatagcaacattccttttccttatatatatttcattttccttctccaaagccagagtttaagtacacaattctgaaaattgtcaatcagcctgattctccctgtggctaagctactccataattataagctagacatcctcttaggtcactagggtctcaagtctgtgaatatttataaaatagtctccccagtgagcaaataaatgttaatgcttctaccaaacgtgattaacaaaaaaacttattctcatgaagaagtgcataattgtaataagatcagaaattaactcaaactccaataacaattaacttagaattgtttttagtgtaggaaatattattgcaagctttaatctgtaagttatagtgtttctaagacaaaaacctcaaaaagcattaacacgcggttctcgaaggtttctgccggaactccatttatgcatacaactaattcacttatcctaccacatgtattcattcaaaacacatgttgaattccttttataagcaaagaatccagtatacagaagtaaataccactggcatggtccctagcctcatagaaattaaagtcaccaagtcgcctcctggcagagacagatagtcaacaagaagtattacaaatrttgtttctccccaaggctgagccccagcctcactcccagcagcttccgcctgctgagttgaaggtacccatgttgtctgagcagctattcaactttttattacactgatggaggtactgggcaaggtagtagaaagaaaaagaaaagccagaaaatctagaaatgttaatgatatttagagtagaaataacagagctacttctgggaggaaaagagctgctactataagacaggaaacagctctatatactctgggttttgaccaatgttgctgaccacgatggaaaaacaaggactactgaatttatccccctgccatgaacaactagaaaaatggaaaaaacatgaaacaatggctttgtgttttctcaagggcaggcagtcaaaattttggggtttttttgaataaaatgccagatttcctcgaatgtgagctttaatggttggccttgtttgtgttatagttggacagctactagccatcagagatttagagccaaagtgcaatactcaccttgcctcagacaaaatattcactgcatatttgtgcaaaaggaacacctttactctggcagaaggaatattgcaattacagggtacagagatacaaagtggccattcttagacatttacacagagccagagagaaataatgaatactactctaagaattcttgatgggttcactaaactgaagaagctgaagaaatgaagccttctagcaactcagcttccatggatatcatatttcttaagaaattaggatctctggatgaagaaggtgatcaatggcagacaagttgggactacttcaaggcctttggtgcatttcaacatctgagatcagactgctgaagattcagctgccaccatgagtcaattgggtaagcacacataggaaaaagaatgctacttgaaatttgggaaaggtaggtaagtttcctagcaggcattgggactgagaaaacaagaggctgagtcatttttagagcatgccacagaaatgatgcccatgtgaatgacaaacataagagagaaatgctgctctctaagcaggagggactgggctgtactaggtattatgca

SEQ ID NO: 33919 - DNA, 1934 bp, Homo sapiens
tttatttatatcatcatctgagagaccatgtagtaatacataacatattcaaattgcctgccatacagactgcaaaagcctgagttttctctctccctctacaaaaggcaaacaacaaatcctcaagggtcttgtaaatgttacaggaagtttgtaagctaagtagatttttgcaatgctaacgatttttctttcttgccgagactcatttacttactcaaaatagcaacattccttttccttatatatatttcattttccttctccaaagccagagtttaagtacacaattctgaaaattgtcaatcagcctgattctccctgtggctaagctactccataattataagctagacatcctcttaggtcactagggtctcaagtctgtgaatatttataaaatagtctccccagtgagcaaataaatgttaatgcttctaccaaacgtgattaacaaaaaaacttattctcatgaagaagtgcataattgtaataagatcagaaattaactcaaactccaataacaattaacttagaattgtttttagtgtaggaaatattattgcaagctttaatctgtaagttatagtgtttctaagacaaaaacctcaaaaagcattaacacgcggttctcgaaggtttctgccggaactccatttatgcatacaactaattcacttatcctaccacatgtattcattcaaaacacatgttgaattccttttataagcaaagaatccagtatacagaagtaaataccactggcatggtccctagcctcatagaaattaaagtcaccaagtcgcctcctggcagagacagatagtcaacaagaagtattacaaatattgtttctccccaaggctgagccccagcctcactcccagcagcttccgcctgctgagttgaaggtacccatgttgtctgagcagctattcaactttttattacactgatggaggtaytgggcaaggtagtagaaagaaaaagaaaagccagaaaatctagaaatgttaatgatatttagagtagaaataacagagctacttctgggaggaaaagagctgctactataagacaggaaacagctctatatactctgggttttgaccaatgttgctgaccacgatggaaaaacaaggactactgaatttatccccctgccatgaacaactagaaaaatggaaaaaacatgaaacaatggctttgtgttttctcaagggcaggcagtcaaaattttggggtttttttgaataaaatgccagatttcctcgaatgtgagctttaatggttggccttgtttgtgttatagttggacagctactagccatcagagatttagagccaaagtgcaatactcaccttgcctcagacaaaatattcactgcatatttgtgcaaaaggaacacctttactctggcagaaggaatattgcaattacagggtacagagatacaaagtggccattcttagacatttacacagagccagagagaaataatgaatactactctaagaattcttgatgggttcactaaactgaagaagctgaagaaatgaagccttctagcaactcagcttccatggatatcatatttcttaagaaattaggatctctggatgaagaaggtgatcaatggcagacaagttgggactacttcaaggcctttggtgcatttcaacatctgagatcagactgctgaagattcagctgccaccatgagtcaattgggtaagcacacataggaaaaagaatgctacttgaaatttgggaaaggtaggtaagtttcctagcaggcattgggactgagaaaacaagaggctgagtcatttttagagcatgccacagaaatgatgcccatgtgaatgacaaacataagagagaaatgctgctctctaagcaggagggactgggctgtactaggtattatgca

SEQ ID NO: 33920 - DNA, 796 bp, Homo sapiens
gccttcagtgggctgctttataataactatgaatataatgctatcaacattttagtggggtattactaaacgagctatattactaataagaaaactttacctctgcaattttggttacagtaaatgaccattatttatttagttgttcccttttgctaaatacaatttcactgcagcctcttaatggagagagaatatccagctttaaacattggttctgttttgctgtttcattttaatttaatctagtttgaaattgcattaaatacatcacggcaatgtactaaggctttacaatttctattgaggaagtgtataaccaaaagtttcctgtcagctggaggttagtcaagccccatgagtttaagcaccagccagcatttgcctgcttgtcaaaggagaaagaacttcctctgccccaacatccctcttgactgcaagtaaacttattgcctgtcataactctaggagtattcttgcctcacagccctgaggtcttagaccctgagtgcagcaagccagtgggtatctgccaaaggcctcaggctccctctaggctgcccctctgcttgccccctttttctcctcataactgccacctggcagccaattaaaagtcagagggaccaagtggtggcccatttggggaacctcaggtcactatgctgttttatttggtttttgcaatgacacttctttgtctgattttaatttgaacsaatataataaaaaatcaggagtctacatgaaaacccaagggcctggcatttcttgggaagtcagatctggccatact

SEQ ID NO: 33921 - DNA, 529 bp, Homo sapiens
acatcccctagaaagatatgttgatgtcctgacccccagtaccagtgaacatgaccttatttggaaataaagcctttgtcgatgtaagcaagtaaagagaaagtcatcctggatcaaggtkggccctaaatccaatggctggtgtccttaaatagagagatttgatggcatacagggacacgcaatgaagaaaacctcacgacagtggaggcagaggttggtgtgatggcagctgcaagtcatggaatggcaggaattgctagcaaccgtcaggaagtaggaagaggcagggaagccttcttccctagagcctctggagggagcatgttcctgacaatacttggattctccagaactgtgagagaataaatttctcttgtcttgagctacccagtttgtggtacttcattacagcagccctaggaaacgaaagcagatgatgtcacagtgtatgtacctactaaaactatgatgttgataaccagaatcatacattatatactatttttctatttggcttcatttactc

SEQ ID NO: 33922 - DNA, 552 bp, Homo sapiens
tgtatatagaatctttcatattctattctcaccataaatagtctattctaagccattwacatccattccctaatataatggaataaactctatctgcttctcatgcttgtttctttgttatccatcctccgcaaagcagccacagtgtgatttcaaaatcagaatgcagattatatcaattccctgctatatactctatgatattttcttactacttttagcctaaaggcctcttcactgctctcctgtgatattttttgtccctttgctcctcacttaaaattccttagtcacactgtctgttaggttcctggaatcagacaggtactttcccaagtcttcatattagcaagtttctttgcatgtagggatctttctccagatctctgcccctcttcttgttgttattattgtctccatataaataccatctcctgctaaaaagaagttaaaagtcacaaaatagcccaaggtaaacataacactattaaatagtagtaagctgaatctgttcaatgatggggggggaatctttctaacaattaaatattg

SEQ ID NO: 33923 - DNA, 552 bp, Homo sapiens
tgtatatagaatctttcatattctattctcaccataaatagtctattctaagccatttacatccrttccctaatataatggaataaactctatctgcttctcatgcttgtttctttgttatccatcctccgcaaagcagccacagtgtgatttcaaaatcagaatgcagattatatcaattccctgctatatactctatgatattttcttactacttttagcctaaaggcctcttcactgctctcctgtgatattttttgtccctttgctcctcacttaaaattccttagtcacactgtctgttaggttcctggaatcagacaggtactttcccaagtcttcatattagcaagtttctttgcatgtagggatctttctccagatctctgcccctcttcttgttgttattattgtctccatataaataccatctcctgctaaaaagaagttaaaagtcacaaaatagcccaaggtaaacataacactattaaatagtagtaagctgaatctgttcaatgatggggggggaatctttctaacaattaaatattg

SEQ ID NO: 33924 - DNA, 1713 bp, Homo sapiens
ggtagctatgatagcggtgatcaccattgccatgagtattccttcaacaacggctgacacagagaacaattatacttcttgggcatatttatcaatcttggctggcaataatgcctggatataatcactctatgatgcagttacacatgctttctgatctcagtatttaccgtaataaatctgctcctataattgaggcataccaccctcaaaaaactacttgtaaacaaaatagaacctggccagaaataatgaacatacttgtttaggaagattgcattgcagaacgggcagaggtgctgcgcaacgaatcctatggaatcattattgattggtccccttaggggatgtttagcttgaattgcacctctcagtctgygtgccatggccacactatgttcagctggtctgaacaaaatggtcagatggtagaaatggcaagaagtatggcaagagttcctattatctggaaccttggtggtatagtggcacctcaacctcaaataatatggcctgctgtagaagctaaacataaagatttgtggaaactattaatagctcttaataagatcaaaatttgggaaataataaaaaagcatctagaaagacactctacaaacttgtctttggatattgcaaaattaaagaacaaatatttaaagcatcccacacctgaccttaatgccaggaactggagtgcttaaaggagctgcagacaggttagcagctagtaacccattaaaatggataaaaacacttggaagctctgtgatttcaatgattgtgcttttaatctgtgctgtttgtctttgtatagtctgcagatgtggatcctgactcctgtgagaagtagctcactgtgacaaagctgcctttgcttttatcgatttgcaaatcaaataagggggacatgttgggaacaggcccccccccctcaaaacctggccataaactggcccccaaactggccataaacaaaatctctgcagcaccatgacatgttcataatggccataatgcccacgctggaaggttgtgggtttaccagaatgagggcaaggaacacctggcccgcccagggcagaaaaccgcttaaaggcgttcttaaaccacaaacaatagcatgagtgatctgtgccttaaggacatgctcctgctgcagataactagcccaacccatccctttatttcggcccatcccttcatttcggcccatcccttcatttcccataagggctactttaaatctaatatctatagaaacaatgctaatgactggcttgttgttaataaatacatgggtaaatctctgttcggggctctcagctctgaaggctgtgaaacccctgatttcccacttcacacctctatatttctgtgtgtgtgtctttaattcctctagcgctgctggggtagggtctccccgaccgagctggtctcagcagctgcctatagaaaattctatcccacttacctttcctttgtgaccagacccttcagtcactctttccaagtctctgactggactaagaaggccttctgtcatgttatttcttcctgtccctgtcaatatttctgccacaaagttgttttatcttctcttgcctgccccctgcctgccagtggctctgatcattgaattgcattagaggagataccaaagcagcatggctctccccagcttttgactttctgaagatctaggatgaagct

SEQ ID NO: 33925 - DNA, 1713 bp, Homo sapiens
ggtagctatgatagcggtgatcaccattgccatgagtattccttcaacaacggctgacacagagaacaattatacttcttgggcatatttatcaatcttggctggcaataatgcctggatataatcactctatgatgcagttacacatgctttctgatctcagtatttaccgtaataaatctgctcctataattgaggcataccaccctcaaaaaactacttgtaaacaaaatagaacctggccagaaataatgaacatacttgtttaggaagattgcattgcagaacgggcagaggtgctgcgcaacgaatcctatggaatcattattgattggtccccttaggggatgtttagcttgaattgcacctctcagtctgcgtgccatggccacactatgttcagctggtctgaacaaaatggtcagatggtagaaatggcaagaagtatggcaagagttcctattatctggaaccttggtggtatagtggcacctcaacctcaaataatatggcctgctgtagaagctaaacataaagatttgtggaaactattaatagctcttaataagatcaaaatttgggaaakaataaaaaagcatctagaaagacactctacaaacttgtctttggatattgcaaaattaaagaacaaatatttaaagcatcccacacctgaccttaatgccaggaactggagtgcttaaaggagctgcagacaggttagcagctagtaacccattaaaatggataaaaacacttggaagctctgtgatttcaatgattgtgcttttaatctgtgctgtttgtctttgtatagtctgcagatgtggatcctgactcctgtgagaagtagctcactgtgacaaagctgcctttgcttttatcgatttgcaaatcaaataagggggacatgttgggaacaggcccccccccctcaaaacctggccataaactggcccccaaactggccataaacaaaatctctgcagcaccatgacatgttcataatggccataatgcccacgctggaaggttgtgggtttaccagaatgagggcaaggaacacctggcccgcccagggcagaaaaccgcttaaaggcgttcttaaaccacaaacaatagcatgagtgatctgtgccttaaggacatgctcctgctgcagataactagcccaacccatccctttatttcggcccatcccttcatttcggcccatcccttcatttcccataagggctactttaaatctaatatctatagaaacaatgctaatgactggcttgttgttaataaatacatgggtaaatctctgttcggggctctcagctctgaaggctgtgaaacccctgatttcccacttcacacctctatatttctgtgtgtgtgtctttaattcctctagcgctgctggggtagggtctccccgaccgagctggtctcagcagctgcctatagaaaattctatcccacttacctttcctttgtgaccagacccttcagtcactctttccaagtctctgactggactaagaaggccttctgtcatgttatttcttcctgtccctgtcaatatttctgccacaaagttgttttatcttctcttgcctgccccctgcctgccagtggctctgatcattgaattgcattagaggagataccaaagcagcatggctctccccagcttttgactttctgaagatctaggatgaagct

SEQ ID NO: 33926 - DNA, 1713 bp, Homo sapiens
ggtagctatgatagcggtgatcaccattgccatgagtattccttcaacaacggctgacacagagaacaattatacttcttgggcatatttatcaatcttggctggcaataatgcctggatataatcactctatgatgcagttacacatgctttctgatctcagtatttaccgtaataaatctgctcctataattgaggcataccaccctcaaaaaactacttgtaaacaaaatagaacctggccagaaataatgaacatacttgtttaggaagattgcattgcagaacgggcagaggtgctgcgcaacgaatcctatggaatcattattgattggtccccttaggggatgtttagcttgaattgcacctctcagtctgcgtgccatggccacactatgttcagctggtctgaacaaaatggtcagatggtagaaatggcaagaagtatggcaagagttcctattatctggaaccttggtggtatagtggcacctcaacctcaaataatatggcctgctgtagaagctaaacataaagatttgtggaaactattaatagctcttaataagatcaaaatttgggaaataataaaaaagcatctagaaagacactctacaaacttgtctttggatattgcaaaattaaagaacaaatatttaaagcatcccacacctgaccttaatgccaggaactggagtgcttaaaggagctgcagacaggttagcagctagtaacccattaaaatggataaaaacacttggaagctctgtgatttcaatgattgtgcttttaatctgtgctgtttgtctttgtatagtctgcagatgtggatcctgactcctgtgagaagtagctcactgtgacaaagctgcctttgcttttatcgatttgcaaatcaaataagggggacatgttgggaacaggcccccccccctcaaaacctggccataaactggcccccaaactggccataaacaaaatctctgcagcaccatgacatgttcataatggccataatgcccacgctggaaggttgtgggtttaccagaatgagggcaaggaacacctggcccgcccagggcagaaaaccgcttaaaggcgttcttaaaccacaaacaatagcatgagtgatctgtgccttaaggacatgctcctgctgcagataactagcccaacccatccctttatttcggcccatcccttcatttcggcccatcccttcatttcccataagggctactttaaatctaatatctatagaaacaatgctaatgactggcttgttgttaataaatacatgggtaaatctctgttcggggctctcagctctgaaggctgtgaaacccctgatttcccacttcacacctctatatttctgtgtgtgtgtctttaattcctctagcgctgctggggtagggtctccccgaccgagctggtctcrgcagctgcctatagaaaattctatcccacttacctttcctttgtgaccagacccttcagtcactctttccaagtctctgactggactaagaaggccttctgtcatgttatttcttcctgtccctgtcaatatttctgccacaaagttgttttatcttctcttgcctgccccctgcctgccagtggctctgatcattgaattgcattagaggagataccaaagcagcatggctctccccagcttttgactttctgaagatctaggatgaagct

SEQ ID NO: 33927 - DNA, 592 bp, Homo sapiens
tgtggggtcttgatcctaggcttcccagtgcccacgtagaatggcaggggatggcctgtgactttatggggaaccaaagccgcttttgcctcctcaggtgaaggccttgtccgcatgcccaaaccagcccctgaaatgtgtctcccgtggtcccccagccacctttaggggttttctaatggggctcttgtaaccaagggaagacagcttgggggccacccaaccctctgacacctcargcccccagccccttccctgcctcccacctgtgtgtcttctgtctgtctctgccttccgccttgccttggtccccagcaccacatagcagcagatagcaaagcatttaaagaacatgcagctgtcctcgcagtgagctcttctttgccctgtaacatgtgtctccctgacacagctgtgccccgtggtggacagtgtgctgggtgtggtgaatgagctcctgggggctgtgctgggtaagtcagggctcaatgccctcctctttgccccttctacccgtctctgtatgaccccaatggggtagggtacgaaggggagccagaagcggcaggatctcagggtcctttagttcctc

SEQ ID NO: 33928 - DNA, 539 bp, Homo sapiens
gactatagtgaactggagaccctgtgccccatttctcaggcagttgccactcagctgccacaaggggagggggtgcaggctcagtgtgaccagattttccaactctttagccagaaactgaaaaatttacatgtgacttcctgatttataaatactagaaataaattcatagtttttgaaaatactatttgggtaaaaggcaaaaagatctggggtcagatccctgggcctttagatcgtgagccttggcagagtaaaaggttttgaagttagcctgcccaggttcaaatcctggtgtcaccacttaccaattgtgtgacccttggcaacagcctcagtgtctccatctgttaaatgagggcaatggtagcacccacctctttgagctgttgtaaaggtgaaatgagcaaaggcgtgcagagcccctagcatctgyctggcatgcagtaagtgctcagtaattgctagctgatagaacaaacttgagtgtttgtagtgatatatgtatgaaattggcagggtagggggaagagtggtga

SEQ ID NO: 33929 - DNA, 1588 bp, Homo sapiens
cctcccaaagtgctgggaattcaggcatgagacatggcgcctggccccagactcttttgaacaagcagatctgtgaactaaccgggtgagaactcacttattaccaaggggatggtggtaaaccattcatgaggaatccgccccggtgatccaatacctcccgccaggcccacctccgacactgggaatcacatttcaacgtgagatttcagaagacacacatccaaaccgtatcaagcatacccagagattttccgtatcttaaggccatttatgccaaataacataagctgatcacaagagtaaacgccaccatattcacagcgcagggtattttacaggacatgtacacaggatggggaggactgggctgaaatcctggaggccatcttagaatctgcctatcatagttgccggggttgagaaacaagaaagccagtgtggctggagcacagtgaacaagggggtgcagggaggagagacagcagagtatcacaggtggagagacacatatataccacctagcctgatgggaggctgaaggcctgaaagtcaccttgtgcaattttggttcctgaggaaggggagggtcatgcgagttcctccatggattcacttgcactaaaaagcacccctggggtgggacccagtcgatgatggaagtcaatggaatgcgtgttgaagagtagcccttggagaaccagtgggctgctgggcataggtgataagttctgctctgtgcatttggcccagtaggcacaatgccaagaagccatgggctcgtcaaggatccatggagaagtctgaaatctaaaaaagctggctggaaaaatattttaaaactttccaaacttgaaagacttagtgaagtgcctaccaagtagcattgtgtcaatgggtcatgagcaacgcccaagtctcctaatagttacatatgcgttctatgtgatgtgactgcattttgtttccattttaacattattgtatttattttttcrtagtatcatgtgcaatgtacaaataaaaaggaacaaaaggagatgccctgaaaagcaagtctctctcccacctctgacccccagccacgcaccctctccccactgaggcgtttcctgtactcaaaggtattttgtgcacatgctaatgaacatgtatatatacacctgactcctccccttttcacaatggtggctgttctgcctgctttttttcttttttcttggcagtacatcttggagatgtttcctattggctcatgtggagctgcccattcttttgtacagcagcagagcagtctgttatttggatgaactgtcatttattaactagacatgcccacaaccctgccacctcttttcctaacacactgggcagtcttggcctctcccaggctccctgggagggtcactactttcacaaagatgatgcccacttctgcccatggaatctggcttgcccagtgactacctgacagggttgagtgacaccacccagaagtgcaaagaaggcagtaaagaagaaagaagaatttattaggtgcccgaggaagggctcaatcctgccagtctaaacattgttgtacatacct

SEQ ID NO: 33930 - DNA, 1588 bp, Homo sapiens
cctcccaaagtgctgggaattcaggcatgagacatggcgcctggccccagactcttttgaacaagcagatctgtgaactaaccgggtgagaactcacttattaccaaggggatggtggtaaaccattcatgaggaatccgccccggtgatccaatacctcccgccaggcccacctccgacactgggaatcacatttcaacgtgagatttcagaagacacacatccaaaccgtatcaagcatacccagagattttccgtatcttaaggccatttatgccaaataacataagctgatcacaagagtaaacgccaccatattcacagcgcagggtattttacaggacatgtacacaggatggggaggactgggctgaaatcctggaggccatcttagaatctgcctatcatagttgccggggttgagaaacaagaaagccagtgtggctggagcacagtgaacaagggggtgcagggaggagagacagcagagtatcacaggtggagagacacatatataccacctagcctgatgggaggctgaaggcctgaaagtcaccttgtgcaattttggttcctgaggaaggggagggtcatgcgagttcctccatggattcacttgcactaaaaagcacccctggggtgggacccagtcgatgatggaagtcaatggaatgcgtgttgaagagtagcccttggagaaccagtgggctgctgggcataggtgataagttctgctctgtgcatttggcccagtaggcacaatgccaagaagccatgggctcgtcaaggatccatggagaagtctgaaatctaaaaaagctggctggaaaaatattttaaaactttccaaacttgaaagacttagtgaagtgcctaccaagtagcattgtgtcaatgggtcatgagcaacgcccaagtctcctaatagttacatatgcgttctatgtgatgtgactgcattttgtttccattttaacattattgtatttattttttcgtagtatcatgtgcaatgtacaaataaaaaggaacaaaaggagatgccctgaaaagcaagtctctctcccacctctgacccccagccacgcaccctctccccactgaggcgtttcctgtactcaaaggtattttgtgcacatgctaatgaacatgtatatatacacctgactcctccccttttcacaatggtggctgttctgcctgctttttttcttttttcttggcagtacatcttggagatgtttcctattggctcrtgtggagctgcccattcttttgtacagcagcagagcagtctgttatttggatgaactgtcatttattaactagacatgcccacaaccctgccacctcttttcctaacacactgggcagtcttggcctctcccaggctccctgggagggtcactactttcacaaagatgatgcccacttctgcccatggaatctggcttgcccagtgactacctgacagggttgagtgacaccacccagaagtgcaaagaaggcagtaaagaagaaagaagaatttattaggtgcccgaggaagggctcaatcctgccagtctaaacattgttgtacatacct

SEQ ID NO: 33931 - DNA, 723 bp, Homo sapiens
agaactgagcacaaaactccagaaataggtgaatggagctgagcagaatgaaactgtcacctcccttaccgtagataccggacttctaattacatgaccagacatttaataagcttgttttgtttccctgggtggcatatatcaagctactagcaagcgttttgttttcatggtcctctacccacatattgttgcaaaacctcactttactgcccttctcccttaatttcacgcttataatagtattgcccctctctcacttcccaggaatgccaagycgattacagctcaagagcccaatcttgactggtccgtagcctggaacatggtgctgagatagatgctgtaactgagtttgggctcactgagaaagactgctgcaattgattaacgatgtctgccaagctgtgtaaagtgaagtaatgtcattccctatcacaagtcctaacctggggtccatggaaagaatttagttggtctgtcattaacttggatagggaaagtattacatctttaatttcattaacctctatctgaaacttatcattccttcaattatgaatgcaggcaacagaccacagtggtattagcaggacctgtgactttgtcaccaatagaaatcacagattttttaaaatgacattacagacgttccgcatatcttgaaatataatttacatgcactgtgacttggaaatgataagttatttgctaagtactcat

SEQ ID NO: 33932 - DNA, 723 bp, Homo sapiens
agaactgagcacaaaactccagaaataggtgaatggagctgagcagaatgaaactgtcacctcccttaccgtagataccggacttctaattacatgaccagacatttaataagcttgttttgtttccctgggtggcatatatcaagctactagcaagcgttttgttttcatggtcctctacccacatattgttgcaaaacctcactttactgcccttctcccttaatttcacgcttataatagtattgcccctctctcacttcccaggaatgccaagtcgattacagctcaagagcccaatcttgactggtccgtagcctggaacatggtgctgagatagatgctgtaactgagtttgggctcastgagaaagactgctgcaattgattaacgatgtctgccaagctgtgtaaagtgaagtaatgtcattccctatcacaagtcctaacctggggtccatggaaagaatttagttggtctgtcattaacttggatagggaaagtattacatctttaatttcattaacctctatctgaaacttatcattccttcaattatgaatgcaggcaacagaccacagtggtattagcaggacctgtgactttgtcaccaatagaaatcacagattttttaaaatgacattacagacgttccgcatatcttgaaatataatttacatgcactgtgacttggaaatgataagttatttgctaagtactcat

SEQ ID NO: 33933 - DNA, 1454 bp, Homo sapiens
gaatgactggggctggataggaatgccttcgtgtttcccaagacccctgggcctgctccacaaagtttgaagggtgggtacacaccaacccaggcaagttgctcccccaaacccatgactgactaatctgatatgacaaaagcccatgatggatttggtatatgttaattcacaatgccctttcctccagaatttaactataagttaatacacaccggaaaccacgcgcatacacgctccttaatgggcttaggtattagcgagtcctaacgatgcatacaaatgtgctctgcgctctgtagaaccctcaagatttatgtgccttgagctctctgaagctgtaaacaaggagaaaaaaaaaaagagaaagcgaaagcgactggggggaagagacagaggcctgactcgcccctccaggttgtggagagaagggattctttatgtattttcctttccttgcaagctcggtgcgtgtgggttttggcgttggtctgggggtggtgttctgcctgaatgctggtgtgcgtgggcagtgtgttgtttgagtgctgcggtaggatgcctgcctcttcggattgctgtgcaggggcctgaacacagcaggcatttgtgagcatatatgcatgagtgtgcactgtgttagggtgtgtgtgtgtgtatgtgcgtgtgagaaagagagagagacagagagggagaggcaggcttccccctgggccaggctgctgtcccctgaacagtggtgaacaaatctctaacaacaatcataataacaataaataatgaataataataataaaacagtagttaacagtccctccataacagaataacaataaaatgcaagaggaaatattttgaggtggagayagaaggagtcaggatcacagcatctgagggggagataggaaaggaagggaggaagaaatcttaatatgctcttggtggggctggggttgggaacccctttcccagacaagggacggaagaggggaaggagagccagagaccactctttattgctttttttctcaggcttctgctttgtgtgatcagagaagggatcccacatatgggaatggttagtggcttttgggactctccaggagcctctgttttaagaatgaggccaaatgtgcaggctcaggccaagcggcagagatgaatgaggtgatgaccacagccttgatccggcaggagctcagagatgcccgggaagacggggggcccgaacggaagcagaaaaacacttatggccgctgggaagttgggagagcgaggctggggctctggcaggcccagggaaagttccctgtctaggctctttattaaaaaatttaaaaggaggagttgaggcaccttgaatattccttcgcgagtttggagactagccgatttttcatgaagcaagcaaagaccgcggtcccggatcctgcaacttctacctcattttctcc

SEQ ID NO: 33934 - DNA, 1454 bp, Homo sapiens
gaatgactggggctggataggaatgccttcgtgtttcccaagacccctgggcctgctccacaaagtttgaagggtgggtacacaccaacccaggcaagttgctcccccaaacccatgactgactaatctgatatgacaaaagcccatgatggatttggtatatgttaattcacaatgccctttcctccagaatttaactataagttaatacacaccggaaaccacgcgcatacacgctccttaatgggcttaggtattagcgagtcctaacgatgcatacaaatgtgctctgcgctctgtagaaccctcaagatttatgtgccttgagctctctgaagctgtaaacaaggagaaaaaaaaaaagagaaagcgaaagcgactggggggaagagacagaggcctgactcgcccctccaggttgtggagagaagggattctttatgtattttcctttccttgcaagctcggtgcgtgtgggttttggcgttggtctgggggtggtgttctgcctgaatgctggtgtgcgtgggcagtgtgttgtttgagtgctgcggtaggatgcctgcctcttcggattgctgtgcaggggcctgaacacagcaggcatttgtgagcatatatgcatgagtgtgcactgtgttagggtgtgtgtgtgtgtatgtgcgtgtgagaaagagagagagacagagagggagaggcaggcttccccctgggccaggctgctgtcccctgaacagtggtgaacaaatctctaacaacaatcataataacaataaataatgaataataataataaaacagtagttaacagtccctccataacagaataacaataaaatgcaagaggaaatattttgaggtggagacagaaggagtcaggatcacagcatctgagggggagataggaaaggaagggaggaagaaatcttaatatgctcttggtggggctggggttgggaacccctttcccagacaagggacggaagaggggaaggagagccagagrccactctttattgctttttttctcaggcttctgctttgtgtgatcagagaagggatcccacatatgggaatggttagtggcttttgggactctccaggagcctctgttttaagaatgaggccaaatgtgcaggctcaggccaagcggcagagatgaatgaggtgatgaccacagccttgatccggcaggagctcagagatgcccgggaagacggggggcccgaacggaagcagaaaaacacttatggccgctgggaagttgggagagcgaggctggggctctggcaggcccagggaaagttccctgtctaggctctttattaaaaaatttaaaaggaggagttgaggcaccttgaatattccttcgcgagtttggagactagccgatttttcatgaagcaagcaaagaccgcggtcccggatcctgcaacttctacctcattttctcc

SEQ ID NO: 33935 - DNA, 1454 bp, Homo sapiens
gaatgactggggctggataggaatgccttcgtgtttcccaagacccctgggcctgctccacaaagtttgaagggtgggtacacaccaacccaggcaagttgctcccccaaacccatgactgactaatctgatatgacaaaagcccatgatggatttggtatatgttaattcacaatgccctttcctccagaatttaactataagttaatacacaccggaaaccacgcgcatacacgctccttaatgggcttaggtattagcgagtcctaacgatgcatacaaatgtgctctgcgctctgtagaaccctcaagatttatgtgccttgagctctctgaagctgtaaacaaggagaaaaaaaaaaagagaaagcgaaagcgactggggggaagagacagaggcctgactcgcccctccaggttgtggagagaagggattctttatgtattttcctttccttgcaagctcggtgcgtgtgggttttggcgttggtctgggggtggtgttctgcctgaatgctggtgtgcgtgggcagtgtgttgtttgagtgctgcggtaggatgcctgcctcttcggattgctgtgcaggggcctgaacacagcaggcatttgtgagcatatatgcatgagtgtgcactgtgttagggtgtgtgtgtgtgtatgtgcgtgtgagaaagagagagagacagagagggagaggcaggcttccccctgggccaggctgctgtcccctgaacagtggtgaacaaatctctaacaacaatcataataacaataaataatgaataataataataaaacagtagttaacagtccctccataacagaataacaataaaatgcaagaggaaatattttgaggtggagacagaaggagtcaggatcacagcatctgagggggagataggaaaggaagggaggaagaaatcttaatatgctcttggtggggctggggttgggaacccctttcccagacaagggacggaagaggggaaggagagccagagaccactctttattgmtttttttctcaggcttctgctttgtgtgatcagagaagggatcccacatatgggaatggttagtggcttttgggactctccaggagcctctgttttaagaatgaggccaaatgtgcaggctcaggccaagcggcagagatgaatgaggtgatgaccacagccttgatccggcaggagctcagagatgcccgggaagacggggggcccgaacggaagcagaaaaacacttatggccgctgggaagttgggagagcgaggctggggctctggcaggcccagggaaagttccctgtctaggctctttattaaaaaatttaaaaggaggagttgaggcaccttgaatattccttcgcgagtttggagactagccgatttttcatgaagcaagcaaagaccgcggtcccggatcctgcaacttctacctcattttctcc

SEQ ID NO: 33936 - DNA, 1454 bp, Homo sapiens
gaatgactggggctggataggaatgccttcgtgtttcccaagacccctgggcctgctccacaaagtttgaagggtgggtacacaccaacccaggcaagttgctcccccaaacccatgactgactaatctgatatgacaaaagcccatgatggatttggtatatgttaattcacaatgccctttcctccagaatttaactataagttaatacacaccggaaaccacgcgcatacacgctccttaatgggcttaggtattagcgagtcctaacgatgcatacaaatgtgctctgcgctctgtagaaccctcaagatttatgtgccttgagctctctgaagctgtaaacaaggagaaaaaaaaaaagagaaagcgaaagcgactggggggaagagacagaggcctgactcgcccctccaggttgtggagagaagggattctttatgtattttcctttccttgcaagctcggtgcgtgtgggttttggcgttggtctgggggtggtgttctgcctgaatgctggtgtgcgtgggcagtgtgttgtttgagtgctgcggtaggatgcctgcctcttcggattgctgtgcaggggcctgaacacagcaggcatttgtgagcatatatgcatgagtgtgcactgtgttagggtgtgtgtgtgtgtatgtgcgtgtgagaaagagagagagacagagagggagaggcaggcttccccctgggccaggctgctgtcccctgaacagtggtgaacaaatctctaacaacaatcataataacaataaataatgaataataataataaaacagtagttaacagtccctccataacagaataacaataaaatgcaagaggaaatattttgaggtggagacagaaggagtcaggatcacagcatctgagggggagataggaaaggaagggaggaagaaatcttaatatgctcttggtggggctggggttgggaacccctttcccagacaagggacggaagaggggaaggagagccagagaccactctttattgctttttttctcaggcttctgctttgtgtgatcagrgaagggatcccacatatgggaatggttagtggcttttgggactctccaggagcctctgttttaagaatgaggccaaatgtgcaggctcaggccaagcggcagagatgaatgaggtgatgaccacagccttgatccggcaggagctcagagatgcccgggaagacggggggcccgaacggaagcagaaaaacacttatggccgctgggaagttgggagagcgaggctggggctctggcaggcccagggaaagttccctgtctaggctctttattaaaaaatttaaaaggaggagttgaggcaccttgaatattccttcgcgagtttggagactagccgatttttcatgaagcaagcaaagaccgcggtcccggatcctgcaacttctacctcattttctcc

SEQ ID NO: 33937 - DNA, 505 bp, Homo sapiens
gtacttccactttatagataaggaaactgaggcaggagtggatgatgcactcagcgtcagatcagggactgagccaagactccaatcatgggtttgtttcttggccagaaggtctgacaaccaaggcgacctccaagataggtccacctacaaaatttggagcgccccttgcaagactaaaatgcagagtctcttcttcaaaattaagaaatcaagatggtgccaggcgcgatggctcatgcctgtaatcccagcactttgggaggcctaggcgggtggatctcctgaggctggagtttgagaccagcctggccaacatggtgaaatcccgtcttcactaaaaatacaaaattagccaggcgtggtggcgcatgcctgtaattccagctactcgggaggctgacacaggagaatcgcttgaacctgggaggcggaggttgtggtgagccgagatcatgccattgcactccaatctaagcaacatgagcrcaactccgtctcaaaa

SEQ ID NO: 33938 - DNA, 1210 bp, Homo sapiens
ctgtattgtatgggcttctgaccaaagggtctacaccatgaccttgctctgtgatcccaccattatcttgggatatctgggctgtaaccaatgggccgctggacagaggagaggatcagaagggttgggatataaaaacaaatcacatcccttccctgattttaaacctgatatgggtgcccacttctctgtggagggtatctccctcatggcagggaatccaaattccaatacaaattggtgacaatctccctttcccattttttcaccaatgtctagtgtagtggccatcattggctgcccgcccagccgtgtccccygctcatccttcctaggggaacctctggggagtccttgccccctttatataggaacctgtgcttgggcttgggatgatgagacttgaggctcctacacctttggtccccagggttggtccaggaaacaggactcatgtatctcctatcactgcttgccattggctactttaagtatctatctcccctgctggactatgacctcctagaggccagggctcaatatgatccctttctgggctctgcaggagggatctgttgggcagaagaagggcacaggtgctggaggtaggctcttcttgcatacctcgtagggacttccatctcacacggcctccctggttgcccatcagcctttcccaccttgggcaggattctgatccatggctttctttagtctcagagcaaaaagctctctcaatgtcactctgaagctcgggcacacttactctgtgttcactctgttttttttttttttttaaagcgcccttcacatgatctagctctcaggcaaattggaaaaaaagaaaagaaaaagccttaattaaaggaaagtaaggcacagttttcatgcataataagaaatggctttttgagccagcatgataaaatcctaccactctggggttgccctccagaaagtgaggattaagaaagccagggttttatttaagggcagttggagaaataatggcagcaaactcttagaaagcactcactgtgtgccagatattcctacatgctttacaaataagggaaagcagcgattcccttgaatcctgctggccaaaagctgagaagagtgaagagaaaaacatgggtggagaaaaatgaccaaggacatcccaaggtatggcatagtctggagggtcgtgaaagccaactggtgctgt

SEQ ID NO: 33939 - DNA, 635 bp, Homo sapiens
tgacttttagtacatgaaagatagtcagcctcactagtaaaagaaatgcaaacaaaaactacaccgagagctctttggagattcttattgggaaagtgggaccaccttatatagcagacgtcctcctgggggaccaccgctgagygacctgcagctgcagacgctttcagcacacactgtgcttcccacatctgaggtctgcttctctctgcttctcagcttctcacggatgtggaaagaacaatgttggaaggtgggagctgaagaggtctgggaagttgtgtatggagggcctatggagtggatacaaagctcaagggtcgagccaggtgcgggggggtcacacctgtaatcccagcacttggggaggctgaggtaggtggattgcctgaggtcaggagtttgagaccagcctggccaacatagtgaaaccccgtctttactaaaaatacaaaaaattagctgggcgtagtggcgggtgcctgtagtcccacccactagggaggctgaggcaggagaatcacttgaacctgggaggcggaggttgcagtgagccaagatcgcaccattgcacttcagcctgggcaacaagagcaaaactctgtctcaaaaaaaaaaaaaaaaaaagctcgagg

SEQ ID NO: 33940 - DNA, 554 bp, Homo sapiens
gagaatgatagcttggttagcgtggacccattgttgttttaaaaattcacacatgccctggtttacacaataggtatgttttcccaaagactgtgtgaaccaaactttaatatattgatttttagaagttcactgaagagattagtatgttgatgaatcttgtaatgtcaagaatgcttttctaatacaattaatacctttgtaatttatcttctacagacataytttacatattaaatttttaaatcaagttatatctaaagagtatttttgtaaagagtcaggaaatgtgcctggatcttaaactacactgttattttctattttaaaaaagaaaatgggagagtctaagaaattcctttgaaaattgttagacatcttttggagtcggtaaaattaagtttattgtttttatttcatttgcaaggttctccacttagaagaaattggagggtgttttggaaacaattttgatgatatcaaataaaagatttccccctccccaacataactcaatatttttgctgttcttggaagtccaaatagaaagtttg

SEQ ID NO: 33941 - DNA, 806 bp, Homo sapiens
atgttgttgtcatccctttgtatggctggagaggaacaagatgctcagggattttgggtgccattcttgagttatattctagggagctttcagaggtggctgcctgggcataatagaggaaagctgtatccttgccaaatgtctcggggaagcattttcttcaaactttgtactctttaaatcaatgatgatacttaatcttgtttttaaaaagaagaaaataagatcacctttaattctaaccttcacattaccaaaatggttttagtcttttttctatgtagtccttttttcctatggctacatatgtgtatatttacacacatatatatgtaaatatacctatgtgtatatttacacacatatatatgtgtaaatatacctatgtgtatatttacacayatatatgtaaatatacctatgtgtatatttacacatatatatgtaaatatacctatgtgtatgtttacacatatatatgtgtaaatatacctatgtgtatgtttacacatatatatgtgtaaatatacctatgtgtatgtttacacatatatatgtgtaaatatacctatgtgtatgtttacacatatatgtgtaaatatacctatgtgtatgtttacacatatatgtgtaaatatacctgtgtgtatgtttacacatatatatgtgtaaatatacctatgtgtatgtttacacatatatatgtgtaaatatacctatgtgtgtatttacacatatatatgtaaatatacctatgtgtgtatttacgaaatgggatcacaacatactgatttataacctaagtt

SEQ ID NO: 33942 - DNA, 617 bp, Homo sapiens
atttgtcaaaattcaccataggggtgaagagcactgatgtctgccacttatttgaaaagcatcaaaaaataagatggattgatggatgtatacaagcgtaggtagacatatacataaaacaaatacagcagaatattaattgcagaatctatgtggcgagtatatagttcagcccaggtctgagtcatagacagatggatgtcatagatagatagtcatagatagataccgaaatactgattggggaagagatagtaaagaagtcatgggaaaaggatacaaaaaaagagagaaaagtggccgggcacagtggctcatgcctgtaatcccagcactttggaaggccaaggtgggcggatcaggaggtcaggagaacgagaccatcctggctaacacggtkaaaccccatctctactaaaaaaaaaaagaaaaaatacaaaaaattagctgggcacggtggcgggcacctgtggtcccagctacttgggaggctgaggcaggagaatggcgtgaacctgggaggcggagcttgcagtgagctgagatcaggccactgcactccagcctgggcgacagagcgagactccgtctcaaaaaaaaaaagagagagaaaagtt

SEQ ID NO: 33943 - DNA, 526 bp, Homo sapiens
ccttgctaagtaatctcatgcaaaggcctctttgtgacccagcctgttcttcactttgtactcttttatgctattgagaaccagatccagagaggacgatggggagtaaccccaattagcacagccctctggaggcttctcagctcctcgtagtgtcattcgactctgtgctgaggcagaggcacagacaccacagatgcagaaacatccatctgaccttcccctccaaccctatcccctcccaccgagagccagcttttaaatcacatgtgataactatttaaatgacaggcacagcccacatttctgccagtgatgtaatgctgactctcttacagtatttatcttaaaacaacccaaccacatatggctccatgccgcaaactcaagttctctgtgagaacattgtgaactaacctaataaatttaagccttttctgggaaaacttggaatccaatgcagccaaaatgtggaatttacatctcaaagcaagaaagcagctggatttttttttttaaggwaaca

SEQ ID NO: 33944 - DNA, 587 bp, Homo sapiens
tcgagatatgtgggggcacatctagagctcaaaagaaaaaactgagtagaataaacagaactgactctgggaaaaaagctacttcagcaaacagaaatgagtattttaaaagttcagttagtatgtatcttcagagaacatcaagaaaacataatacccctaaaaacaaaataagaaaacagaaacaaaaaraaaaaactgaatactatgaaaaagcagaaattatgataaaaaatgagttcatggatattaaaaattgcttgccaaaattaaaaacttagtagaaaggttgggagattaataatttcaagtttaataattgccccatggggttaaaaaaacaaatggaaaaagaatggaaaataccgagaaagtttaagaaaaatgacaacctgggaggattatcaactggtctctaggctttccagaaagagagaagagaaaaataaatggtgagaaaatattgaaaatagcaataatagaagaagagagcttcctcaagctaaagaaaaggcaagggaatttagatttaagaaacctagattaccagaaaggatgaaaatgggacacatcttcatgaagtttga

SEQ ID NO: 33945 - DNA, 587 bp, Homo sapiens
tcgagatatgtgggggcacatctagagctcaaaagaaaaaactgagtagaataaacagaactgactctgggaaaaaagctacttcagcaaacagaaatgagtattttaaaagttcagttagtatgtatcttcagagaacatcaagaaaacataatacccctaaaaacaaaataagaaaacagaaacaaaaaaaaaaaactgaatactatgaaaaagcagaaattatgataaaaaatgagttcatggatattaaaaattgcttgccaaaattaaaaacttagtagaaaggttgggagattaataatttcaagtttaataattgccccatggggttaaaaaaacaaatggaaaaagaatggaaaataccgagaaagtttaagaaaaatgacaacctgggaggattatcaactggtctcyaggctttccagaaagagagaagagaaaaataaatggtgagaaaatattgaaaatagcaataatagaagaagagagcttcctcaagctaaagaaaaggcaagggaatttagatttaagaaacctagattaccagaaaggatgaaaatgggacacatcttcatgaagtttga

SEQ ID NO: 33946 - DNA, 621 bp, Homo sapiens
atagcccttgctaaattagccaacttccccagttaattctggactcaacaactgcccagtctgggaaatgagaaaaggggaaatttaaaacaaggataaagccaaatagcacccaactgaagggttcaattgtcaagaaaattaaaattaaggaagaagagtttattacagagatggagggaagggggcgggagtaccatacacagttgtggattactcagggatgttggaatggaaaccaaaatctttcttggtttgaaaagattatcagtccttccctctgtcttggcctgagggaccaataaaaggatcttccctttcatctttgaccattttgaaggatgtacaaatagacgctttgtctaaaatggaagtgaataagagactctctaaatatttattatgcaacagattaaaatgattgtagacaaatttctcctgtcaacaatgattaggttacatagcaagattttamaatggacctcaggcatcgcactgtatattagctctaagcaaaatgaaaaactctaaattatactttaaatcaaccaagaacgtattctgttcctattcagaatcatcagcttacttcatgcattttatctgacagaaggacaaatc

SEQ ID NO: 33947 - DNA, 621 bp, Homo sapiens
atagcccttgctaaattagccaacttccccagttaattctggactcaacaactgcccagtctgggaaatgagaaaaggggaaatttaaaacaaggataaagccaaatagcacccaactgaagggttcaattgtcaagaaaattaaaattaaggaagaagagtttattacagagatggagggaagggggcgggagtaccatacacagttgtggattactcagggatgttggaatggaaaccaaaatctttcttggtttgaaaagattatcagtccttccctctgtcttggcctgagggaccaataaaaggatcttccctttcatctttgaccattttgaaggatgtacaaatagacgctttgtctaaaatggaagtgaataagagactctctaaatatttattatgcaacagattaaaatgattgtagacaaatttctcctgtcaacaatgattaggttacatagcaagattttacaatggacctcaggcatcgcactgtatattagctctaagcaaaatgaaaaactctaaattatactttaaatcaaccaagaacgtrttctgttcctattcagaatcatcagcttacttcatgcattttatctgacagaaggacaaatc

SEQ ID NO: 33948 - DNA, 776 bp, Homo sapiens
atatttccaagggcacatgccctgaggctcacctagtgatgtgttccatgcattcttgctagggaccttccaaatctgtccataccatctctaagcactgagaaagggctacttcccatgtagtttagtaaagattctctatctgctactttaaaaagctgaggctcctcaattgtttcttgaatctgggccccctctgggaaagttataccactgaactccctgaaactatgtttttcctctgttagatttcttggggtctcaaccttcctgatataggaagaaaaaaaagatagtttcctcttcaagaggccacagtgagctaagagcaggtgtacaactggagcacgcagccacaatataggctgctcctgcacctgccaaagtctaaaggattgttaggtttggtcttgggctgagcccaaagcctgtctctttggccccaaatacttgtccttgtacccatttctcaaggtttcaggcctttgcatcaatatgttgggggtttaaggtaacaataaatcatgtcttttccccccatttctttctgagtatgaaaccaactgggagacaaccacaggattcaaagagaacttaaaatrtcagcttgattattacagttatgcttgaggatgatgacttgaccaattaggcttcctaatacttcatcctcatgataggcagggctcttaaggctccccttgctcagggcagagctggctctttaggtggaccaggtggaggagaggagtcctacagacccataacctgggcag

SEQ ID NO: 33949 - DNA, 578 bp, Homo sapiens
aatatgcttctaaatccacctaaaccaaaccaacgaaactgtgagggaaagattatttgcatcctcacttatttgtgggatctaaaaatctaaacaattgaactcaagaagatagagagtacagggatggttaccagaggctgggaaaggcagtgggaaattggggaggtggggatggttgatgggcacaaaaaaatagaacaagacctagtatttgatagcacgacagggtgactatagtcaataattgtgcattttaagataactcaattatttatttatttattttatttaaataattactttaaataattttaaataattgagttatttttaaatgtacaattaaattgtacatttaatttaaaatgcacaatawttaattgtacatactgttttattttaaaacagtataactggattatttgtaacacaaaggataagtgcttgaggggatggataccccattttccatgttgtgattatgacagatttcatgcctgtatcaaaacatctcatatatcccataaatacatatacctactatatacccacaaaaattgtttttaaaaatttta

SEQ ID NO: 33950 - DNA, 1168 bp, Homo sapiens
acccagttcgagcttcctggttgctttgtttacctactcaagcctcagcgatggcaggcgcccctcccccagactcactggcacattgcagttcgatctcagactgctgtgctagcaatgagtgaggctctctgggcgtgggaccctccgagccaggcgcaggatataatttcctggtgtgccatttgctaagaccattggaaaagcgcagtattagggttggagtgacccgattttccaggtgccttctgtcacagctttgcttggctaggaaagggaattccctgaccccttttgcttcccaggtgaggtgatgcytcaccgtgcttcagctcatgctcggtgcactgcccccactatcctgcacccactgtccgacaagccccagtgagatgaacccagtacctcagttggaaatgcggaaatcacccatcctctgcgtcattcacgctgggagctgtagactggagctgttcctatttggccatcttggaaccgccgtgtaaatttttttatagagagttggtcattattaagtagtctattgagattttcccttacaagttcttccattgcatttgtgtctggaatccttgaccattccaaattatttcaatgttaatacactttctactagtttaaataaaatatcatttttacgtttaactatttaatatatatggaatttatttttattttgatagaaagtgagaatctaaatagtttcttcccaacagttaatcttatcaacaccattaaataattctttccttttggattgtgatgtaacctttggcatatactaaatttttatccatactgaagtttgtttctgtaccctctttgtagttctgttgcttctggcatgtttatcaggcctatataccattttagcattacaacatattttactagttagtagagtaagtctccctctatcatacttctttgttgaactgttctagtctcaattattggttcttccagagaaactttagagtgatgctgtcagttttaaaaaatttgatatttttattagaactgtatcaaatctataaattgagaaagataccttaataagattttatctttacatttaagaatttatgtctctatttattgatatatgcttttgttcacattaaaagtttaataattttattcatgt

SEQ ID NO: 33951 - DNA, 1168 bp, Homo sapiens
acccagttcgagcttcctggttgctttgtttacctactcaagcctcagcgatggcaggcgcccctcccccagactcactggcacattgcagttcgatctcagactgctgtgctagcaatgagtgaggctctctgggcgtgggaccctccgagccaggcgcaggatataatttcctggtgtgccatttgctaagaccattggaaaagcgcagtattagggttggagtgacccgattttccaggtgccttctgtcacagctttgcttggctaggaaagggaattccctgaccccttttgcttcccaggtgaggtgatgcttcaccgtgcttcagctcatgctcggtgcrctgcccccactatcctgcacccactgtccgacaagccccagtgagatgaacccagtacctcagttggaaatgcggaaatcacccatcctctgcgtcattcacgctgggagctgtagactggagctgttcctatttggccatcttggaaccgccgtgtaaatttttttatagagagttggtcattattaagtagtctattgagattttcccttacaagttcttccattgcatttgtgtctggaatccttgaccattccaaattatttcaatgttaatacactttctactagtttaaataaaatatcatttttacgtttaactatttaatatatatggaatttatttttattttgatagaaagtgagaatctaaatagtttcttcccaacagttaatcttatcaacaccattaaataattctttccttttggattgtgatgtaacctttggcatatactaaatttttatccatactgaagtttgtttctgtaccctctttgtagttctgttgcttctggcatgtttatcaggcctatataccattttagcattacaacatattttactagttagtagagtaagtctccctctatcatacttctttgttgaactgttctagtctcaattattggttcttccagagaaactttagagtgatgctgtcagttttaaaaaatttgatatttttattagaactgtatcaaatctataaattgagaaagataccttaataagattttatctttacatttaagaatttatgtctctatttattgatatatgcttttgttcacattaaaagtttaataattttattcatgt

SEQ ID NO: 33952 - DNA, 1168 bp, Homo sapiens
acccagttcgagcttcctggttgctttgtttacctactcaagcctcagcgatggcaggcgcccctcccccagactcactggcacattgcagttcgatctcagactgctgtgctagcaatgagtgaggctctctgggcgtgggaccctccgagccaggcgcaggatataatttcctggtgtgccatttgctaagaccattggaaaagcgcagtattagggttggagtgacccgattttccaggtgccttctgtcacagctttgcttggctaggaaagggaattccctgaccccttttgcttcccaggtgaggtgatgcttcaccgtgcttcagctcatgctcggtgcactgcccccactatcctgcacccactgtccgacaagccccagtgagatgaacccagtacctcagttggaaatgcggaaatcacccatcctctgcgtcattcacgctgggagctgtasactggagctgttcctatttggccatcttggaaccgccgtgtaaatttttttatagagagttggtcattattaagtagtctattgagattttcccttacaagttcttccattgcatttgtgtctggaatccttgaccattccaaattatttcaatgttaatacactttctactagtttaaataaaatatcatttttacgtttaactatttaatatatatggaatttatttttattttgatagaaagtgagaatctaaatagtttcttcccaacagttaatcttatcaacaccattaaataattctttccttttggattgtgatgtaacctttggcatatactaaatttttatccatactgaagtttgtttctgtaccctctttgtagttctgttgcttctggcatgtttatcaggcctatataccattttagcattacaacatattttactagttagtagagtaagtctccctctatcatacttctttgttgaactgttctagtctcaattattggttcttccagagaaactttagagtgatgctgtcagttttaaaaaatttgatatttttattagaactgtatcaaatctataaattgagaaagataccttaataagattttatctttacatttaagaatttatgtctctatttattgatatatgcttttgttcacattaaaagtttaataattttattcatgt

SEQ ID NO: 33953 - DNA, 550 bp, Homo sapiens
gttttcaaataaataataataaaactgataaaatgtattatttattaaaaagaaattaaactttagcaatgaatgtaagtttttcaagtgtaaacatgaaaaccagaaactttttgcagttctacattcatatatgtattaatgaatggtttccttttctccaggaatttattaaaaacaaagaaacatggccatttgttaattattccaatgctttttaaaataaatcatttttaagtaatccaaactctttaatatgtcttttttttttttttttttaagacagtctcactctgttgcccaggctgaagtgcagcagcatgatcttgactcaaggcaacctctgcctctcgggttcaagcgattctcccgcctcagtctcctgagtagctgggattacaggcgtgcaccatcatacccrgctaatttttgtatttttattagagacagggtttcaccatgttggccaggctggtcttgaactcctgacctcaagtgatccacccacctcggcttcccaaagtgctgggattacagaaatgagccactg

SEQ ID NO: 33954 - DNA, 588 bp, Homo sapiens
ttttattattatatatcatatccagggttgtccctgttcttcatggtcactcaggtatgagactgacagaggagtctctrtcttacgcattgtctgtcatgtaccagttggaaaagagagtgctggattattggcaattaaatactcaatttgtaagttacatctgctcacaattaattgaccacaattagtcatgtgacttcacacaaccgcgttggacctaaatgtgcaatcttatcatgtatctaaaacactgagagccaggaaatatgatgaccaaaccactgtgaagctaaggatactttccttgtgaagattgagcatggaagatagtggcagatagaccaccagatgtgtccaacaacaaagcaaattaagtcactggaaaagagaaaatatatattaataaacattaataaatatatttattatagtcttatttccatttatattgtgaaagaattttatagtttaagtaacatctcttgcctttctataaattagcatattgtgaagtttttattaaaggtaaacgtccttgtaaagacaagtgtgcaattgaacactcgtgagacttctgagtacact

SEQ ID NO: 33955 - DNA, 588 bp, Homo sapiens
ttttattattatatatcatatccagggttgtccctgttcttcatggtcactcaggtatgagactgacagaggagtctctgtcttamgcattgtctgtcatgtaccagttggaaaagagagtgctggattattggcaattaaatactcaatttgtaagttacatctgctcacaattaattgaccacaattagtcatgtgacttcacacaaccgcgttggacctaaatgtgcaatcttatcatgtatctaaaacactgagagccaggaaatatgatgaccaaaccactgtgaagctaaggatactttccttgtgaagattgagcatggaagatagtggcagatagaccaccagatgtgtccaacaacaaagcaaattaagtcactggaaaagagaaaatatatattaataaacattaataaatatatttattatagtcttatttccatttatattgtgaaagaattttatagtttaagtaacatctcttgcctttctataaattagcatattgtgaagtttttattaaaggtaaacgtccttgtaaagacaagtgtgcaattgaacactcgtgagacttctgagtacact

SEQ ID NO: 33956 - DNA, 1065 bp, Homo sapiens
gaagcaasgggcaggtcagcaagggaggagccgaagcaaggggcaggtcagcaagggaggagccgaagcaaggggcaggtcagcaagggaggagccactgcaaagaaatgagggcttgctggggatgttataggacggcgcctgtgctgtgtgctggagagggccacaggcagtactgataacgccaaggttgcagtcagctaacatccattctcctatcagccaagggtctggcaatagccgggcacaggaagattgtgagttatttcttcaggagggctgtgtgtcctggacagtgaagaagggcagacttaaagcttctttgcttcttctttttgccttccctctgtcctgccagcccgactccttttccctcattaggattccacaccccccacccccacatgtcagggcacagccgggctgaccagctccacccgctctgctgggccctcactgagtctcagtcttctcatgtgtgacacaggcaaggtgaacatggtggacatgtgtcaggcgggcgcctgggcctagaggaggaaggagcagggccattgtgggggcgcaggctgggcctggctcctggggcctgggcccagctcctggggcctgggcccagaggaggaaggagcagggccggtgtgggggcgcaggctgggcctggctcctggggcctggacctagaggaggaaggagcagggccggtgtgggggcgcaggctgggcctggctcctggggcctgggcccagaggaggaaggagcagggccggtgtgggggcgcaggctgggcctggctcctggggcctggacctagaggaggaaggagcagggccggtgtggaggtgcaggctgggcctggctcctggggcaataattgctgtgggcggggagtgccagggctgggccatggccccctaggctctctgtgcacagccccccagtaggcccgtgggacttgcaggctctcagcaaatctcccgtcagaagctggtggctgcaggtttgacaccccgtcgtcccatggagttagcgagcacccattctgcacctgctgtgtacgcggca

SEQ ID NO: 33957 - DNA, 1065 bp, Homo sapiens
gaagcaaggggcaggtcagcaagggaggagccgaagcaaggggcaggtcagcaagggaggagccgaagcaaggggcaggtcagcaagggaggagccactgcaaagaaatgagggcttgctggggatgttataggacggcgcctgtgctgtgtgctggagagggccacaggcagtactgataacgccaaggttgcagtcagctaacatccattctcctatcagccaagggtctggcratagccgggcacaggaagattgtgagttatttcttcaggagggctgtgtgtcctggacagtgaagaagggcagacttaaagcttctttgcttcttctttttgccttccctctgtcctgccagcccgactccttttccctcattaggattccacaccccccacccccacatgtcagggcacagccgggctgaccagctccacccgctctgctgggccctcactgagtctcagtcttctcatgtgtgacacaggcaaggtgaacatggtggacatgtgtcaggcgggcgcctgggcctagaggaggaaggagcagggccattgtgggggcgcaggctgggcctggctcctggggcctgggcccagctcctggggcctgggcccagaggaggaaggagcagggccggtgtgggggcgcaggctgggcctggctcctggggcctggacctagaggaggaaggagcagggccggtgtgggggcgcaggctgggcctggctcctggggcctgggcccagaggaggaaggagcagggccggtgtgggggcgcaggctgggcctggctcctggggcctggacctagaggaggaaggagcagggccggtgtggaggtgcaggctgggcctggctcctggggcaataattgctgtgggcggggagtgccagggctgggccatggccccctaggctctctgtgcacagccccccagtaggcccgtgggacttgcaggctctcagcaaatctcccgtcagaagctggtggctgcaggtttgacaccccgtcgtcccatggagttagcgagcacccattctgcacctgctgtgtacgcggca

SEQ ID NO: 33958 - DNA, 1065 bp, Homo sapiens
gaagcaaggggcaggtcagcaagggaggagccgaagcaaggggcaggtcagcaagggaggagccgaagcaaggggcaggtcagcaagggaggagccactgcaaagaaatgagggcttgctggggatgttataggacggcgcctgtgctgtgtgctggagagggccacaggcagtactgataacgccaaggttgcagtcagctaacatccattctcctatcagccaagggtctggcaatagccgggcacaggaagattgtgagttatttcttcaggagggctgtgtgtcctggacagtgaagaagggcagacttaaagcttctttgcttcttctttttgccttccctctgtcctgccagcccgactccttttccctcattaggattccacaccccccacccccacatgtcagggcacagccgggctgaccagctccacccgctctgctgggccctcactgagtctcagtcttctcatgtgtgacacaggcaaggtgaacatggtggacatgtgtcaggcgggcgcctgggcctagaggaggaaggagcagggccattgtgggggcgcaggctgggcctggctcctggggcctgggcccagctcctggggcctgggcccagaggaggaaggagcagggcyggtgtgggggcgcaggctgggcctggctcctggggcctggacctagaggaggaaggagcagggccggtgtgggggcgcaggctgggcctggctcctggggcctgggcccagaggaggaaggagcagggccggtgtgggggcgcaggctgggcctggctcctggggcctggacctagaggaggaaggagcagggccggtgtggaggtgcaggctgggcctggctcctggggcaataattgctgtgggcggggagtgccagggctgggccatggccccctaggctctctgtgcacagccccccagtaggcccgtgggacttgcaggctctcagcaaatctcccgtcagaagctggtggctgcaggtttgacaccccgtcgtcccatggagttagcgagcacccattctgcacctgctgtgtacgcggca

SEQ ID NO: 33959 - DNA, 551 bp, Homo sapiens
ggggcaataacttaaagaaagcatatatgtcattgaaaatgatgttttccagatataatgccctcccagtgtccagtcagaaatttttaaagcagttgataaaaactcaaaattcactggcactaacttacacttcttacaactttgtctaatcaatatcattttccaagctcttgcactcgtaarttctgacttcatttttttcttccctctttttttttattttctgaagaatgtgaaagagccaagttgggatcatttctcttcctcttcctgtgtttcttcgtaatctttgattgggtgtgtattttaaactaaaccgagttactctgtccgtttgagggcatcagccatatggaaggccgttgaggggattctaggaggttccacatgggtaaatgccttatcagcacattgcgggatttaggaatgtgccaaattccaggatgcatttgggatccaaagagctggccatatcctggattctgcagcatctggaagcccctctccaaacaactctcagccaggcttcttgatttacaaagcaagca

SEQ ID NO: 33960 - DNA, 551 bp, Homo sapiens
ggggcaataacttaaagaaagcatatatgtcattgaaaatgatgttttccagatataatgccctcccagtgtccagtcagaaatttttaaagcagttgataaaaactcaaaattcactggcactaacttacacttcttacaactttgtctaatcaatatcattttccaagctcttgcactcgtaaattctgacttcatttttttcttccctctttttttttattttctgaagaatgtgaaagagccaagttgggatcatttctcttcctcttcctgtgtttcttcgtaatctttgattgggtgtgtattttaaactaaaccgagttactctgtccgtttgagggcatcagccatatggaaggccgttgaggggattctaggaggttccacatgggtaaatgccttatcagcacattgcrggatttaggaatgtgccaaattccaggatgcatttgggatccaaagagctggccatatcctggattctgcagcatctggaagcccctctccaaacaactctcagccaggcttcttgatttacaaagcaagca

SEQ ID NO: 33961 - DNA, 1287 bp, Homo sapiens
tgcatcttatagccactgctccccttttccaagccaccttgaagcccatgagtcgctggcaggacacgtgtacagtaagatagtacagcgaacacatcctctcctcttccccaaaccgtaccaaatgtggaagctaatgaggtgtgtttctgctgatgcctcacttttaccaacattccagctgttcaaaccagcaggatacaaataaaactgggaatggaagctactgtgctcatgaaattttctgcataaattctggtcctaagttctaaattgaaatctctgctctttagccatccccctctgcaatcagaggctttaatcattgggttttatcaaatctgatttataaaattgcatgcttcacaataaaatagcttcagggtgcaagcacaaaatttaaaacattcaattaaaaatataaaacagcaacagtagttaagaaaaaaaacagcatatattagaatcgtcagctgcctcctaggtggagagtttttaaatgactttaaacattctatctgaaggtcaaaaagcaatttcagattgtccagttaggtagaaaccttcaaggagcataaagcatgcctggccttggcaaggattgctttctgtacatcccaggtcactgctctaggatttgttccccagatggggtatgtgtgctggtggttaagaaccagtgcctcacattcagccctgacagcagagccccctgccactgacagtcatgggacctcagccaagttcttcagccatcttgaatctcagtttcctcttctgcaaaacaagattaataataatttctactattattatatatattccatgagaacggaatgtgacagcttagttaagctgtcaagctaagttaagcttagtttaacctggtatccagttttgagaaagccctcactgtatagtaktattatcctgttctctaaaccctgataaatgtataatacatgagtttgcttttgtactttaaaagcaaaacctaatcactgggcactgtagtgcatgcctgtgatcccagctattcagaaagctggagcgagaggattgcttgaagccaggagtttgagactaacctcagcaacatagcaagaccccgttccaaaaaaaaaaaaaaaagcaaacctttatgcaagtcagtatttctttcagggaaatggagtctaagtcaagatgacagaaacactgcctctttccctgtagctatacagggcaaggcatccttgtcgaatctagaaagtgtggaggccttttcactaacaggaattttgaata

SEQ ID NO: 33962 - DNA, 1287 bp, Homo sapiens
tgcatcttatagccactgctccccttttccaagccaccttgaagcccatgagtcgctggcaggacacgtgtacagtaagatagtacagcgaacacatcctctcctcttccccaaaccgtaccaaatgtggaagctaatgaggtgtgtttctgctgatgcctcacttttaccaacattccagctgttcaaaccagcaggatacaaataaaactgggaatggaagctactgtgctcatgaaattttctgcataaattctggtcctaagttctaaattgaaatctctgctctttagccatccccctctgcaatcagaggctttaatcattgggttttatcaaatctgatttataaaattgcatgcttcacaataaaatagcttcagggtgcaagcacaaaatttaaaacattcaattaaaaatataaaacagcaacagtagttaagaaaaaaaacagcatatattagaatcgtcagctgcctcctaggtggagagtttttaaatgactttaaacattctatctgaaggtcaaaaagcaatttcagattgtccagttaggtagaaaccttcaaggagcataaagcatgcctggccttggcaaggattgctttctgtacatcccaggtcactgctctaggatttgttccccagatggggtatgtgtgctggtggttaagaaccagtgcctcacattcagccctgacagcagagccccctgccactgacagtcatgggacctcagccaagttcttcagccatcttgaatctcagtttcctcttctgcaaaacaagattaataataatttctactattattatatatattccatgagaacggaatgtgacagcttagttaagctgtcaagctaagttaagcttagtttaacctggtatccagttttgagaaagccctcactgtatagtattattatcctgttctctaaaccctgataaatgtataatacatgagtttgcttttgtactttaaaagcaaaacctaatcactgggcactgtagtgcatgcctgtgatcccagctattcagaaagctggagcgagaggattgcttgaagccaggagtttgagactaacctcagcaacatagcaagaccccgttccaaaaaaaaaaaaaaaagcaaacctttatgcaagtcagtatttctttcagggaaatggagtctaagtcaagatgacagaaacactgcctctttccctgtmgctatacagggcaaggcatccttgtcgaatctagaaagtgtggaggccttttcactaacaggaattttgaata

SEQ ID NO: 33963 - DNA, 1287 bp, Homo sapiens
tgcatcttatagccactgctccccttttccaagccaccttgaagcccatgagtcgctggcaggacacgtgtacagtaagatagtacagcgaacacatcctctcctcttccccaaaccgtaccaaatgtggaagctaatgaggtgtgtttctgctgatgcctcacttttaccaacattccagctgttcaaaccagcaggatacaaataaaactgggaatggaagctactgtgctcatgaaattttctgcataaattctggtcctaagttctaaattgaaatctctgctctttagccatccccctctgcaatcagaggctttaatcattgggttttatcaaatctgatttataaaattgcatgcttcacaataaaatagcttcagggtgcaagcacaaaatttaaaacattcaattaaaaatataaaacagcaacagtagttaagaaaaaaaacagcatatattagaatcgtcagctgcctcctaggtggagagtttttaaatgactttaaacattctatctgaaggtcaaaaagcaatttcagattgtccagttaggtagaaaccttcaaggagcataaagcatgcctggccttggcaaggattgctttctgtacatcccaggtcactgctctaggatttgttccccagatggggtatgtgtgctggtggttaagaaccagtgcctcacattcagccctgacagcagagccccctgccactgacagtcatgggacctcagccaagttcttcagccatcttgaatctcagtttcctcttctgcaaaacaagattaataataatttctactattattatatatattccatgagaacggaatgtgacagcttagttaagctgtcaagctaagttaagcttagtttaacctggtatccagttttgagaaagccctcactgtatagtattattatcctgttctctaaaccctgataaatgtataatacatgagtttgcttttgtactttaaaagcaaaacctaatcactgggcactgtagtgcatgcctgtgatcccagctattcagaaagctggagcgagaggattgcttgaagccaggagtttgagactaacctcagcaacatagcaagaccccgttccaaaaaaaaaaaaaaaagcaaacctttatgcaagtcagtatttctttcagggaaatggagtctaagtcaagatgacagaaacactgcctctttccctgtagctmtacagggcaaggcatccttgtcgaatctagaaagtgtggaggccttttcactaacaggaattttgaata

SEQ ID NO: 33964 - DNA, 379 bp, Homo sapiens
acccaatggtaatagagcagaagatggaaaaatgtccagaaatgttgttgactcaaagaggaaaggaaacctttttaamccctttattcagaaatggaaattaagggctgggcgtggtggctcatgcctgtaatcccagaactttgggatgcaaagggaggatgcggatcacctgagttcaggagttggagaccagcctggccaacatggcaaaaccccatctctactaaaaatacaaaagttagccaggcatggtggcacacgcctgtaatcctagctactcaggaggctgaggcaggagaatcacttgaacctgggaggcaaaggttgcagtgagctgagattgcaccactgcactccagcctggacaaaagagtga

SEQ ID NO: 33965 - DNA, 379 bp, Homo sapiens
acccaatggtaatagagcagaagatggaaaaatgtccagaaatgttgttgactcaaagaggaaaggaaacctttttaaaccctttattcagaaatggaaattaagggctgggcgtggtggctcatgcctgtaatcccagaactttgggatgcaaagggaggatgcggatcacctgagttcaggagttggagaccagcctggccaacatggcaaaaccccatctctactaaaaatacaaaagttagccaggcatggtggcacaygcctgtaatcctagctactcaggaggctgaggcaggagaatcacttgaacctgggaggcaaaggttgcagtgagctgagattgcaccactgcactccagcctggacaaaagagtga

SEQ ID NO: 33966 - DNA, 916 bp, Homo sapiens
tgtttcagctgagaaatctgaggctcagatcagggaagtaccttttctatgttccaggataggcatgaagcagaccaagaatattcttatcatttttcctgatgatgaaactgtgatgtaagttacatatagagaaagaaattccaatatttttctaaaagacacttatttttgtacattgttattgaaggtgacagaaaagggtgttgagttgaacagaataaaatccacctttagagtaactatgcaacttatttcaagagtaggtgaatatttcttggtcctattctcctgggttctaagtagttcttcccaggaaaacataagagagattacgtttaagtagttagtgcttccttgtaaatgtatagtccttaatgctggtgctctgtttctaccacagcctgaaaaatataaaataactctagtggctttgctccatctcataagcatccttatcaccaagtaccaggagtaagaatgagcagtgtagatgtggaggaaaaacatttgttttcatgatcttagtcccccagttctactgaaaaggccttgggtattttgattactgacaatatacctatttgatcattcctcatcccttgcaaaatgaatatgggctgtcacrtagagccagttgaatactgtgaaaagatcacagtggaaagtcttaagggcgaccttggacaagaacctggattcctgcttctaactgaaaacatcctacaaggttatacaaactggtaggaaatggctgacctactggagatctgcagattgatcaggagcgaagccacttagagcgtatcagattctcttgttatctgcaaagcaggagtgagtcatttcattgagctgttggcatgcaacaggcacttaggaaagatctgacgaagtgaaagtatccatttgggac

SEQ ID NO: 33967 - DNA, 916 bp, Homo sapiens
tgtttcagctgagaaatctgaggctcagatcagggaagtaccttttctatgttccaggataggcatgaagcagaccaagaatattcttatcatttttcctgatgatgaaactgtgatgtaagttacatatagagaaagaaattccaatatttttctaaaagacacttatttttgtacattgttattgaaggtgacagaaaagggtgttgagttgaacagaataaaatccacctttagagtaactatgcaacttatttcaagagtaggtgaatatttcttggtcctattctcctgggttctaagtagttcttcccaggaaaacataagagagattacgtttaagtagttagtgcttccttgtaaatgtatagtccttaatgctggtgctctgtttctaccacagcctgaaaaatataaaataactctagtggctttgctccatctcataagcatccttatcaccaagtaccaggagtaagaatgagcagtgtagatgtggaggaaaaacatttgttttcatgatcttagtcccccagttctactgaaaaggccttgggtattttgattactgacaatatacctatttgatcattcctcatcccttgcaaaatgaatatgggctgtcacgtagagccagttgaatactgtgaaaagatcacagtggaaagtcttaagggcgaccttggacaagaacctggattcctgcttctaactgaaaacatccyacaaggttatacaaactggtaggaaatggctgacctactggagatctgcagattgatcaggagcgaagccacttagagcgtatcagattctcttgttatctgcaaagcaggagtgagtcatttcattgagctgttggcatgcaacaggcacttaggaaagatctgacgaagtgaaagtatccatttgggac

SEQ ID NO: 33968 - DNA, 916 bp, Homo sapiens
tgtttcagctgagaaatctgaggctcagatcagggaagtaccttttctatgttccaggataggcatgaagcagaccaagaatattcttatcatttttcctgatgatgaaactgtgatgtaagttacatatagagaaagaaattccaatatttttctaaaagacacttatttttgtacattgttattgaaggtgacagaaaagggtgttgagttgaacagaataaaatccacctttagagtaactatgcaacttatttcaagagtaggtgaatatttcttggtcctattctcctgggttctaagtagttcttcccaggaaaacataagagagattacgtttaagtagttagtgcttccttgtaaatgtatagtccttaatgctggtgctctgtttctaccacagcctgaaaaatataaaataactctagtggctttgctccatctcataagcatccttatcaccaagtaccaggagtaagaatgagcagtgtagatgtggaggaaaaacatttgttttcatgatcttagtcccccagttctactgaaaaggccttgggtattttgattactgacaatatacctatttgatcattcctcatcccttgcaaaatgaatatgggctgtcacgtagagccagttgaatactgtgaaaagatcacagtggaaagtcttaagggcgaccttggacaagaacctggattcctgcttctaactgaaaacatcctmcaaggttatacaaactggtaggaaatggctgacctactggagatctgcagattgatcaggagcgaagccacttagagcgtatcagattctcttgttatctgcaaagcaggagtgagtcatttcattgagctgttggcatgcaacaggcacttaggaaagatctgacgaagtgaaagtatccatttgggac

SEQ ID NO: 33969 - DNA, 600 bp, Homo sapiens
tcttcctgactagacatggatatcaggcctgaaattccaactcgattcagcacaccataaatcattctcctaatgatctctcctcctttcctccccttctgacaytttcccaatactctttagagaacaaaaaaaattaaacattattcttctatcagtaattcccagagctatgaaagtatactctttccagatctcaatgtctactgacacggtgacatcatgaaaacaaaaattcaggctttagtggatgtttggtccaaattcatgtttttcacctgaagatgacataattggatcactctggtcattctgctggaattatacaagggccacattaagtcttgaaattgaagatctactttatccttgaagtcaagggggaaatgcaggagaagaaaccactctggcttattatgatcaatagccatgacatgcacaagagtcctcttgggggagacttggttaggaagactttggagaaaggtgtgtcatgttgtgtttccatccaaatgctgctgtttctgtaataagtgcaaaaaaaaaaaaaatcattttatgctggggatacaaacatccaatgcagaccactcttttgaa

SEQ ID NO: 33970 - DNA, 600 bp, Homo sapiens
tcttcctgactagacatggatatcaggcctgaaattccaactcgattcagcacaccataaatcattctcctaatgatctctcctcctttcctccccttctgacattttcccaatactctttagagaacaaaaaaaattaaacattattcttctatcagtaattcccagagctatgaaagyatactctttccagatctcaatgtctactgacacggtgacatcatgaaaacaaaaattcaggctttagtggatgtttggtccaaattcatgtttttcacctgaagatgacataattggatcactctggtcattctgctggaattatacaagggccacattaagtcttgaaattgaagatctactttatccttgaagtcaagggggaaatgcaggagaagaaaccactctggcttattatgatcaatagccatgacatgcacaagagtcctcttgggggagacttggttaggaagactttggagaaaggtgtgtcatgttgtgtttccatccaaatgctgctgtttctgtaataagtgcaaaaaaaaaaaaaatcattttatgctggggatacaaacatccaatgcagaccactcttttgaa

SEQ ID NO: 33971 - DNA, 618 bp, Homo sapiens
ataatcattcccattgtacagatgagttaactgagtctcagagagattacatcccttgctctctcactggaggctgcattgctcaggtttcccctcaccagcaagactcattctctcagccaggtcggggggtggggtgtgtgtccactgattgctcacagctgagtccttcaatggggcttgatctgagacaaaggaagatgctttgcctaagagcatgcccttcccacccccgaaactgcctattttgaataaaaggcctaaaagtgggtaccaggcctgacttgtttgcaccaatatgaaacaattctgaggccatcccagctttagagctttagagctctccgtggggctggccgtggcttctgctgagccgcaccccagcctgacttctccctctgccccacycctcgccgctgccacccttgtactctttacaatgagacccttgcccatgaatctccatttcagcatctgtttccaggaaactctaactaagagtagtggagtcatgactcacaacacaagatactctgcatttttagctacagtgggcattaggtctgtggacctttgggaaactctcatccaggatactcaatataacccatcttggga

SEQ ID NO: 33972 - DNA, 679 bp, Homo sapiens
tcccctccacccacgrtgaaggaggaacggtcctgcctccaaatgggaaaactgaggctcagggaggagaagggccgggtgtgtgtggaggtggcaccagaaacaggcctgattcccaggtctctgccttaattacggtgctgccctggctccggaatgctggggcctggggtcagaagttggcctggaggccgggtgcggtggctcacgcctgtaatcccagcactttgggaggccgaggtgggcggaccacctgaggtcgggagttcgagaccagcctgaccaacatggagaaaccccatctctactaaaaaaaaaaaaaatacaaaattagccaggcgtggtggcacatgcctgtaatcccagctactagggaggctgaggcagaagaatcgcttgaacccgggaggcggaggttgcggtgagccaagatcgcgccattgctctccagcctgggcaacaagagcaaaactccagctaaaaaaaaaaaaaaaaaaaaattggctaggcatggtggcgggtgcctgtagtcccagctactcgagaggctgagacaggagaatgatgtgaaccagggaggtggagcttgcagtgagccgagatcacgccactgcactccagcctgggggacagagcgagacttcgtcttaaaaaaaaaaaagccgggtgtggtggctta

SEQ ID NO: 33973 - DNA, 1132 bp, Homo sapiens
ttcaaacaaatatatgtatttaccccctctttgttttctttttagcaaacagtaattaacattattatacatacctttcttttcttcttagaagtacacattgtgaacagttccatattcgtatataaaacctctctcttcattcagctgccttaaggatctgttagatgaatgtgaccagcctcctactgatggaggtttaggttatcatcttttgctattagaaatgatgctgcaataaattgaatccaaccacaggtcactcagcaagtcactcaggaccagtaagcctggtgtttaagtatgggtgggagttgaaaggcaaaagctaggtttgtggatgtgccaggaccaygtaaggaacagctctctcatatattgtgactgtcttctgtgtccctttgattatggatgaaaactttcatatgtaaatggagttgtttagcaaacataagtttgcaaggagcaagagttgactcctgagaactttttcacatttcttatggcattgtgagtagtctttctagtcacctaagttcctaacttggacttactatgacacctcctctttcttgacctctacaatcaggtagaccactaagtcttgctgattttcctcttttaagcatatagagagagcttcttatggactggtgacactgagcctattacatatatatcaattcctttatttcacaatggccctatgaagtaggtgctattatccccattttcagaagaaaggcacagagggtaagtaagttgctataggcaaagctagtaagtagtagagcaagcactgcacccagatgagagccacatttcaagtccttaatagctccatgtggttagtagctactatactggacagtgcaggtctagggcccttacttgtagctttttttgatacaccatctctctaagctaagacagggatattaccatcttccttgttttcttcactgattccaaccagtcaaagcacctagtcaatggaattaggagttagcagaccaagattggtgttagatggtacttgggcaatcagtctttctaagcctcagtatttcatctgtaaaatggggatgaggatgatgacaataatgcctaaatcgcagaactgatctgaaat

SEQ ID NO: 33974 - DNA, 1132 bp, Homo sapiens
ttcaaacaaatatatgtatttaccccctctttgttttctttttagcaaacagtaattaacattattatacatacctttcttttcttcttagaagtacacattgtgaacagttccatattcgtatataaaacctctctcttcattcagctgccttaaggatctgttagatgaatgtgaccagcctcctactgatggaggtttaggttatcatcttttgctattagaaatgatgctgcaataaattgaatccaaccacaggtcactcagcaagtcactcaggaccagtaagcctggtgtttaagtatgggtgggagttgaaaggcaaaagctaggtttgtggatgtgccaggaccatgtaaggaacagctctctcatatattgtgactgtcttctgtgtccctttgattatggatgaaaactttcatatgtaaatggagttgtttagcaaacataagtttgcaaggagcaagagttgactcctgagaactttttcacatttcttatggcattgtgagtagtctttctagtcacctaagttcctaacttggacttactatgacacctcctctttcttgacctctacaatcaggtagaccactaagtcttgctgattttcctcttttaagcatatagagagagcttcttatggactggtgacactgagcctattacatatatatcaattcctttatttcacaatggccctatgaagtaggtgctattatccccattttcagaagaaaggcacagagggtaagtaagttgctataggcaaagctagtaagtagtagagcaagcactgcacccagatgagagccacatttcaagtccttaatagctccatgtggttagtagctactatactggacagtgcaggtctagggcccttacttgtagctttttttgatacaccatctctctaagctaagacagggatattaccatcttccttgttttcttcactgattccaaccagtcaaagcacctagtcaatggaattaggagttagcagaccaagattggtgttagatggtacttgggcaatcagtctttctaagcctcagtatttcatctgtaaaakggggatgaggatgatgacaataatgcctaaatcgcagaactgatctgaaat

SEQ ID NO: 33975 - DNA, 603 bp, Homo sapiens
tgccytgaagagtcccctcataaaattaatgttgcagtcttgcctctctgcacactcggaatttcacgtttgctttgttccattttgatctttgtaagttattttaaagattacatgtacctgtcctttgctgtattaagtgtccttagaatgattttggtcaaaggtaataaaattctactctgctgcagcttacttgtcttacctcttttatccatctcaaatttcccgtcccactctacagaaggtgccacagtggcaatccatgcccgatagcatgatctttactaatatgggaagtgcccttgaacctcagcagaagcccacatgggagtggaagggcagcactccaacacctctgaacccacacctcagggtagggggagctggccccaccttccctggcaatgacagtgacctcacagctggtccccagcccaggtgggcagggtgccttccactttttagttttatatagtctttgttaattcgttagccctgcttatctcaccaatgcaaacgtacagagtgggaactctttcatgtcacaaacacatgaggccatcacatgactgtatccccaatcctcctgctgggcctttg

SEQ ID NO: 33976 - DNA, 1691 bp, Homo sapiens
ccaggttttgtcactccacattaagtagcatggggacagacagagaaagggcccaaacatatacataatacggaaaatgaatcttgtgagtaaagatgaaagtcatgtgggtaatacagtctggtaggaaaaggcaggtttttgttgatgctacatatgggctggggcctgaaggtgggaggaacaggagggaagatatcctatgaaaaatagattgaaagtctagtcctttgagttctgsactttaatttcttctcagaagactttccttcattccacttaacccattagtttaacacagattcacttcaatgcacaattaaatttcgctatagtgtgaaggagtttagagataaatgacatatagttgagggagaaaacattacaactataagcttaggttaatcaattctcttggcatgtctaaaacaataaattctttcaagtggcccctgttgacacttctctttcagatgacaagaactccataaatgggaagtttcatttctaattcagtgactttttgttagtttctttggcgaagggagaaggggaaaagaggatagagttattgacccctttgagaatctgatgcttgctaaagatctgatcttctccccacagaggcagagacacagagacacatgcatttttacacacaatttcagaggcgcatggacctctcctgttttacttcatttctgctttccagtccaaggacaatttcttgcctttgagcccctttctgctctgaaagaataaagtccagattgaacccagcaacagaatgatttattttggcttccaaaaaaaaaaaatcataatcttttcagacctgtcctcacccaccccaacagtggctgtggcctctgagtctacccaggactttctctctaacctgaccttctgtattaggctgtcctagcactgccaaaaagaaatacctgaggctggataatttataagaaatgaggtttccttggctcacagttctgcaggctaaacaggaaacacatcactggcatctgcttctgggggcttaggaagcttaaaatcatggcagaaggtgaagtgggagcaggcacatcacatggcaaaggcaggagcaagagagagagtggggcagtggggagccgcacacttttaaatgaccaagtcttacaagaactcactatctggaggccagcaccaaggaaatggtgctaaaccattcataagaaatccactcccttgatccaaacacctcccaccaggtcccacctgcaacactgggaattgcatttcagcatgagacttgagtggggacaaatatccaaactattaatatatcaccttctaaaacgctttcctgtgcttgcttcctcacttgccatctctggaataccaggctcttctcttaactgcctcaatgctacaagaagtgtccctggcacttagaagttcagttcaaccctccttcccctttacaattgctcctgtggggagccacagtaatgacaggataatgacaattccacagtctttcctagcaagctttaaaccactcaaggccgctccatttacattttaacaggagaatcattagtcccttgatggagagagtttagctcttcaattcactgcagctttttttaagcagtggggaacattttatcacaaactcagataaagaagataaagtgtgacttaat

SEQ ID NO: 33977 - DNA, 1691 bp, Homo sapiens
ccaggttttgtcactccacattaagtagcatggggacagacagagaaagggcccaaacatatacataatacggaaaatgaatcttgtgagtaaagatgaaagtcatgtgggtaatacagtctggtaggaaaaggcaggtttttgttgatgctacatatgggctggggcctgaaggtgggaggaacaggagggaagatatcctatgaaaaatagattgaaagtctagtcctttgagttctgcactttaatttcttctcagaagactttccttcattccacttaacccattagtttaacacagattcacttcaatgcacaattaaatttcgctatagtgtgaaggagtttagagataaatgacatatagttgagggagaaaacattacaactataagcttaggttaatcaattctcttggcatgtctaaaacaataaattctttcaagtggcccctgttgacacttctctttcagatgacaagaactccataaatgggaagtttcakttctaattcagtgactttttgttagtttctttggcgaagggagaaggggaaaagaggatagagttattgacccctttgagaatctgatgcttgctaaagatctgatcttctccccacagaggcagagacacagagacacatgcatttttacacacaatttcagaggcgcatggacctctcctgttttacttcatttctgctttccagtccaaggacaatttcttgcctttgagcccctttctgctctgaaagaataaagtccagattgaacccagcaacagaatgatttattttggcttccaaaaaaaaaaaatcataatcttttcagacctgtcctcacccaccccaacagtggctgtggcctctgagtctacccaggactttctctctaacctgaccttctgtattaggctgtcctagcactgccaaaaagaaatacctgaggctggataatttataagaaatgaggtttccttggctcacagttctgcaggctaaacaggaaacacatcactggcatctgcttctgggggcttaggaagcttaaaatcatggcagaaggtgaagtgggagcaggcacatcacatggcaaaggcaggagcaagagagagagtggggcagtggggagccgcacacttttaaatgaccaagtcttacaagaactcactatctggaggccagcaccaaggaaatggtgctaaaccattcataagaaatccactcccttgatccaaacacctcccaccaggtcccacctgcaacactgggaattgcatttcagcatgagacttgagtggggacaaatatccaaactattaatatatcaccttctaaaacgctttcctgtgcttgcttcctcacttgccatctctggaataccaggctcttctcttaactgcctcaatgctacaagaagtgtccctggcacttagaagttcagttcaaccctccttcccctttacaattgctcctgtggggagccacagtaatgacaggataatgacaattccacagtctttcctagcaagctttaaaccactcaaggccgctccatttacattttaacaggagaatcattagtcccttgatggagagagtttagctcttcaattcactgcagctttttttaagcagtggggaacattttatcacaaactcagataaagaagataaagtgtgacttaat

SEQ ID NO: 33978 - DNA, 1691 bp, Homo sapiens
ccaggttttgtcactccacattaagtagcatggggacagacagagaaagggcccaaacatatacataatacggaaaatgaatcttgtgagtaaagatgaaagtcatgtgggtaatacagtctggtaggaaaaggcaggtttttgttgatgctacatatgggctggggcctgaaggtgggaggaacaggagggaagatatcctatgaaaaatagattgaaagtctagtcctttgagttctgcactttaatttcttctcagaagactttccttcattccacttaacccattagtttaacacagattcacttcaatgcacaattaaatttcgctatagtgtgaaggagtttagagataaatgacatatagttgagggagaaaacattacaactataagcttaggttaatcaattctcttggcatgtctaaaacaataaattctttcaagtggcccctgttgacacttctctttcagatgacaagaactccataaatgggaagtttcatttctaattcagtgactttttgttagtttctttggcgaagggagaaggggaaaagaggatagagttattgacccctttgagaatctgatgcttgctaaagatctgatcttctccccacagaggcagagacacagagacacatgcatttttacacacaatttcagaggcgcatggacctctcctgttttacttcatttctgctttccagtccaaggacaatttcttgcctttgagcccctttctgctctgaaagaataaagtccagattgaacccagcaacagaatgatttattttggcttccaaaaaaaaaaaatcataatcttttcagacctgtcctcacccaccccaacagtggctgtggcctctgagtctacccaggactttctctctaacctgaccttctgtattaggctgtcctagcactgccaaaaagaaatacctgaggctggataatttataagaaatgaggtttccttggctcacagttctgcaggctaaacaggaaacacatcactggcatctgcttctgggggcttaggaagcttaaaatcatggcagaaggtgaagtgggagcaggcacatcacatggcaaaggcaggagcaagagagagagtggggcagkggggagccgcacacttttaaatgaccaagtcttacaagaactcactatctggaggccagcaccaaggaaatggtgctaaaccattcataagaaatccactcccttgatccaaacacctcccaccaggtcccacctgcaacactgggaattgcatttcagcatgagacttgagtggggacaaatatccaaactattaatatatcaccttctaaaacgctttcctgtgcttgcttcctcacttgccatctctggaataccaggctcttctcttaactgcctcaatgctacaagaagtgtccctggcacttagaagttcagttcaaccctccttcccctttacaattgctcctgtggggagccacagtaatgacaggataatgacaattccacagtctttcctagcaagctttaaaccactcaaggccgctccatttacattttaacaggagaatcattagtcccttgatggagagagtttagctcttcaattcactgcagctttttttaagcagtggggaacattttatcacaaactcagataaagaagataaagtgtgacttaat

SEQ ID NO: 33979 - DNA, 1691 bp, Homo sapiens
ccaggttttgtcactccacattaagtagcatggggacagacagagaaagggcccaaacatatacataatacggaaaatgaatcttgtgagtaaagatgaaagtcatgtgggtaatacagtctggtaggaaaaggcaggtttttgttgatgctacatatgggctggggcctgaaggtgggaggaacaggagggaagatatcctatgaaaaatagattgaaagtctagtcctttgagttctgcactttaatttcttctcagaagactttccttcattccacttaacccattagtttaacacagattcacttcaatgcacaattaaatttcgctatagtgtgaaggagtttagagataaatgacatatagttgagggagaaaacattacaactataagcttaggttaatcaattctcttggcatgtctaaaacaataaattctttcaagtggcccctgttgacacttctctttcagatgacaagaactccataaatgggaagtttcatttctaattcagtgactttttgttagtttctttggcgaagggagaaggggaaaagaggatagagttattgacccctttgagaatctgatgcttgctaaagatctgatcttctccccacagaggcagagacacagagacacatgcatttttacacacaatttcagaggcgcatggacctctcctgttttacttcatttctgctttccagtccaaggacaatttcttgcctttgagcccctttctgctctgaaagaataaagtccagattgaacccagcaacagaatgatttattttggcttccaaaaaaaaaaaatcataatcttttcagacctgtcctcacccaccccaacagtggctgtggcctctgagtctacccaggactttctctctaacctgaccttctgtattaggctgtcctagcactgccaaaaagaaatacctgaggctggataatttataagaaatgaggtttccttggctcacagttctgcaggctaaacaggaaacacatcactggcatctgcttctgggggcttaggaagcttaaaatcatggcagaaggtgaagtgggagcaggcacatcacatggcaaaggcaggagcaagagagagagtggggcagtggggagccgcacacttttaaatgaccaartcttacaagaactcactatctggaggccagcaccaaggaaatggtgctaaaccattcataagaaatccactcccttgatccaaacacctcccaccaggtcccacctgcaacactgggaattgcatttcagcatgagacttgagtggggacaaatatccaaactattaatatatcaccttctaaaacgctttcctgtgcttgcttcctcacttgccatctctggaataccaggctcttctcttaactgcctcaatgctacaagaagtgtccctggcacttagaagttcagttcaaccctccttcccctttacaattgctcctgtggggagccacagtaatgacaggataatgacaattccacagtctttcctagcaagctttaaaccactcaaggccgctccatttacattttaacaggagaatcattagtcccttgatggagagagtttagctcttcaattcactgcagctttttttaagcagtggggaacattttatcacaaactcagataaagaagataaagtgtgacttaat

SEQ ID NO: 33980 - DNA, 1691 bp, Homo sapiens
ccaggttttgtcactccacattaagtagcatggggacagacagagaaagggcccaaacatatacataatacggaaaatgaatcttgtgagtaaagatgaaagtcatgtgggtaatacagtctggtaggaaaaggcaggtttttgttgatgctacatatgggctggggcctgaaggtgggaggaacaggagggaagatatcctatgaaaaatagattgaaagtctagtcctttgagttctgcactttaatttcttctcagaagactttccttcattccacttaacccattagtttaacacagattcacttcaatgcacaattaaatttcgctatagtgtgaaggagtttagagataaatgacatatagttgagggagaaaacattacaactataagcttaggttaatcaattctcttggcatgtctaaaacaataaattctttcaagtggcccctgttgacacttctctttcagatgacaagaactccataaatgggaagtttcatttctaattcagtgactttttgttagtttctttggcgaagggagaaggggaaaagaggatagagttattgacccctttgagaatctgatgcttgctaaagatctgatcttctccccacagaggcagagacacagagacacatgcatttttacacacaatttcagaggcgcatggacctctcctgttttacttcatttctgctttccagtccaaggacaatttcttgcctttgagcccctttctgctctgaaagaataaagtccagattgaacccagcaacagaatgatttattttggcttccaaaaaaaaaaaatcataatcttttcagacctgtcctcacccaccccaacagtggctgtggcctctgagtctacccaggactttctctctaacctgaccttctgtattaggctgtcctagcactgccaaaaagaaatacctgaggctggataatttataagaaatgaggtttccttggctcacagttctgcaggctaaacaggaaacacatcactggcatctgcttctgggggcttaggaagcttaaaatcatggcagaaggtgaagtgggagcaggcacatcacatggcaaaggcaggagcaagagagagagtggggcagtggggagccgcacacttttaaatgaccaagtcttacaagaactcactatctggaggccagcaccaaggaaatggtgctaaaccattcataagaaatccactcccttgatccaaacacctcccaccaggtcccacctgcaacactgggaattgcatttcagcatgagacttgagtggggacaaatatccaaactattaatatatcaccttctaaaacgctttcctgtgcttgcttcctcacttgccatctctggaataccaggctcttctcttaactgcctcaatgctacargaagtgtccctggcacttagaagttcagttcaaccctccttcccctttacaattgctcctgtggggagccacagtaatgacaggataatgacaattccacagtctttcctagcaagctttaaaccactcaaggccgctccatttacattttaacaggagaatcattagtcccttgatggagagagtttagctcttcaattcactgcagctttttttaagcagtggggaacattttatcacaaactcagataaagaagataaagtgtgacttaat

SEQ ID NO: 33981 - DNA, 816 bp, Homo sapiens
agattgctgtatcaaacagtatttctacttttagttctttaaaaaatatctatatggttttccatagtggctgtactagtttacattcccaccaacagtgtagaagtgttccctgatcattgcatccgcgccaacatctactattttttaattttttgattatggccattcttgcaggagtaaggtggtatcacattgtggttttgatttgcatttccctgatcattagtgatgttaggcattttctgatatgttcattggccatttgtgtatcttcttttgagaactgtgtattaatgtataatttgtatactagaaagaaaacaaaaaaactcagattcttacaatggaaagtggaaattcagaataattggataagtagatacttattaaaaacaagcccaakttaatattaatacaatgaatataaatgggttaaactcatcattataagacacaaaattaaatacaagctataaaatgagatttcccaaagtgttgttcacaagagacatactttaagaaagacatacaaatatttaaaacaaaaggatggaaatgatacacaagcaaaaatgaatgaaatgatgtcagtttaacaacatttgctttaaaaaagctagaattaagggcaaaacatcatgaggaataatatgctatatatgtttcaaaggaaaagtataataagaataaatatctgacaaagtttattaggcaacaaaagttgcaaatcaaaatggtgcatatttttaggaaacctcttacagaaaatgacacattaatcagacataaataagcatacattttaagaactta

SEQ ID NO: 33982 - DNA, 623 bp, Homo sapiens
catcttaatgaggaatttggctctttttataggaaacagaaaatacctcattctaaggcatatacacagcaaggacctgaggagcttgtgtacttcatagaatcatgaactcaaaggataaaaaggcaaattaaaaattatcctatccaggaaatcccaagtagcagtatgcatactatctacatataagcacttagtcaattgattataaagtcagactgcctcagagtctctgagggtagagcttggcaaacagatttaaggagrataggtaacttgctcaagatgacattgtaaatagagagtggagtcagaattcacattcagatccagctgagtaaaaagcttattctattaacctaattaattggtctgtaaaaaggatttccataagctaactcaaatggggcaaacctgggttaaaaggaaaaaagcacctgacctagcttcaaacatcacttcacctctggaggaagttggaaaatattctagcagaaatacaaaattggtttattggattgctttttgagaaaagaaaacttgagtagcctacaaatataaggggcagattaaccaaatagcagctgcagccatgtagccaaaaaacaaagggcattttctct

SEQ ID NO: 33983 - DNA, 623 bp, Homo sapiens
catcttaatgaggaatttggctctttttataggaaacagaaaatacctcattctaaggcatatacacagcaaggacctgaggagcttgtgtacttcatagaatcatgaactcaaaggataaaaaggcaaattaaaaattatcctatccaggaaatcccaagtagcagtatgcatactatctacatataagcacttagtcaattgattataaagtcagactgcctcagagtctctgagggtagagcttggcaaacagatttaaggagaataggtaacttgctcaagatgacattgyaaatagagagtggagtcagaattcacattcagatccagctgagtaaaaagcttattctattaacctaattaattggtctgtaaaaaggatttccataagctaactcaaatggggcaaacctgggttaaaaggaaaaaagcacctgacctagcttcaaacatcacttcacctctggaggaagttggaaaatattctagcagaaatacaaaattggtttattggattgctttttgagaaaagaaaacttgagtagcctacaaatataaggggcagattaaccaaatagcagctgcagccatgtagccaaaaaacaaagggcattttctct

SEQ ID NO: 33984 - DNA, 935 bp, Homo sapiens
ggcactgctagaatcttctccaagccgggccgyctgcttctctaccggtctcttagcaactaaatacctgactaatactcaacttttcccagggctttaagagctgcaagatattaattccaagcaagacatctaaattgttactctggaaacttgctcatgcccccttcatgggtcagacactgaaaggccacgttccaagtatccttaccatctcaccctcgccgtccctagaagcaggattgaagtcccgtctccacacggccacggcaggaggggcggcctgggctcagatgagtggctccagattggacacacacagagcttgctttgccatgggtatgtttacgtgtcagttcccacccatgcactcaggaaaagcgggcccctctttccaaccctgagggaaatcatagaaagaaataataaaataggaaaacaaaattgctgatcgatgaaaaccacaagatgtttttgtttcttaaagacaaatcaacacaacatagcaggtatgaccaagggaaaaaaaaaataagcattgagaacaaaaagtaggacatatgaaaataaaaggactcaatttacaagctggaggccgagcgcagtggctcaggtctacgtcatcccagcactttgagaggccgagtagagtggaccacttgaggtcaggagtttgaggccagcccggccaacatggtgaaaccccatctctactaaaaataaataaataaattaattaattaattaattaattaataaaataaagaacgaacgaactcagggccttggctgtgaaaccccggcagcaggtgaacaaattatcccagggcttttgggcagcaatttgcctcttagtgtccagggagtgtcagggatgagccaccaccctatgcagggtgtgtcccatgagcacgaagctgccaggggaggcccaa

SEQ ID NO: 33985 - DNA, 935 bp, Homo sapiens
ggcactgctagaatcttctccaagccgggccgcctgctkctctaccggtctcttagcaactaaatacctgactaatactcaacttttcccagggctttaagagctgcaagatattaattccaagcaagacatctaaattgttactctggaaacttgctcatgcccccttcatgggtcagacactgaaaggccacgttccaagtatccttaccatctcaccctcgccgtccctagaagcaggattgaagtcccgtctccacacggccacggcaggaggggcggcctgggctcagatgagtggctccagattggacacacacagagcttgctttgccatgggtatgtttacgtgtcagttcccacccatgcactcaggaaaagcgggcccctctttccaaccctgagggaaatcatagaaagaaataataaaataggaaaacaaaattgctgatcgatgaaaaccacaagatgtttttgtttcttaaagacaaatcaacacaacatagcaggtatgaccaagggaaaaaaaaaataagcattgagaacaaaaagtaggacatatgaaaataaaaggactcaatttacaagctggaggccgagcgcagtggctcaggtctacgtcatcccagcactttgagaggccgagtagagtggaccacttgaggtcaggagtttgaggccagcccggccaacatggtgaaaccccatctctactaaaaataaataaataaattaattaattaattaattaattaataaaataaagaacgaacgaactcagggccttggctgtgaaaccccggcagcaggtgaacaaattatcccagggcttttgggcagcaatttgcctcttagtgtccagggagtgtcagggatgagccaccaccctatgcagggtgtgtcccatgagcacgaagctgccaggggaggcccaa

SEQ ID NO: 33986 - DNA, 935 bp, Homo sapiens
ggcactgctagaatcttctccaagccgggccgcctgcttctctaccggtctcttagcaactaaatacctgactaatactcaacttttcccagggctttaagagctgcaagatattaattccaagcaagacatctaaattgttactctggaaacttgctcatgcccccttcatgggtcagacactgaaaggccacgttccaagtatccttaccatctcaccctcgccgtccctagaagcaggattgaagtcccgtctccacacggccacggcaggaggggcggcctgggctcagatgagtggctccagattggacacacacagagcttgctttgccatgggtatgtttacgtgtcagttcccacccatgcactcaggaaaagcgggcccctctttccaaccctgagggaaatcatagaaagaaataataaaataggaaaacaaaattgctgatcgatgaaaaccacaagatgtttttgtttcttaaagacaaatcaacacaacatagcaggtatgaccaagggaaaaaaaaaataagcattgagaacaaaaagtaggacatatgaaaataaaaggactcaatttacaagctggaggccgagcgcagtggctcaggtctacgtcatcccagcactttgagaggccgagtagagtggaccacttgaggtcaggagtttgaggccagcccggccaacatggtgaaaccccatctctactaaaaataaataaataaatwaattaattaattaattaattaataaaataaagaacgaacgaactcagggccttggctgtgaaaccccggcagcaggtgaacaaattatcccagggcttttgggcagcaatttgcctcttagtgtccagggagtgtcagggatgagccaccaccctatgcagggtgtgtcccatgagcacgaagctgccaggggaggcccaa

SEQ ID NO: 33987 - DNA, 1113 bp, Homo sapiens
cacagcatctccattctagatctgtctctcctttgggtggaacacatcttcctctcacagctctgagaaagggcccaagaagctggttctccatgaccctgcaggtctgcaatgtccttattctgtccttgcccttgatctagtgctccccattccacatgggaagtaaatttcccaagaagtttgtaggcactgctccattcttgcttccagagttgcgttctcggtcttagtccttaatatgagatcagctccatcactctggaggctttgagggttttctcttcttcttgggtttttatgaatgcatgatggtgtcgccagtgctgggtcttttaaaattaattattatggtaccatgagggcccagaaagtacgtctatctgttaattgtgtcattataaattaattgtaagattacaaaaatggcaaaggggaaaatcacacatagcccacttttttttgttttttggcaaaattaagcaaaattagcatggccagattcacctacaccaatgccatcctggactggatctyggaccttggaccaccatgctgggtgctccctcaatgctcctccaaacccatcagactccggagtaactcagacccctgggcatgtcacctgggcagcccgaggcagagcacagctgcgctccccacccctcgtggtcctctgcctgagatggcccctatccgagcagctttgtggatctagaagtagagccagccctttctggctgccacaaaaggaccttccaagcaccttcaaggctgacacgagccccctcccaccttgggatgtgatccctgtcctaccttccattgctgagggcagagaacctctgagagaccaggagcaggaggtcagccagctgcagtagcccctgaaaccacagcccttccctgtgtagccctcacctcccatgttctgtggccagcagggtcttggctcggtgcactcatgggcctcaggaagtcagtcctggactagacggagcctcacagatccacaggcagtgtcaggcttcgtctcccagtcagggcccagtccctgtttttaactttctttgctggagctgcataaataaataaacacacgagtgtgtggac

SEQ ID NO: 33988 - DNA, 624 bp, Homo sapiens
ttttccttctttcccttttataactgagcaacttctaggcaggatggctgaatgagccataccagtccaccttcagcaggggcttctggctggctgatggaggcatgtctctggggaacagcagagctcagggtagggacagaacagggagagctgggaggaaggagaaaggccctgcagcagacgctgcagaagctttccatcctccttgccttaacctggggctcacccaagtctatactcgtggtgagggcagggggaaaattgctttttcttaaagtcagtcattgatgacacctcctatcactgagtattcttggggcaggcctgccccaaccagctagaccaatggttcctacggaatttttaaggtggacagaaggttcctctggggacgttagtcagagctgggtgtctaatggagccctcaccsccagttcagccagagcagcttgtttttgatctgtttgacaaatagaacttttccataaggttccatttgaatgaagtcttcacacctaaacatttgagaatggctgcttcagtctaagctgggatcatctggtttcaaaaccgtcaaagaaatttcagcaggaaaatttggtcaaatagtattgccctggg

SEQ ID NO: 33989 - DNA, 522 bp, Homo sapiens
taccctgttgccatcttgaacctgctgttccatggcagaaccaccccagagccagcggcaggrgcgagggttgattgccagcccaggcagggctcctctccctgacagctgctgacggagggtgtgaggaggtctcaggcccctggccctttaccagcatgtggctgggcctggaaggctgtgtgctccaatcctctggaaaaagtgaaaggccctgcagggaagtccttgaagacaagaggttttagatctggagcatcatcagatcgcctctcatggagcttgtttttcctctattttttcacctcccctcagtcttgctccttgctatgcaaatgcagtctggtctgtggaccggcagcatcaacatcacttgggaaatttgaaatgcagaatcttgggctcctctcctaaatcggtatctgcattgtagcaagagccctgtatgtcaagaaccctacctgttagttgcatgtcagtgtctgagaagcgctgactgatgggggcccagtttccctccta

SEQ ID NO: 33990 - DNA, 710 bp, Homo sapiens
ggaggttgcagtgagccaagatcgcctcattacactctaacctgggcaacaagagcgaaaaactccgtctccaaaaaaaaaaaaaaaaaaaaactgtcaatctttttttatttcccatggctttgttatccctaaattttataggtattcactcatgttttctcttagttctttaaaaaaaaattggctataattagtctgatatttgttttggagtatggtatgaagtaaggattatttgtcccctctagtttatattttttgggtactattaattcatccttattaacttaaaaaataacaccttaatcatatgctgaatccttggatctgttgttttagtcagtttatctgttcttttgccatgaccttactattttagacattaaaatcactttatagtaggctttattatctggtagtgcctatgctcagtttttactccagtgtttttcaatttagggtttcaaaatactccctccatcttgagatggagtctcactctgtcccccaggcttgagtgtaatggcgcgatctcggctcactgcaacctcygcctcccaggttcaagtgattctcctgcctcagcctcccgagtagctgggattacaggcatgtgccaccacgcctggctaatttttgtattcttagtagagacagagtttcaccatgttggccaggctgtcaaaatactgttaatgggaaatttc

SEQ ID NO: 33991 - DNA, 1071 bp, Homo sapiens
tcctgggatttttctgggaagtgttggcttctcaggagtcctccaagtgtggacagctcccttttcaggacctctctctttcttctctataaaatgagcaggtcaaaggccatggcttccgagagtcctttttaggcctatagtttgtgatctgttgattactgtgttactctggatgaagaacttacccctttctacctccattcccacctctatccattgctggcaatgtggtaccagactcacaggcccaycctggtgggggtgtgcatgtgggagagggggcttatggtgaaaacccaggaggaaacagaagaaggaggctgtgaaacagtagtgacccccctgtgctgcagagggaggtgcaggtagagtgagtggtggggaacgtggctgtcccttgtgaggcaacacatctgggggaagcagagggagctccttcctcagtctctgcccatgcattctcttcagtgccctagtccctgccgtctcacaccccgtttctctgctccaaggaacagtacagggtgtggacgctggtgaaacacatccgtagtaaccagctggcctgtagcttcatggtactgtggcttggctggaagtccatgctaggatgggaagcatgagccgggactttccaacaagctgagcacacaggcctgtgtgtgctgggtggggctggggtctcagtgctgaggcagcactttgctgtatttttaatttttaattttttgtaaaagataaaaagatgatggaagtatgtcaggaggacacaggaagcagcttaaaggggctctactagtcaactctgagaaaatttaaacattcaaataaatgatagtaatagattacaattcattgaataaaataagaaaccatgaatcttctagatctgtggataaatagatgattaacaaatagagagatggaaagatagatacagataaaggagaaaagttcttccttggagtaaaaagaatgccattaataaatatagaaaaaatgaagcaattttatttttctatatttattagaaaagaagtaataataaacttttttattgtagttttg

SEQ ID NO: 33992 - DNA, 1182 bp, Homo sapiens
cttggagaggtgctctgaccacgtggttcaaatcagtcccgacccccaccttagatctttattatctggtgacatcactttatttrtttatttatttatttatttatttatttatttatttatttacttgcttttttctttgctcccctctactgagctctggtctcttgagctggtcccaagtatcagagtcagggcttggcacagagtagacacacaataagccgagtgagagtctaatgaacacacacacacctcccttggagcgctctcactcgtgtccactcaatcatatgctgagaccctctgccacacttgcaaacacagacacacacttctccacccctggacacgtcctgcgcgggagctccgagatgcgtgagcgcctgtaaccagggatgctgccgccccctcctggaaagattgggaaagtacagccagagtctttctgggaaaccactccaatgctaacctcaggctaatcctaactccccttccttgcagacagctgtccctgcccaggcagggtcttcagatcatttctgatatttggcctagggcctgggctgtatgttcttaccaggtgcggaggaaggaaggaaggaagggagggaggggaggggaggggaggggaggaaactgacgcaggtaagagcattcacctctttccctctccaaggctcagtttcaggatcattgtcacaggtctgacacgaatcatgtgcaataattttttgtacattcataggtttggaacacggtataaagggccttgaatgccagaatgaagccttgggttttatcctgcagtcgttgggagccactaagagtttctgagcaagagagggacaggatccgaactgtgctttggaaagatgaaccagccggtgtgcattcatgcattcactcattcgttcattcattcattcatctgaccaaaatgtgctttaaacatcttttgcatgccgggccctgggaatgcagcagtgaccagaggtgctgttggacttcatggagctcatggcctcgagtgacatgtgtgggagtggacatttggacacagaggaggcatcaccccagtcctaggcaaggtgagccctggggcaacataaggctcacataggcgccttagcttctgccctgtatgtagacagagcagggtgggagtcaactaagccactg

SEQ ID NO: 33993 - DNA, 1182 bp, Homo sapiens
cttggagaggtgctctgaccacgtggttcaaatcagtcccgacccccaccttagatctttattatctggtgacatcactttatttatttatttatttatttatttatttatttatttatttatttacttgcttttttctttgctcccctctactgagctctggtctcttgagctggtcccaagtatcagagtcagggcttggcacagagtagacacacaataagccgagtgagagtctaatgaacacacacacacctcmcttggagcgctctcactcgtgtccactcaatcatatgctgagaccctctgccacacttgcaaacacagacacacacttctccacccctggacacgtcctgcgcgggagctccgagatgcgtgagcgcctgtaaccagggatgctgccgccccctcctggaaagattgggaaagtacagccagagtctttctgggaaaccactccaatgctaacctcaggctaatcctaactccccttccttgcagacagctgtccctgcccaggcagggtcttcagatcatttctgatatttggcctagggcctgggctgtatgttcttaccaggtgcggaggaaggaaggaaggaagggagggaggggaggggaggggaggggaggaaactgacgcaggtaagagcattcacctctttccctctccaaggctcagtttcaggatcattgtcacaggtctgacacgaatcatgtgcaataattttttgtacattcataggtttggaacacggtataaagggccttgaatgccagaatgaagccttgggttttatcctgcagtcgttgggagccactaagagtttctgagcaagagagggacaggatccgaactgtgctttggaaagatgaaccagccggtgtgcattcatgcattcactcattcgttcattcattcattcatctgaccaaaatgtgctttaaacatcttttgcatgccgggccctgggaatgcagcagtgaccagaggtgctgttggacttcatggagctcatggcctcgagtgacatgtgtgggagtggacatttggacacagaggaggcatcaccccagtcctaggcaaggtgagccctggggcaacataaggctcacataggcgccttagcttctgccctgtatgtagacagagcagggtgggagtcaactaagccactg

SEQ ID NO: 33994 - DNA, 547 bp, Homo sapiens
ttgggaattcttagcttgttaagtgatttaccaggagcttcacagtcccgggtaattgtagaaaaatgttctgccagtcagtggtgttttgcagaaaaccttgccgaaacatttgctttagtaatggagagagaatgaaagatctggaagtgatagaawtctaaaaaatgcagcacttgctatactttttttacaggcatagataaaacccttatctacacagaggtgtttgccagcttgccgcagtataggtgtagtctgtaatgactgatgaggtagttatcttttttaatcttaaagagaaggttaggatgggtcagtggggtgtgagttggatcaagtagactcttaggggctcacagactggcctgagcttatcccacaagttttgtatgtgtggatgtgtgcaagtgccttttgctgggaaaaaggggaccaggacttttgtcacattctctggaggtcccaagaagtgaagaggctggtggactggggactgttgtgtgcagagattacacattctttctctatcaaagttatccagggg

SEQ ID NO: 33995 - DNA, 580 bp, Homo sapiens
tgaattgatatttgggcctttacatcattgcttgagcgcaggaagactgtctagcccaagctgtacccagtgcattcattcctgagtaatttaataagaaaaactgtcttccaaagatactgacatgcttttcttagattttcacagttaattatctctratgtatgtgtgtgtgtgtgtgtgtgcacgcacgtgcattttttcatccccatttctaaatcctggtcttatgaaaaatgtgccttgtgttcccccagcaactattttccagcaccattttcctgcagccatcgattcctttcaggatgctgtgaagtgcttatcagagttcgcctgcaacgccgctttccctgacacgagcatggaagcgattcggctcatccgcttctgtggcaaatacgtctctgagaggcctcgggttcgtttttccccaccttactcagatgggcagtgaagggaaaaggtcatggagcagaaattcttgctcctaacaaagagctttccagctactcttttagaaatgtgtgtttgccctaaattaggtgtttatttcaaaatgctgccatgacagggagttagg

SEQ ID NO: 33996 - DNA, 602 bp, Homo sapiens
tcaaaaacactcccccaccccttggaaatataggcagggaagggaaaataaatgtttttttgtgggaggcaggagcattattgaaaaaaactcaacaggctttttaaaactggaaaagtagaacgcgcgcatgttgaaaaattccagggcggctggagacaggatggggtggggcaggtatgtcggctccgcatggatcaggcttggtccagcccrtgttatgaccttccagctgtctgcttctcctctttggcctcagtttcctcatctataaaatgggaactatagtattgtacgcaccatgcagctgttgtgggggttaaatgatatgatctgtcacattcctgttacatgtatgtattcaacaaacatcgactgtctttttcattagtgaaaaccaggtctctctggctgtgcacccgtctctcgtcccacgacagctgctgatggctttcttgtgtacgctctcaggaaatttctatgcattcttttcttcttcgtttgtttgtaatatgaagggaaacacgctagcccctgttctgtgcctggcttttccctcttaaaactgcatctgtgggatgtagatatgaagtttgaaggat

SEQ ID NO: 33997 - DNA, 1119 bp, Homo sapiens
cagagatggtgccaaaagcgaatttcctgctgggtccctgatatcagtgacgaggtccaggggccccgtggggctgctcttggtttctgtgtgaggctcccacactgatctgatcaaaagtgagctcctaaaaggcccatggagtgggatgggttgggagggcggtgagagcccagagccaccgaaggccccaggtagccagtggaaggacaacagggcccaggaacatgccctggggcaggtggaggccgtctcctgcaacctcacaggtgctgtcgtctgccctgaagtcccactgtgctcacttatatatgacatggcatcagggcacccctcctctggtcggagtggtccctgggctcagtcttggattctggaggtgtccagaagaagtgggaggcagccctgcccgagcagaggtggtcacggcaggtggaagctgacattgaacatggaaggcatgcccgggagccttgtgccagtctgcatggcagcatcagtggttaaaaacccactgtccactcccttcagcccttcagccctgcttcagcttctgggcctccctggccctctccaagttccagtagtcaaaatttagtccctggaggggctcctccagctcccgcccctgccctagtgcctgcagytattgactggccatgctcaacccactagtagacaattttaacgttacccctgccgtggctccctccaggattctttctgccatgctgttgagcagaagacatgtctttctctgacttcttctgccaccagccaaagaaaactctctgctcttaaaaatcttgcctgactaggtcaggtccagagaagaccagctcccttgggacataggatgtaacctgatctcagagtgatgtctcctcatcgttacaggttctgcccacactcaatggacttcacaacgaggatgtgtccaccagggggcagagatgttggggtcaactcagcatcttgcctaccttaggaggctggctatcttagggaggagggttgagagaggggagaagtaattctagggcagagccctgtgtttagcgggctgagcagaagagcgaccaagcaagcacaccaacaggctactcagttccttggtta

SEQ ID NO: 33998 - DNA, 765 bp, Homo sapiens
aatttctgagcattggccatagtaaaggcctggctgtgtggcagtgagggtagtttgatataagcacccagggattccatctgtgttgaggcccagtgatgggacagtccatgagtgtagaacatcttctaatgacactaataggtgaatagggatttctgttgggagagctgctcagttgtcaacttcgaggagacgtagttcttctggtttcaggtctgtcgtaggggctacataagaatcgaagcctaggtcttcataatctgtatattcatagcttcagtatcattggtggccagttgttttgacagtgagagaggggttgttaatttcatctgttatgtacaggatacgtagggttgggagggcaattaacattaggattatagtgggcaagagagtccacacagtttctgcttcttagggatctatagtgctagtatrtattaatgttgttgtcaatatgagggaaacaatatatcaatatgagggaaataaaccttctttgagttcttcatgacatctccatactgttttccatagagactgtactaacattaccgcccacagtgtctaagccttccctttttaccgctttcgtgagaatatctattgtttattgactttttaataatggctattctggctagggaaagttggtatctcactgtggctttaatttgcatttccctgatgattagtgatgtcaagcattttttcatgtttgttggccatttgtatatcttcttttaagaaatgtctatt

SEQ ID NO: 33999 - DNA, 831 bp, Homo sapiens
accccttccatggcccaacagcgcccctctccctgtttggatgctgcagaagggaggaaggaggtggagaggagaggaactctcagtgggaataaagtttccttttcaattattcagctgatccttgacccccattaccatggataatcaaaaacggggtggatgcatcatgccttaaataaaaacatcgctgaggtggccctgaggatgtgcaagcagataattgcatggggtgttcatccaatgacactccagggggaggtactttcctatatgcacggagatgagagcggtggccctcagcacaatgtcgcacatctgaggagtgttacttcctgaggggggctcctcaggttcagcttcctgttccctcgcacagggctggtgatgatcaacctcttctgacaatggagagagcatgcggtrgatgttaggggaaccaaaccccaagagggaaccagcttcagtggaaagcggagtgcgtgcctccccgaggcagggcattgctgagccccagagaggagccctgggttccgctgcctcccccacaggacaaggcatgacagcacctgcattggaatatagactgtgctttggagcctttggcatcagcttccacctggtgcgtaagtctgtggtctctccagcaagttcagggaagtgagggagtcgcagttctctgtcattcagcaggtgtggactgagggctggctctgtgccaggccctgtgctggatgctgggttccattgtgaggccaggcacagccaaggcagagacgaacattcctacagtcgctcacgacaccaagctccacagaccagagaatggac

SEQ ID NO: 34000 - DNA, 608 bp, Homo sapiens
gaataaccaacacacaggcatggaccttgacttatatatggccgttttgcatacaaccaacaatggcggacacccagcaagctgggttatggccggaggtcgctatggagcagtggaagttcattatgatcctgaatcatctgggtggaagagtggttcggagttcaaatatatctgctatttctgcctccttagtcctgaaagttagtattttagaaacatttccacctgcagggggtggagccaagatggccaaataggaacagctccagtctacagctcccagcatgagcgatgcagaagatgggtgatttctgcatttccaactgaggtactgggttcatctcaatggggagtgccggacagtgggggcaggacagtgggtgcagtgcaccrtgtgtgagccaaaacagggagaggcatcccctcacctgggaagtgcaaggggtcagggaattccctttcctagtcgaagaaaggggtgacagacggcacctggaaaatcaggtcactcccaccctaatactgcacttttccaatgggctcaaaaaacggcacaccaggagattatatcccgcacatggcttggagggtcctacgcccacgga

SEQ ID NO: 34001 - DNA, 480 bp, Homo sapiens
taaaaattatctaaaacaatactacaatgggcttttcttccttctagttttctccccctgaccacaggctttatgaagcatagtcaaaagtatatatagagaaacaggaaatgcaagggagagaagtttatgaggcaaaaaatatatatattcatgtgtgtgtatatatatatgggtgtgtgtgtgtgtatatatgtgtgtgtatatatatatatcttggtttaaaaaaataacccagaagacaagatataatctttaaaaattattttatttttattaatgattacgggtacwtcatagtggtacatacttatggggtacatatgatgttttttgttttagaggtgaggtcttgctgtgttgcccaggctggtcttgaacccatggcctcacgtgatccgctcccctcagcctctcaagtaaatgggactgcaagtgagaggcactgtgtttggcatcttgctttttttggctaaacct

SEQ ID NO: 34002 - DNA, 480 bp, Homo sapiens
taaaaattatctaaaacaatactacaatgggcttttcttccttctagttttctccccctgaccacaggctttatgaagcatagtcaaaagtatatatagagaaacaggaaatgcaagggagagaagtttatgaggcaaaaaatatatatattcatgtgtgtgtatatatatatgggtgtgtgtgtgtgtatatatgtgtgtgtatatatatatatcttggtttaaaaaaataacccagaagacaagatataatctttaaaaattattttatttttattaatgattacgggtacttcatagtggtacatacttatggggtacatatgatgttttttgttttagaggtgaggtcttgctgtgttgcccaggctggtcttgaacccatggcctcacgtgatccgctcccctcagcctctcaagtaaatgrgactgcaagtgagaggcactgtgtttggcatcttgctttttttggctaaacct

SEQ ID NO: 34003 - DNA, 589 bp, Homo sapiens
tctccaggtagtgaccagttctagttctgtctgaaattcgtactcaggtcccctgacttccagtcagtgatattccgaccatggcatcctgactgctaacccttgctaacaaaatttgaagtaggtcacctctgacctttgtttatgtttagaaaagttgttgtgctcaaggccttctatcaagtacccgctgcgccaggtttagtaaaatacataagctactccccatttttgttgttgctgtttttgcttttgctttttaaagtttttattacagtataacatccacaccgaaaagtgcgcaaatcctccataaactccgacmgagaggcaagacaagccaggcttcccacgctcctgtcccctccaccggccctgccaagggtaaccacgtgctgggagatttgcagcacaacgcaaaggagaaggattagcgagcaccttgttccagcaaaaactggagcaagcctaaaacttcctgggaattaagtgtaaatttaagccaggtattctagtaatgttgagttcaacaggattgccattattttaactagaattcagttgagagcagagcgccatcgccgtcttc

SEQ ID NO: 34004 - DNA, 589 bp, Homo sapiens
tctccaggtagtgaccagttctagttctgtctgaaattcgtactcaggtcccctgacttccagtcagtgatattccgaccatggcatcctgactgctaacccttgctaacaaaatttgaagtaggtcacctctgacctttgtttatgtttagaaaagttgttgtgctcaaggccttctatcaagtacccgctgcgccaggtttagtaaaatacataagctactccccatttttgttgttgctgtttttgcttttgctttttaaagtttttattacagtataacatccacaccgaaaagtgcgcaaatcctccataaactccgacagagaggcaagacaagccagscttcccacgctcctgtcccctccaccggccctgccaagggtaaccacgtgctgggagatttgcagcacaacgcaaaggagaaggattagcgagcaccttgttccagcaaaaactggagcaagcctaaaacttcctgggaattaagtgtaaatttaagccaggtattctagtaatgttgagttcaacaggattgccattattttaactagaattcagttgagagcagagcgccatcgccgtcttc

SEQ ID NO: 34005 - DNA, 589 bp, Homo sapiens
tctccaggtagtgaccagttctagttctgtctgaaattcgtactcaggtcccctgacttccagtcagtgatattccgaccatggcatcctgactgctaacccttgctaacaaaatttgaagtaggtcacctctgacctttgtttatgtttagaaaagttgttgtgctcaaggccttctatcaagtacccgctgcgccaggtttagtaaaatacataagctactccccatttttgttgttgctgtttttgcttttgctttttaaagtttttattacagtataacatccacaccgaaaagtgcgcaaatcctccataaactccgacagagaggcaagacaagccaggcttcccacgctcctgtcccctccaccggccctgccaagggtaaccacgtgctgggagatttgcagcacaacgcaaaggagaaggattagcgagcaccttgttccagcaaaaactggagcaagcctaaaacttcctgggaattaagtgtaaatttaagccaggtattctagtaaygttgagttcaacaggattgccattattttaactagaattcagttgagagcagagcgccatcgccgtcttc

SEQ ID NO: 34006 - DNA, 582 bp, Homo sapiens
tcttacatagtctaaattcttgtgtacttagctttttttgtggtactgtttgggacttgttttaatgattacattattactcgtatgcttcctatggtgttattcttgaattttttatactctaatttcactaaagataaggcccagcgaaaaggctttcaaagtactctctgtgggttcccctgtttgagcctgtgggagtaaggcagtggacagcacactctgagaactgtgcgttacaaattctatttaatttgatattcacaactatccccttaggatctgtattaccttcattatcatcatctccattttgtataaggcatgaggaagttagggaagtcatactactagtgagacatagattcaaaggtggactaagtggctccaatacctctctgtgttctttccattacatcatacatacgagtaaatagcctgtccatgttgctgtaacttctactaccaaaattcattatttacttttaaattgtgttcaaaagggtctatgtatacaattagttcaatacatatttactttttaggaagcattacagtacagttactgttgaaamacatgcc

SEQ ID NO: 34007 - DNA, 1337 bp, Homo sapiens
aaccgtttgaaaagtgtattttgaccaaatgtataaaagtaaatacatctgtgaaataggataacttattcaggcaattgaggttggagaggagataaaacattacatttaattcatcgagactcgccccactcaaataaatgtttcatggacttgaggagattaatggccaagttaaatgtactttcaatttttgttcagaaaagaaaaaaaaaatctgtgtgccataaaggagtgaacattgggctcaatggcctacttgcacaagaaggatcatttgccctgtgcatgtttcattatatgacaaggtaattatctttaatggaacatgaaaaagaatgaaacakatttttttttctcttttcttttttttttttttttttttttttttgagacggagtcttgctctgtggagtggctggagtgcggtggcaacatatctgctcactgcaacctctgcctcctaggttgcagtgattctcctgcctcggcctcccgagtagctgggattacaggcgcccaccaccaccacgcccggctgattcttgtagttttaacagagacaggggtgtcaccattttggccaggttggtctcgaactcctgacctcaggtgatctccccgtctcggcctgctgaagtcctgggattacagaggtaagtcaccgcgccgggccataatgaaacagatttcggatgccagattccaccacaagtggattttttcattaacaagggaggataatagctattctgagcttcagagtcatagaaagctagacaagaatcttacactttgcaaaactaatatttgaaatgatattaccttgtgttaatcatttaaaaatgtatcattttagcacacccatggataggtttttgctgagttaagaattaatgtgatggccagctgctgtgggctcacgcctatgatcctagggctttagaaggccaaaacgggcggatcacttgaggccaagagttcgagaccagcctggccaacatggcaaaaatcacaactctactaaaaatataaaaattaggcgggcgtggtggcttgcgtttgtaatcccagctgctcgaaggctgaggcgggagaacgggagaatcgctcgaacctgggaagcggaggttgcagtgagccgatatcgcgccactgcactccagcccaggcgacagagcgagactctgtctcaaaaaaaaaaaaaaaattattatgctttcgaagttgcattatttagcctgctcttccttctcttcctcctgtcagttatctcaataaaatcccattaaaattgcattgttaaagtgtttcaaattctatttttaggtagaggt

SEQ ID NO: 34008 - DNA, 1536 bp, Homo sapiens
ttgccgggtgggcgtcttcctggactatgaagctggagatgtctccttctacaacatgagggacagatcacacatctacacatgtccccgttcagcctttactgtgcctgtgaggcccttcttcaggttagggtctgatgacagccccatcttcatctgccctgcactcacaggagccagtggggtcatggtgcctgaagagggcctgaaacttcacagagtggggacccaccagagcctatagaatcaattccttggactcacagccatgcagataagccctggccatctcagcagccaccgcacaacccccctaatgaaagacacgccctcctcccctctggtcacgtaagagaacatcttccagctgcctttttcacacccactccagccctctgccccagttttctcctcctcactagtctgtggctttagtagttcctttgcttgtaattatgggatgggatccaggcatagggaactagttgtttcatagctcccagtcaaaaagaaagtgagagaagctgttgggcagygaacctactgtttaaaatcaggataaccacattaagcccaatatgccagttggcaccagatgctgtggacttggaatgaggccaacagggttcaccaggatgagagaggagagaggaatccacaggaccaccagaagggagagggaaccagatatgcagatcagagatagaggaagtggaaccagagagctgggagggaccaaggttgtaaggatggctaagtcccaccataagagctaaagggtcctgggagatgatggctcatttccacccaaccccaggatttccacagcacacacccacaggcctggacctgggatgaagatgaatgaagaacatggactcatgtggatgtggtttggctcagatgtccctgcaataaacaaggggtcagtacttagtccctgagtgtggttgaggtttgaggtcctggtcgagcagggcagtactggaccaggtctacgtcagcattcaggttcaatggggacaccagtggcttcaaacttcctgatctaattatgtttttagacacttagaagttattgaggactttaaagagcttttgtttatttgggttaatatttatgacatttgacattgaaacaaaaatttaaaatgttatcttttaatttatgttaaaatagcattaataaatcagttataggttaatgtagataggatgttttgtgaaaaagcaatctattgtgtccaaataaaaaaacaaaaagtgtgacactggttaactttttccagatctcatgtctggcttaataagagatatttgtattatcatatctgcctttgtattaaacctattggtatatcataggtcatgttagctcaaaaaaactttactgcacactactgagagaatgagatgaaaaacgattaatgtttcattattattattgtgaaaatattattaacactggggactccttaagagtacatcagagttctctctaggaatcccaaaaccacattttgaaactagaatagt

SEQ ID NO: 34009 - DNA, 596 bp, Homo sapiens
tggttccagaatttcaagcatcgtttttttgtttttgtttttgtttttttttagagatgaggaagttgaggccaagaaaagtgaaagtatttagttaaaaacacatagtaagtgactgagctgcaagtaaaccagtctcccagctattcatgcagtaaaatgactgaactacaaatgggaatgagaacagattaaactaatctggagccagagttgtcagaaagttctctagggaaatccatgagcatgtccccattggttcaaggatttcttatgcagagggagagaaataaygtgatttctctcacatgaactcaggggccaactttggatagaactgaaagctgtacctgagaaacaaagagaaatattccttcctccttcattttatactatttccagcaccaaaaccttttcttctctctgcctgcccccttccacacaaactgtccaactccattctcatttccccactgaggtggatgctgtggtgccctgccctggtcactccgtgttggactgagacacacaatcaaccagctgcagagagtgttggtggctcagggccctcagctgactccataccatgaattgtt

SEQ ID NO: 34010 - DNA, 740 bp, Homo sapiens
tttaactgtatctttgtaaccattgaccaatctcttcctttcccaccagccctctccccatcatagttttttccatagttttttctccccatcacagctttttcactctaggttttcagctagtgagagaaagtgttacagctcgtttactcccaccactggcaagctccgggttcttgtcccacaaccaagaataataagccacatgcacaccagagagtgagtaatgcagagttggatttattaagcagcagagaagctctcaccaaggagaagggatctgagatagggtttctggctgtgaggctaagttcagggtttttatacacttggaaggaggaggaatgcactgattggtctgcgggccaacttggaggaagcaccaatcagaaagagacatgttagtggaaagaaccaattgaaggcagaggtaaaggctcagcctacaaccaatcaggggctggaggaatgttacactttatgcaaactaatgttcggcccatgaccaaacacagaaatataggtatatgtaaaataagtgaaagataaggaccagttgggaggaagtgtgtgaaacgagacagaggggtaagccaaggagagggaaatgtgtccaaaacaggagtggaatttgttcatctgggttcaaagagtaggcatttccrtccaagaatgcagactctttcttatcttatggggcctgcagttttattttcaggctgttcctagtttaaaggagt

SEQ ID NO: 34011 - DNA, 982 bp, Homo sapiens
gggtcattagggacttcctgggtgcaaaacagtgaatcaagtygctcactattttgcatacttgatggtgaaagaaaattagctttttcctaaagccccagtgtcaccagacccacctctggccccggcaaaaggccagtgaaattatgaaatgactttagccatgatataccaccacgctggaggggaaatctgtctgagacctcaggtggtgagggagaagtgacaggagagaattgatgagctgcacgtggggctgcgattctctgacagatacatcaggaaaggaatccctgtcacccaaatggctgagctcttttctacataatatttgtttcaaatgcatgagatgctgcagcatcacatcagagaggaaatggcttgatctttgcctgtgttcaatgggcaagctctgtgattcaggtgagatcctagtcaattctctgtcctaaatgctttggggaatgtttaaccagttttgaaaatggcctaatctgggaatataggaaaagggggagagagagagaggagggagaaggagaataaaggagagggagggaggagaggaagggaggaaaaaggggagagagagagaggagggagaaggagaataaagaagaaagagggagaagaggaagggaggaagcatggagagagaggagggagaaggagaataaaggagagggagagaggagaaagaggaaggaggagatggaaatgaggaaagcagagggagaggaggtctcattctcaatatccagtaacatcagatggctgaagtagcaacattttttctgaactttcagaattttcaaaccatattagaggcatatactttgcttgaattgccccatattgactgtaagcaatgggactagggattttcttgacatttgcttaaccacaaaggcttacatgcacaacgtacatttaaaatacaggcacaaaaggtatatttatgagttctttctttgattcttca

SEQ ID NO: 34012 - DNA, 982 bp, Homo sapiens
gggtcattagggacttcctgggtgcaaaacagtgaatcaagttgctcactattttgcatacttgatggtgaaagaaaattagctttttcctaaagccccagtgtcaccagacccacctctggccccggcaaaaggccagtgaaattatgaaatgactttagccatgatataccaccacgctggaggggaaatctgtctgagacctcaggtggtgagggagaagtgacaggagagaattgatgagctgcacgtggggctgcgattctctgacagatacatcaggaaaggaatccctgtcacccaaatggctgagctcttttctacataatatttgtttcaaatgcatgagatgctgcagcatcacatcagagaggaaatggcttgatctttgcctgtgttcaatgggcaagctctgtgattcaggtgagatcctagtcaattctctgtcctaaatgctttggggaatgtttaaccagttttgaaaatggcctaatctgggaatataggaaaagggggagagagagagaggagggagaaggagaataaaggagagggagggaggagaggaagggaggaaaaaggggagagagagagaggagggagaaggagaataaagaagaaagagggagaagaggaagggaggaarcatggagagagaggagggagaaggagaataaaggagagggagagaggagaaagaggaaggaggagatggaaatgaggaaagcagagggagaggaggtctcattctcaatatccagtaacatcagatggctgaagtagcaacattttttctgaactttcagaattttcaaaccatattagaggcatatactttgcttgaattgccccatattgactgtaagcaatgggactagggattttcttgacatttgcttaaccacaaaggcttacatgcacaacgtacatttaaaatacaggcacaaaaggtatatttatgagttctttctttgattcttca

SEQ ID NO: 34013 - DNA, 992 bp, Homo sapiens
tccagtgtgagaccctcagtaactacagcaatatgttggatttagtaggtttcgatttttcaatgattaaaactgaaatcacagctaatattctttttcgggggattaagcagggagagtgtatcagcaccagcccaatgcgagggcactggcgaggtgtaccttggatgtatgrctccagcgctggggagggctgaatagagagtaaagctgagccagggccctgacaaagaaccacacataccgtgcaccacctcacctcctcccgtaaatcatgcacctacggaggggaggagctacatttaaaaaggatcttgaatcttttattataattgagccttttctattgtgaatatagattttatccatccagctaccaaaatagtgtatgtcagaatcaaaacatattaggactgaaagtttatttagaaagcacttacattttatgaaagaggcattttatgagagacgaggacataggggcttggagaagttattgccctcctgaaggcacaggcaaggaggggttcctccagcctactgctccctggtcgctgttgcagacactctcatggttctgtgtgcccatagagcagtattccgaagttttctaagaaagtgagggggaaattttacaggcgtgaggaccctacatttttaaaaaactgactgagactaagagtaaagggaatacctgaagtgttgaaaaaaaatttgtgaagacatctgccagactactgctttcttttaggcccagtagttgaacaagtttaagaggccagtgcagcagagtggaggtggctgcgctgagatggtctcctctgtccacatttaccagggcaaaggatataagagtcttctgggaccagatgacagccatgttgaggagaggggaaaaaagagccaaatgagatggactggagcagtttcaagtcctgtcctagaggaccttccacacagggtctctgtttgggtggatagctagagaacca

SEQ ID NO: 34014 - DNA, 992 bp, Homo sapiens
tccagtgtgagaccctcagtaactacagcaatatgttggatttagtaggtttcgatttttcaatgattaaaactgaaatcacagctaatattctttttcgggggattaagcagggagagtgtatcagcaccagcccaatgcgagggcactggcgaggtgtaccttggatgtatggctccagcrctggggagggctgaatagagagtaaagctgagccagggccctgacaaagaaccacacataccgtgcaccacctcacctcctcccgtaaatcatgcacctacggaggggaggagctacatttaaaaaggatcttgaatcttttattataattgagccttttctattgtgaatatagattttatccatccagctaccaaaatagtgtatgtcagaatcaaaacatattaggactgaaagtttatttagaaagcacttacattttatgaaagaggcattttatgagagacgaggacataggggcttggagaagttattgccctcctgaaggcacaggcaaggaggggttcctccagcctactgctccctggtcgctgttgcagacactctcatggttctgtgtgcccatagagcagtattccgaagttttctaagaaagtgagggggaaattttacaggcgtgaggaccctacatttttaaaaaactgactgagactaagagtaaagggaatacctgaagtgttgaaaaaaaatttgtgaagacatctgccagactactgctttcttttaggcccagtagttgaacaagtttaagaggccagtgcagcagagtggaggtggctgcgctgagatggtctcctctgtccacatttaccagggcaaaggatataagagtcttctgggaccagatgacagccatgttgaggagaggggaaaaaagagccaaatgagatggactggagcagtttcaagtcctgtcctagaggaccttccacacagggtctctgtttgggtggatagctagagaacca

SEQ ID NO: 34015 - DNA, 1293 bp, Homo sapiens
taatgaaagaatcattcttttatggaactatgagaatcagatgagtattgctgacaaatataattcactaggctctttgagtttcttgtaggatggcatctaaattttgttggacaacttattggatttcctactttgagttatggagaagtgccatcatttaattatcaataacatgtttcatagcattccatacctgaaattagcatctacaaactaactcaaatagggagtttcatgaagactgcccaaaggttagaggcacaaataaatgaaagattttgacataaaagttattgtaatatttattatatttatagtttccaaagtaatagaaattccaagattgtgacaagaatattctgaaaaatgaataggatgctaacagttattttgactccttatagtcattaggatagattaacagggaaatagatttaagaacactataaagattgtatttacctggacagtaaatcttgctagacataacttttcatctttactaagatattcaaaatagttatttcatatacatattactaacttttaaaaatcccaagttaatcccagtaacatagagccaagtaaggtagcaacaccagatattctattttgtagactactatttcatttctaaatatagcaacactgcttatttggcagtcagacttctggcaacccaacctaaacatgcagctgtgactccaaacataaattaaaaaggcccctgagtggtcacaatagatgtcaaaaaagccagaactttattgaggtagagacatgccagccctcacatttagcagatattccattccacaactgtttataaaaacagaaaggctgctatcattaagcacaccgacagcagagtctgcattagtttagcaagatttccaaaacgaaccaacaaacttgttttgctgttaactgctatccaatgctaaagtgattcttgttgagcttaacttttttttaatttttttgagacggagtttcactccttttgcccaggctggagtgcaayggcacgatctcggctcactgcaacctccgcctcctgggttcaagtgattctcccgcctcagcctcctgagtagctgggattacaggctcccgctgccacacctggctaattttgtatttttagtagagacaggatttctccaagttgggcaggctggtctcaaactcccaacctcaggtgatccacctgcctcagcctcccaaagtgctgggattacaggcatgagccactgctcccggccgtacttacttttttcaactatactg

SEQ ID NO: 34016 - DNA, 521 bp, Homo sapiens
tggaaatgagagccatcatggaccagaaacgtgggcaggcgtaggaagcttcagagttggaatccaattcgaaacaacttcccatcacggcaggaaagaaccaaacgaatggaaatagaggaagaaactttggtgaaatcgagcttggaaaacagcttgttggtaaaaatattaactaagtcgttgatgggtctggtgtgttggagttttaatgctggttccttgaacaataccattaaaatacctgatgataaggcaaacccaagcttattgctygtaaaatcaaggagaagagaagaaaaagtcggagtatttatgagatttgggggtatggtataagggttaatattgggtgaaaatcatactaattaaaaatgggtgggtaggatttccaagagtctcggagagttaacagtcatttgatgctatttattgaaaagttgggcagtctgataataaattaagtgggattttggagaagtctctgaaataaacagtgaagttatctgcagcttttatct

SEQ ID NO: 34017 - DNA, 493 bp, Homo sapiens
tctttaaaaatattttacttacataatatatagaaaggcaagtatctttatattcattaggcaaaataaaggtctaaattattttaagtagtcatactatggtgtggcagagaattataaatcttaatattgttcatgctgtggtttcatatatgatatcttttaaactaacaaattgtagacactgaaaatttattacttctgaagagaaatattgattattataatttttaatggaagatttaaaaacaagatatcttgatatccagcaaaactttctaaaactagaacttaaaattaagggcccagattgtttgtttttttttttttttggtggaaaggcatactttaaatatgggcacataaatattgaaagcaatttgagatgtyccctctctctggttcccaggcaggaaatgtataacagaaacacctgtggagctctctgaaaatattttggtgggggtatggggagtagagggtggtcaccaca

SEQ ID NO: 34018 - DNA, 861 bp, Homo sapiens
caaaggtgtgaactggctaatgcagaattcaatttcagttttagaaggatccttttcttgtcagcatagagaatggatttagggttatggatgggagtgagcatgaggtcaagggctgagatactaatcaaaaggttactattatagtaagcctaggaaagaaatgatgaggactcttctcattttgactttccttcaaaactcaaactctccctaaactttcccatgtaaaatgcacatatcccaaatcctaaaatttgatctctaacactagccagtttaggaagataaaaaatgaaagggggaaagttgaaggcatttcccctaagaagtggaacaagacagggatgcctactttcaccacttctattcaacacagtgctattaatagaaatcccatccatagcaatcaggcaagagaaagaaataaagggcatccaaattagaaaagaggaagtcaaactatctccatttgtcaggataatcatatatctagaaaaacctaaagactcctccaaaagactactagatttgataaatgaatttagtaaagtcttagtttacaaaactaatgtacccaaatcagtagccctgctatacaccaacaacaaccaagctgagagccaaatcaagaactcaatcccttttataagagttgtraaaaaaaaaaaaaaaaaaaacccaccgatgaatatacttaatcgaagaggtggaagatctctataaggagaactataaaatgcagctgaaagaagtcatagatgacacaaacacagggaaatatatgccatgctcctggattggaagaatcaatattgtgaaaataaccatacttcccaaagcaatctacagattcagtgc

SEQ ID NO: 34019 - DNA, 861 bp, Homo sapiens
caaaggtgtgaactggctaatgcagaattcaatttcagttttagaaggatccttttcttgtcagcatagagaatggatttagggttatggatgggagtgagcatgaggtcaagggctgagatactaatcaaaaggttactattatagtaagcctaggaaagaaatgatgaggactcttctcattttgactttccttcaaaactcaaactctccctaaactttcccatgtaaaatgcacatatcccaaatcctaaaatttgatctctaacactagccagtttaggaagataaaaaatgaaagggggaaagttgaaggcatttcccctaagaagtggaacaagacagggatgcctactttcaccacttctattcaacacagtgctattaatagaaatcccatccatagcaatcaggcaagagaaagaaataaagggcatccaaattagaaaagaggaagtcaaactatctccatttgtcaggataatcatatatctagaaaaacctaaagactcctccaaaagactactagatttgataaatgaatttagtaaagtcttagtttacaaaactaatgtacccaaatcagtagccctgctatacaccaacaacaaccaagctgagagccaaatcaagaactcaatcccttttataagagttgtaaaaaaaaaaaaaaaaaaaaacccacygatgaatatacttaatcgaagaggtggaagatctctataaggagaactataaaatgcagctgaaagaagtcatagatgacacaaacacagggaaatatatgccatgctcctggattggaagaatcaatattgtgaaaataaccatacttcccaaagcaatctacagattcagtgc

SEQ ID NO: 34020 - DNA, 1225 bp, Homo sapiens
acttytccttgtgaacaaaaacaatcacactaatagttttattaatttaaaaaaaaaattttgggagcaaaatgttgtcatggagcaaacccaaaactagaggggaaaaagtcctggtctgagtctcaactgggccagggtctaccctggctactttgaccagaagttgacaaggtggggagacccaaacctgccctacctctgcagaaaattgatggccagtcaatgcagccaagggctattacacttgtaaagcagtgaagaccattataaggcctttgtcaaagatatgtattcaaaatcccttctgagtgctttacctcaatcatcaaacttggagggaaccaaatttaaagctcaattaaaaccagagaaggccaaatatcttaatgaagactcactacagcacagttcttacaatccatgcccaagccctttaaaggcatgatcatcttcgaatgaagtctcaaagggttgaacccatgctaaaatctctaacatgagatgaattacagcaaagttaccgtttaattaacctatctttcaaaattcttgctgacatattttttgccacttcagattatgttcatgatgtgattttttaaattagcaaagaaggaggtttttacatttgttcaaactgaaagaataaagacatgtttgcacaaaaagaaagtgttggtcaatacttttattattttctaatattcttataagttttcttcatggcttgcctatatggcaaagccttattctgttcatttcctagagtctgcaaaaaagtctgtgattattatttaaggatcatggtgattcccttcactgcatgggggcgggggagggggaaagcaaaagcaaagctattatcctgtatttataacacgtctgttaccatagtaatgcctgtgctgtcacaaaccataccaagggccagaggctgtctctgtggggggaaaggcagcacagagttggaagatgaatgcacacatgtgtggccagagcagggtcaatgctgtggtaaccaccaagacacgggagctccccttctccagagaaaagggagggcagggccagaagagcagttctccaggcccagaagtaagctacacccacaattctgtatgcagctgtgagaaaggagagtggaaatccaagtcaatgcagtatcaccgtgttcccaatcacgagtattccactgggcccactggctgccaagacatggatg

SEQ ID NO: 34021 - DNA, 1225 bp, Homo sapiens
acttctccttgtgaacaaaaacaatcacactaatagttttattaatttaaaaaaaaaattttgggagcaaaatgttgtcatggagcaaacccaaaactagaggggaaaaagtcctggtctgagtctcaactgggccagggtctaccctggctactttgaccagaagttgacaaggtggggagacccaaacctgccctacctctgcagaaaattgatggccagtcaatgcagccaagggctattacacttgtaaagcagtgaagaccattataaggcctttgtcaaagatatgtattcaaaatcccttctgagtgctttacctcaatcatcaaacttggagggaaccaaatttaaagctcaattaaaaccagagaaggccaaatatcttaatgaagactcactacagcacagttcttacaatccatgcccaagccctttaaaggcatgatcatcttcgaatgaagtctcaaagggttgaacccatgctaaaatctctaacatgagatgaattacagcaaagttaccgtttaattaacctatctttcaaaattcttgctgacatattttttgccacttcagattatgttcatgatgtgattttttaaattagcaaagaaggaggtttttacatttgttcaaactgaaagaataaagacatgtttgcacaaaaagaaagtgttggtcaatacttttattattttctaatattcttataagttttcttcatggcttgcctatatggcaaagccttattctgttcatttcctagagtctgcaaaaaagtctgtgattattatttaaggatcatggtgattcccttcactgcatgggggcsggggagggggaaagcaaaagcaaagctattatcctgtatttataacacgtctgttaccatagtaatgcctgtgctgtcacaaaccataccaagggccagaggctgtctctgtggggggaaaggcagcacagagttggaagatgaatgcacacatgtgtggccagagcagggtcaatgctgtggtaaccaccaagacacgggagctccccttctccagagaaaagggagggcagggccagaagagcagttctccaggcccagaagtaagctacacccacaattctgtatgcagctgtgagaaaggagagtggaaatccaagtcaatgcagtatcaccgtgttcccaatcacgagtattccactgggcccactggctgccaagacatggatg

SEQ ID NO: 34022 - DNA, 1225 bp, Homo sapiens
acttctccttgtgaacaaaaacaatcacactaatagttttattaatttaaaaaaaaaattttgggagcaaaatgttgtcatggagcaaacccaaaactagaggggaaaaagtcctggtctgagtctcaactgggccagggtctaccctggctactttgaccagaagttgacaaggtggggagacccaaacctgccctacctctgcagaaaattgatggccagtcaatgcagccaagggctattacacttgtaaagcagtgaagaccattataaggcctttgtcaaagatatgtattcaaaatcccttctgagtgctttacctcaatcatcaaacttggagggaaccaaatttaaagctcaattaaaaccagagaaggccaaatatcttaatgaagactcactacagcacagttcttacaatccatgcccaagccctttaaaggcatgatcatcttcgaatgaagtctcaaagggttgaacccatgctaaaatctctaacatgagatgaattacagcaaagttaccgtttaattaacctatctttcaaaattcttgctgacatattttttgccacttcagattatgttcatgatgtgattttttaaattagcaaagaaggaggtttttacatttgttcaaactgaaagaataaagacatgtttgcacaaaaagaaagtgttggtcaatacttttattattttctaatattcttataagttttcttcatggcttgcctatatggcaaagccttattctgttcatttcctagagtctgcaaaaaagtctgtgattattatttaaggatcatggtgattcccttcactgcatgggggcgggggagggggaaagcaaaagcaaagctattatcctgtatttataacacgtctgttaccatagtaatgcctgtgctgtcacaaaccataccaagggccagaggctgtctctgtggggggaaaggcagcacagagttggaagatgaatgcacacatgtgtggccagagcagggtcaatgctgtggtaaccaccaagacacgggagctccccttctccagagaaaagggagggcagggccagaagagcagttctccaggcccagaagtaagctacacccacaattctgtatgcagcygtgagaaaggagagtggaaatccaagtcaatgcagtatcaccgtgttcccaatcacgagtattccactgggcccactggctgccaagacatggatg

SEQ ID NO: 34023 - DNA, 736 bp, Homo sapiens
aaagtacgagataagcctaagatatcttgggccaaaaacgccaagaagtgctcaaagctaaacaaggacaagttcaatgaagacagaagctggtctgaagggttcctggccaatctgtgaacgattttaaatatcagaaagaatgacatcgatggattaaaacacatggtgagaaaaactgacccataagtctataattacagggggtgtgtgtagctattcttgggtaaaagttattggaaaacaaaatattctcattgtctcaaggtatcacccctggggttacttgttaattacaggaggaaaatgtgccttcacaataagaggtatggcagtcactcccttggccaagtggtcaagtttggcatcaccataaaaaaaaatgacctggcaatatatgctgcytcattggatgcaaagaggaagacaatataacctatgtggtgtccttgacaaagaggttcagactaaatatagttatcaggaaacaaataaaggttggggaaactaaactgccaaatgcaattttgtctttgtgtgaacttatcatagccaaatctatgagctatttaaatttctattttccccaaggtttccaggaaagcagcaactgctgtagaatagaaccacagctaggagtataattattgtgtatagtggtgtaattatgatgatgctgctgaggaaacgcaagagttactgctttggaagtccccctaaccacaggagccaccaa

SEQ ID NO: 34024 - DNA, 541 bp, Homo sapiens
cattatttaagcctttctgagcttctgttcaagacagcaagtttagtctgtcctttttcaattgtatttattttagtgtcttcctatttaagaggcttacagagtcttgggcaatctataagcaataaaaaacaccttccagtcatggtgaaaatgacaaggcaaacaaataatgtatacaaatccaaaataaataaataaataaataataataaaaaaaaaagctactcccaaaaagtgagttagtttttgccctcctagaaaaaaaamttttgaagttcagagtggtgtactcaatattaaaggactttcaggtacctgtattgtagagatccctttcttgtttttaaatggaactttcaaaatctgggacttctaatatcagtcattcatttaaaaaacattcaatatttattgaatgtttgcagtgtgacatcagcaggttgaaggatttggcagacaaaataaacaagataaagagaggtatagatgagtaagaggcaagagataattcaaaatcaccattaaaatagagtcacct

SEQ ID NO: 34025 - DNA, 615 bp, Homo sapiens
gcttgctgattacgtgcagctttcccttcaggcgggattcatacagcggccagccatccgtcatccatatcaccacgtcaaagggtgacagcaggctcataagacgccccagcgtcgccatagtgcgttcaccgaatacgtgcgcaacaaccgtcttccggagactgtcatacgcgtaaaacagccagcgctggcgcgatttagccccgacatagccccactgttcgtccatttccgcgcagacgatgacgtcactgcccggctgtatgcgcgaggttaccgactgcggcctgagttttttaagtgacgtaaaatcgtgttgaggccaacgcccataatgcgggctgttgcccggcatccaacgccattcatggccatatcaatgattttctggtgcgtaccgggttgagaagcggtgtaagtgaactgcagttgccatgttttacggcagtgagagcagagatagcgctgatgtccggcggtgcttttgccgttacgcaccaccccgtcagtagctgaacaggagggacagctgatagaaacagaagccactggagcacctcaaaaacaccatcatacactaaatcagtaagttggcagcatcacctawaaatg

SEQ ID NO: 34026 - DNA, 621 bp, Homo sapiens
agagctaagcagcttctgctgcctttgccagccccactgttcccaccactccttgacggtcatattttgcctattttacaccaatcctcctttaatgtcactttcagaacaaaatgctgggttctagactctcgatgtgacccaggatatcagttttgtcattagcagactaattaggcttgtttaggttgctgggaacaaagagactactcatggaagtacattggacaattatacggggaaagtaaggaagattgggtctgtattcctatgggtggggaaagaaaggtggggggggattccttacatttcaatatacagttctacctttttttctttttgtaagagacatgaggcactaattatcttaagtaatataytgtaaagtacctctcccatcctcttctgtattccccagtcacctcactggtttagagaatttgtgatctttagttcatggttgttatacagcatattacttctacccaatgctttgagggtaaaaatacaatatataattatggcccaattacttacattttctaaaatcttggttttacacctgtaaaatgaaagaaatagtagtactggtattgttgtggaaatttaatgacataactc

SEQ ID NO: 34027 - DNA, 621 bp, Homo sapiens
agagctaagcagcttctgctgcctttgccagccccactgttcccaccactccttgacggtcatattttgcctattttacaccaatcctcctttaatgtcactttcagaacaaaatgctgggttctagactctcgatgtgacccaggatatcagttttgtcattagcagactaattaggcttgtttaggttgctgggaacaaagagactactcatggaagtacattggacaattatacggggaaagtaaggaagattgggtctgtattcctatgggtggggaaagaaaggtggggggggattccttacatttcaatatacagttctacctttttttctttttgtaagagacatgaggcactaattatcttaagtaatatactgtaaartacctctcccatcctcttctgtattccccagtcacctcactggtttagagaatttgtgatctttagttcatggttgttatacagcatattacttctacccaatgctttgagggtaaaaatacaatatataattatggcccaattacttacattttctaaaatcttggttttacacctgtaaaatgaaagaaatagtagtactggtattgttgtggaaatttaatgacataactc

SEQ ID NO: 34028 - DNA, 590 bp, Homo sapiens
atttgaagaatgttttctattgaatgtctatcactttttcaccatcctagaaaaacccaggttgaatcatcataagttggggatcatctgcataagccacatagtatttgctgagaacttggtatgtataatttattctgacttccgtggagagaagagagagtatgcagatcatttggatatattaatgcactgctcctaaaagcaaataaaaaacagcaaggtgctcaccttttttttctaaagcatgtggatttttgtcttgttttatgttgttttgttttgttttatcctaaacccactgactcagaatctctggaagtggagtttagactctggcattttcagtaagcttcccaaatgattcttatatttggggaaatcttttgaaagccaaacacgtgttgaactacttgaaacttttttaaagctggttagaatgaccatctaatctgtggtactttaaaagagaaagaagacactattaaaaaattattgcagaacaacctgtgtgtrtatatatatatatatatatatatatatatatatatatgccaagaacttcccagaaaatcaagaaatactttcat

SEQ ID NO: 34029 - DNA, 637 bp, Homo sapiens
agtgagtttggatacattctcccagggcctttcaattctctctacttgaatcctaataggtactttaaagaaaatgactttggaggttatacttctcaaactggaatcgtacatcatcttcgctatctacagtctcgaaacaaatcctgtagctgtgccccccaccgcagcctccagtagtaaagaatttcaaacaytaaatttgatattgtgaatatcttcttaaaatatccataggatttattgtggataactctaaacatattgtttaatgaagaagcatgtttactgctacaaatcaaaccttacaagatggttaaagagctttctgtgaacaattctgagaatcagagacttaagatgttatcttttctgtattctgaaataaagatgtcctgaaaagccattgaaatccaaatgaatgaataatttgtaatggtaattgtgtgtggtggtgtgtgtgtgtgtgttttacataagcagaagtaggaatatttgagcagaaagggccaaaatcacaatccatcttccatttgcaatctcaccagcaccctaaagcatctatactcctagagtatgaaattagcaagatgtgatgataccaattctagagaaatacatattacacatgctcaca

SEQ ID NO: 34030 - DNA, 598 bp, Homo sapiens
ttatatctatatatatctatatatatatctatatatatatctatatatatctatatatatatctatatatatatctatatatatmtatatatatatctatatatatatctatatatatctatatatatctatatatatctatatatatctatatatatttgaggttgcatatttcactttatttagcaaatggtcacacttggccccaccactgcccctgcagccttgcttgaacacctgcctcaggaagcagctcagagtgaacaggaaggcctgggtttccaagcttgggcctcacctgcctccacacatgccacacactacagaacaaaattactgccccatgtcctcaggagcccatcccatgtggtccaggcggccctccagtgttcaacagctgcctgcaggggctgcagcccagctctaggcacagaccccctgttcctgagacaccagccccaggagagcctctgtctccagctgtgagggtgccagacactgagccctggccctgccacctgtccttgctgggcaataagcaaatgtatgaaaatacttcaatgacttctttgaaagagttaagcttggcaataaattt

SEQ ID NO: 34031 - DNA, 598 bp, Homo sapiens
ttatatctatatatatctatatatatatctatatatatatctatatatatctatatatatatctatatatatatctatatatatctmtatatatatctatatatatatctatatatatctatatatatctatatatatctatatatatctatatatatttgaggttgcatatttcactttatttagcaaatggtcacacttggccccaccactgcccctgcagccttgcttgaacacctgcctcaggaagcagctcagagtgaacaggaaggcctgggtttccaagcttgggcctcacctgcctccacacatgccacacactacagaacaaaattactgccccatgtcctcaggagcccatcccatgtggtccaggcggccctccagtgttcaacagctgcctgcaggggctgcagcccagctctaggcacagaccccctgttcctgagacaccagccccaggagagcctctgtctccagctgtgagggtgccagacactgagccctggccctgccacctgtccttgctgggcaataagcaaatgtatgaaaatacttcaatgacttctttgaaagagttaagcttggcaataaattt

SEQ ID NO: 34032 - DNA, 587 bp, Homo sapiens
attcaattcaacaaatctttattgaggacctacatgtttgtggtattcatgcctattaaaagtgccttattgattcataagaatgaaagcaatgaaaaattatacaaggcaggctgggcatggtggctcacacctgtaatcccagcactttgggagactgaggcaggcggatcacttgaggtcagaagttcaagaccagtctggcacatatgatgaaatctcgtctccaccaaaaatacaaaaattagccgggcctggtggcatgcacytgtggtcccagctacttgggaggctgaggtatgagagtcacttgaacccagcaggtggaggttgcagtgagctgaaattgtgccactgccctccagcctaagcaatagagtgagactctgtctcaaaaaaaaaaaaaaaagaaattattcaaggcagaataaggtaaatgccacaggaagaaaagcaaggtgttttggtacttccaagagctgagagatagcttgaggtctttatcaggaatatagtgtataatctggttttaaaatcagaaaatgttgacttctgaatctgtagaactgaagataatactatgacat

SEQ ID NO: 34033 - DNA, 587 bp, Homo sapiens
attcaattcaacaaatctttattgaggacctacatgtttgtggtattcatgcctattaaaagtgccttattgattcataagaatgaaagcaatgaaaaattatacaaggcaggctgggcatggtggctcacacctgtaatcccagcactttgggagactgaggcaggcggatcacttgaggtcagaagttcaagaccagtctggcacatatgatgaaatctcgtctccaccaaaaatacaaaaattagccgggcctggtggcatgcacctgtggtcccagctacttgggaggctgaggtatgagagtcacttgaacccagcaggtggaggttgcagtgagctgaaattgtgccactgccctccagcctaagcaatagagtgagactctgtctcaaaaaaaaaaaaaaaagaaattattcaaggcagaataaggtaaatgccacaggaagaaaagcaaggtgtttyggtacttccaagagctgagagatagcttgaggtctttatcaggaatatagtgtataatctggttttaaaatcagaaaatgttgacttctgaatctgtagaactgaagataatactatgacat

SEQ ID NO: 34034 - DNA, 641 bp, Homo sapiens
ctaaaaacaatgtgtgggaaataattcagcattatcaaagtgaatttcagagagcatcagctgctgcttggggcctggggtcacacctctatagtcgctggtcttggagagagggttttacccctgaacctactgccctactctgaacctattgcccgacattgctgagatcatttatgatttccaagagaacttgagtgaggatatgtgcatggtttagtgaattggctcccatttcctgagccctaatatgccatggcacagctgctctagtagtcacggtaaatatgttatttcattgagttttcacagaaagtcaatgaaatagatattcctgatcccctttagtttcagacaggaaactaaatccctgagaggtcacatgatttgcccaagcctcaggttaaatttgggaagtaccagcgctgagattcagacccagkactgtgtaactttagagacatgctctcatcttgctccagtgatagacactgagcacccagtgtgcagcaagcagtgggttgtatgctggaaatataaagaagaatgaagccacgcactttgcaggggcatagcacatcatcttcagcggaatgctaaggaggttccaaaatgacttaattgaaagcactgcataaatg

SEQ ID NO: 34035 - DNA, 585 bp, Homo sapiens
acttgggactctttgtttttattttttatcatgactttatttatttattattttattttatctattttttttgagacagagtctcgctctgttgcccaggctggagtgcagtggcgtgatcttggctcactacaacctccatctctcaggttcaagcgattctcctgcctcagcctccggagtagctaggaataaaggttcccaccaycacacccggctaatttttgtatttttagtagagatggggttccaccatattggccaggctggtcttgaactcctgacctcaggcgatccacccatcttggcctcccaaagtgctaggattacaggtgggagccactgcatctggctaatttttatcataactttatattctgctgcaagctgcttttaattattcaagttaagaggaaggtaaaaaaaataatttccagttcttacctgagctgaaaaaaatgagataggtaatataagccagttcaaattacagtggaagtaagaaaactcagtttctttgtaaggatctgagtagcccaagtagaatcacatgatcatattggaaagcatcttaaagatcataaa

SEQ ID NO: 34036 - DNA, 585 bp, Homo sapiens
acttgggactctttgtttttattttttatcatgactttatttatttattattttattttatctattttttttgagacagagtctcgctctgttgcccaggctggagtgcagtggcgtgatcttggctcactacaacctccatctctcaggttcaagcgattctcctgcctcagcctccggagtagctaggaataaaggttcccaccatcacacccggctaatttttgtatttttagtagagatggggttccaccatattggccaggctggtcttgaactcctgacctcaggcgatccacccatcttggcctcccaaagtgctaggattacaggtgggagccactgcatctggctaatttttatcataactttatattctgctgcaagctgcttttaattattcaagttaagaggaaggtaaaaaaaataatttccagttcttacctgagctgaaaaaaatgagataggtaatataagccagttcaaattacaktggaagtaagaaaactcagtttctttgtaaggatctgagtagcccaagtagaatcacatgatcatattggaaagcatcttaaagatcataaa

SEQ ID NO: 34037 - DNA, 657 bp, Homo sapiens
tttatttatgtatttaaaaacacattgatgtataatctcaattagataaaatagaagttaagggaggtccttgcagagataccatttgaacttaacaatcttggacctttgattgagaagtatactttctttttttttttttttttttttttttttttagtgaggcagagtctcactctgtcacccaagctggagtgcagtggtgcaatcctggcttactgaagcctgaactcctgggttcatgcagtcctcctgccttagctccccagtagctgggactgcaggtgtgtgccaccatacccggctaatttattaaataaaawtttttttttttttttttttttgtagagatagggtcttgtcatgttgcccaggctgctctcaaactcctgggcccaagtgatcctttcgccttggccttccagagtgttaggatcataggcgtgagccaccacaccctactgagaaatgcacttgacccctggacaactgattaccctccctcagtcagttgaaaattcctgtataccttttgacttcccctaacttaactattaattgttaactggaggctttactgataacataaacaattgattaacacatattttgtatgttataggcattatatactgtattacaataaactagagaaaa

SEQ ID NO: 34038 - DNA, 657 bp, Homo sapiens
tttatttatgtatttaaaaacacattgatgtataatctcaattagataaaatagaagttaagggaggtccttgcagagataccatttgaacttaacaatcttggacctttgattgagaagtatactttctttttttttttttttttttttttttttttagtgaggcagagtctcactctgtcacccaagctggagtgcagtggtgcaatcctggcttactgaagcctgaactcctgggttcatgcagtcctcctgccttagctccccagtagctgggactgcaggtgtgtgccaccatacccggctaatttattaaataaaattttttttttttttttttttttgtaragatagggtcttgtcatgttgcccaggctgctctcaaactcctgggcccaagtgatcctttcgccttggccttccagagtgttaggatcataggcgtgagccaccacaccctactgagaaatgcacttgacccctggacaactgattaccctccctcagtcagttgaaaattcctgtataccttttgacttcccctaacttaactattaattgttaactggaggctttactgataacataaacaattgattaacacatattttgtatgttataggcattatatactgtattacaataaactagagaaaa

SEQ ID NO: 34039 - DNA, 657 bp, Homo sapiens
tttatttatgtatttaaaaacacattgatgtataatctcaattagataaaatagaagttaagggaggtccttgcagagataccatttgaacttaacaatcttggacctttgattgagaagtatactttctttttttttttttttttttttttttttttagtgaggcagagtctcactctgtcacccaagctggagtgcagtggtgcaatcctggcttactgaagcctgaactcctgggttcatgcagtcctcctgccttagctccccagtagctgggactgcaggtgtgtgccaccatacccggctaatttattaaataaaattttttttttttttttttttttgtagagatagggtcttgtcatgttgcccaggctgctctcaaactcctgggcccaagtgatcctttcgccttggccttccaragtgttaggatcataggcgtgagccaccacaccctactgagaaatgcacttgacccctggacaactgattaccctccctcagtcagttgaaaattcctgtataccttttgacttcccctaacttaactattaattgttaactggaggctttactgataacataaacaattgattaacacatattttgtatgttataggcattatatactgtattacaataaactagagaaaa

SEQ ID NO: 34040 - DNA, 643 bp, Homo sapiens
gcttgctgcttttcattctttagtactcacctctttcccctctaccctggggacctttgcaaatgctgatccagctgcctggagtgcccttccttcccttgctaattattcttctgatctcagtttaagagatgcttactcaaagctaccttctctaacttgagtacatcttcctctgttaagctcccttagtatggtgaattgctcttcagcttagagtgactgccattgcaagtaactgaagtcaaattgttttaaacaaacctagtggctttattgtctcctgtgtcttgagggttcagaagccagatgggctttagggttgattggtttgagtgatgttgccaaagattcaattttgtgcttttctctactttgtcttctctaacgtaaattttatcgtctggccagagtcctctctctcggttatgggaaaccatcaacagtttgggggygcttgtttccaaaaccttagaggagtgagagagcttctggaccaagagtgctcagcagtcctctccgttcatgtcactggccctccttgtgtcatgtcctcatccatttctgaaccaataactgtgaccagggagaagataggattcttttggtcttgaaccagttgcctagctcctagagataaagg

SEQ ID NO: 34041 - DNA, 1724 bp, Homo sapiens
agaaagaagaattagcagattaagccttaataatatataaatactttacaagtgaaggtaagacttaaaaagatttaatagcataaactttaataattcatgtattagaggcatcaggtttaaaataaactgctgttctttcacttattttgtcttatttccgtctttaaattagaaatgaaaagaacctgtagttgttttgtttttactgtgtcaaaaaaatgcttaaaagtcatgtttcatggtggatttttaaaattgtggtaaaatatatataacatgaaatttaccattttagccatttttaagtgtgcagttcagtggcattaagtacattcacatgcttgaggaaaacaccaccatcatccatttttcagaacttcatcatcccacactgaaactctgtactccttaaacagcagctccccattctcccaccccccctgcccccggtaaccactattctgtgaatttgatgatattttaaaattgttgtccacagtgattgtccgaaccaatatatagtaatgatatctctctgtgtgtctacagggatcacctcctttaacgtgactgtatcctaactaaatgcataattgccttgtattgggaaatggtagacacttctcgaggacctgaaaccattcaatttagtcagtgctcctagccatcactaaccttatgtgttcacccggagtcagatcatttctctcatttaagaaaacaataattctagaaaatgacttttaagtgacaggtggtaaaatggactgtcttgagtatgtgcttgatactccaaactttaccagtctgcactgagaaggcaaaaagaatcagtaactgttatgtaatatttttaatacttcctagcttgtcagtataatgccattgtgaatgctgtgcaaccatgcaaaataagtacattgaaatgtagggattcagatggctttttagtcatttaatgagcaataggaatttttggaatttcaaggaaagtgttaccttgccagaggacttgctctgtattgctagggagtctcactgctcaggagactgaggaacagagcagggcatgcagcctatcattgccgtggctgcttagaaggaagcagcagcaagcaggcatgagaggcagcctatttcaggggttgcaaaagaaacacatggtccatggcgcttaggggagggagcattcacatcccaggcggacaccaggggaagcgcctgaggttggtggtggtttcagtaggtgctgaaggccacgagccattttrgccggtgcatatggggaagggagacaatcatgacatgggcattcctgataaaggaggccaccggagttgagggttagtggtagggaaaaaaagagcagctgttcgagttttgatcagctggagtgtgcgatttagtccctggaagagaaaggggcttgggcccgtgtggagcactttgataggctaagtggaaccctgattttgtgaaacttaataaactggtgctttagaaaggtgggtccaggaatggtgcctagcgtcaatcagagaagataagttatttaaaagggaaagtggttaaaggctgttttaattctccaggaggaagatgctgagggtctctacattatgtccattgtgatgagggtggaaaggagggccaaatggcagagatattgtccagacagaggctggctgaacagcagggataaaggagagagtggccataaa

SEQ ID NO: 34042 - DNA, 1724 bp, Homo sapiens
agaaagaagaattagcagattaagccttaataatatataaatactttacaagtgaaggtaagacttaaaaagatttaatagcataaactttaataattcatgtattagaggcatcaggtttaaaataaactgctgttctttcacttattttgtcttatttccgtctttaaattagaaatgaaaagaacctgtagttgttttgtttttactgtgtcaaaaaaatgcttaaaagtcatgtttcatggtggatttttaaaattgtggtaaaatatatataacatgaaatttaccattttagccatttttaagtgtgcagttcagtggcattaagtacattcacatgcttgaggaaaacaccaccatcatccatttttcagaacttcatcatcccacactgaaactctgtactccttaaacagcagctccccattctcccaccccccctgcccccggtaaccactattctgtgaatttgatgatattttaaaattgttgtccacagtgattgtccgaaccaatatatagtaatgatatctctctgtgtgtctacagggatcacctcctttaacgtgactgtatcctaactaaatgcataattgccttgtattgggaaatggtagacacttctcgaggacctgaaaccattcaatttagtcagtgctcctagccatcactaaccttatgtgttcacccggagtcagatcatttctctcatttaagaaaacaataattctagaaaatgacttttaagtgacaggtggtaaaatggactgtcttgagtatgtgcttgatactccaaactttaccagtctgcactgagaaggcaaaaagaatcagtaactgttatgtaatatttttaatacttcctagcttgtcagtataatgccattgtgaatgctgtgcaaccatgcaaaataagtacattgaaatgtagggattcagatggctttttagtcatttaatgagcaataggaatttttggaatttcaaggaaagtgttaccttgccagaggacttgctctgtattgctagggagtctcactgctcaggagactgaggaacagagcagggcatgcagcctatcattgccgtggctgcttagaaggaagcagcagcaagcaggcatgagaggcagcctatttcaggggttgcaaaagaaacacatggtccatggcgcttaggggagggagcattcacatcccaggcggacaccaggggaagcgcctgaggttggtggtggtttcagtaggtgctgaaggccacgagccattttagccggtgcatatggggaagggagacaatcatgacatgggcattcctgataaaggaggccaccggagttgagggttagtggtagggaaaaaaagagcagctgttcgagttttgatcagctggagtgtgcgatttagtccctggaagagaaaggggcttgggcccgtgtggagcactttgataggctaagtggaaccctgattttgtgaaacttaataaactggtgctttagaaaggtgggtccaggaatggygcctagcgtcaatcagagaagataagttatttaaaagggaaagtggttaaaggctgttttaattctccaggaggaagatgctgagggtctctacattatgtccattgtgatgagggtggaaaggagggccaaatggcagagatattgtccagacagaggctggctgaacagcagggataaaggagagagtggccataaa

SEQ ID NO: 34043 - DNA, 952 bp, Homo sapiens
ggagatccaaagagagagatacttaaataacatctgttttttttaaatgtgttcctgtctttagactgagattagggggtccaggataccaaaataatttccagatgttatcacaagcatcattactcataatctctgagtagttattgtactaggccattattgcattgctacaaagaaacacctgagactgggtaatttataaagaaaagaggcttaatcggctcatggttctgcaggctgtgcaggaggtatagtgtcatctgcttctgggtaggctttaggaagcttccaatcatggcagaaggcaaaaggggagcaggctctcatgtggcaaaagcaggagcaagagagagagagagagaacgaggtgccacacagttttaaacagccagatatcatgagaagtcactcactatggcaaagacagcaccaaggggatgaagcttaaacatttcatgagaaatcctcccctatgatccaattacctaccaccaggccccacctccaatactggggattgcaattcaacatgagatttgggtgggggcacatattcaaactatatcagttatgaacaggtgaagtgccagaagactggtgtctacatggtaaggatgcaatcatcaggaggttacaggttggtaatcttctgcttgactcctggcaaattctagaacggagtactcaatttttagtgttaagaagatggccacaagaaggggttaacaaaaacacattaataggaattcatttcatttatattttcttttttcagggaataaatgtttagggaaagctaacaaattggaacaggaacaaaatgaaataaatatttcagttttgaaataatagamccaaatcaacatgttgaaatgtacagggccaaatgtaaaatcttatgcttaggttgaaaagaatcaaatcaactatgccagttggaagatattga

SEQ ID NO: 34044 - DNA, 1186 bp, Homo sapiens
ttatctcaggctggtttatagttagaagagtctctaaaactttttgagaattatttattcatgatctctggtggctataatttcagtttaaatccagagcaaagaatcagcatgatgctatcttctttctctagaagttcaataaattgaagagaaagtaaattgscattagcaaggaaattcacatttaaaaaaaaatgcatgtctgttaggatgcagtggcccaatatgccttcaaaaagtaagaactctcttcttaaaggcagaatcaggttcatgacctaagaatctgccttcttatactacatcaaagagaagaaagaaaagaaggaaggaaaaaggaaagaattttatcaggccaagaattcccttcttctttccttcgttctctttaatgtagtataagaaggcagattcttaggaaagacaaaaagaaaaactgaaagaaggaaggaaagaatgaagaaaaaaggaagaaataaaggcagagagtaattaagaataagctactttttgaaagttatccaagtaagttaattataaaagcaaaataaatgtccagatctagtcacatttacacaaattagcattaagttctttttcagtcatttgttagttgtcattcattcattcttccaagcttgtgctaagagccggaagaatgatagaaaagactcttaccatataaggcaatggtttaaaaccatgggcaaaaccctacctttgaatacttgactgtcagcaaagtgacctccacaaagtgccatccaatttccattccccttccagcttctttgatgtttccaggaactgataaagtatgccttctgcatttaatatttataaattggttaaatgtctcaggctttggtctaagccatataacatagggcaaagaatgaaagaggttagtcagatcagagagaaaagcaaagagagaaagggtctcaacagagctgtagttattttctgtaaccaactggccctcgaaaacaactgacatccttagtcagatgctaagcatgtgatgtggaatggccatggctggcacccttcacagaggatcgtgcgtctccactgtgcaggtgtttctgctcctggaggcctgccagccagcaacctgattctctgaagggatcatacacagttgcctcctagttaaaacgggacacttatgcaaacacag

SEQ ID NO: 34045 - DNA, 1186 bp, Homo sapiens
ttatctcaggctggtttatagttagaagagtctctaaaactttttgagaattatttattcatgatctctggtggctataatttcagtttaaatccagagcaaagaatcagcatgatgctatcttctttctctagaagttcaataaattgaagagaaagtaaattgccattagcaaggaaattcacatttaaaaaaaaatgcatgtctgttaggatgcagtggcccaatatgccttcaaaaagtaagaactctcttcttaaaggcagaatcaggttcatgacctaagaatctgccttcttatactacatcaaagagaagaaagaaaagaaggaaggaaaaaggaaagaattttatcaggccaagaattcccttcttctttccttcgttctctttaatgtagtataagaaggcagattcttaggaaagacaaaaagaaaaactgaaagaaggaaggaaagaatgaagaaaaaaggaagaaataaaggcagagagtaattaagaataagctactttttgaaagttatccaagtaagttaattataaaagcaaaataaatgtccagatctagtcacatttacacaaattagcattaagttctttttcagtcatttgttagttgtcattcattcattcttccaagcttgtgctaagagccggaagaatgatagaaaagactcttaccrtataaggcaatggtttaaaaccatgggcaaaaccctacctttgaatacttgactgtcagcaaagtgacctccacaaagtgccatccaatttccattccccttccagcttctttgatgtttccaggaactgataaagtatgccttctgcatttaatatttataaattggttaaatgtctcaggctttggtctaagccatataacatagggcaaagaatgaaagaggttagtcagatcagagagaaaagcaaagagagaaagggtctcaacagagctgtagttattttctgtaaccaactggccctcgaaaacaactgacatccttagtcagatgctaagcatgtgatgtggaatggccatggctggcacccttcacagaggatcgtgcgtctccactgtgcaggtgtttctgctcctggaggcctgccagccagcaacctgattctctgaagggatcatacacagttgcctcctagttaaaacgggacacttatgcaaacacag

SEQ ID NO: 34046 - DNA, 649 bp, Homo sapiens
aacgatttaattttcttaagttacagccgtcacacaaagaaaagtctgcagtctatctatctgcctatctatacatatatgtatatatatatctctatactgttgcgaaaaaacatactttttttgcaacagtaactgcaccaaattactaggctcaatgttgatttagaaaacaaataactaaaaaatgctttttgctgtttttccagaggaatccaatttgatcatccattcggaccttaaacctcagaaattcaaatgtgtaaaaaatgtccatcaatgtaaacaaaaatggcaaaatgtgaatttctggagctgggtaacagttaaaaggcagttcattacactgtgctatgtatccttatgtttttaaaagtctattaaaatgttacatttttcaaaattgttcaggtgcatcaagtggtctttacaaaaatctttcattctaaaaccgtagagagcatccatttatcaataatgtacctgacaggacacactgacttgaaagtagtcttcaaatcacaccaacaattattctwtcaacagatagatgtaaggccatatctgactggaagttactgaagaaataaatgtaatataattaagtatatgtcttcttatgttaaaatgttatatagttgataactaa

SEQ ID NO: 34047 - DNA, 508 bp, Homo sapiens
atagatccaaatttttagatgttctctaattcctttttatttccacttgcaaaatgataaatttctcatgtgaactcatatcattcttaaatactctgctttaagcatcaaggaacaatcaagacaaattgacattctgaccctttccaacagcttctcctttcaaatccaccttaaatgttatcacatgcagcaggtttacaaaatatgcaactactgcataacatgaatcttcatctttctaatttgcaacatttgtttccttaccatttaactttggtatgccagcttttcattatgtcagctctcttcttcacagtaccattgtttctgctaataacaccacaataagtagactcaaacatgtaatggtgcaaacaatagtcctaggtgaatgttcagggtgctgtggtatttcttctccatgatgttttgcagagatccagaatcctttcatcttgtcacccttagggrcgtagggagttattatagttagattcagcaaagg

SEQ ID NO: 34048 - DNA, 1047 bp, Homo sapiens
tgtctcaaggtagctgaggatttttctttttcggtatatgtggtggggaggaaaatagctaaaaaatatttacttcatgtaagactagatttaggggagaatattaaaactcaggaagaggacttttaacataatgaggtggttaaaaggagacaacttctcaatagacaagggaggtattttgaatagatttttggaaatggtacacaaaattagttttattgaagagtgaaagagctggacagatgggaaaatcatcatggagactagtagattgtgagggtgaaaaccatgagtaggcttaaaagtattgtctcaagacaaaaaaaaaatgggctattttggaagtaaagagtttttaattccaggaggtggccctctactgatgtaagcagactgtgatttagtatgtgaaggatggatgtaccagactcatttcccagagggaagaggcagttactagattgtttagcctcttcacatgcttgtaatattgttgctttcaaaggtttgctgaagaaatgaatgaaatggcttgtcaagtattagtaagatatttctagctgtagttcaattgcattttttttttttttttttgagatagggtctccttctgtcacccaggctggagtgcagtggtgtgaacatggctcattgcggcctcgacttcctgggctcaagcgattctcccatctcagcctcccgtatagttgggaccaaaggcacgtgccaccacacctggctaagttttaaattttttgtatagatggagtcttaccatctttcccaggctagtcttgaactcctggacccaagggatcctcctgtctcagcctctcaaactcctgagattataggtgtgagccaccacgccctaccaacaaaacttttttttttttgcccgacccccagcaacaaaacttttgattccttccttatratagtttctttttaaataacttggacaagaaatgtttgcacagaatctcactgataatgtactttaacttgaagagtatgaaataatcttgagtctactatttttgt

SEQ ID NO: 34049 - DNA, 735 bp, Homo sapiens
tgcattttgtatttatacagtattatagtagtatataaactgtwtaatagtacttatacagtttaaccagtgagatggttaaatggttaacaagtaaaccacatagttaaccagtaaagatgtaaaatgacttcagacaaatatgatcaatctctacagtcccctgatgaatttcacaggttcccaccaccatcagttctacctattcatctcatccatgctcattgttctgcctctttcctgttcctatggatgccctggcatgtttgtttctttctttctggcctcctatttccctcccctcagacatcacttcagcatctgtgccttctcacttcccttatcctgggtgttaccatttcagcctatgagcatgccattaatttgccatctttacaaaattctctcttgacttcacatccctctgtagctgccctctcccttctctcctcttctttacaacaaaactccttaaaagaactgttggctgggcacagtggttcactcctataatcccagcactttcagaagccaaggtgggaacatcacttgaggccaagaggtcgagaccagcccaggcaacacagtgagacctcatcactacaaaaaataaataaaaattagccagatgtggtggcacactgcctgtagtcccagctactcaggaggctagggtgggaggatcacttgagcccaggaggttgaggctgccttaaacctcctcctgaaggatcc

SEQ ID NO: 34050 - DNA, 240 bp, Homo sapiens
atgacataatctatttgccatttcccattagccaatgaacagcttgtttctcttcctgaaaaaaggatagatcttacaytcccaaagaatcagagccagataacagcaacaaacttattgatcagttactatatggtagccatagttttgtgggttttttgttttgagacaaggtctcgctctgttacccaggttggagtgcagtggtgcaatcacagctcagtgcagcctcaacctcct

SEQ ID NO: 34051 - DNA, 588 bp, Homo sapiens
tgaacaggccatgtttgcctagagtggaggttctgggggacaggaagagaggaaaggaaagaacacctggaggagcgggcagggctcatcaggcatccaccccaggggagatgatgccaggacatgagaccagcccgcccagctgggcttcccccttgactccaaagcaaggccatgactctgatcyggggttccagcctccccagtctattgactctccctgctggtggaggggagttgtgggggtaagggagatgacttcccagacgaggaacagagaagacatgaggagactggaaaagtggtgcagaggggccctgatgtgggaaccattctgctctcctcaggggcctccatccagtctccatctcaatggtcatcactgagactgcaagtcactgtacccaggagaatggcgcctttgccctccagaccaggaagccagggcagcagcaggttagggtgggaaggaactgaattcatggttggtaatgttgagtctgagtacccgagggtctaaaggaacagatgcgaggtcagcagttgactaagggtgaccctgaagttgcccactctgtaacactctgt

SEQ ID NO: 34052 - DNA, 719 bp, Homo sapiens
aagcctgaccaacatggtgaaaccccgtctctactaaaaatacaaaaattaggctgagcacggtggctcacgcccataatcacagaactttgggaggccgaggtgggcggatcacgaggtcaggagatcaagaccatcctggctaacatggtaaaaccccgtctctactaaaaatacaaaaaaattagccaggcgtggaggcaggcacctgtagtcccagctactcgggaggctgaggcaggagaatggcgtgaacccaggaggtggagcttgcagtgagctaagatcgcaccactgcactccagcttgggygacagagcaagactccatctcaaaaaaaaaaaaaaagtaaaaaagaaaaattagccaggcgtggtgacaggcacctgtaatcccagctactcgaaaggctgaggcaggataattgcttgaacctgggagtcagtgagccacgatcagaccactgcactccagcctgggcaacaaagcaagactctgtctcaaaaaaaaaaaaaaaaaaatcaaggtggcaatgttatgctggtggttaaggacagagcctctcctaccacagtgccactgacttgctatgtgaccctgggcaagtcacttaactctaatatgcctcagttttcttctgttaaaatggggataataatactgagctacctcaaagggcagttttgaggcatgactaatgctttttataaagcattttg

SEQ ID NO: 34053 - DNA, 1075 bp, Homo sapiens
aaatcttttttgaggtaaagaaatctaatgctagttatttagtaaagagtcacatttgattcttggaaagtacattttatatatatgtcattacttgtttaatatttcctccaataattgttatatgtacctcatatacaaatgataaagtttatttatcattggagttttttctttagttacatgtttttgagagatgaattgcaaaggtattctgtctgctactcaaagtgtgatccacagaccggtagaatcaacatctcctgtgagcttgttaaaaatgcagattcttgagtcccatcccacacctaatgaatgagaatccccccccyttttttttttttgatacggagtctcgctctgtcgcccaggctggagtgcagtggcgcgatcttggctcactacaacctccgcctcccgggttcacgccattctcctgcctcagcctcccaaatagctgggactacaggcgtccgccaccacgcccggctaattttttgtatttttagtagagacggggtttcactgtgttagccaggatggtcttgatctcctgacctcgtgatccgcccgcctcggcctcctaaaggagaatccacattttaacaagattcatatataatttgaatgcacgtctgagagcactgcacatatacgccatctggtggctattgtatgaattgcaggtagaagatttaattccgttgtctccttacatatccatagaaacttaatacaaattaaattcttttacagttatagtatgatgctataataataatttacgagaattcaaaataccgtatttatacatgtatctaaagtaaattaaattcatagctgagaaatgctggaaattctaagtgaaatgcatgttctattttaagtgaaaaatgctatgatgttttatctctaattgtttggcttatacatgcttactcacaaagataatgctagtgttgatacactttgaacataaaatagttaaattgtatgagaagtatggtagaatatttcataccttgtggtccatattcagctaacttttttcctgcaatgaaatcaggagtgaggt

SEQ ID NO: 34054 - DNA, 1359 bp, Homo sapiens
tgcatgtagagctcttcaaccagacagaaagcttcttgaggaggaggacttggatttactatcttcatactccataaagtaacagggatcatattccagaaatcaacatgaggaaagacgtttttgtgtgtatgagtttacttacttgggtaataaggcagaatgtttgaaatgagaactgtttcaggaaataccaagagcaacacagttccatatgcaatgaatatttcttcagtggccttaaaagtagtatgagctcctccctccaatygaatctgtttgagaatgtttttattctcttagttaagacgccttctcaaatcctgcttctaatttaggacaggaagataaagaggcatgtcttcagagctgtatagggagcaattccaacccagccaaaagttcataatccagtggatctaatttagaagagggaagaatggcttctagggttcccaggtacacactgttgtttttttgagcacttttgtattcagtacagctctttgacaaactgtccaagtaaagcccaaaagcaggttaaggttttgccactcctgcagtagtgggacaaacgtttgtgaagactggcgaggttggaagaatggaataaaatcccagtaggcccatactcagaaactgatttctcaagaactccaaatgaaggaaagccattctctcccctcaaactttcagtcttctcctgtgttgcataaatgcagtaatgctggtctcagagaaggaaagtgaatcataagttcttgtcttgccacctacattgatccagcccccatttctcaacctgcaagatgagaggaccagactaagctttcttccccatccaacattttcatcagcaaattaaaccaagagtgagaatctttcctccagatcttcttccaacctctgaatacagcaactttgattgttgttaattacccaaacccctgcctagctgaaggatggatggctctgtgtttacaacttgaatgtcttcaaacataacgtattcaaccagggacagaacaatgccaccgcagactggaaagcaaagatattgtttatacaggtaagatgtcttgaaccagctgtctctccagacattttttgctttgtagaaaacaatgaggaacaccgttatagacataaatgaaagctcccaagatggttacagggagccaaaggatctgggagaggcacggctgggctgctgctaattggacaggtggctcttcctgccagctgtcctcattcaacaggcattttttaatgagaaatatttctctgcaattgaagtaatggtcctaatagaatattatggccttgcataaggaaaagaacacaaaggagtttagatac

SEQ ID NO: 34055 - DNA, 1359 bp, Homo sapiens
tgcatgtagagctcttcaaccagacagaaagcttcttgaggaggaggacttggatttactatcttcatactccataaagtaacagggatcatattccagaaatcaacatgaggaaagacgtttttgtgtgtatgagtttacttacttgggtaataaggcagaatgtttgaaatgagaactgtttcaggaaataccaagagcaacacagttccatatgcaatgaatatttcttcagtggccttaaaagtagtatgagctcctccctccaatcgaatctgtttgagaatgtttttattctcttagttaagacgccttctcaaatcctgcttctaatttaggacaggaagataaagaggcatgtcttcagagctgtwtagggagcaattccaacccagccaaaagttcataatccagtggatctaatttagaagagggaagaatggcttctagggttcccaggtacacactgttgtttttttgagcacttttgtattcagtacagctctttgacaaactgtccaagtaaagcccaaaagcaggttaaggttttgccactcctgcagtagtgggacaaacgtttgtgaagactggcgaggttggaagaatggaataaaatcccagtaggcccatactcagaaactgatttctcaagaactccaaatgaaggaaagccattctctcccctcaaactttcagtcttctcctgtgttgcataaatgcagtaatgctggtctcagagaaggaaagtgaatcataagttcttgtcttgccacctacattgatccagcccccatttctcaacctgcaagatgagaggaccagactaagctttcttccccatccaacattttcatcagcaaattaaaccaagagtgagaatctttcctccagatcttcttccaacctctgaatacagcaactttgattgttgttaattacccaaacccctgcctagctgaaggatggatggctctgtgtttacaacttgaatgtcttcaaacataacgtattcaaccagggacagaacaatgccaccgcagactggaaagcaaagatattgtttatacaggtaagatgtcttgaaccagctgtctctccagacattttttgctttgtagaaaacaatgaggaacaccgttatagacataaatgaaagctcccaagatggttacagggagccaaaggatctgggagaggcacggctgggctgctgctaattggacaggtggctcttcctgccagctgtcctcattcaacaggcattttttaatgagaaatatttctctgcaattgaagtaatggtcctaatagaatattatggccttgcataaggaaaagaacacaaaggagtttagatac

SEQ ID NO: 34056 - DNA, 1359 bp, Homo sapiens
tgcatgtagagctcttcaaccagacagaaagcttcttgaggaggaggacttggatttactatcttcatactccataaagtaacagggatcatattccagaaatcaacatgaggaaagacgtttttgtgtgtatgagtttacttacttgggtaataaggcagaatgtttgaaatgagaactgtttcaggaaataccaagagcaacacagttccatatgcaatgaatatttcttcagtggccttaaaagtagtatgagctcctccctccaatcgaatctgtttgagaatgtttttattctcttagttaagacgccttctcaaatcctgcttctaatttaggacaggaagataaagaggcatgtcttcagagctgtatagggagcaattccaacccagccaaaagttcataatccagtggatctaatttagaagagggaagaatggcttctagggttcccaggtacacactgttgtttttttgagcacttttgtattcagtacagctctttgacaaactgtccaagtaaagcccaaaagcaggttaaggttttgccactcctgcagtagtgggacaaacgtttgtgaagactgrcgaggttggaagaatggaataaaatcccagtaggcccatactcagaaactgatttctcaagaactccaaatgaaggaaagccattctctcccctcaaactttcagtcttctcctgtgttgcataaatgcagtaatgctggtctcagagaaggaaagtgaatcataagttcttgtcttgccacctacattgatccagcccccatttctcaacctgcaagatgagaggaccagactaagctttcttccccatccaacattttcatcagcaaattaaaccaagagtgagaatctttcctccagatcttcttccaacctctgaatacagcaactttgattgttgttaattacccaaacccctgcctagctgaaggatggatggctctgtgtttacaacttgaatgtcttcaaacataacgtattcaaccagggacagaacaatgccaccgcagactggaaagcaaagatattgtttatacaggtaagatgtcttgaaccagctgtctctccagacattttttgctttgtagaaaacaatgaggaacaccgttatagacataaatgaaagctcccaagatggttacagggagccaaaggatctgggagaggcacggctgggctgctgctaattggacaggtggctcttcctgccagctgtcctcattcaacaggcattttttaatgagaaatatttctctgcaattgaagtaatggtcctaatagaatattatggccttgcataaggaaaagaacacaaaggagtttagatac

SEQ ID NO: 34057 - DNA, 597 bp, Homo sapiens
attgctttcaatgtgttcgtattatttagaaatgcaacaataaatatatgtacaccatcttcttgtgcatgtgtatgatgctcttcagggtctatattcagaaattactcatttgagtattaatgtatttgagttccttttctgtgaactgagagagttgctcaacctacagtagactttatgtgagcagaaaaataaagcgtgttggttctgtcctggccagtgcaatcagggcaagaaaagaaacctttgtgggtttttatttaatccatcgagacctcagatttaatttgtaatcatagtaatacacagattatgctgaaaaatctaatcttttggtcattcttttgatgataatctgtaaatgtaaaactcttaatttctttatatctgaaagtttctttatttacccttatcttgattaatagtttatctgggtatagattgataaatgtttattgtttagcaatctgaagtttttattctcttctagcttctcttgtgcttgattaaaaacaacctctgrcaattaattgttatttttttaagtaacctatttttcttatgactgcttttgagatttccttgttatctttg

SEQ ID NO: 34058 - DNA, 551 bp, Homo sapiens
cttccctttgcagagctgggcagggattctgccacctgagggtttggcatccaattcttctgtgagatatttactcttagtgccttaggcgccaattattgtctttgattaatttcagggcctcaaattgtgaacccctcagtttttctaacaatgcccctcctaaccccagtcaaggccagcagtgttgaagggttcattgggaggggacctgcactggctgtttggactatcagctccaccagtgcctactgtggcctgtgctttcttagcacatttttaaagaaataagctattgaacttggtgaaataataaaacaacccaggaatcacctgatccaaataaacaaacaccaattaactgccactgtggtgggcagattctaggatggtccaaatgctacagccttctgaaattcacatcctggagtgatctcttcacaagtgtgggatggacctagtgactggctcctaatgagcagaatatggtagaagggataagaygctgcttctgagattgggtcataaaaaggctgtggcttttgccttgg

SEQ ID NO: 34059 - DNA, 1188 bp, Homo sapiens
taaatcccagtggctctctgcacaccccgccattcagaaatgtttacatgctgagcaaacgattttcagtgtatagaaatgaattgtggctggagattgcaggactctgatcaccaaactttccagccaccttttttttttttttttttgagacggagtcttgctctgtcgcccaggctggagtgcagcggyacaatctcggctcattgcaagctccacctccgtggttcacaccattctcctgcctcagactcctgagtagctgggactataggcgcccgccaccacgcccagctaatttttttgtatttttagtagagacggggtttcactgtgttcgccaggatggtctcaatttcctgacctcgtgatccgcccgcctcggcctcccaaagtgctgggattacaggcgtgagctaccgcgcccggccctttccagccccctcttaccttatcattggttttatattcaaatgtcaccctgggagtggcacagggagggagggagcccacagcatgggaagcttcaagagatcctggcatttggagaaggtgggtgagcctggagttcacctggagagatttttactttcttccacttctagaaacactgcccatttttttttttggtgggttttgttgtgttttggtatttttttaagcagtcaacaaaacagcttctagaaaatggaaaacccagagtgtgatctaccaggagctcctggtttcaaccagttccttgctgtacctgctgggcctgtgatacgaagaaacatcatggcttcaatggcagccttggaaatgaacttcattgaaagggaatttacactgaggtttatgattgctgctatgaaaagagtgcacatcctttccttcgaaacacaagtaagtaagagccacatgttactgtgacagggcagtattttagggataaagaaaaattagaactattttagtcttcactagcatatacacacaaacacacacatatagtttcaccattgatggaataatatgcagcagataaaatgaataaattagagctaaatacgtctaaattcataaatctcaaaaacataacggtatagtggtgagtgaaagtaacatgttttggaagggtatatgaaacatgatcaaattacaattttttaaaaacacaggataatactatgtatcattactggtcac

SEQ ID NO: 34060 - DNA, 1188 bp, Homo sapiens
taaatcccagtggctctctgcacaccccgccattcagaaatgtttacatgctgagcaaacgattttcagtgtatagaaatgaattgtggctggagattgcaggactctgatcaccaaactttccagccaccttttttttttttttttttgagacggagtcttgctctgtcgcccaggctggagtgcagcggcrcaatctcggctcattgcaagctccacctccgtggttcacaccattctcctgcctcagactcctgagtagctgggactataggcgcccgccaccacgcccagctaatttttttgtatttttagtagagacggggtttcactgtgttcgccaggatggtctcaatttcctgacctcgtgatccgcccgcctcggcctcccaaagtgctgggattacaggcgtgagctaccgcgcccggccctttccagccccctcttaccttatcattggttttatattcaaatgtcaccctgggagtggcacagggagggagggagcccacagcatgggaagcttcaagagatcctggcatttggagaaggtgggtgagcctggagttcacctggagagatttttactttcttccacttctagaaacactgcccatttttttttttggtgggttttgttgtgttttggtatttttttaagcagtcaacaaaacagcttctagaaaatggaaaacccagagtgtgatctaccaggagctcctggtttcaaccagttccttgctgtacctgctgggcctgtgatacgaagaaacatcatggcttcaatggcagccttggaaatgaacttcattgaaagggaatttacactgaggtttatgattgctgctatgaaaagagtgcacatcctttccttcgaaacacaagtaagtaagagccacatgttactgtgacagggcagtattttagggataaagaaaaattagaactattttagtcttcactagcatatacacacaaacacacacatatagtttcaccattgatggaataatatgcagcagataaaatgaataaattagagctaaatacgtctaaattcataaatctcaaaaacataacggtatagtggtgagtgaaagtaacatgttttggaagggtatatgaaacatgatcaaattacaattttttaaaaacacaggataatactatgtatcattactggtcac

SEQ ID NO: 34061 - DNA, 1188 bp, Homo sapiens
taaatcccagtggctctctgcacaccccgccattcagaaatgtttacatgctgagcaaacgattttcagtgtatagaaatgaattgtggctggagattgcaggactctgatcaccaaactttccagccaccttttttttttttttttttgagacggagtcttgctctgtcgcccaggctggagtgcagcggcacaatctcggctcattgcaagctccacctccgtggttcacaccattctcctgcctcagactcctgagtagctgggactataggcgcccgccaccacgcccagctaatttttttgtatttttagtagagacggggtttcactgtgttcgccaggatggtctcaatttcctgacctcgtgatccgcccgcctcggcctcccaaagtgctgggattacaggcgtgagctaccgcgcccggccctttccagccccctcttaccttatcattggttttatattcaaatgtcaccctgggagtggcacagggagggagggagcccacagcatgggaagcttcaagagatcctggcatttggagaaggtgggtgagcctggagttcacctggagagatttttactttcttccacttctagaaacactgcccatttttttttttggtgggttttgttgtgttttggtatttttttaagcagtcaacaaaacagcttctagaaaatggaaaacccagagtgtgatctaccaggagctcctggtttcaaccagttccttgctgtacctgctgggcctgtgatacgaagaaacatcatggcttcaatggcagccttggaaatgaacttcattgaaagggaatttacactgaggtttatgatkgctgctatgaaaagagtgcacatcctttccttcgaaacacaagtaagtaagagccacatgttactgtgacagggcagtattttagggataaagaaaaattagaactattttagtcttcactagcatatacacacaaacacacacatatagtttcaccattgatggaataatatgcagcagataaaatgaataaattagagctaaatacgtctaaattcataaatctcaaaaacataacggtatagtggtgagtgaaagtaacatgttttggaagggtatatgaaacatgatcaaattacaattttttaaaaacacaggataatactatgtatcattactggtcac

SEQ ID NO: 34062 - DNA, 1188 bp, Homo sapiens
taaatcccagtggctctctgcacaccccgccattcagaaatgtttacatgctgagcaaacgattttcagtgtatagaaatgaattgtggctggagattgcaggactctgatcaccaaactttccagccaccttttttttttttttttttgagacggagtcttgctctgtcgcccaggctggagtgcagcggcacaatctcggctcattgcaagctccacctccgtggttcacaccattctcctgcctcagactcctgagtagctgggactataggcgcccgccaccacgcccagctaatttttttgtatttttagtagagacggggtttcactgtgttcgccaggatggtctcaatttcctgacctcgtgatccgcccgcctcggcctcccaaagtgctgggattacaggcgtgagctaccgcgcccggccctttccagccccctcttaccttatcattggttttatattcaaatgtcaccctgggagtggcacagggagggagggagcccacagcatgggaagcttcaagagatcctggcatttggagaaggtgggtgagcctggagttcacctggagagatttttactttcttccacttctagaaacactgcccatttttttttttggtgggttttgttgtgttttggtatttttttaagcagtcaacaaaacagcttctagaaaatggaaaacccagagtgtgatctaccaggagctcctggtttcaaccagttccttgctgtacctgctgggcctgtgatacgaagaaacatcatggcttcaatggcagccttggaaatgaacttcattgaaagggaatttacactgaggtttatgattgctgctatgaaaagagtgcacatcctttccttcgaaacacaagtaagtaagarccacatgttactgtgacagggcagtattttagggataaagaaaaattagaactattttagtcttcactagcatatacacacaaacacacacatatagtttcaccattgatggaataatatgcagcagataaaatgaataaattagagctaaatacgtctaaattcataaatctcaaaaacataacggtatagtggtgagtgaaagtaacatgttttggaagggtatatgaaacatgatcaaattacaattttttaaaaacacaggataatactatgtatcattactggtcac

SEQ ID NO: 34063 - DNA, 1188 bp, Homo sapiens
taaatcccagtggctctctgcacaccccgccattcagaaatgtttacatgctgagcaaacgattttcagtgtatagaaatgaattgtggctggagattgcaggactctgatcaccaaactttccagccaccttttttttttttttttttgagacggagtcttgctctgtcgcccaggctggagtgcagcggcacaatctcggctcattgcaagctccacctccgtggttcacaccattctcctgcctcagactcctgagtagctgggactataggcgcccgccaccacgcccagctaatttttttgtatttttagtagagacggggtttcactgtgttcgccaggatggtctcaatttcctgacctcgtgatccgcccgcctcggcctcccaaagtgctgggattacaggcgtgagctaccgcgcccggccctttccagccccctcttaccttatcattggttttatattcaaatgtcaccctgggagtggcacagggagggagggagcccacagcatgggaagcttcaagagatcctggcatttggagaaggtgggtgagcctggagttcacctggagagatttttactttcttccacttctagaaacactgcccatttttttttttggtgggttttgttgtgttttggtatttttttaagcagtcaacaaaacagcttctagaaaatggaaaacccagagtgtgatctaccaggagctcctggtttcaaccagttccttgctgtacctgctgggcctgtgatacgaagaaacatcatggcttcaatggcagccttggaaatgaacttcattgaaagggaatttacactgaggtttatgattgctgctatgaaaagagtgcacatcctttccttcgaaacacaagtaagtaagagccacatgttactgtgwcagggcagtattttagggataaagaaaaattagaactattttagtcttcactagcatatacacacaaacacacacatatagtttcaccattgatggaataatatgcagcagataaaatgaataaattagagctaaatacgtctaaattcataaatctcaaaaacataacggtatagtggtgagtgaaagtaacatgttttggaagggtatatgaaacatgatcaaattacaattttttaaaaacacaggataatactatgtatcattactggtcac

SEQ ID NO: 34064 - DNA, 1188 bp, Homo sapiens
taaatcccagtggctctctgcacaccccgccattcagaaatgtttacatgctgagcaaacgattttcagtgtatagaaatgaattgtggctggagattgcaggactctgatcaccaaactttccagccaccttttttttttttttttttgagacggagtcttgctctgtcgcccaggctggagtgcagcggcacaatctcggctcattgcaagctccacctccgtggttcacaccattctcctgcctcagactcctgagtagctgggactataggcgcccgccaccacgcccagctaatttttttgtatttttagtagagacggggtttcactgtgttcgccaggatggtctcaatttcctgacctcgtgatccgcccgcctcggcctcccaaagtgctgggattacaggcgtgagctaccgcgcccggccctttccagccccctcttaccttatcattggttttatattcaaatgtcaccctgggagtggcacagggagggagggagcccacagcatgggaagcttcaagagatcctggcatttggagaaggtgggtgagcctggagttcacctggagagatttttactttcttccacttctagaaacactgcccatttttttttttggtgggttttgttgtgttttggtatttttttaagcagtcaacaaaacagcttctagaaaatggaaaacccagagtgtgatctaccaggagctcctggtttcaaccagttccttgctgtacctgctgggcctgtgatacgaagaaacatcatggcttcaatggcagccttggaaatgaacttcattgaaagggaatttacactgaggtttatgattgctgctatgaaaagagtgcacatcctttccttcgaaacacaagtaagtaagagccacatgttactgtgacagggcagtattttagggataaagaaaaattagaactattttagtcttcactagcatatacacacaaacacacayatatagtttcaccattgatggaataatatgcagcagataaaatgaataaattagagctaaatacgtctaaattcataaatctcaaaaacataacggtatagtggtgagtgaaagtaacatgttttggaagggtatatgaaacatgatcaaattacaattttttaaaaacacaggataatactatgtatcattactggtcac

SEQ ID NO: 34065 - DNA, 1210 bp, Homo sapiens
atgaaggtgactggatagagtaggtcctgctcaggaccctaacagaaaaactgtatgtttaattttgtaggtaagaaaaaaaaaactgaggrtgaattttgtgtttgaccttagaagataaacagaagtttgctataactgatacaaaaaaaagtctatttcaggcaaagacatggagacatgaaatccaatagtgtgtaaaaggattataagaagccctggttactgaaatttgcatcaaacataagaggagatgctgtcatcttgaattggggcattaatgagagggcttggctgtcttgtttagggattttgacattgtcctgcaggcactggggaatcataaatgtgtttcatcttcgatataacatgataagatcagtgttaaaaagaatgttatgactattgcatagaaaagactaacaggtgatgagcataagaccttttagaggctcctacaagagtaaaggtgaaagatgctgactcagtgagtaaagagatggtggaggaaaatggaattgaaagattaaggaggcgtaatcaaggattgttgactcattcaatgtgggtgaggaagagtgaaatgtcaaagatttatctgaagacttaagctggagagactgatgatgttgcagtatcagttagtaaattagtagggaatctttttggaggaggaggggaggatgatgagtttaggtttccatagatgcttttgagcttcctgtgggaggatcaggtagaagtggctcgtgggtagttagaaataactgtttgaggttaaagaggcagctattacttaagatctaaagtgagaatcagcaacatggaggcttctgtcattgttataagattagaaacgataaagcagggagagatagatagaaaaagagtagagaatggcatttgcacttttgcattttccccaaaactataaataactggatttcttactttccctctagtctgtaacaatttaatagatcttctcttacttttgaaataagcatgtcacaaagaaaatatgcaaatatgtccacatgtaattaaatatttccccaagaaagtcaaattactttttaaaaatcaatttttttttctgcaagttgctatagttgctgatttctttgaaatattgttcatactgtatctagtacaatgtcttttcctcagagggtgctccgtaaatgttagatgataataattatatgca

SEQ ID NO: 34066 - DNA, 1210 bp, Homo sapiens
atgaaggtgactggatagagtaggtcctgctcaggaccctaacagaaaaactgtatgtttaattttgtaggtaagaaaaaaaaaactgagggtgaattttgtgtttgaccttagaagataaacagaagtttgctataactgatacaaaaaaaagtctatttcaggcaaagacatggagacatgaaatccaatagtgtgtaaaaggattataagaagccctggttactgaaatttgcatcaaacataagaggagatgctgtcatcttgaattggggcattaatgagagggcttggctgtcttgtttagggattttgacattgtcctgcaggcactggggaatcataaatgtgtttcatcttcgatataacatgataagatcagtgttaaaaagaatgttatgactattgcatagaaaagactaacaggtgatgagcataagaccttttagaggctcctacaagagtaaaggtgaaagatgctgactcagtgagtaaagagatggtggaggaaaatggaattgaaagattaaggaggcgtaatcaaggattgttgactcattcaatgtgggtgaggaagagtgaaatgtcaaagatttatctgaagacttaagctggagagactgatgatgttgcagtatcagttagtaaattagtagggaatctttttggaggaggaggggaggatgatgagtttaggtttccatagatgcttttgagcttcctgtgggaggatcaggtagaagtggctcgtgggtagttagaaataactgtttgaggttaaagaggcagctattacttaagatctaaagtgagaatcagcaacatggaggcttctgtcattgttataagattagaaacgataaagcagggagagatagatagaaaaagagtagagaatggcatttgcacttttgcattttccccaaaactataaataastggatttcttactttccctctagtctgtaacaatttaatagatcttctcttacttttgaaataagcatgtcacaaagaaaatatgcaaatatgtccacatgtaattaaatatttccccaagaaagtcaaattactttttaaaaatcaatttttttttctgcaagttgctatagttgctgatttctttgaaatattgttcatactgtatctagtacaatgtcttttcctcagagggtgctccgtaaatgttagatgataataattatatgca

SEQ ID NO: 34067 - DNA, 620 bp, Homo sapiens
aaataattctatagggctaatgtttcacttgcctcactttaggaaatgttgaccaagctaagccacagtgcccaaaaccattgataaaactttagtcaggtaacctgattcagatactggaattataaaacgatgattgacatgttaaaggatttaatttaaaaaaaaagtacataatatgcaagaacagatgggtaaggtaagaagagagatggaaactctgggaaataacaaaacagaaatagtagaactcagaaaaaacctactataacacaaataaaacatgtcctttgatgagcttatcatggatgggagagamgggaagaaagagttgatgagcctgaaaatatggcaagagaaacttgccaaaatgagatggaaagaaaaaaaattgagaacagcaccaatgacgacagcacgaatgggacatcaaagatctctaggacaatgtgaaaaggtgaaaaacatgaatatttggattaccaaaaggagattaaagagagacagatcagaagaaattgtgaagtaataattgccaaggaatttccaaagttaatggtagacaccaaatatggatccagaaagctcacccaatagcaagaatgttaattatcaataaa

SEQ ID NO: 34068 - DNA, 984 bp, Homo sapiens
gcagctcagtttacactggtctctaagtgccacctagagcggcagccccagtccataaatctacccagtcttccagctcagcccccacagccgcctgcctgccttgggcatcctaacttaatgctggcattttcaataatttgattgctccacttcagtaacattatgcagctgttccaagcagctgctatgccaggggctatgagagccagtgggtctcattctagggctacagagggccaagtactctaggaaggggtgtgagccaaggggaaacaagagcctttttagtacacctcatcccatcacccacacctagagcgtctacactccatgcaccacacgtaccacttgacacatgggctctaaacctggagaatctcgttatccagagcagagagctcccctaccccatgtgtccaggcatgtctgggagggggcagctggggcagcaggatgctgggctagttacctccactaccctgttgaggctccaaatcccagggagacaaacagatatttcctttgtaagccaggacacgaaaaagtggggaagccctgccttagggtagattcatcttattctcccattgggcaaaaatgaccatgaaaacccaaaagagttgagaacatggactcaaagggatatgtgcacacccacattcgtggcaacactattcacaaccaaaagtggaagcggcccaagtgcccattgacagaagaatggatgaaaaaaatgtggcatggccatacagtggaatattattccactttaaaaagaaagaaaatctgagccaggtgtagtggctcacaccyataatcccagcactttgggaggtggaggcaggagggtcccttgaagccaagagttccagacaagcatgagcaacatagtgagtccctctctttacaaaaataaaaattcaaaaattagctacgcatggtggtgcatgcctgtacccctggttattcgggaggcaagag

SEQ ID NO: 34069 - DNA, 984 bp, Homo sapiens
gcagctcagtttacactggtctctaagtgccacctagagcggcagccccagtccataaatctacccagtcttccagctcagcccccacagccgcctgcctgccttgggcatcctaacttaatgctggcattttcaataatttgattgctccacttcagtaacattatgcagctgttccaagcagctgctatgccaggggctatgagagccagtgggtctcattctagggctacagagggccaagtactctaggaaggggtgtgagccaaggggaaacaagagcctttttagtacacctcatcccatcacccacacctagagcgtctacactccatgcaccacacgtaccacttgacacatgggctctaaacctggagaatctcgttatccagagcagagagctcccctaccccatgtgtccaggcatgtctgggagggggcagctggggcagcaggatgctgggctagttacctccactaccctgttgaggctccaaatcccagggagacaaacagatatttcctttgtaagccaggacacgaaaaagtggggaagccctgccttagggtagattcatcttattctcccattgggcaaaaatgaccatgaaaacccaaaagagttgagaacatggactcaaagggatatgtgcacacccacattcgtggcaacactattcacaaccaaaagtggaagcggcccaagtgcccattgacagaagaatggatgaaaaaaatgtggcatggccatacagtggaatattattccactttaaaaagaaagaaaatctgagccaggtgtagtggctcacacccataatcccagcactttgggaggtggaggcaggagggtcccttgaagccaagagttccagacaagcatgagcaacatagtgagtccctctctttacaaaaataaaaattcaaaaattagctacgcatgrtggtgcatgcctgtacccctggttattcgggaggcaagag

SEQ ID NO: 34070 - DNA, 672 bp, Homo sapiens
acatcctaaatacatgtaatttttataaaatttaaataaaagtggggtggccatgaggctggtttctctgagaagttccagctgtccctgggtaattactgatagtgcccycttcccacactcttattcttctagctcaggcaattgtctgtatgggcacactactaaaaaactaatggttctggagggtccttatgacctgcctttctctactgctctttcactcctatcaaaagccatcttgagagaacccaccctaccacggccatctgtcctcattaatatctcccctgtctcctagcacccttaaggctgtcaactctccaagtgtcaaacagtgctgtatttctggggtcttccatgtgccaaagtcacactgtattccttgaaaaagtaaagaaagcctcccttcctttccctaactgtagtagtccattttcatgatgctgaacatacccaagactgggcaatttacaaaagaaagatgtttaatggacttacagttccacatggctggagaggcctcacaatcatggtggaaggcaagaaggagcaagtcacgtcttacatggatggcagtaggcaaagagagagagctcatgcaggagaactcctctgtgtaaaaccatcagatctcatgagacttgttcactatcatgagaacagcatggg

SEQ ID NO: 34071 - DNA, 1296 bp, Homo sapiens
tgtggcatgaataaacaagtgaataaatgaacgaatatttttcaggcatatggggcccattaagctgagagttcatagtaacaaaaacactctgtcaagtactattacacctagagattgctccattttcaccaaaatccatgttttcttctccttgagtatataggtaatccccctttttgcagcctcccttgcattggatstggccctatgatgagatctagccaatggaatatgagtgaaagaggtatgagccacttccaggtctcactcataaaactgtccatgctcctccccttcgagctaattggaattgagacaagcacagtgaacttgaagttcacacgtatgtgatagcagagcctcatcaacctgagaccctgaatggcagtggagacttctcacaatcccagaagatatgtttattattatcccaactttaccaatgagaaaactgagtcagagaagttaatcatagataataaggggcagtaagggacctgaactggagccacttctgcctcagtcatcatattcttcttcaaaaatactcagaagctttaaaggagcatctgaatcattggcctataacctctcccagatgaccgttcccataacctgaaattaaagtaatgatttttttcaatatgccattttccatctgtccccattcacttgctccctcccttctaacagatcatttgcccctgcaagtgcatatcatgatggcacacccacttagtgagactcccccagaactgccataacttctgtcttatcctagttattgtgtctacctctcaaacaatgccatcctgcctgttcattaactgatttttgacagtgacatagaatagagcttacgcattctgtaaggttttctccatttaaaacaaaacaaaacaaaagcacaattaatattgcacaaggttggccaaaaaaccctaaaggtttttatattttgctacaaaaacattcacattaaaatattcagaaacaggtaggtgaactcatttaaaggttatgtaatgttcaaatatgtctataacatacaataacacctaatataaaagcaaaattaagaaatcagaatattctctttaactgaaatggccaattagctgagaattaatgcatttatccaataaaactccccaaggcagagatgcatttaagatggggacatggaactaagctccgggggtgcccacacaaataggcagaactttaaaatggcctcgtacaaaaggaatgttatctccaatggccttaataacacacaatccacctaggaga

SEQ ID NO: 34072 - DNA, 779 bp, Homo sapiens
tctccttctcaatttttcggaatcgtttcagtagattggtaccatttcttctttgtacatctgatagaatttagctgtagacccatctggyccagggctttttttggtcagtaagttttttattactgactccattttggaacttgttattggtctgttcaagttttcactttctttatggttcaatctcgggaggttgtgtgtttccaggaatttttttttcatttcctctatattttctaatttatttgcatagagttgttcattatagtccccgaggatcttttgtatttttgtgggattagttgtaatgtcaactttgtcatttctggttatacttagttggatcttctttgtttttctttgttaatctagctagcaactacccaattttaacacttactataaagctacagtaatcaagacagtgtcttactagcaaaagaataaacacatagatcaatggaacagatagacagcccagaaatagatccacacagatatagtcaactgatctttgacaaagaagcaaaggcaatacaaagaaaaaatgagttatacagggaatctgcacctcccattcaatgttgctataaacctaaaactcctctaaagaatagtctatttaaaaaaggaaaaatcatcaggacaggctacaaaatcaagactaggaagacagaggaagaagagtcttctcagtttacaatcttctgagcccaagtatctagggtagcacttaaggaggtaacaatgaaaagataagtgcagaatcttcagat

SEQ ID NO: 34073 - DNA, 735 bp, Homo sapiens
aatatacattttatattacaaatataggttggaacattttttttgaatttcactatagtggcatatacaaaccactagggaacagtatatcaagtagtatatgtaatggatccagctaatggagcaaatcaatctaagtatctccacttttgttaatgcaaagcatttttctggaaaaggagttaagagttggtttgttaatcgacttgtgagcactatgaatatggaaagttgggattatctactcttcaacttttgcaaaaacaacttctgcaaataaacttttgcaaataaaaaaattaggataatctttgaagtgttgctatcctctgctcaggagaggaattaagcatattgggtagattctctgaggccagtcagtggtatttacccctgacagctatcagaagaaagatgtgaaaccttcctccgttccaaacattgtgggatctttgttgccccttttgaaccaatattattctttccactttgaagacmatttaagattcccaacttcttacaaaaccatgaaaaacacaaaaggggaagcacagatgctaagctttctagccaatcctcctctacacaaagatcatgcacacaatgtgaagcttcagatactgaatggtcaactattacatgattttgccctccaatagatggtttctagagccctcagataccaaccagtttctctttaaaaaaaggatgttattatgtgcaattgtgtagata

SEQ ID NO: 34074 - DNA, 735 bp, Homo sapiens
aatatacattttatattacaaatataggttggaacattttttttgaatttcactatagtggcatatacaaaccactagggaacagtatatcaagtagtatatgtaatggatccagctaatggagcaaatcaatctaagtatctccacttttgttaatgcaaagcatttttctggaaaaggagttaagagttggtttgttaatcgacttgtgagcactatgaatatggaaagttgggattatctactcttcaacttttgcaaaaacaacttctgcaaataaacttttgcaaataaaaaaattaggataatctttgaagtgttgctatcctctgctcaggagaggaattaagcatattgggtagattctctgaggccagtcagtggtatttacccctgacagctatcagaagaaagatgtgaaaccttcctccgttccaaacattgtgggatctttgttgccccttttgaaccaatattattctttccactttgaagaccatttaagattcccaacttcttacaaaaccatgaaaaacacaaaaggggaagcacagatgctaagctttctagccaatcctcctctacacaaagatcatgcacacaatgtgaagcttcagatactgaatggtcaactattacatgattttgccctccaatagatggtttctagagccctcagataccaaccagtttctctttwaaaaaaggatgttattatgtgcaattgtgtagata

SEQ ID NO: 34075 - DNA, 575 bp, Homo sapiens
aagtaccaataacccattagaaaagcggagaaattatataaaatatgatcaatatgcaacgtataaaaatgatccttaaacatatgaaacaagactacctttatttaaaattatagaaaaacaaaccaaactgtactgaaataccatttttaattacctgattgttaaaaagctgaggctgacaggatgttccacatggacagttctaagaaaacaaacaccctcattcatggttacagaaatgcgaaatgatgaatcctatgaagaagaatttggaaatatttaccaaattgcctatgtgttattctgtgacttgaggatctttcttctagattctggcaaatatgcaaattatcctttaagcaaggttgttaattgtgacattaattaaagatatattaatagggaattacactgttgtgcctccactcaaagcagtgctgtgcagctataaagaggaataaaggtgatttgtgtgtctagaaaaatatagataaatagatgatagataaagatagatagcttctagaatatcyattaagtaaaattaatttccaaaatattttttttagaat

SEQ ID NO: 34076 - DNA, 575 bp, Homo sapiens
aagtaccaataacccattagaaaagcggagaaattatataaaatatgatcaatatgcaacgtataaaaatgatccttaaacatatgaaacaagactacctttatttaaaattatagaaaaacaaaccaaactgtactgaaataccatttttaattacctgattgttaaaaagctgaggctgacaggatgttccacatggacagttctaagaaaacaaacaccctcattcatggttacagaaatgcgaaatgatgaatcctatgaagaagaatttggaaatatttaccaaattgcctatgtgttattctgtgacttgaggatctttcttctagattctggcaaatatgcaaattatcctttaagcaaggttgttaattgtgacattaattaaagatatattaatagggaattacactgttgtgcctccactcaaagcagtgctgtgcagctataaagaggaataaaggtgatttgtgtgtctagaaaaatatagataaatagatgatagataaagatagatagcttctagaatatccattaagtaaaattaatttmcaaaatattttttttagaat

SEQ ID NO: 34077 - DNA, 619 bp, Homo sapiens
ggtagtatctgcttcataatagacaaacaataaatatttaataagtgagtggacaaatacatgtgtatatgttcttcaaaaaacctgtaagaatagacaataatctctatttgtggagttttaattcattttcattttyatctttatggatttctgcatttttttagattttctatataaaaatatatttatcataataaaattttcaggctttaaaaataggaaaagcagataaataaaaatgaatacaattaataaattaaaaataaaataaaatcaataaaatatataaataaaataaaaaatacataaataaaattaatctccaaaagaaaaaacaaaatttaaagaaattatagtattttgaaagcaattattatatagcagtgatcataaattatatatttcctgactaaaagattaaatccattattaagctgaaccaagtttcatagtagagtgatccctctctgtacattttctgtattgcctttttttggctcctagaaataagataattcttcccaaatagtccttgatatcactgaaaatttgacaatttattattaaagcacaaaagctaatactctgctgatgttgtgtcaagaaaatcaacaca

SEQ ID NO: 34078 - DNA, 622 bp, Homo sapiens
ctctaaattaatttttctcaattaaaatttcccaaatttccaaatttcagtgctactttaagatgatctttccttttcatattttctgtcatatatttttagtcattcaataaaattctggctttttaattgtgttgtaccaacatgacactgtttaataggcacttctttatgataggtttyaccatttaaatgattagtaactactcattacttttatttttcaggttatcctttgttcttatctcattctaatactttcaggtaaattttagaataattttgttgagttcaagaaaaatccttttgggatttggttgaatttttaattccatacattaatttggagaattatatttagtctcctgtcatctatgaccctcttcctattttgtcaagatttttttgttctatagactttagtaggttttttaaaaaaaaaaaatatttaaaaaaagtgatgaggtttcgctgtgttgcccaggtctggtctcgaactcctgacctcaagcgatccacccaccttggccttccaaagtgctgagattacaggcgtgagccactgcacctggccagtaggtggttttattctcagatcttttctatttttattgctttatga

SEQ ID NO: 34079 - DNA, 622 bp, Homo sapiens
ctctaaattaatttttctcaattaaaatttcccaaatttccaaatttcagtgctactttaagatgatctttccttttcatattttctgtcatatatttttagtcattcaataaaattctggctttttaattgtgttgtaccaacatgacactgtttaataggcacttctttatgataggtttcamcatttaaatgattagtaactactcattacttttatttttcaggttatcctttgttcttatctcattctaatactttcaggtaaattttagaataattttgttgagttcaagaaaaatccttttgggatttggttgaatttttaattccatacattaatttggagaattatatttagtctcctgtcatctatgaccctcttcctattttgtcaagatttttttgttctatagactttagtaggttttttaaaaaaaaaaaatatttaaaaaaagtgatgaggtttcgctgtgttgcccaggtctggtctcgaactcctgacctcaagcgatccacccaccttggccttccaaagtgctgagattacaggcgtgagccactgcacctggccagtaggtggttttattctcagatcttttctatttttattgctttatga

SEQ ID NO: 34080 - DNA, 525 bp, Homo sapiens
gatttgagccctcaaacataaattatatataaataagggttgatgtcaattaatattatgctagacttatgccatgacaaaagcattataaaataataccactctttaagatacaaattatgtaatkgctcataaatattcttttttttcaggttgagaaattattattattattttattattatactttatgttttagggtacatgtgcacaatgtgcaggtttgttacatatgtatacttgtgccatgttggtgtgctgcacccattaactcgtcatttagcattaggtatatctcctaatgctatccctcccccctccccccaccccacaacagtccccggtgtgtgatgttccccttcctgtgtccatgtgttctcattgttcaattcccacctatgagtgagaacgtgtggtgtttggttttttgtccttgtgatagtttgctgagaatgatggtttccagcttcatccatgtccctacaaaggacatgaactcatcattttttatggctgcatagtatt

SEQ ID NO: 34081 - DNA, 525 bp, Homo sapiens
gatttgagccctcaaacataaattatatataaataagggttgatgtcaattaatattatgctagacttatgccatgacaaaagcattataaaataataccactctttaagatacaaattatgtaatggctcataaatattcttttttttcaggttgagaaattattattattattttattattatactttatgttttagggtacatgtgcacaatgtgcaggtttgttacatatgtatacttgtgccatgttggtgtgctgcacccattaactcgtcatttagcattaggtatatctcctaatgctatccctcccccctccccccaccccacaacagtccccggtgtgtgatgttccccttcctgtgtccatgtgttctcattgttcaattcccacctatgagtgagaacgtgyggtgtttggttttttgtccttgtgatagtttgctgagaatgatggtttccagcttcatccatgtccctacaaaggacatgaactcatcattttttatggctgcatagtatt

SEQ ID NO: 34082 - DNA, 932 bp, Homo sapiens
gagtgagtgagtgtgaactctgactgggaaagccaaataaatgaggtgctgtgcgatgaaagaactgacttcagagggttgacttctggtcagagcgtcttctgtgttgtcgccatcttatcaatgttagtctttttccccgacaccatctttcttctgagtcctgtttctgctgtgaagctcagacgcctcagcataaattctctgctacccctttgtcacccactcccagtgggatcccatcccgttctttgcagccagatgtgtctaggttcagagacttcagctggcctgtgccgctgggagccttcccaggctgctctcctgtccctgggatgcctttgttttgcgtcataggaggtagtcacattttccagtttgactgcaggcttctgcacgacagggatcatcttcaccttyccttagcactggcatcagatagggcctgagttcaaatcccagctcttctgctgtgggctgtgtgatcatgggcatgttccctgttatttctaagcctgtgtttcctcatgtataaagctacaattgagaagaagagtttggtgtagtacatcgtagaaaccggttcagattctgcactgttttctattaaaccaaaggttcacaatcacaccagtggctgcttttggcttttagccagtaaatgtttgtatgtggaatgaagggccggatggtgggacgtagcagctggttggggaaaggcggaggattcacgtgtttttgagcatggagtcagaagctttccaggtgccatctcattgcatatggcaagtaggtgttagtcctattttgcagatgaggaagagacaaggtgaagcccgttggccagtccttccccatctcagtgcatgcctggcatctggtacttgttccccttgccatgttcccagatggctcacattccatgctcactt

SEQ ID NO: 34083 - DNA, 992 bp, Homo sapiens
acccagaaatccctactgagggtgaactccacagtgtggttgagtccagatttgttgctcggtccagatagattttcagctgctgcatccaaactgcagccagggggacaataagaacagaacctcttttgttctgatgaaactgtttttaatggtcccttctaggcygggccctagtggaagtctcaacaaggctgctcattgaaacgcccttgaaagagccaagtggggagcgcgagggaccctggggaggggccggcggccctttgctcagccctggtggtcctgccgcaaaggagagctgggctgttttatttgttgtctgagatggaaaagggggagggggtcgtcgagacgaggaccgtcccgcaaatttctataattactgcctgcagagtgttagggacacacacacagtaacatcaaacgtcatcctggagggttaggggttcccaaaagctgaacacccagaagctggtagagcaaatccactaaatggaacaacatgtgttccccggcccaagaactccaactgcattaagggaggcacatttctgaccactttacttttcatcttgaggcctcagggggccctttggttcatgcagaatccaggatatagaggggaagaaacagatggaaagatacgaaccgctaccagggcacaagtagctgcctgccccgcacccttcttaagccccaatgtctgcaggtgtccgtcctctgagggtcccccagtggcacctgaaggatgctctccatgtagcaacagtgacaaaagaaataaggaaacaagccgggcatggtggctcatgcctgtaatcccaacactttgggaggccgaggtgggaggatagcttgatcccaggagttcgagttcagcctgggcaatgtagtgaaacctcatctctctacaaaacaaataagaaagaaaaaatagctgggcatggaggcacatgtttgtagtcccagctactcgggcggaggtggga

SEQ ID NO: 34084 - DNA, 531 bp, Homo sapiens
tgcagattattagcaaccccccaggagacttcaattgagaggactggggtagaacccaggaatatgcatgcttaacaagcactctasgtggttctggccaaacggttctgaccacactttgagaatcactgtctaaggtctgctgccctttcctgatgtatattcattcctttctatcggcagtacctggcagtaccctgcacatctctgttttgcaaagtctgagttaggagacaacaatgtcaacagacccaaggttcaagagttctagtccagactagtccaggaccactccccttagccatggtgatgccactgatttgtcctgctggactccagctatcaataaaacaggtcatccatttgggctttactaattgagactttgacattctttggagaggtgtgagctgaattttccctttgtacttatgaaagaagggtttgctaagcagatggatactataaacaaaactatacatataatgattgattcacttaattttaagtgcaggtcttcactctctagat

SEQ ID NO: 34085 - DNA, 698 bp, Homo sapiens
tccatgtggctgagggtttaaatgactcagaaatggtcatgtacttccaagtagttggggctatcattcaagcattgatttatctgattctaatgcttttgccgttttaaccttcctggccgatccctccttgtgcagcaagtggtagagagatggctgagtgggtatgaatcccactaaaagaataaggttgcctcttccctgtagctgttcatatgtagagtcaaagtgacaggtaattagagtatcagcaagaagggactatgctcaactaaattagataaaatgtgttcataaaaatcattaaaagcaaaaaatggaagctagaagactgaaaataagaaaagaaagagacaaacatgaaggcagatsaagaaacgttagaaaggcttttgctctatttcctggctattagcagtggctggattatatcaaagacacatcaagcagacaagtgtacacactttagaagctttgcataaaaatcagtactaaaatatgttttatagaggatatgcacactttggtctacctgagtttgaatttcagttttgcacttaccggctgtgtatccttggtaacttactagacctcctggtacatcagttaatttatttgtaatataggaatgacaatagtcatcaccgcacagagtttaatattaaatgagttaatacatgtaaagcacagaaaagagt

SEQ ID NO: 34086 - DNA, 698 bp, Homo sapiens
tccatgtggctgagggtttaaatgactcagaaatggtcatgtacttccaagtagttggggctatcattcaagcattgatttatctgattctaatgcttttgccgttttaaccttcctggccgatccctccttgtgcagcaagtggtagagagatggctgagtgggtatgaatcccactaaaagaataaggttgcctcttccctgtagctgttcatatgtagagtcaaagtgacaggtaattagagtatcagcaagaagggactatgctcaactaaattagataaaatgtgttcataaaaatcattaaaagcaaaaaatggaagctagaagactgaaaataagaaaagaaagagacaaacatgaaggcagatcaagaaacrttagaaaggcttttgctctatttcctggctattagcagtggctggattatatcaaagacacatcaagcagacaagtgtacacactttagaagctttgcataaaaatcagtactaaaatatgttttatagaggatatgcacactttggtctacctgagtttgaatttcagttttgcacttaccggctgtgtatccttggtaacttactagacctcctggtacatcagttaatttatttgtaatataggaatgacaatagtcatcaccgcacagagtttaatattaaatgagttaatacatgtaaagcacagaaaagagt

SEQ ID NO: 34087 - DNA, 698 bp, Homo sapiens
tccatgtggctgagggtttaaatgactcagaaatggtcatgtacttccaagtagttggggctatcattcaagcattgatttatctgattctaatgcttttgccgttttaaccttcctggccgatccctccttgtgcagcaagtggtagagagatggctgagtgggtatgaatcccactaaaagaataaggttgcctcttccctgtagctgttcatatgtagagtcaaagtgacaggtaattagagtatcagcaagaagggactatgctcaactaaattagataaaatgtgttcataaaaatcattaaaagcaaaaaatggaagctagaagactgaaaataagaaaagaaagagacaaacatgaaggcagatcaagaaacgttagaaaggcttttgctctatttcctggctattagcagtggctggattatatcaaagacacatcaagcagacaagtgtacacactttagaagctttgcataaaaatcagtactaaaatatgttttatagaggatatgcacactttggtctacctgagtttgaatttcagttttgcacttaccggctgtgtatccttggtaacttactagacctccyggtacatcagttaatttatttgtaatataggaatgacaatagtcatcaccgcacagagtttaatattaaatgagttaatacatgtaaagcacagaaaagagt

SEQ ID NO: 34088 - DNA, 698 bp, Homo sapiens
tccatgtggctgagggtttaaatgactcagaaatggtcatgtacttccaagtagttggggctatcattcaagcattgatttatctgattctaatgcttttgccgttttaaccttcctggccgatccctccttgtgcagcaagtggtagagagatggctgagtgggtatgaatcccactaaaagaataaggttgcctcttccctgtagctgttcatatgtagagtcaaagtgacaggtaattagagtatcagcaagaagggactatgctcaactaaattagataaaatgtgttcataaaaatcattaaaagcaaaaaatggaagctagaagactgaaaataagaaaagaaagagacaaacatgaaggcagatcaagaaacgttagaaaggcttttgctctatttcctggctattagcagtggctggattatatcaaagacacatcaagcagacaagtgtacacactttagaagctttgcataaaaatcagtactaaaatatgttttatagaggatatgcacactttggtctacctgagtttgaatttcagttttgcacttaccggctgtgtatccttggtaacttactagacctcctggtacatcagttaatttatttgtaatataggaatgacaatagtcatcaccgcacagagtttaatattaaatgagttaatacatgtaaagcasagaaaagagt

SEQ ID NO: 34089 - DNA, 935 bp, Homo sapiens
ttaacccgttccttggcttccaaccctcttggcctggccccatttctggcccccagcttgcttcttggacatgaggatgaaatgcagcttctgcctctgaayggcaggctcaggttttagctctccctgaggctagtgggggatagactaggtctcatattaaggtacaggctgagccactgtaacaaagggtccccagatacagtggcttatgtaagatgaaggtttcttcctttctcatataagtctgtaaatgcaggcaggcctggcaaactattggtttatcttgaatgacttgctatagtcaatggcatgtgagtggaagtgacaatgttccaggaaaaccaggctgaaagaggccttgcaggttgctgttgcccctcctgttctcctgctctgcatcataagaagcatcatccccagtcagcctgctggttcaaggaaggtgagagaagtggagcagacacagaccagagctgtagctccagccacccagctgagcccagccagaacagcagactcccagccagcctgcagacacagtggaatgaatgcttcctgttttctgccatggagattttgttgttatgacagtgacaatccaggatgggcaggtggttctgctccatgaagttgtccatggacccaggttagcatccaccccaccagcctaacacatagctcccatctgtctaaggcagtggttccagccactgggaagggaaaaaccaaacaagtatggagcatgtggactgacttaaggaaattgacaacacttctgcacatatctcataggactgaagttcattacacagccacacctagctgcaaggaaggttgggaaatacaggcttgttctgggctgaattatgtccccctccagattcatatgttgaagtcctgacccccagcacctcagaatgtatttggagaca

SEQ ID NO: 34090 - DNA, 935 bp, Homo sapiens
ttaacccgttccttggcttccaaccctcttggcctggccccatttctggcccccagcttgcttcttggacatgaggatgaaatgcagcttctgcctctgaacggcaggctcaggttttagctctccctgaggctagtgggggatagactaggtctcatattaaggtacaggctgagccactgtaacaaagggtccccagatacagtggcttatgtaagatgaaggtttcttcctttctcatataagtctgtaaatgcaggcaggcctggcaaactattggtttatcttgaatgacttgctatagtcaatggcatgtgagtggaagtgacaatgttccaggaaaaccaggctgaaagaggccttgcaggttgctgttgcccctcctgttctcctgctytgcatcataagaagcatcatccccagtcagcctgctggttcaaggaaggtgagagaagtggagcagacacagaccagagctgtagctccagccacccagctgagcccagccagaacagcagactcccagccagcctgcagacacagtggaatgaatgcttcctgttttctgccatggagattttgttgttatgacagtgacaatccaggatgggcaggtggttctgctccatgaagttgtccatggacccaggttagcatccaccccaccagcctaacacatagctcccatctgtctaaggcagtggttccagccactgggaagggaaaaaccaaacaagtatggagcatgtggactgacttaaggaaattgacaacacttctgcacatatctcataggactgaagttcattacacagccacacctagctgcaaggaaggttgggaaatacaggcttgttctgggctgaattatgtccccctccagattcatatgttgaagtcctgacccccagcacctcagaatgtatttggagaca

SEQ ID NO: 34091 - DNA, 935 bp, Homo sapiens
ttaacccgttccttggcttccaaccctcttggcctggccccatttctggcccccagcttgcttcttggacatgaggatgaaatgcagcttctgcctctgaacggcaggctcaggttttagctctccctgaggctagtgggggatagactaggtctcatattaaggtacaggctgagccactgtaacaaagggtccccagatacagtggcttatgtaagatgaaggtttcttcctttctcatataagtctgtaaatgcaggcaggcctggcaaactattggtttatcttgaatgacttgctatagtcaatggcatgtgagtggaagtgacaatgttccaggaaaaccaggctgaaagaggccttgcaggttgctgttgcccctcctgttctcctgctctgcatcataagaagcatcatccccagtcagcctgctggttcaaggaaggtgagagaagtggagcagacrcagaccagagctgtagctccagccacccagctgagcccagccagaacagcagactcccagccagcctgcagacacagtggaatgaatgcttcctgttttctgccatggagattttgttgttatgacagtgacaatccaggatgggcaggtggttctgctccatgaagttgtccatggacccaggttagcatccaccccaccagcctaacacatagctcccatctgtctaaggcagtggttccagccactgggaagggaaaaaccaaacaagtatggagcatgtggactgacttaaggaaattgacaacacttctgcacatatctcataggactgaagttcattacacagccacacctagctgcaaggaaggttgggaaatacaggcttgttctgggctgaattatgtccccctccagattcatatgttgaagtcctgacccccagcacctcagaatgtatttggagaca

SEQ ID NO: 34092 - DNA, 624 bp, Homo sapiens
gcacccggcttatttattttttttagtataagtgtgtcccaaatatctaataggatatacttgtactaaaaagtcatccagttatctgaagttccagtgaaccggggggtgggggcggtggggaggtcggggtcctgaatttgtatttgctcagtctagcagccctgtgctttgcggactggggcccctttgagagcttgatgaaaactgtggactttcttctggaaaagtcccactttgtaaacaatcccagagaattcaaggagccctctgaaagtccatcagtgaatttagaccaggacttggaaaacttgttccgtaaagcacctgatagtacacatttgtcgttgttgttgttgttgagacagagtcttgctctgttgcccaggctggagtgcaatggcgtgatctcggctcactgcagtctccacctcctaggttcaaataattctcctgcctcagcctcccaagtagctggsattacaagtgcctaccaccacgccaggctaattttttgtattttagtagagatggggtttcaccatgctggccagactggtctggaactcctgacctcaggtggtccacccatctcagcctcccaaagtgttgggattacaggca

SEQ ID NO: 34093 - DNA, 537 bp, Homo sapiens
tttttattatgctttaagttctaggatacatgtgcacaacatgcaggtttgttacattggtatacacgtgccatgttggtttgctgcacccattaactcatcatttacattaggtatttctcctaatgctatccctccccctgcccccaccccccgacaggccctggggtgtgattttccccaccctgtgtccaagtgttctcattgctcaattcccacctatgggaatacatttttaaatcatttttgaaggtgttattacattctgattgaacattttcagaaagaataaatcatttaatacaagaagtgggccacttcatgtaacaaaacaaaccaccactacagcaacaacaacaaaaaacacaaatgaatgtgactttagctttgcaacatcrtgacagactagcaagttaatgacatttgttatgccatagaaaatatttgttgaattgccactctaatgactttatatcagccaactcattatcaacactagaaaagatgattaaaaaatacttcagtacgttcacgtgt

SEQ ID NO: 34094 - DNA, 1669 bp, Homo sapiens
tgttagtgtacctgtggttggtctacctgtctgcaaattgtgttgtttttttcagttcaacaagaggaacagtggctctttttatccagaaaaacttctctaagaaagagatctttaaaacatttagtagatgaagcacattgccttcggttggatgctatataccataatattacaggtcagtatgataaggataaatgattccttagtgtgaaaagaagattctaaaagaagtacttctagaataaaagaaaatttttgaatatttctggaacatattctcttaatatcctaatatattagaataatttagaagaatattttcttttaaaataaaatacttctattttaatttattaatcattaaataaataaattctcattcatacaagttttttgtcctggttgttatataataatgtgtgtgcacttgcatggctcttctaggaatatctgttgatgtccaccagcaaattgtttatttctctgaaggaactctcatatgggcgaagaaggctgccaacatgtctgatgtatctgacctgagaattttttacagaggttcaggattaatttcttctatctccatagattggctttatcaaagaatgtatttcatcatggatgaactggttagtccgagaagttaaagaggaatagtgatagacagtgatactgatatgcatatcttggtatatttaatactaaacacaattgccttattcaatacatactcaagtatttactatgccttagatactaggttatcaatgaatcatagatctggcctataggagggtgtagcctttacctagtgctagtcctgacatagcattaaatcacctttatttgtacttttttagagtcatgagtttatactaaaaataattcatcttctataagatagtggtggtacctgtcttattgttaggtaagactgccagtcatgatcaaagttagctgcaagcatttaaaattatatcataaccagagggaaatttagtagttctccaaaaacacagtagtactgtacttttcggaagaccattttttgttgttgttgktggtggtggtggtgcataaggactattttgagctgatgaagacacagtcttgacatgtttcaaattctacttctttggaaggtacaggcttatcacagtaagcaacagccattgctgtggttgaaagtgcataaacctagatatcgcttaaatgttaaaaatagttgaatgcctctacaagccaggaaaataggcacttgtattgcattgatgtcaataatgtataaattcattaggatataggatataaaactgtcgtttaagggcttttttttgctcatttgtcttgggcagtgctcagtgcctagtacaattccaacagaacagatactcagggatacttgttggctgaatttaatgctgtatagacagatgctaatcctaccggtatattttttatttttttaggtatgtgtctgtgatttagagaactgctcaaacatcgaggaaattactccaccctctattagtgcacctcaaaaaattgtggctgattcatacaatgggtatgtgttagccttgtaaagatgaattctcttccattgggaataaataatctttgagaaacttgcttgctaatgaaacattgtagtaccagatgagcc

SEQ ID NO: 34095 - DNA, 1669 bp, Homo sapiens
tgttagtgtacctgtggttggtctacctgtctgcaaattgtgttgtttttttcagttcaacaagaggaacagtggctctttttatccagaaaaacttctctaagaaagagatctttaaaacatttagtagatgaagcacattgccttcggttggatgctatataccataatattacaggtcagtatgataaggataaatgattccttagtgtgaaaagaagattctaaaagaagtacttctagaataaaagaaaatttttgaatatttctggaacatattctcttaatatcctaatatattagaataatttagaagaatattttcttttaaaataaaatacttctattttaatttattaatcattaaataaataaattctcattcatacaagttttttgtcctggttgttatataataatgtgtgtgcacttgcatggctcttctaggaatatctgttgatgtccaccagcaaattgtttatttctctgaaggaactctcatatgggcgaagaaggctgccaacatgtctgatgtatctgacctgagaattttttacagaggttcaggattaatttcttctatctccatagattggctttatcaaagaatgtatttcatcatggatgaactggttagtccgagaagttaaagaggaatagtgatagacagtgatactgatatgcatatcttggtatatttaatactaaacacaattgccttattcaatacatactcaagtatttactatgccttagatactaggttatcaatgaatcatagatctggcctataggagggtgtagcctttacctagtgctagtcctgacatagcattaaatcacctttatttgtacttttttagagtcatgagtttatactaaaaataattcatcttctataagatagtggtggtacctgtcttattgttaggtaagactgccagtcatgatcaaagttagctgcaagcatttaaaattatatcataaccagagggaaatttagtagttctccaaaaacacagtagtactgtacttttcggaagaccattttttgttgttgttgttggtggtggtggtgcataaggactattttgagctgatgaagacacagtcttgacatgtttcaaattctacttctttggaaggtacaggcttatcacagtaagcaacagccattgctgtggttgaaagtgcataaacctagatatcgcttaaatgttaaaaatagttgaatgcctctacaagccaggaaaataggcacttgtattgcattgatgtcaataatgtataaattcattaggatataggatataaaactgtcgtttaagggcttttttttgctcatttgtcttgggcagtgctcagtgcctagtacaattccaacagaacagatactcagggatacttgttggctgaatttaatgctgtatagacagatgctaatcctaccggtatattttttatttttttaggtatgtgtctgtgatttagagaactgctcaaacatcgaggaaattactccaccctctattagtgcacctcaaaaaattgtggctgattcatacaatgggtatgtgttagccttgtaaagatgaattctcttccattggsaataaataatctttgagaaacttgcttgctaatgaaacattgtagtaccagatgagcc

SEQ ID NO: 34096 - DNA, 1708 bp, Homo sapiens
ctttgctggacatacagttagtgggggaaaactgaaacatctctttaggtggttgctatgtccgtccagggtgctatgctaccttcagttctaaatatgaaaaccatacggcaaaacaggaatattcctcaaaccctttactttcacagtgttgcttcaaattgtgttacttttttgcttaaacaatattgactgtaagtcagaaaatcacagcatcgcatgtttatttgcatggaagaactctctgraacaggaaatcaagacaggaggtgtcaatacggactgctgccagtcactccggcagtcttcttgcaccagccacttctccgtggagtgtggcagctgggcagcgctccttctgggcttccacaggaaggctctgaccccgaaaaccttagattagagcgcattttgaaatttaaataagcctcaattcacctctgccatcttggcatacaaccgaaatgtgcaagtcagaagaatgtatttctatttaaaatagatagaaagcaggtatcactctttctccttcagtaagtttttagtagtctccaattaaaaaaaaaaaagggttttctttcaaaccaactcaaattcaccaatcttcacacaatatcttaatgttttttacccccattttgttacccagctatgatgtagagggctgattaccacattctttgtaagtattgaagccaattattaattgggtctaaataatacttttcttcccctggattaataatctctgatattactttccaacatttttactcttttcatgtatcttaccttttaaaactctttagagagtcctcctacaattaccttgttgtcatttctgattggcacgtgagtctttttatatctgcaggcctagaatgtagtccactgcctggctcttggtaaatattctttttttttttttttttttgagacagagtctctttctgtcgcccatactgcagtggtgtgatctcagctcactgcaagctccgtctcccgggttcacaccattctcctgcctcagcctccggcgtggcagagattacaggcgtctgccaccatgcccagctaattttttgtgttttttttagtagagacgggtttcaccgtgttagccaggatggtcttgatctcctgacttcgtgatccacccacctcggcctcccaaagtgctgggattacaggcgtcagccaccgtgccccgcctaaatattcttgaggaaatgtaaaatcatgcatgagcagcattcaataaaaagttgaatacaatttatttgtcttccctggctagacattactattgatttagacacatttttctattatttataccatatggaaatatactttcatcaagacgagttcctctgatttcaccagaaaactcaataagctcattctaataattatcctgaaatataaatctaaacattgattttctcacaagtgcacaagtatctaaactgccatcaaccaaaagcttgatataccttggcagaatttcagatcatgcactgtactacacagtcctaaatttcaccttctgtatttctgaatctcatgcaatataagaacaagctcctctcagttcaataggtgttgctgttcaattgccaaaaggatcttattttggtcagaatttaaaaaaaatctgtattgagaatagtttgatatttcaactaagtggtattttatttatttt

SEQ ID NO: 34097 - DNA, 1082 bp, Homo sapiens
  misc_feature (1)...(1082): n = A,T,C or G
aacagaaaaacaaaacttagtttgatgcagtaactagcacctgatatcattcctgaggtatttgccggagtctgtagagtcaagcagaagaaaatgagcaacaattttattaactcctaatcttagagggtcttgctcccattgagagtgacaaaaataatttaattgtaagtgaaggacatgaaaaattgcctggagtattgaaaggattttgagcttagcttgcccagttttatgaaagttttttctccccatggctggactgtgaaatcaccatggaggagaaattgctttatttaaatagcttgcctgcctgccttccttccttccttccttccttccttccttccttccttccttccttcattccttccttctttctttccttcttcttcgttctttcgttcgttctctttctctcgtttctttctccttctttctttctttgatctttatctctttcgttcgtttctttctccttccttccttccttccttccttccttccttccttccttccttccttcgttccttccttccttcctttctttccttcctttcttttccaatagtgatgagatcttattgtgttgcccaggctgctctctaactcctgagctgaagtgttgctcctgcctcagcctcccaaactgctggaattacaggcatgagccatggcaccccgcttttaaatatattttctgtgtaaagactctaagaatctgtgtaaagaatcacaacaaactcctggtaagagagtaaattgtgccgcaattagaattactcaaagaaaagttttaatagtgcgtctacttctgctgttctgcagccaggccagcttagcagcatcttaagcctgccgctgaggcagaaatcatttaaaaaaccaatctctgtctctgtctctgtctctctatctctcctctctctttttaaagaattcctacatatgarggagatcttacagtattgatctcactgnnnnnnnnnnnnnnnnnnnnnnnnnnnnnnnnnnnnnnnnnnnnnnnnnnnnnnnnnnnnnnnnnnnnnnnnnnnnnnnnnnnnnnnnnnnnnnnnnnnntg

SEQ ID NO: 34098 - DNA, 613 bp, Homo sapiens
cccattcttccattttcaatgttggccaaaccccaacattccgcataaatatggttataacctggggcgcatcctctccccgctgctgactgagggtcagcaagggacagagacrccttcaaaatcccgtgcgtttggtttacatcttggtacatcagaaaatgcttctcgcctggtctccatttgtgatctctcttgactcctgttttgaacttttggggtcaagcctatattaaagtccagggttgggtcaacagatggccctgggaagaagcagaaaagaagctggtggccttggcctcttgatgctcattgtcttggaaacagacacatcctctctgggtctctgcaggggctgaaaggcacctggggctggctgttcattctctggcatgggctgtccattccgtggtcccaaaccatcttgctgctatcaaatgaggccagcagatctgtttgggatcactgggggagaggttccagctcttcctaaagtgtggactgttatccaaatgtgccagcagccaccaggggtgggccagacatcacctcccctaacacagatggagaggctctggaaattcacgttgcaattagtagctcctctgtaggg

SEQ ID NO: 34099 - DNA, 1004 bp, Homo sapiens
acgaagacttttaagcaggggcataacgtagtgggagctggctttttatacctcacttcggggtagaggatgcactgcccaggctggtggtggagtggtgaggatctgctgccggctgtaaggcctaacgtgcggggtctgcccgagacgcctccctctgccatcctgtagaccccacctgagtagctccatggggacttcccagggcttggccaagtttccagaacactctggaggcttctaggtcagaggctccatctcccaaccccaacgatgccctcgtttctcagtggtacccaacccccaccagagcaagaatcctcaaggctgggccatatggcagatggggcactgcgagaaagggagcgggagggagaacgcgttgggggcagtcttggaaggcaggtcgtggcttctacctgcatgtccccgagcccatgcagagcctgacatggaggagcccctcaaccaacttgtgaacgtcagggtgagcacacctggtgacgggcactgtcagggcgcgggcccacatccagagaggaaaaaacatcagggctgccccctctgccctgcagagccccttccactgcccggctatctcctcctctcattggtcaccctctttctagctgtttctgcctccagggagccttctagagccccyctgctgtgggcttcttgtgccccacatctccccggctggcttcgcacgtcatgaatgaacgaatggggcaatgacttgcttatttctgtctcatccaccggacctgggtctgtctgttcacttctgtgtcccagtgtgtggagggatgcctgccccacatagggccttgacaaacttttgttgcataaaggaatgagtgttcaacaaagatgtaggtacaaacagactgtggctcacgcctgcactgtggttaaaatcgccaggtgacaccctggtggcgggagaccacatcctgcctcgcacaggctcccagccaccaagccgacgctctgggttaagt

SEQ ID NO: 34100 - DNA, 1004 bp, Homo sapiens
acgaagacttttaagcaggggcataacgtagtgggagctggctttttatacctcacttcggggtagaggatgcactgcccaggctggtggtggagtggtgaggatctgctgccggctgtaaggcctaacgtgcggggtctgcccgagacgcctccctctgccatcctgtagaccccacctgagtagctccatggggacttcccagggcttggccaagtttccagaacactctggaggcttctaggtcagaggctccatctcccaaccccaacgatgccctcgtttctcagtggtacccaacccccaccagagcaagaatcctcaaggctgggccatatggcagatggggcactgcgagaaagggagcgggagggagaacgcgttgggggcagtcttggaaggcaggtcgtggcttctacctgcatgtccccgagcccatgcagagcctgacatggaggagcccctcaaccaacttgtgaacgtcagggtgagcacacctggtgacgggcactgtcagggcgcgggcccacatccagagaggaaaaaacatcagggctgccccctctgccctgcagagccccttccactgcccggctatctcctcctctcattggtcaccctctttctagctgtttctgcctccagggagccttctagagcccccctgctgtgggcttcttgtgccccacatctccccggctggcttcgcacgtcatgaatgaacgaatggggcaatgacttgcttatttctgtctcatccaccggacctgggtctgtctgttcacttctgtgtcccagtgtgtggagggatgcctgccccacatagggccttgacaaacttttgttgcataaaggaatgagtgttcaacaaagatgtagrtacaaacagactgtggctcacgcctgcactgtggttaaaatcgccaggtgacaccctggtggcgggagaccacatcctgcctcgcacaggctcccagccaccaagccgacgctctgggttaagt

SEQ ID NO: 34101 - DNA, 1002 bp, Homo sapiens
ccttgactgcccagccrcaccttgtgtgtgtctggtgtagtgtgtagtttacgaaacaaacggaaaagctcaaagacagcgatccaagacatgatcagcaatttggtcccaaattaggagaggaggaagaggagtatcaattttgtcaccaaaatgttaaaaaaaatgtccttggcgctctttttagctttcccgtttactaccagtccagacatgcaaaaaaaccttgtttattgaaaaataaacaacaagggctagacttgtgtctgcgtctttgattttgcgtgtgccaggctacactggtcccctcccataggggcctcaggccccgggcagggtgggcaggggttcatgctttccagggccctgctttggcctaacacccagcacctctcatgtggccaggaggccgcagggctaaggggtgagcccgcccgggcctgtgcacaccccttctagaccacactcttggaacctgggagtctcctgtccagagggtcctgagaagacctccaaggcccacatggaccttgtccctgtctgtttcccaaggtggctcattgtgggtggcctggatggagctgggacatgaaggtgacaggtgcagggaggggggtccatgtgggagcatgagagttaccgtgctcagggccagttccccccatgctctgaggtccagcaaagaacttgggagtcaaagtctcccacgctggtgtggggccttccggggcttagtgaaggggcagtcgcccaagagaggggctaggacacagtctatgtgctacttagtgagggggacttgcagcctttcaacacttcccatggcaggtggacgggcttccctgggctcctcaggcaggccctgcacatccctcccaggcccagccccggccacacgcaagtgcgctcagcgcaggattccagtcccagaatgccagagccagagcggccagctgaacccaggacagaggagcccaggtcttattccttggccctggtggc

SEQ ID NO: 34102 - DNA, 571 bp, Homo sapiens
gcttcttcccagtgtgtgtctctctgtgccccctccttgtcttataaggatgcccgtcatcagaatgtaggcccattcaagtccagcaggacctcaacgaaccacatctgtaaggaccctacttccaaatgagagctgtcggaggttccagaggacgtgagttttgcatggcgcactattcaagtygatacacaacttgatcagcatttgggaccaaaaaccatctcttcctttcacaacccaaactgactcctgggcagggcaaacctgtggatgctgacgtatctcctggtgccctcccaccccatccctcactgctcatctctgtagtagggggggtcatgcgacacccactccagtgcgggggaccaccccgggcaggcgcctccccggctgtgtgtgtgtgcttccctgctcccaggaggaggcagcccccacctccttgccagcttcgaggtgagtccaccacgctgaggctgcacagtgccagtgttaactcagcaaggtggatttttaaactaaattggccaaaaattttgatgacctaaagacagactgtaattataagtct

SEQ ID NO: 34103 - DNA, 571 bp, Homo sapiens
gcttcttcccagtgtgtgtctctctgtgccccctccttgtcttataaggatgcccgtcatcagaatgtaggcccattcaagtccagcaggacctcaacgaaccacatctgtaaggaccctacttccaaatgagagctgtcggaggttccagaggacgtgagttttgcatggcgcactattcaagtcgatacacaacttgatcagcatttgggaccraaaaccatctcttcctttcacaacccaaactgactcctgggcagggcaaacctgtggatgctgacgtatctcctggtgccctcccaccccatccctcactgctcatctctgtagtagggggggtcatgcgacacccactccagtgcgggggaccaccccgggcaggcgcctccccggctgtgtgtgtgtgcttccctgctcccaggaggaggcagcccccacctccttgccagcttcgaggtgagtccaccacgctgaggctgcacagtgccagtgttaactcagcaaggtggatttttaaactaaattggccaaaaattttgatgacctaaagacagactgtaattataagtct

SEQ ID NO: 34104 - DNA, 569 bp, Homo sapiens
tgacgtatggtaratcattcactcacattcaattgctctttgttgtgctttaatattaggggaagggggacttggcagggggtatggagatgaggagtctctttcctccttttagaggaaaggttgtgtcatctttttggcaagtcactttccctccctacgccttcctttccatgcctgtaacatgagatagttttattacatgaattctaagtctctgcccattcctaatgttggcctcttaataaattcaacttttcattgtgtggtgttattcttcttcaagaaatggattagaaatgttaccatacagagctagaagtcatgaattaattaggaagcccatcgtccaaatctaactgtaaaatgccttggtttcatcttctggaacaaaacgattttttttggggttctgctgatgaacagaaactgtcttttaaagatcacagtttctatcttggagatcttttccactgacagatacttcagcctcatccacatatttaaatgtactttgatctttctttgttttgcaaattcccttttgaaacagtttgtgtgaactttag

SEQ ID NO: 34105 - DNA, 569 bp, Homo sapiens
tgacgtatggtagatcattcactcacattcaattgctctttgttgtgctttaatattaggggaagggggacttggcagggggtatggagatgaggagtctctttcctccttttagaggaaaggttgtgtcatctttttggcaagtcactttccctccctacgccttcctttccatgcctgtaacatgagatagttttattacatgaattctaagtctctgcccattcctaatgttggcctcttaataaattcaacttttcattgtgtggtgttattcttcttcaagaaatggattagaaatgttaccatacagagctagaagtcatgaattaattaggaagcccatcgtccaaatctaactgtaaaatgccttggtttcatcttctggaacaaaacgatttttttkggggttctgctgatgaacagaaactgtcttttaaagatcacagtttctatcttggagatcttttccactgacagatacttcagcctcatccacatatttaaatgtactttgatctttctttgttttgcaaattcccttttgaaacagtttgtgtgaactttag

SEQ ID NO: 34106 - DNA, 605 bp, Homo sapiens
aagtttttgaacagtagctaatagcataaaaattagggtgaagataatatctgaagaaaaggagatgagtgaacaaataattattgaatgcctattatgtttcaaaatatttgctgggtacatgacctttgatgcctctgtttgtttagtgaattctctttctgtagraagaactaaggctgagaaaagttaactgattttccaaggtaactcatgtagtgaatggctatgcttgtacttaaagtctggtttgtctgaatccacaatctattggttttttgatattccaggccctctccagggtgcctgagtttgttgtttcatcacagaattacacggaagagactggaaagataactcttcaaatgtcaaatcattcccctataaaaaattttgccacagctgttgaaatatggccttagggtttatgacagaatttgaaccagccccatggaaaatgcatcttgactctgcttttattcctttccctgctgagctcctaatagaagatggatgtctattgcttttctcttgatattcatggcactgctcctctccatccataggattatcttatgtaagtaatagttctttcaaattttggg

SEQ ID NO: 34107 - DNA, 577 bp, Homo sapiens
tgtaacaagcctgttgcacatgtatcccggaatgtaaaataaaataaaataaaataaatagtaccccaaatgcagtgcaggactctggattcaattctggaacagagaaaggacatttgtgggaaaaaaaggggtgcaatctagggtctttatatatagataatggtactgtatcaatgtgaatttcttagttttgactaatgcactatggttatgtaagatattagcattatgggatgctggtcaaggccagatggtgactttctgcactctttgtaatgtttttgtaaatctaaaatgattccagaataaaaggtgtatttaagaaatgggggaaaaagataagcagctctgggccttggagagagatacaaaaattagtagcaattgaaaataattgaagcctcaccagtaaataagacaatacagaaagagtgacagaaccttcatgaattcatgagaataaatgctaaattgccgtaacwtaaagaccctgtaataccttgactcagaggacaaagaagtttcattttttcttccttaacagtcccaatgtgaagagactcagctggtagga

SEQ ID NO: 34108 - DNA, 558 bp, Homo sapiens
aatctaaaaattggtttttaagctaagcataggagtgacataatttttaacataaattatatatttacatataattaagtattaattttcttaatgtgattatgaagtaatgaggtctatagggcctgaacatctaagtttygtgttctttttaaacatatcttttgtcaaaggaatattgatcttacagatacattttatcacattgagtattctcaaaattctcattttgagactgtgtacaagctgagaaaatatattttttacattattaagaaaattatgaaaccctaaattgcaatgtctgtttttcttccaggtataatgagagaaaagtggttactttcaagacagcacgcaattccttttgggagaaaattgaaaatagaagaatgtaatttggtgatatttttggtgagcagatgagctcctctgagtggagcctcttagtctaggttgagaaaaatatcagtgaaactattctgcatatggaaagaacagctacttgggagttggaagatgatggagtagtcttaccaacagaaagtggaagaattg

SEQ ID NO: 34109 - DNA, 558 bp, Homo sapiens
aatctaaaaattggtttttaagctaagcataggagtgacataatttttaacataaattatatatttacatataattaagtattaattttcttaatgtgattatgaagtaatgaggtctatagggcctgaacatctaagtttcgtgttctttttaaacatatcttttgtcaaaggaatattgatcttacagatacattttatcacattgagtattctcaaaattctcattttgagactgtgtacaagctgagaaaatatattttttacattattaagaaaattatgaaaccctaaattgcaatgtctgtttttcttccaggtataatgagagaaaagtgkttactttcaagacagcacgcaattccttttgggagaaaattgaaaatagaagaatgtaatttggtgatatttttggtgagcagatgagctcctctgagtggagcctcttagtctaggttgagaaaaatatcagtgaaactattctgcatatggaaagaacagctacttgggagttggaagatgatggagtagtcttaccaacagaaagtggaagaattg

SEQ ID NO: 34110 - DNA, 1215 bp, Homo sapiens
ctctgtctctgagaggaacacagactgcaggcgcaaggcagaagcagagcccaggaggaggctgatctaatccaggagagacagcrggcctgggagcagggagggagcagcaggtctgtttgtcaggatcacgacagcactggggtgtgaggggaagccaaggaaggtggccaggcttgatgccagtccctgagacgagaaagagtgcagggagccggctggcagggaaatgcctacgggtagggaaactgagccccagagagaggctgcgattgccaccggcacacagagtggcaggttccagacaggaagccgggtctggtgcagcttcaacctccctcctttctgaatcagccaagcctcattccacagtgaggcctcttggactccaagggctatcccatccactgtcgggatggtggaaggatcatcttctatctcaggccaggactgacccagatgggagcaggcagtggagcctggggccccggtgggcgtaggctccagatccctcagtgcctggaacagagcagcagtgggagggagggagacagcgcctggccttgctgatgctgaggttagtctggagtacatgcagctcctgctgatggacaaaaccatcaaggcagttggagcccccagatcctcttgttcaggaatccccaggccatctccttgtcacccagagtaatttgttttgcttgctttactcactttcatttggaaagaaagggacccttttgtagaccagagcttgaacatctttaagctagtcagatcccctcctcaatgctcaagaccaattttaaacccatagccgagtcttcactgtcttgcgcgcccctgctgatgggtggatcactcttatagcctctccattgtgttgggggcagttgtgatatgtggaaagttcttccaccagctgagttagaggccatctcccctcattccacatgctgatgtgggcctgttctctggacaccccccacctcctgctcccactcctcatcagtcacagacacccccaccccctactccatccctgttctccctcctcacctctctgtgcctcctcacagccgtccagaatgagcgggaccggatcagcactcgaaggtcaagctatgaggacagcagcctgccctccatcaatgcgctcctgcaggcggaggtcctgtcccgacaggtaccggggtgatcctgccacccacccag

SEQ ID NO: 34111 - DNA, 1637 bp, Homo sapiens
ttttgacttacaatatttttcaacttactgatgggtttgttgggaaataaccccattgtaagttgaggatcatctgtattcctcacagttttggaggccagaagtccaagatcaaggctcagacaaatttagtgtctgatgatagccggcttcctcatagacagtacctctacactcacatagtggataggcaaggcatttcctttgaccttgttttacaagagcactaatcccatcattagaactccatccccatgatgtaatcacctctcaaaggccccacttcttagtaccatcactttgagggttaggtttcaacacatgaatttgagagggacaaacatattcagaccatagcatctgcttaagtaaaaagaaattggtgagccaatgggttagaaccctttcttttccatcatggcttgtggaggaggtaagctaatagggcaatacgctctctactgttgaggcagcagcttttgggataaaaggaccactgagaagtggattttattttgacaggcagattgggaaagatgccatagaaggtcaggtcttggtaggaagttgctgtggttggcattgcatacaactaatgaagtcagcatcttgataccaatcctattcctccagttctttcctggatatgaaaagccgggacctagaccctgctgagcagaggtctaaaagacaccattatcatctcttctgccatatctatccagagggaaggcatgtccagatagcaggaatcttcttcaggagtatagaaacaagtgcagaccatctaaatgagaacaagcaaagccaaatttatttggagcttacaatagcaagggagtcagccatcatcacttgcatttgtcagagactcaacggcaggcagaggagtgagaaagctttagagtggaaaaaagggaaagcttcaggtatgccaattcaaggctgttggcatggagaagctgcaggtgggctaactaaaagcagggcatcctatgtaattatttaggggtgggtagatatttggctctctctagctggccttgagttggaagccctgacaaaacttasagaagctgtaagttattaatcacgtcctggccatttggggtagattgctacaagggttattgcttggcttcctggactggttgctaaatatagtaatctgatttcttggactggttactggacatagtaggttgccttcctggactggttgttgaaggttgtaggttagtgttctatttgtatatattctctggccattgtctatttgaattcagtctcccaggacggaggagtagggaggaaataagaaagggatagggtggccaggtgattaaggcaaataaactcctatcagtactccaatagtcctgttgtcagaggcgtttgaaccagagtgactccaacttgaacaggtgctgggtaaaacgaggctgagacctactgagctgcattcccaggaggttaggcattcttagtcacagaagattggaggtccacgcaagatacaggtcacaaagaccctgctgataaacaggatgtcgtaaagaagacaggccaaacccaccaaaaccaagatgaagacaaaagtgacctctggtcatcctcacttctcattatacgtgaat

SEQ ID NO: 34112 - DNA, 1098 bp, Homo sapiens
agcaaatcccccatcccactctgccttggcccaagctgaagaagcagccaggatccttctctgactttttatcctgccccgcaggctggcctgatgccccagaggttgactgagctcagctccttttgttgtttcaggaagcagctgtgaggaaaacagtcccatttcaaagtacttgtgattgctgcagacccaggaggaagccttttcttcccaaagggaaagccagctgcacttgcccctaagcccagatgtgcagatgaaaatttctcatgtcttgttgtctaaggtttgaatgttttaacctccaaagtgtcagatggactctgagagctgcaaaaagtttaactaaaatagttcagttgctaaaggagaggctgaggaggatgagagaagttgacccacccatccccagaacccagaagaacgacagctttaaggaggttggatggaaagctgaacacattcagacagagcctgctctccatcagcctccctggagatgaggggctggctgctgcaatgggagctctgtccctatgtacctcctcttcgcaaggggtgtaaagctctgcaggaggtttccatctcacctccttgaggatattgatggacatccaccctcttaaatctatactctaaaaggcatgtaatttagtggaaccctcccactcacctctcaccttctacagcacaactcccagctcactggaaggaaagacatagccaggagagaaaggaaggaatgtcaacgttgttgaagagaggaggagttccttaacacctcaggggctcagctgggtttccacagtggaggacagtgagtggggctacccsacccctggtccagcagtagacacacgactcaggcctggccaggcagaaaactccatacttggccacaatagttggttcagagatggcacgagacccataacagtccaagaagagtcagttctgacattctttatggaattaagagaaatagttactctgctggaaatagaagccaagaattcattctcactctaaagggagaaaatcttcctgagaatgaagtcaaccaacaaaaaataagagctgagaattaaaaagatg

SEQ ID NO: 34113 - DNA, 1098 bp, Homo sapiens
agcaaatcccccatcccactctgccttggcccaagctgaagaagcagccaggatccttctctgactttttatcctgccccgcaggctggcctgatgccccagaggttgactgagctcagctccttttgttgtttcaggaagcagctgtgaggaaaacagtcccatttcaaagtacttgtgattgctgcagacccaggaggaagccttttcttcccaaagggaaagccagctgcacttgcccctaagcccagatgtgcagatgaaaatttctcatgtcttgttgtctaaggtttgaatgttttaacctccaaagtgtcagatggactctgagagctgcaaaaagtttaactaaaatagttcagttgctaaaggagaggctgaggaggatgagagaagttgacccacccatccccagaacccagaagaacgacagctttaaggaggttggatggaaagctgaacacattcagacagagcctgctctccatcagcctccctggagatgaggggctggctgctgcaatgggagctctgtccctatgtacctcctcttcgcaaggggtgtaaagctctgcaggaggtttccatctcacctccttgaggatattgatggacatccaccctcttaaatctatactctaaaaggcatgtaatttagtggaaccctcccactcacctctcaccttctacagcacaactcccagctcactggaaggaaagacatagccaggagagaaaggaaggaatgtcaacgttgttgaagagaggaggagttccttaacacctcaggggctcagctgggtttccacagtggaggacagtgagtggggctaccccacccctggtccagcagtagacacacgactcaggcctggccaggcagaamactccatacttggccacaatagttggttcagagatggcacgagacccataacagtccaagaagagtcagttctgacattctttatggaattaagagaaatagttactctgctggaaatagaagccaagaattcattctcactctaaagggagaaaatcttcctgagaatgaagtcaaccaacaaaaaataagagctgagaattaaaaagatg

SEQ ID NO: 34114 - DNA, 578 bp, Homo sapiens
gtgtgcgcgtgcatgtgtgtgtgtgtgtgcatgtacctgtgtgtacgcatgtgtgtagggacattgagggcaagaggaagaaggcagcccctccactcagagagctcagttgagggcttaaagcaaacaaaaattccctggccaccgacagtgtgctgggagtgtgctctgcacagataactactctatcatgtggcaaattatgtggcatgcacatgtttatgctaacacctctacagcagtaagtactgtggaggaagggcaatcgctaagggccagcagrgtcaggaaaagaaatctgtgctgggccttgaagtttgggctaaaagtttaaaagctggcctgggaagggcatggaccttggcagtggacacatctgagccaaaaggccagctggaccccttgctggctcagggatcttgggcaagatttcccacctctgagcctgcttcagcatctatcagacagggaaaccagaaacctgcccttgagggctgctatgaggattccatgcacactgcctggcacgcaggagccattcaacatggatggaccacttccctcccatctcttcccca

SEQ ID NO: 34115 - DNA, 1791 bp, Homo sapiens
tgggcctttcttcttgcacctttgcaaccctgtaccccttccctctccacttttctttgtgcaatatggctagcaaggtcctcccctttcccactcaccctctgaatgaatcctatctaaaacacttggcttcaaatccaatgggacatttgaaatgtacagtactgacatgtttaaagtgagagtaagcagtatctttaaatcaaaagtgcttctgtaaatgcaaaattgaaacccgcctttcctgcagcagtaaagccttagaactgcaaagaatttgaaagagtagctatttataaaaaatatgttaatacatgtatttgaggacaattgcctaaaattaatataccaaatgataacagtggttacttcgaggtggcaagattatcaatgtttttgatattcttcttccagctttattgtattccctacaatgagtagttattatttctataatcaaggaaaaagctraacacttttagttttagccaactccaacctcaaatttcacaaacagagaaacagaaacttggagagaacattcctggtcacacaaaggtttgccagtggaagtgggtgagtctgggtctcagggtttccttccccactccttttccctggtgccacaccttggtaagacagtggccacgctcagcactgcatacttgggcagcagtttgcggttggttggttgtctatccttacaaggtgcctgattttcaccagcgtgaccgtgagcaggcaacttggggaaacacaagttaaaagaaagagttgttcttatgttcttttttaaagcgcaaacacacattgtcatttcctttccatagagagcccttccccacagtttataggaatgccttatcattgttgacatagcctgttcatgggcttctgtcaagggtaagtccccatgccccttagccaaccagaaaccacttctgttaattgaggaattgtctttacatgcccttacgttcagtcacgccttgaagtgctgggagaacatcttcatccaggatgggcagtgagagacaaagccttgaatccacacagttccatttcctggggacccgtagagcatttttcatgcatgttccacaagctcctttcatgggcacctcattatgctcagagttatccagagcaattgatgaacaaatgtcttttctttctaggaactcacagatttcaaatcttgaaaactggttaagagagtttgttgttgagagatgagacataacccacatgtaagaacgtttccatcatctccagtgtggacttttgtctcacttttctcttttttcttcggcctctcttattctccaaaagttatctgttctttagggaacatttgatcctatgggtcattttcaatccctcgttaactacccggcaaggactttattttcttttagagatagggtctcactatgttgccaagagtgagagtgagagtggctattcacagatgtgaacatagcacattgcagcctcaaactcttggcctcaagtgttccttccaccccagcctcccaaggacagtaaaatccttttgaaaaaatccttagccgagtgaggtggctacaggcgtgagccaccacactcggtgaagggttttttcaaaaggactttactgtgatttttttggcagtgctggcttgaacatgaattggcttttgttctttcagttctattgaagtgaattaaatctataacctcacctggagttgggagtaacaaacgcagccccatagattttgccagcttatggaattaaaaaggccacca

SEQ ID NO: 34116 - DNA, 615 bp, Homo sapiens
ctaccccaaactcactgcatacatcaggcatagcttccagggtgagctttgttagtttttctgagtagacttagccatttactatgctagtcacatacttcacttgcctaagcaatggattttggygttctattgaagagggaatatggtttggaagagtgtctccccctcctctgagttcaatttactagttgagatttgcaagcctgaaatgcttgaagcagctcaggcacgatagcagtgcaagctttaaaatctaggtgtagctgttaatcctttacagaggcacataagtctccaggagtagctcggctagctgtgagcaagatgtatgcttttcatgtactgcgtactcatgggctgagggattattgattttctttcacagttgtaaaaacagcaattggtgatcatcccacacgtacagtacacaccaagttgctttcctatctgtgaagaatctccttgtattctttaatatttaacattgaactttccaacttgctgttttccataaggctcttttcacatagcaattactcaagacagaaaatagccacttactatcttttataaatgaaagaaggttctaagaaacttcttacattcagccat

SEQ ID NO: 34117 - DNA, 615 bp, Homo sapiens
ctaccccaaactcactgcatacatcaggcatagcttccagggtgagctttgttagtttttctgagtagacttagccatttactatgctagtcacatacttcacttgcctaagcaatggattttggtgttctattgaagagggaatatggtttggaagagtgtctccccctcctctgagttcaatttactagttgagatttgcaagcctgaaatgcttgaagcagctcaggcacgatagcagtgcaagctttaaaatctaggtgtagctgttaatcctttacagaggcacataagtctccaggagtagctcggctagctgtgagcaagatgtatgcttttcatgtactgcgtactcatgggctgagggattattgattttctttcacagttgtaaaaacagcaattggtgatcatmccacacgtacagtacacaccaagttgctttcctatctgtgaagaatctccttgtattctttaatatttaacattgaactttccaacttgctgttttccataaggctcttttcacatagcaattactcaagacagaaaatagccacttactatcttttataaatgaaagaaggttctaagaaacttcttacattcagccat

SEQ ID NO: 34118 - DNA, 2621 bp, Homo sapiens
taaatttttgtagtaatgaatctttctcctgtttacagttcttcacctcccagccactacctcccacgccaagcaaaaaaaataaataaataataaatcatttttgattcctttcttccaacctctaatttcctggtttcctcagcgctcagtgtttgtgttgggagacccattagggatgagagagaggggagaaggaatggttttgaacacagaaaaattgtagtcccctggatgggctgtagcccttccgggtcacccttgccaaatctccggtcgaaaggcagctgagccagctgcgggcagacgcccctcccagcactttcctctaggcctggaagtattggattatgggcaattgattcttatttggcatgtactcacttctcgcccaggttttcaactttctttttcttcctctcttcccctctctcatttcgttattcgtctgcatctcttcccaatccctctctcccgctcccccaccaagagcttgtgaggaaagcagactggccggagtcctcgctccgggcccagcagtcctctttgttaacttcctggagcctcctctggcgtggtgccttaagactgtgggctaggccgggctttctccctcagaaacctgggcctcactgctgagacacagtttccaacagccagagggactcgaagattcccaagaggatggttgggtctagtgagagtgcttgttggaaggcggggaagggagattttaacaggtctcacgttttggaaaacaaacaaatttgaccacttgcgttggaatggtcagctgtggttccgggaccgggagtgtaggtggctaaggcacccagctcaggccggccgggcaggggacatggatactgcagctgctgtttggctctaggtccggatcccacggaattggagcttcgcttaacctgccccagcctagcccaagcccgggcggggacctggctggcggtgcccggctgtggttctggcggctgccccgcaccccattctagctgggaggaagcctttgggagtcacaattttagtaggctgtggyaccctcggccttatcatctttgcattggatggagtttccatcaaatacattcttctcctcgccgtctacagtcggcatagtttgaagtctgtttacttgtcccggggaaaggtgaactcaatcgggtttgcggaccgagacaaacaggacctcagcctctttcttgccatcaattacgctggctccatccgctcccgctcccggctgggggaattgtcgcagctgcgggaagagacctagaacgcaatctgaagcgtttcattagggaaataggtgcgcgctgggagcagtgcaagagggttccgcaacctggggacaccctccgcccctacagcaccgtcggcttctggaaagccgacagtcctcctttctgggaatctcctgcatcaactcgtgcccaatttctggcctcccctctcggagaaatcagcattctgaggatgcccctggcgctgaggtgcttggaagcttccgaggtttgggagcaagtacggttcaccccgagatcaccgcgaagctttgcctccgccaaagtaccctacccatccctaggccccaacggctgagaggagtgggggagattttgcacactgcaccccccttcctcctctccccacccccacttcgccatgtaaacactaggactttctcgagagccttggagagccgctctagtggcttcgggccctgaaaccccaggctgggcttttttgatgtttagcatcccaaagctgctccccaccctggccccagcctgggaactgggagctgtgggcaggagaggaaggaaagcagctctctcagctagcgagggggtcagggactgggccaagctcagaagcggggagaagagcgagacagagatgctctgagcaggggagacagggatcccgggctgctgccgctaccaacaagggtacacactgcggtcctcaaggccaggaggggggtgggggcagggaatgcctcagccaacagggcagcggctcggccctgctgctggcccggtgggaagtagcctggggccccgcgactgaaatccgagccaggcctgggcagtctccgctagaaacgctctgggcgcgcactcctggagacgcggaggcccgggcgctccagaccagtgtccttgtaggaggcttcttcacgaagcttagagtttggcctttcatagggaaagacttgctcgggagcaagtctaagggattttaagggattttaaatcttcctgggccagggctagggagctctagtgacagtgtcttggtctggaatccaactctccaattttgaggccgcagggaggaattctgagactttagaggccgcacagccttcagcgcgctcaccgcgtccaggcgtcagtgaggggctatctcgaggcgcgagtgcacaaaaggtagcgcgagtctcttctcaggcgatccagataagaggaaatgagagccgggttttctgacttccaactcattagggaccaggtaaggtcaatgctttctctattatgtctttatcttaaaagcgggtcaatttaagataagggaaaaaaaatccaggatctgtgtga

SEQ ID NO: 34119 - DNA, 2621 bp, Homo sapiens
taaatttttgtagtaatgaatctttctcctgtttacagttcttcacctcccagccactacctcccacgccaagcaaaaaaaataaataaataataaatcatttttgattcctttcttccaacctctaatttcctggtttcctcagcgctcagtgtttgtgttgggagacccattagggatgagagagaggggagaaggaatggttttgaacacagaaaaattgtagtcccctggatgggctgtagcccttccgggtcacccttgccaaatctccggtcgaaaggcagctgagccagctgcgggcagacgcccctcccagcactttcctctaggcctggaagtattggattatgggcaattgattcttatttggcatgtactcacttctcgcccaggttttcaactttctttttcttcctctcttcccctctctcatttcgttattcgtctgcatctcttcccaatccctctctcccgctcccccaccaagagcttgtgaggaaagcagactggccggagtcctcgctccgggcccagcagtcctctttgttaacttcctggagcctcctctggcgtggtgccttaagactgtgggctaggccgggctttctccctcagaaacctgggcctcactgctgagacacagtttccaacagccagagggactcgaagattcccaagaggatggttgggtctagtgagagtgcttgttggaaggcggggaagggagattttaacaggtctcacgttttggaaaacaaacaaatttgaccacttgcgttggaatggtcagctgtggttccgggaccgggagtgtaggtggctaaggcacccagctcaggccggccgggcaggggacatggatactgcagctgctgtttggctctaggtccggatcccacggaattggagcttcgcttaacctgccccagcctagcccaagcccgggcggggacctggctggcggtgcccggctgtggttctggcggctgccccgcaccccattctagctgggaggaagcctttgggagtcacaattttagtaggctgtggcaccctcggccttatcatctttgcattggatggagtttccatcaaatacattcttctcctcgccgtctacagtcggcatagtttgaagtctgtttacttgtcccggggaaaggtgaactcaatcgggtttgcggaccgagacaaacaggacctcagcctctttcttgccatcaatyacgctggctccatccgctcccgctcccggctgggggaattgtcgcagctgcgggaagagacctagaacgcaatctgaagcgtttcattagggaaataggtgcgcgctgggagcagtgcaagagggttccgcaacctggggacaccctccgcccctacagcaccgtcggcttctggaaagccgacagtcctcctttctgggaatctcctgcatcaactcgtgcccaatttctggcctcccctctcggagaaatcagcattctgaggatgcccctggcgctgaggtgcttggaagcttccgaggtttgggagcaagtacggttcaccccgagatcaccgcgaagctttgcctccgccaaagtaccctacccatccctaggccccaacggctgagaggagtgggggagattttgcacactgcaccccccttcctcctctccccacccccacttcgccatgtaaacactaggactttctcgagagccttggagagccgctctagtggcttcgggccctgaaaccccaggctgggcttttttgatgtttagcatcccaaagctgctccccaccctggccccagcctgggaactgggagctgtgggcaggagaggaaggaaagcagctctctcagctagcgagggggtcagggactgggccaagctcagaagcggggagaagagcgagacagagatgctctgagcaggggagacagggatcccgggctgctgccgctaccaacaagggtacacactgcggtcctcaaggccaggaggggggtgggggcagggaatgcctcagccaacagggcagcggctcggccctgctgctggcccggtgggaagtagcctggggccccgcgactgaaatccgagccaggcctgggcagtctccgctagaaacgctctgggcgcgcactcctggagacgcggaggcccgggcgctccagaccagtgtccttgtaggaggcttcttcacgaagcttagagtttggcctttcatagggaaagacttgctcgggagcaagtctaagggattttaagggattttaaatcttcctgggccagggctagggagctctagtgacagtgtcttggtctggaatccaactctccaattttgaggccgcagggaggaattctgagactttagaggccgcacagccttcagcgcgctcaccgcgtccaggcgtcagtgaggggctatctcgaggcgcgagtgcacaaaaggtagcgcgagtctcttctcaggcgatccagataagaggaaatgagagccgggttttctgacttccaactcattagggaccaggtaaggtcaatgctttctctattatgtctttatcttaaaagcgggtcaatttaagataagggaaaaaaaatccaggatctgtgtga

SEQ ID NO: 34120 - DNA, 2621 bp, Homo sapiens
taaatttttgtagtaatgaatctttctcctgtttacagttcttcacctcccagccactacctcccacgccaagcaaaaaaaataaataaataataaatcatttttgattcctttcttccaacctctaatttcctggtttcctcagcgctcagtgtttgtgttgggagacccattagggatgagagagaggggagaaggaatggttttgaacacagaaaaattgtagtcccctggatgggctgtagcccttccgggtcacccttgccaaatctccggtcgaaaggcagctgagccagctgcgggcagacgcccctcccagcactttcctctaggcctggaagtattggattatgggcaattgattcttatttggcatgtactcacttctcgcccaggttttcaactttctttttcttcctctcttcccctctctcatttcgttattcgtctgcatctcttcccaatccctctctcccgctcccccaccaagagcttgtgaggaaagcagactggccggagtcctcgctccgggcccagcagtcctctttgttaacttcctggagcctcctctggcgtggtgccttaagactgtgggctaggccgggctttctccctcagaaacctgggcctcactgctgagacacagtttccaacagccagagggactcgaagattcccaagaggatggttgggtctagtgagagtgcttgttggaaggcggggaagggagattttaacaggtctcacgttttggaaaacaaacaaatttgaccacttgcgttggaatggtcagctgtggttccgggaccgggagtgtaggtggctaaggcacccagctcaggccggccgggcaggggacatggatactgcagctgctgtttggctctaggtccggatcccacggaattggagcttcgcttaacctgccccagcctagcccaagcccgggcggggacctggctggcggtgcccggctgtggttctggcggctgccccgcaccccattctagctgggaggaagcctttgggagtcacaattttagtaggctgtggcaccctcggccttatcatctttgcattggatggagtttccatcaaatacattcttctcctcgccgtctacagtcggcatagtttgaagtctgtttacttgtcccggggaaaggtgaactcaatcgggtttgcggaccgagacaaacaggacctcagcctctttcttgccatcaattacgctggctccatccgctcccgctcccggctgggggaattgtcgcagctgcgggaagagacctagaacgcaatctgaagcgtttcattagggaaataggtgcgcgctgggagcagtgcaagagggttccgcaacctggggacaccctccgcccctacagcaccgtcggcttctggaaagccgacagtcctcctttctgggaatctcctgcatcaactcgtgcccaatttctggcctcccctctcggagaaatcagcattctgaggatgcccctggcgctgaggtgcttggaagcttccgaggtttgggagcaagtacggttcaccccgagatcaccgcgaagctttgcctccgccaaagtaccctacccatccctaggccccaacggctgagaggagtgggggagattttgcacactgcaccccccttcctcctctccccacccccacttcgccatgtaaacactaggactttctcgagagccttggagagccgctctagtggcttcgggccctgaaaccccaggctgggcttttttgatgtttagcatcccaaagckgctccccaccctggccccagcctgggaactgggagctgtgggcaggagaggaaggaaagcagctctctcagctagcgagggggtcagggactgggccaagctcagaagcggggagaagagcgagacagagatgctctgagcaggggagacagggatcccgggctgctgccgctaccaacaagggtacacactgcggtcctcaaggccaggaggggggtgggggcagggaatgcctcagccaacagggcagcggctcggccctgctgctggcccggtgggaagtagcctggggccccgcgactgaaatccgagccaggcctgggcagtctccgctagaaacgctctgggcgcgcactcctggagacgcggaggcccgggcgctccagaccagtgtccttgtaggaggcttcttcacgaagcttagagtttggcctttcatagggaaagacttgctcgggagcaagtctaagggattttaagggattttaaatcttcctgggccagggctagggagctctagtgacagtgtcttggtctggaatccaactctccaattttgaggccgcagggaggaattctgagactttagaggccgcacagccttcagcgcgctcaccgcgtccaggcgtcagtgaggggctatctcgaggcgcgagtgcacaaaaggtagcgcgagtctcttctcaggcgatccagataagaggaaatgagagccgggttttctgacttccaactcattagggaccaggtaaggtcaatgctttctctattatgtctttatcttaaaagcgggtcaatttaagataagggaaaaaaaatccaggatctgtgtga

SEQ ID NO: 34121 - DNA, 526 bp, Homo sapiens
ccacggacttacaaatatgagaccgctacaacaaatgtatctagcctagcaaaacatgaatgaaacgttgtatgcagtctctttttctattagtcagtggctgaaagcctttgaaacaacctgatgggcggttggtattgtgtaagacggtgacctaaaaacagcctgtcagttccctgccatcccatttttcaacagcagggtgtgatcataatgggctttattgacatcataaatctgagagcatggatggtatccatttccagttgtttaattgaagaaaygaaagatcttgtaatgtggagttgatatggagagtttgtcgagctacagtaaaattttgcaagagctgtgaccttgggtcagaaaatgactgatcaagacggaaccttttgtcatactgtggaagcgactgtattgacttattttattcttagcgctaatgccaacagagagcacgaattgcttctgactgctttctgtctcaacccagagtgactctgtgggcaaatcaatacaagtatcg

SEQ ID NO: 34122 - DNA, 1110 bp, Homo sapiens
agaccaagatggaggtgggtcccatgctgggaagcagtgctggggctcccacccctcccccccgacactatcctagccagccaggctgcctgtctccctgggtgggacccatggaggactgaggcccggagcccgccgtgggtctgctgtcctgtagaaggctatgggggcctatgtgaagaagccctgctggcagtatctgatttgggagcaaagacatatgaggacaccactaagaagctgcctgtgggctcacgcctgtaatcccagcactttgggaggccgaggcaggtggatcacctgaggtcaggagttcgagaccagcctggccaacatggtgaaaccccgtctctactaaaaatacaaaaatcagccgggtgtgatgatgcgtgcctataatcccagctacttgggagcctgaggcaggagaatcgcttgaacccgggagacggagattgcagtgagctgagattacgccattgcactgcagcttgggcaacagagcaagactctgtctcaaaaaaaaaaaaaagaagctgcctatgaaagtcccatackagggtcagttcctgagcgcccgatccagcttaatccccttgatgtctcttgttgatcaggcctccccttcctctcctcctcctcctgagcaatgagcctggccaaagaaaatgattgatcttcccagaaagagaactgaaccccagtagagcatagaatttttttctgaattgtgtggggtagatagtggggtgctttagcagatcaggaaagaggccctgcttggctagagcatggcctctgagttcctaaagaacagagaccatgttgagttcacattggtatgtgtcgctcccctgcacccctgccagcacattgtccttagtagacaggcaggaaatatctactgaattgaactgagtggacagaaagtgctttcacaaacaatggttgtttacatggatgaataacagacagaaatgggcattaggcctggcctgcagggatggatgggattcaggtgggccagggcaggcatcccaggaggcggaacagcaggagcaagagcatgggtactgaggaggtgagtgaggtctgccgaggctacgagga

SEQ ID NO: 34123 - DNA, 1110 bp, Homo sapiens
agaccaagatggaggtgggtcccatgctgggaagcagtgctggggctcccacccctcccccccgacactatcctagccagccaggctgcctgtctccctgggtgggacccatggaggactgaggcccggagcccgccgtgggtctgctgtcctgtagaaggctatgggggcctatgtgaagaagccctgctggcagtatctgatttgggagcaaagacatatgaggacaccactaagaagctgcctgtgggctcacgcctgtaatcccagcactttgggaggccgaggcaggtggatcacctgaggtcaggagttcgagaccagcctggccaacatggtgaaaccccgtctctactaaaaatacaaaaatcagccgggtgtgatgatgcgtgcctataatcccagctacttgggagcctgaggcaggagaatcgcttgaacccgggagacggagattgcagtgagctgagattacgccattgcactgcagcttgggcaacagagcaagactctgtctcaaaaaaaaaaaaaagaagctgcctatgaaagtcccatacgagggtcagttcctgagcgcccgatccagcttaatccccttgatgtctcttgttgatcaggcctccccttcctctcctcctcctcctgagcaatgagcctggccaaagaaaatgattgatcttcccagaaagagaactgaaccccagtagagcatagaatttttttctgaattgtgtggggtagatagtggggtgctttagcagatcaggaaagaggccctgcttggctagagcatggcctctgagttcctaaagaacagagaccatgttgagttcacattggtatgtgtcgctcccctgcacccctgccagcacattgtccttagtagacaggcaggaaatatctactgaattgaactgagtggacagaaagtgctttcacaaacaatggttgtttacatggatgaataacagacagaaatgggcattaggcctggcctgcagggatgratgggattcaggtgggccagggcaggcatcccaggaggcggaacagcaggagcaagagcatgggtactgaggaggtgagtgaggtctgccgaggctacgagga

SEQ ID NO: 34124 - DNA, 915 bp, Homo sapiens
atactttggggcggcacgttccggactcctgcagtattgtgttcttaaccccggcaaggttaagagggatcattttatttcaaagaaaacgtctcaggacccagtctggaaaattctaacttggaaatttaaggtcttattctgttaaaatggctttcagttgtgaaatagtaatataacaatgtcatccttaaaaacttgtaaaaaaaaamacaaaaccttaagattatttattaaaataaacacaaaacttaaaaatctcatagaattttagttcctgaacacgggcaggtctaagtgctccaatttgagacacacttacgtgcgacacatacggatgtcaagttggtgctaagacgcccccatggcccccaggtattaccaggcaggtgcagataagactgtgtgatggtgtggaggagtgctgagaactgaagtagtaggatataaaggaaattgtaggcttgaagtttcaggccgcagggtccgattgcttgtgctcaaatcctagctctgtcccttgccaactttgtgtccttaagcagctttaattctctaaatcttgatttcctcatagagttaaaaatgacctctgttttaagcctctttggagggttgaatgagggggaaaaaaggcaaagcatttttatagcatactggcacctggcacctgtagcaagccttccgaatgaggaaaaggtgttgcaaggtctaccccatacccttattgcaaaagacagattaaccagagagaggcatagcaagggtattcagggtaagttttacatgatgaagacacaaagacctgggggtatgacccagtggtaatgaactggagggatcttgccaaagcctgtttgttcagattctttctggcctctctgtgaggcatgtcctcgccccaaatatggggta

SEQ ID NO: 34125 - DNA, 915 bp, Homo sapiens
atactttggggcggcacgttccggactcctgcagtattgtgttcttaaccccggcaaggttaagagggatcattttatttcaaagaaaacgtctcaggacccagtctggaaaattctaacttggaaatttaaggtcttattctgttaaaatggctttcagttgtgaaatagtaatataacaatgtcatccttaaaaacttgtaaaaaaaaacacaaaaccttaagattatttattaaaataaacacaaaacttaaaaatctcatagaattttagttcctgaacacgggcaggtctaagtgctccaatttgagacacacttacgtgcgacacatacggatgtcaagttggtgctaagacgcccccatggcccccaggtattaccaggcaggtgcagataagactgtgtgatggtgtggaggagtgctgagaactgaagtagtaggatataaaggaaattgtaggcttgaagtttcaggccgcagggtccgattgcttgtgctcaaatcctagctctgtcccttgccaactttgtgtccttaagcagctttaattctctaaatcttgatttcctcatagagttaaaaatgacctctgttttaagcctctttggagggttgaatgagggggaaaaaaggcaaagcatttttrtagcatactggcacctggcacctgtagcaagccttccgaatgaggaaaaggtgttgcaaggtctaccccatacccttattgcaaaagacagattaaccagagagaggcatagcaagggtattcagggtaagttttacatgatgaagacacaaagacctgggggtatgacccagtggtaatgaactggagggatcttgccaaagcctgtttgttcagattctttctggcctctctgtgaggcatgtcctcgccccaaatatggggta

SEQ ID NO: 34126 - DNA, 526 bp, Homo sapiens
cctagacgggatcaaaatggtccttagattcttaatgggtccctatctggaatccatttgatcttaaaataaaatggccgtggaagaaatttttcattaattcctagctgatttgcaatgaaattaaatttctgagtataaggaatattttttacggagtaaacttataagtggggttgctgggtgtttcccattgattagcctagtgtttaaaagtataatgtctttattttctggtttcttacttttttgagttccctcacttttcttctagagttcattatgcaggtctggaaarcaacaaccaccaccaccagcaggagaaaagcaggggttagtttggggggggttgaaatgggaaaaatagacatttccagctcccaacatcttatttcctgaatatcttcggagcccaagaaagtggctctgagctgcctttgcagtcttgaagctgcacttgcgttcccaccagcccccgggcctctggttgcatcctggggggcacttctgcactcccagcctcctg

SEQ ID NO: 34127 - DNA, 616 bp, Homo sapiens
tgcatcctgaaacgctggcgttctcttgtttccttaccgttccagaagcaaatctgttaatctttctcaaacattttattttccttaattatttcctctgggaggtcctaaaggatctattattcagatcctggacttcttaccctgtctgccttgttttttcagaatttaaaaaatttgagcatgtgacttgctgttgaatggggacctgattcattcaatgaacgtccattaagtgcctgctgcttcaaaggcatcatacagggcagtgtggtggatactgtaaacccccattcatccgcaaacactattgaggaccaactatayatccaccactaaagaggtgcatttgaataaagcccaacccttgtgctccgatttatagactatagacgagtgagggaggtaggctatacttgtgttgtaggaattacaatgcaatgtgataactgcagaacaacagacttgtgaggttcccccctttgctgacccctcccactgaaatgtgagaacagatgtggtggcaatgccagagcacccccagagaagccggtcacaggcctccagcagcagttcatcatcactcagccacgatggaaatataagccaagcacta

SEQ ID NO: 34128 - DNA, 448 bp, Homo sapiens
gtgtgagccaccgcacccagcctgctctcctatctgtattcaaacagaaaaaaaataatttcttgcttcaaatttaattcagaggggaaatgcaaactgagccagagatttgtcaytggaaggggaacctgaaggcagaagagcagcaggttattacagtgaggagggtgacctcagggagccgtcctctttaggacatccactgtctctggggagcacaggtctctgcgggtacggcccctaacctgccttgcatggccttcagagatgatgcacctgggctatccacatgtctctgggactcagagcttggcctgcatcctgggatggcagaggaatcctgaggttgggctagtctgccaggccctctctctttgcaacagggtcactaatctaggacccgcccacgtgcttctaatttattcattaatattttgaagttcaaatg

SEQ ID NO: 34129 - DNA, 448 bp, Homo sapiens
gtgtgagccaccgcacccagcctgctctcctatctgtattcaaacagaaaaaaaataatttcttgcttcaaatttaattcagaggggaaatgcaaactgagccagagatttgtcactggaaggggaacctgaaggcagaagagcagcaggttattacagtgaggagggtgacctcagggagccgtcctctttaggacatccactgtctctggggagcacaggtctctgcgggtacggccccyaacctgccttgcatggccttcagagatgatgcacctgggctatccacatgtctctgggactcagagcttggcctgcatcctgggatggcagaggaatcctgaggttgggctagtctgccaggccctctctctttgcaacagggtcactaatctaggacccgcccacgtgcttctaatttattcattaatattttgaagttcaaatg

SEQ ID NO: 34130 - DNA, 544 bp, Homo sapiens
ctgtggtgggtttgatgctgccaaataggtaaaagtaattacaattctggtagtatgaaagagaaatggtcaagcttgggagtcatggattgtactttggggctgggaatcttatagattgttcatatatggaaagcattttaagggcattkcagaaagccttctggttgaacttcatgaaacttaactcttccttcccgactgtctctcccaccttctgaaaaccacagaaacagctctatttattgggttctatgacttaaaagaagaaaagactgaagagtgacaatcagacgtctttaaagttctcttttggacccaaggcaggatgctcgtggcatttcaacaccttcctcaggatcagagtagggagagacagaaatgatctttatttttgggatcacagcttgaaatggggctgctgggctgtattggatttgattctgtccaaaaggcgaaagtaatgatagctgctgggctcccatcctccatgaaaacccagtcagttcattgtcagtttaattgttgttttctgagctcttct

SEQ ID NO: 34131 - DNA, 636 bp, Homo sapiens
taaacaaggtccttaccccagccacaaacagtggataagtacagctgaggagtaaataactagtaaatgtactgttctatcattatagaaaagggtcaatcattcaattaaactagtactactgtctttcatttgtgaagtgctcaattttaaaggaggaacttcagatttcatatcacagatcacaagaattcatgaaatatttaaagaattttaaatacagacaagttctctaattaaattcagaaagggggaagcttttgaactactaatcatctgaaaaattcctaaagttagctacttggttatcaagtttgagatatgtagcacataccaacttccatgtaatcaagtcagctgagctgttagtgaagttctccaggctaggttcaaggacactccttgaattaacaaggaatatatttttcccctcttattagcaaaacctgtccataattagtcacataaatttcattaagatcattatgatcctcaacttttctctctctctctctctctctctctgtctctctckcgtgtgtgtgtgtgtgtgtgtgtgggggggggggggggtgttcatcataattctaaactttttcctcaaaagagtaacttgatagaaatatttcagaaaat

SEQ ID NO: 34132 - DNA, 636 bp, Homo sapiens
taaacaaggtccttaccccagccacaaacagtggataagtacagctgaggagtaaataactagtaaatgtactgttctatcattatagaaaagggtcaatcattcaattaaactagtactactgtctttcatttgtgaagtgctcaattttaaaggaggaacttcagatttcatatcacagatcacaagaattcatgaaatatttaaagaattttaaatacagacaagttctctaattaaattcagaaagggggaagcttttgaactactaatcatctgaaaaattcctaaagttagctacttggttatcaagtttgagatatgtagcacataccaacttccatgtaatcaagtcagctgagctgttagtgaagttctccaggctaggttcaaggacactccttgaattaacaaggaatatatttttcccctcttattagcaaaacctgtccataattagtcacataaatttcattaagatcattatgatcctcaacttttctctctctctctctctctctctctgtctctctctygtgtgtgtgtgtgtgtgtgtgtgggggggggggggggtgttcatcataattctaaactttttcctcaaaagagtaacttgatagaaatatttcagaaaat

SEQ ID NO: 34133 - DNA, 1032 bp, Homo sapiens
taaaatttggtcataaaatcagcaacattataaaaattaaataaacaaaaaacacacaaaactttagatttattcctgtatcctagaagttccttctataatggtaaaatatggtttcagccttggctgaagattgattttaccagttgagagttcttggtcaaaatgcaatgcacctctaaaatataaataaaatgaagtagatgaaacctgaaggaggaattagaactgactctctgtactttggcttttccatctctaaaagtaaaccactatcatataaagttatgaggttcaaacgaattagaagcacataaaatggcatagcacacagtaagtactcaatgaaagccagctattattatcgtgtccaatgtatcttactgaatgtgggaatttgtttttcaaaatgtatagtcacatcaggaaaaaaatcggatacactagactattaactgttgttagttgtggagacctttcatttcttgttgcaaacttctgcagtgtttgcctttttaatcttctattttctagttttaaaaaaagataaaatgtactgaattaacagatttgttattttatatttttttcaatcaataaatgctaaaagtacaaactaatgtcatgtagatatccttgaaatttaatattaaaaagggatccttggatttgaaatattagagaacactgctttttatcatggtaacagtctcaaccctatacaaagcatcttcaacataataccaacaactcagtctacaattccaagatwataagattatgtttcctgggggcccggtgcagtggctcatgcctgtaatcccagcactttgggaggccgaggtgggcagatcacgaggtcaggagatcgagaccatcctggctaacgtggtgaaaccccgtctccactaaaaatacaaaaaattagtcgggcatggtggtgggcgcctgtagtcccagatatttgggaggctgaggcaggagaatggtgtgaacccgggaggcggagcttgcaatgagccaaattacacc

SEQ ID NO: 34134 - DNA, 1003 bp, Homo sapiens
tgccccagcccaggtgcaagcacagtgaagagttgccccaccaactgcagccccaggctttggactgttactccggtaaaggtggttcttcccctttgggattccaagcccaggcaaatggaacccatcaatgggcaagttgacagaggttctgcttgggataatgaagagctgcctgtttctttccagtgcctgcttctgggggcagtgaccttgtgaaccactcatttttatgcaagtggcatccctaaaacctgagatgaggaagacttcaagggttttacagggcccttgttttttaaatccaaattgataataatgatctcaaaacacagtgagaggtctgaaggctggcttctgaagaatccctgatgtcttattggaacaaccactgagctacggagagctctgctgtgatgggctaggcactttatatctgtgtgaatacagatttataaaacaggttaataaacttatccaaggtcacatttcaggtctgtcttcaaaatgtgtgcatatgttaagcacaagcctcagttttcattattttaaaactagacgcagaacatataacaactgtcaggtggttagtatcaaaggccaagtgattaatctaggcctgacccctgaaagggagaggggagtgattctcagaccaagtcctggctgacaagctttctctggtcttagctatacatctccttccccccacgtccctctttgtgcagaaataaaatccatgtcccttgagccagctggtggggggtgctgagaaccttggggaagggcaggaaggctgatattaatgagtattttctaatcttagtttaaaaaggggggatggtggggaaatgagagscaggaaatgaaaatctagaaacccctgtaagaattcttgaactgttgtcattttcttgtcatgccctaacaccatgatcaatgaatagtgtgaaccttactaaagaggcctgtgtgcctgccaaggagtcaggatggaagcgga

SEQ ID NO: 34135 - DNA, 620 bp, Homo sapiens
aaaatcaattaaatgaaaagctggttctttgtaaagatcagtaaaattgataaatttctagctaaactggccaagaaaaaagaaaagacatacaaattaacagtatcaggaagaaaaacagagaattcaaaggagtgtaatgcaaactttatgctagtaaatgcaataagttagatggtatggaaaaaaatgtgaacaatacaaagcagactgtggttgcctttggtggcagtagcggggtgggagtggaaggttgaattgactggaaccagaagcacaagtgaactttttggggtgatggaaatgttttgtatcttggttgcattgatagttaaatggttgtagacattgcttaaaactcactgaacacttaagtgggtatgttttattatttgtaaaatatacctcaaaagcagttttaaaaatgtattcaagtacatacttaagatctttgcattttactctgagtataccttaattttaaaatctrttttttaaaaagtattatgtagataccttttattttcccaatgtctttattaaatgacatctccacgttttgcttcttacctctatttttttttttttatttctctgtctctcaggcatgcacacacaca

SEQ ID NO: 34136 - DNA, 553 bp, Homo sapiens
tactggttttctcggctctgattctgggtctggagcccctggtgtaaaccccgcaaggtgaccccagcaaatttgcccttttgaacagggagtccaaggaccctgggcactctcaagcccaactgcagtgacaaaagttctttctttttgtctccaccccatcagcttttgagggtatggctctggtagcccccatagtataacctctgtctggtggccggctcaggttttgggggatgtggagggagggtcagggatgccagcctgggccatcacccgcttgcataggtctggaaatcaatagctgtgtctgccttggaggagggcagagaactttccagtggcttctgttgtgcagttttttatttttaaccatagagtccagcacgggagtcagactgcctgcattcaagtcttakttccttccatcctctataggtgaccccttgagtgactgtggccaagaaacaagttaattaaaatctctccaggcctcagtttcctcatctgcaaagtggggagaatgatagtgcctttttcacaggattcagcg

SEQ ID NO: 34137 - DNA, 602 bp, Homo sapiens
tgcctggctgaaaaaagaaatttattaagagaacttgtagtagcctctaactccaactaaaaacagaaactccaaaagggagttccagagggagctgtggctctagagagcaggcacaaagaacagtcccgcagggcacctccgctgggatgaaaatcagcatttcccatccgttctgaggctgctcaaaattcaagttccaaggagagagtctggctgaacttggggccagtgcccatgccttggagagggaggacatcataactgagagtcttggtgggctggaagttgcccagagcacaatcagrtgccatgactggaagaaggggtcagcgcccgtccatgggaaagagagccgatcactcattttgagtctgttgcccaccctttgtccagtctgctttggccagggtgggggcatggacaaccaggatggcagttgggaccctcctctttaaggacaagggctgggcagacacactgctgtggcctagatcattcccagctatgttctacccttagtaagcccagctgtgggtgctttctgattagaaatctgaattctcagcctcggggagggcggtccagccctactgacctca

SEQ ID NO: 34138 - DNA, 558 bp, Homo sapiens
tgaaatgatatgatatatgagattttattcagaataatccagtgggttgaggtatagaggtartaagattggcttgaggtggtaattattgaagcttgatgatgggtacataggggtttcttacaaaattctttttatatttttgaaattttctgtaataaagagtaataaaaagatgaagtttcttatagtcctgagtgtggtcctgagtcttcaaaaacctaatgctatgatatctccaaggatggaagaacttctgggatattccttgaagtatgccacctcctaattgacaatagtaacaataaaacgtaagctcattctctttatttgtagtaaaggaaaaaaaatcccattataaagctatgccaatagttaaacactttggggaaagagttcaagcttgttgcagtactgatagttattactgggaccttgtctgaacttattaaaggatccaaggaattggtcagtagtcaaacggatgatttccttaaacgatctctcagactgtaggaggggaccttgctcaatattgaacccccacctcaaccccac

SEQ ID NO: 34139 - DNA, 657 bp, Homo sapiens
tacattttattgggcatacttctgtcagacaaggccaattctttggagtgagctgacatcacytggcagctggagatcgctcactgacccagtaaagaatatctaggtagggcactgtccaacccttgcaagcctcagatgaatatggctctcacattaagttcaccatatccatggttacaaaacgctgcccactcatagctcaatgtgggcaactgtgcaattggcattatgcttcagagtcaaactttatgaaatacattttatgtagccaaaccttccactaggagctttaaaaaaacataaaaataaaaaggtttaagaggaaattttaatacactaacaggccacttagagaatatttcagtgttcaaatgcaaattcttagcatggtatggtttttcaattgttaaaaaaaattgaattcaaaaactgtatatataaaatgttacatttttctctaaattaagagtctcaaactccagtgaaattaattttaaaattcttaatatcaaatacgtatattagcagttttttaagattaaacatagtctatttatttatgaagctgtttggacattttactatttttcaggtgaactatctggattctgcttacctagacaatgtacattggacttttgacaggaattatta

SEQ ID NO: 34140 - DNA, 657 bp, Homo sapiens
tacattttattgggcatacttctgtcagacaaggccaattctttggagtgagctgacatcacctggcagctggagatygctcactgacccagtaaagaatatctaggtagggcactgtccaacccttgcaagcctcagatgaatatggctctcacattaagttcaccatatccatggttacaaaacgctgcccactcatagctcaatgtgggcaactgtgcaattggcattatgcttcagagtcaaactttatgaaatacattttatgtagccaaaccttccactaggagctttaaaaaaacataaaaataaaaaggtttaagaggaaattttaatacactaacaggccacttagagaatatttcagtgttcaaatgcaaattcttagcatggtatggtttttcaattgttaaaaaaaattgaattcaaaaactgtatatataaaatgttacatttttctctaaattaagagtctcaaactccagtgaaattaattttaaaattcttaatatcaaatacgtatattagcagttttttaagattaaacatagtctatttatttatgaagctgtttggacattttactatttttcaggtgaactatctggattctgcttacctagacaatgtacattggacttttgacaggaattatta

SEQ ID NO: 34141 - DNA, 657 bp, Homo sapiens
tacattttattgggcatacttctgtcagacaaggccaattctttggagtgagctgacatcacctggcagctggagatcgctcactgacccagtaaagaatatctaggtagggcactgtccaacccttgcaagcctcagatgaatatggctctcacattaagttcaccatatccatggttacaaaacgctgcccactcatagctcaatgtgggcaactgtgcaattggcattatgcttcagagtcaaactttatgaaatacrttttatgtagccaaaccttccactaggagctttaaaaaaacataaaaataaaaaggtttaagaggaaattttaatacactaacaggccacttagagaatatttcagtgttcaaatgcaaattcttagcatggtatggtttttcaattgttaaaaaaaattgaattcaaaaactgtatatataaaatgttacatttttctctaaattaagagtctcaaactccagtgaaattaattttaaaattcttaatatcaaatacgtatattagcagttttttaagattaaacatagtctatttatttatgaagctgtttggacattttactatttttcaggtgaactatctggattctgcttacctagacaatgtacattggacttttgacaggaattatta

SEQ ID NO: 34142 - DNA, 657 bp, Homo sapiens
tacattttattgggcatacttctgtcagacaaggccaattctttggagtgagctgacatcacctggcagctggagatcgctcactgacccagtaaagaatatctaggtagggcactgtccaacccttgcaagcctcagatgaatatggctctcacattaagttcaccatatccatggttacaaaacgctgcccactcatagctcaatgtgggcaactgtgcaattggcattatgcttcagagtcaaactttatgaaatacattttatgtagccaaascttccactaggagctttaaaaaaacataaaaataaaaaggtttaagaggaaattttaatacactaacaggccacttagagaatatttcagtgttcaaatgcaaattcttagcatggtatggtttttcaattgttaaaaaaaattgaattcaaaaactgtatatataaaatgttacatttttctctaaattaagagtctcaaactccagtgaaattaattttaaaattcttaatatcaaatacgtatattagcagttttttaagattaaacatagtctatttatttatgaagctgtttggacattttactatttttcaggtgaactatctggattctgcttacctagacaatgtacattggacttttgacaggaattatta

SEQ ID NO: 34143 - DNA, 1149 bp, Homo sapiens
aatgatatgcaaatcacatctgcttgtgcacacaatgagatatgtgtgagtgtttacgtgtttggcatatttgtcaataatataaaatattaagaactaagaaatgaccattatttttcccatctaggtactaatctattctagtgactataaattcataattttccccagcaaacttacttgttttccttgatttcccgtagtgktgaatgacaccactgtctgtttatttacctactttctagaaatagaacactaataatcaaatcattgaccttccccaccctcgatttatcatatcattacccctcccaacacaaacactctctaatcatcaaacaatttaagtcctgcagacactgtttcctggatattttaaaattccatctctttctctctattcttcgtgtcattctgagagtttggcctcttatcacaaaaaccctagatttctgcaaaatcttctaatttagcttctgagtcttaccccaactactgtgcccagctgtttaaataagctttccaaaatacaaatatgattaagatccttctgtaatatttagctctggcttgctgtgttgtttgttatgaagtccagcctcttcatttcagcactcgcaggcattgtaaatgtattttctgcctacctatctctttatccttttccctctccattttgctacaagtgtctttgcctccggcaatgtgaatagacctgcaatgtcatgaatgtaggcttctttcattctttaagcttttacacatgctgcccctttccctggcttagttgtcctcctcacagtatgttcccacagcagcctgtgcgtgacagggtcacacgattaacagtgctgtgattatggctcacttctctgtctgcctcagcagtctctaagacccttgagggaaggatcagatcttgtttttctgtgtccaacactgtcgcggtaagcactcaatattcatttgtcaaatgataaaaggggacaaattcagtagttgagttagttgtagcaatctttcggtaactcatctgtttattccagataggtataatgttattccttttgataaaaatattaactctaattacattttctaaacaacatataggaaaatatcagtaggggtgagtacattattggaact

SEQ ID NO: 34144 - DNA, 1149 bp, Homo sapiens
aatgatatgcaaatcacatctgcttgtgcacacaatgagatatgtgtgagtgtttacgtgtttggcatatttgtcaataatataaaatattaagaactaagaaatgaccattatttttcccatctaggtactaatctattctagtgactataaattcataattttccccagcaaacttacttgttttccttgatttcccgtagtggtgaatgacaccactgtctgtttatttacctactttctagaaatagaacactaataatcaaatcattgaccttccccaccctcgatttatcatatcattacccctcccaacacaaacactctctaatcatcaaacaatttaagtcctgcagacactgtttcctggatattttaaaattccatctctttctctctattcttcgtgtcattctgagagtttggcctcttatcacaaaaaccctagatttctgcaaaatcttctaatttagcttctgagtcttaccccaactactgtgcccagctgtttaaataagctttccaaaatacaaatatgattaagatccttctgtaatatttagctctggcttgctgtgttgtttgttatgaagtccagcctcttcatttcagcactcgcaggcattgtaaatgtattttctgcctacctatctctttatccttttccctctccattttgctacaagtgtctttgcctccggcaatgtgaatagacctgcaatgtcatgaatgtaggcttctttcattctttaagcttttacacatgctgcccctttccctggcttagttgtcctcctcacagtatgttcccacagcagcctgtgcgtgacagggtcacacgattaacagtgctgtgattatggctcacttctctgtctgcctcagcagtctctaagacccttgagggaaggatcagatcttgtttttctgtgtccaacactgtcrcggtaagcactcaatattcatttgtcaaatgataaaaggggacaaattcagtagttgagttagttgtagcaatctttcggtaactcatctgtttattccagataggtataatgttattccttttgataaaaatattaactctaattacattttctaaacaacatataggaaaatatcagtaggggtgagtacattattggaact

SEQ ID NO: 34145 - DNA, 1149 bp, Homo sapiens
aatgatatgcaaatcacatctgcttgtgcacacaatgagatatgtgtgagtgtttacgtgtttggcatatttgtcaataatataaaatattaagaactaagaaatgaccattatttttcccatctaggtactaatctattctagtgactataaattcataattttccccagcaaacttacttgttttccttgatttcccgtagtggtgaatgacaccactgtctgtttatttacctactttctagaaatagaacactaataatcaaatcattgaccttccccaccctcgatttatcatatcattacccctcccaacacaaacactctctaatcatcaaacaatttaagtcctgcagacactgtttcctggatattttaaaattccatctctttctctctattcttcgtgtcattctgagagtttggcctcttatcacaaaaaccctagatttctgcaaaatcttctaatttagcttctgagtcttaccccaactactgtgcccagctgtttaaataagctttccaaaatacaaatatgattaagatccttctgtaatatttagctctggcttgctgtgttgtttgttatgaagtccagcctcttcatttcagcactcgcaggcattgtaaatgtattttctgcctacctatctctttatccttttccctctccattttgctacaagtgtctttgcctccggcaatgtgaatagacctgcaatgtcatgaatgtaggcttctttcattctttaagcttttacacatgctgcccctttccctggcttagttgtcctcctcacagtatgttcccacagcagcctgtgcgtgacagggtcacacgattaacagtgctgtgattatggctcacttctctgtctgcctcagcagtctctaagacccttgagggaaggatcagatcttgtttttctgtgtccaacactgtcgcggtaagcactcaatattcatttgtcaaatgataaaaggggacaaattcagtagttgagttagttgtagcaatctttcggtaactcatctrtttattccagataggtataatgttattccttttgataaaaatattaactctaattacattttctaaacaacatataggaaaatatcagtaggggtgagtacattattggaact

SEQ ID NO: 34146 - DNA, 558 bp, Homo sapiens
ttcaggcagagtttaaattttcaaaattaatgcaaaaatatatgatgaagaaaatatcaacattttaaacaaaggcagaatgattattactgtttctccttttgtttcaatatagttggcacagcgctgggtaggaagcttgaacttgaatgctatcagtctgaactcagaacccaagcttgtaaccattgtgtgccaatgtttctcaggatatgaaaaataaagaagggtcaaatattacctacacactctaagactgatggccaaagataacagtgaaactatggtcttgattttttagaagggaagcagagaaaatgattatttttcttgtatagtcccatttagaaacttaagtacaygcatagtttagcttcaaaaccagaggacaaataaaaatcttacttaaacttttcttggcctctcttgtctctcttggcactctttcatcagtgccaagaatccaattactgaccacaagtaacctaaagcagttttcccggcattcagtggtatatttttctggaagaaaccttggatacaattaagaatgacttg

SEQ ID NO: 34147 - DNA, 558 bp, Homo sapiens
ttcaggcagagtttaaattttcaaaattaatgcaaaaatatatgatgaagaaaatatcaacattttaaacaaaggcagaatgattattactgtttctccttttgtttcaatatagttggcacagcgctgggtaggaagcttgaacttgaatgctatcagtctgaactcagaacccaagcttgtaaccattgtgtgccaatgtttctcaggatatgaaaaataaagaagggtcaaatattacctacacactctaagactgatggccaaagataacagtgaaactatggtcttgattttttagaagggaagcagagaaaatgattatttttcttgtatagtcccatttagaaacttaagtacacgcatagtttagcttcaaaaccagaggacaaataaaaatcttayttaaacttttcttggcctctcttgtctctcttggcactctttcatcagtgccaagaatccaattactgaccacaagtaacctaaagcagttttcccggcattcagtggtatatttttctggaagaaaccttggatacaattaagaatgacttg

SEQ ID NO: 34148 - DNA, 817 bp, Homo sapiens
tccctggtgagagccagtctccaggcctccctcccccacactctgctagaagtgcagcgaagcaatgagaacaaggatcttgttccaagcccactgagcaagtgctagcatttagtgaccttctgcaccagtaattcggtccttcggggattgaaattgattttcctcctttctgtgtgtgagcacaacccaagtgcacagctctgttatgaatgctgatctcaggtgtgtatttaaaggtgaacagcaacactcttgaagacagaaatgagaaaagttgtttgcatagcctctgtgaatggacgggatgtctgctccaaagactggctttgaatttctccaagcccttttgtgtgtatgtgcatacatgtttgtgtgtgtgtgtgtgtgtgtatgtgttggggtgaggtagggtgtccaaaactgtaagtgaacacatgtaaaactactcaaattccttcccatgaagctggtccaagagtggggtgtttgtctctggcacgagatttaagaaggtgtccaaagagtcagtactcaagattaaaatgttttaatgctgtatttttttaaaaatccaagtgaatggaatgatgagcaaaatctgcaaattttaaataagtaaacaaccagcattactaatttttttcttttgcttcaggctccagtacggcttggcagggcacctttttgtataacattttgatattttattcatcatggatttttctatgttcattttaatttttgcaatattggaaatattctaaayatttagaaatattggaaatattttatatcttgatcgctgagttttctg

SEQ ID NO: 34149 - DNA, 750 bp, Homo sapiens
ggagtaaatggctttttgtttgtttgtttgttttttgtttttttgagacagtctcacactgttgcctgggctggagtgcaatggcgcgatcttgctatcttggctcactgcaacctctgcctcccaggttcatgcaattctcctgcctcagcctcccaagtagctgggaaatctatgtcactcaaggccttagtggggaaaggtgcacaccaccatacctgggtaattttttgtatttttactagacggggtttcactatgttggccagactggtcttaarctcctaacttcgtgatctgcccaccttggcctcccaaagtgctgggattacaggcatgagccactgtgcctggccgagtaagtgttatgtaccagacatgatgctaggtcttgggtgccttctttccttgtgccttgtgttttccattcactggtttcttgacattctttgtgattctagcttcttagagttatttttcctcctgctgctttctgcaatcttcttggccattatatctaggaactctgtcctttctagccagccagaatttaggagactgtcccccacgtgcttttctctctagcaaaatagcttgcatttatagcataactaatccacaggaaggcaaacacgtgtgtgccctgcatgtccccaaacagcttaatttcctcaacatcctactccttgggttttgggttgggctgaactatagctcttcatggatttgttctggaccctggccctataa

SEQ ID NO: 34150 - DNA, 750 bp, Homo sapiens
ggagtaaatggctttttgtttgtttgtttgttttttgtttttttgagacagtctcacactgttgcctgggctggagtgcaatggcgcgatcttgctatcttggctcactgcaacctctgcctcccaggttcatgcaattctcctgcctcagcctcccaagtagctgggaaatctatgtcactcaaggccttagtggggaaaggtgcacaccaccatacctgggtaattttttgtatttttactagacggggtttcactatgttggccagactggtcttaaactcctaacttcgtgatctgcccaccttggcctcccaaagtgctgggattacaggcatgagccactgtgcctggccgagtaagtgttatgtaccagacatgatgctaggtcttgggtgccttctttccttgtgccttgtgttttccattcactggtttcttgacattctttgtgattctagcttcttagagttatttttcctcctgctgctttctgcaatcttcttggccattatatctaggaactctgtcctttctagccagccagaatttaggagactgtcccccaygtgcttttctctctagcaaaatagcttgcatttatagcataactaatccacaggaaggcaaacacgtgtgtgccctgcatgtccccaaacagcttaatttcctcaacatcctactccttgggttttgggttgggctgaactatagctcttcatggatttgttctggaccctggccctataa

SEQ ID NO: 34151 - DNA, 647 bp, Homo sapiens
atgatttgaccttcccccttccttgcttatatcactaagagccctaagtagatgattatttatctatatgcaaattaacttgtctaattacaaataagcctatgatacaaataataatgcaaacatctcccagtttctctaacaagtcccgatccctctggccattgaatatgctgttccacttgtccagaacattcttcctgctacctctaacctcacccctcttcagctggccagctccttctcactcataggtctcagcttagatgtcactgcctctgggaagccctcactgatctcctcagtgtggctcgaggccttggtcccctgtgctgmgccatcctagcacttatcaccctgtgttgtgactgtttccctagcaggacaggaaatgtccatggagaccagaacagcttgtccttcaccaaagttaagttctccataaacttttttgattgaatcatttatgccaagggttggcaaagctgttctgcaaagtgccagatagtattttcagctttgtgggctgtatgatctctgttgcaaccattcgactctgcggttggagggagaaagcagccatagctgatacttaaacaaatgagcatggctgtgttccaataaaactctatttgtgggcactgaaa

SEQ ID NO: 34152 - DNA, 646 bp, Homo sapiens
aagctttcctagctgttgagctgaatcatcacaaagatattaacaaaggccagcggggtctttttccctgcataagataacacacaagataggcaccccaaggtagctaaaccctggtcttctttggcagtaggggagcctggtttagatgacatttgccttttgcttttgaaatttcatgccgttacaaaatgttcactgttgtccaggatggaatacttaatctaaagagcacaaaacaatagattttaaaaataagtcacatggctatatacaggtaaaagcaagatgctatttactggaacactattaagaagagtgcttaaacttgcaaatactttgttcctagttctgaatgccagctgatgcatccagctttagtggtgcatgactcatctttctgagggcccytttaaggcctctgttgttcagaaaatgcagccctgaaagcttttatgtagaaccgatgtctccttcaagctcaaaggcagtttctccttgaccagtttttccttgacataacgtacttaagtgccacagcatttatcaggtacgcctcctcaggtttgagtcatgctatcatcttttatttaaccactgaaatatttcaatctggccaatctgtattgtgtatatttcatgaaat

SEQ ID NO: 34153 - DNA, 646 bp, Homo sapiens
aagctttcctagctgttgagctgaatcatcacaaagatattaacaaaggccagcggggtctttttccctgcataagataacacacaagataggcaccccaaggtagctaaaccctggtcttctttggcagtaggggagcctggtttagatgacatttgccttttgcttttgaaatttcatgccgttacaaaatgttcactgttgtccaggatggaatacttaatctaaagagcacaaaacaatagattttaaaaataagtcacatggctatatacaggtaaaagcaagatgctatttactggaacactattaagaagagtgcttaaacttgcaaatactttgttcctagttctgaatgccagctgatgcatccagctttagtggtgcatgactcatctttctgagggcccctttaaggcctctgttgttcagaaaatgcagccctgaaagcttttatgtagaaccgatgtctccttcaagctcaaaggcagtttctccttgaccagtttttccttgacataacgtacttaagtgccacagcatttatcaggtacgcctcctcaggtttgagtcatgctatcatcttttatttaaccaytgaaatatttcaatctggccaatctgtattgtgtatatttcatgaaat

SEQ ID NO: 34154 - DNA, 617 bp, Homo sapiens
tggacaagtccatctcctctgagcctttttcttcgtaggtcaaacaggagatttggatttattaaatctgcctgtgcctcggcccagcttcttactcccacatctaccctgcccaagaggctgaaacccatgccaattgttctgatgaggccatgagggagaaccagacgtctgtttttaatactgatgacagattagcgtgcggggmattcagccaccccccacaacaagccccatttctgctcaaaacaactggaacaggagactacttatgcttggctttcctaacagcgtcccggaactgaccgagcgatggcttctctgaaggagacaaagagggcgccaaacctagaggtgggggcaggggtaggagacagggagggagagtgagcatttcaaaagttagttcagaagggtgtgaaacagatggcagccataaagtgtgtgtgtatgtgtgtgtttgtgttcatgtgtgcacatgggagaaagagagagagagagatctgtgtaagcacctatgcctgtgcacatgcacgcatgagctcgtggataaataaataattccagcactggacttggctgccagcaaaaattcagagagatcaaaggataaagcc

SEQ ID NO: 34155 - DNA, 2746 bp, Homo sapiens
attttttcttttcttttttttttttttgagacagagtcttgctctgttgcccagactggagtgcaatggtgcgatcttggctcactggaaccactgcctctcgggttcaagcgattctcctgcctcagcctcctgagtagctgggattataggtgcatgccaccacacccaactaagttttgtatttttagtagagatggggtttcaccatgttgtacaagctggtcttgaactcctgacctcatgatcagcccgtctcggcctcccaaagtgctaagattacaggtgtgagtcaccgcacttggcctaatttttctttcagaaatggtggtctccctatattgcccaggctggtcttgaacccactgggctcaagctatcctctcacctcaggctcccaaagtgctgggattacaggcgtgaaccactggccctgggcctgttcttgttatttattggaatctgcaayagcctcctcatggatctccttgattctactcttacattctcacagtctatcctgaccctgcagctggaggtgtggagacatacacatatgtattttattgttggtgttagtttggggacctctgatgcacagagttagattatttgcagtgttcagtttaggactgaagctcattgttgagccatgcatgggtaggctttatttatttgttcagttagctagttagttttaataaactttttaaactttaatgaactctcactaatctaccaccaaaaacaccagctaggagctgggcgcagtggcttacacctgtaattccagcactttgggaggctgaggcgagcagattgcttcaggtcagaagttcgagaccagcctggccaacatgttgaaaccttgtctctactaaaaatacaaaaattagccaggcatggtggtggacgcctgtaatcccagctactcaggaggctgaggcagaagaattgtttgaacccaggaggcggaggttgcagtgagccaagattgcgccactgcaccctagcctgggagacagagtgagactcagtctcaaacaaacaaacaaaaaaacaccagctaggaacttgagtacttacatgtaacatatgcttccttatgccattaccttagttttcctgactcaagatcaccatcatcctgtctcctatgttcatcacttccttgcttccctttttaaatcatatttattgcatctgtatttattcctaaaagatagtatatttgaggtgtaggtatgctttaacttaaagaagggaggaaagggtgttgtgccatataaaatctttggagccaggcatggtggctcttgcctgtaatcccagcactttgggaggccgaggtgggtggatcacctgaggccaggagttcaagaccagcctgaccaacatggtgaaaccccatctctactaaaaacacaaaaaattagctgggcatggtggcaggtacctgtaatcccagctactccggaggctgaggcaggagaatcgcttgaacccaggaggtggaggttgcagtgagctgagatcgcgccattgcactccagcctgggcaacaagaacaaaactgtctcaaaaaaaaaaaaaaaaatctttaggacttactttcttcagttaataatacattcattcatttcatattgacaggtatcactacagctcattcattttggttactgtagtatattctattgaatatatatcctgtgctttatttcaatgctgtcccatggatgggaatttgggttttttacagaggcctccttctgccacacaatctaatcccatcagcctcctgccaataaccatgcatcatcatcacctcatggcccacaggatagggtcaaaattccacaatttggcttacaatattgtggaaatgatcaggattcattttgtttctccctccgtccttggtcttagtcatgaggcatttcttttggtctttgtacaaacaatgttcttttcttccttaggtcatctacctgacactttccctacctcctttctcccatgccttctctttcctctatgaagctctgtatgagcactcaacaccctccagcacttagccaagaagtatgctgtgggaggggcacgggattcatagagttctactagacttagtcagtggtctaccagtggaggcccagggctgtctgggaggtgttgtagaaggaggagtggggatcaaatgggagatgctttatctcccttcctctgcctcattgaaatagtggcatcactattcctgattttatggattgaggttcaagaaagattgcatttggaaaaagtgttccataaagataagtttgcaaaccagtgaatcaataattcatatggtcccctcaagccctgccattctataattaaaagtgagagaaccgaagagaaaaaaagaagcaataatttcatggctaagcatataaactctggagcagaccaactttgagtaaatcacttaatatctttgaggtttcctcagctgtaaaaggggtacgatattaaaatgaaccatatgaaattgccattttataagtaaaaaatggccaaatgtcagcaatttcatatgaatcgaaccaatatatgtaagtaaatcacagatctggagggcagagtaaatgagataatgcaagtattgtactgaggtagatactgctaggttttcaccaaacccatgtcttctcctaggcacacagctaaaatccatttccctgtcttcatttcagacaggtat

SEQ ID NO: 34156 - DNA, 2746 bp, Homo sapiens
attttttcttttcttttttttttttttgagacagagtcttgctctgttgcccagactggagtgcaatggtgcgatcttggctcactggaaccactgcctctcgggttcaagcgattctcctgcctcagcctcctgagtagctgggattataggtgcatgccaccacacccaactaagttttgtatttttagtagagatggggtttcaccatgttgtacaagctggtcttgaactcctgacctcatgatcagcccgtctcggcctcccaaagtgctaagattacaggtgtgagtcaccgcacttggcctaatttttctttcagaaatggtggtctccctatattgcccaggctggtcttgaacccactgggctcaagctatcctctcacctcaggctcccaaagtgctgggattacaggcgtgaaccactggccctgggcctgttcttgttatttattggaatctgcaatagcctcctcatggatctccttgattctactcttacattctcacagtctatcctgaccctgcagctggaggtgtggagacatacacatatgtattttattgttggtgttagtttggggacctctgatgcacagagttagattatttgcagtgttcagtttaggactgaagctcattgttgagccatgcatgggtaggctttatttatttgttcagttagctagttagttttaataaactttttaaactttaatgaactctcactaatctaccaccaaaaacaccagctaggagctgggcgcagtggcttacacctgtaattccagcactttgggaggctgaggcgagcagattgcttcaggtcagaagttcgagaccagcctggccaacatgttgaaaccttgtctctactaaaaatacaaaaattagccaggcatggtggtggacgcctgtaatcccagctactcaggaggctgaggcagaagaattgtttgaacccaggaggcggaggttgcagtgagccaagattgcgccactgcaccctagcctgggagacagagtgagactcagtctcaaacaaacaaacaaaaaaacaccagctaggaacttgagtacttacatgtaacatatgcttccttatgccattaccttagttttcctgactcaagatcaccatcatcctgtctcctatgttcatcacttccttgcttccctttttaaatcatatttattgcatctgtatttattcctaaaagatagtatatttgaggtgtaggtatgctttaacttaaagaagggaggaaagggtgttgtgccatataaaatctttggagccaggcatggtggctcttgcctgtaatcccagcactttgggaggccgaggtgggtggatcacctgaggccaggagttcaagaccagcctgaccaacatggtgaaaccccatctctactaaaaacacaaaaaattagctgggcatggtggcaggtacctgtaatcccagctactccggaggctgaggcaggagaatcgcttgaacccaggaggtggaggttgcagtgagctgagatcgcgccattgcactccagcctgggcaacaagaacaaaactgtctcaaaaaaaaaaaaaaaaatctttaggacttactttcttcagttaataatacattcattcatttcatattgacaggtatcactacagctcattcattttggttactgtagtatattctattgaatatatatcctgtgctttatttcaatgctgtcccatggatgggaatttgggttttttacagaggcctccttctgccacacaatctaatcccatcagcctcctgccaataaccatgcatcatcatcacctcatggcccacaggatagggtcaaaattccacaatttggcttacaatattgtggaaatgatcaggattcattttgtttctccctccgtccttggtcttagtcatgaggcatttcttttggtctttgtacaaacaatgttcttttcttccttaggtcatctacctgacactttccctacctcctttctcccatgcsttctctttcctctatgaagctctgtatgagcactcaacaccctccagcacttagccaagaagtatgctgtgggaggggcacgggattcatagagttctactagacttagtcagtggtctaccagtggaggcccagggctgtctgggaggtgttgtagaaggaggagtggggatcaaatgggagatgctttatctcccttcctctgcctcattgaaatagtggcatcactattcctgattttatggattgaggttcaagaaagattgcatttggaaaaagtgttccataaagataagtttgcaaaccagtgaatcaataattcatatggtcccctcaagccctgccattctataattaaaagtgagagaaccgaagagaaaaaaagaagcaataatttcatggctaagcatataaactctggagcagaccaactttgagtaaatcacttaatatctttgaggtttcctcagctgtaaaaggggtacgatattaaaatgaaccatatgaaattgccattttataagtaaaaaatggccaaatgtcagcaatttcatatgaatcgaaccaatatatgtaagtaaatcacagatctggagggcagagtaaatgagataatgcaagtattgtactgaggtagatactgctaggttttcaccaaacccatgtcttctcctaggcacacagctaaaatccatttccctgtcttcatttcagacaggtat

SEQ ID NO: 34157 - DNA, 719 bp, Homo sapiens
ctggctcctcaacttccactccacaatgcaagtgtcattttctaaactgactgtagcacaacttgatgtgaaaaaaggccaaggttttctggtagataaaactgggcctgtactacatagctgttaatgaagcacatcatacgtctgtcattgggrttcacacttgtaagcagataaatgtactccaggacattatgctaagtgatattattcaaatgtcatttccttaaaatttactctcaagtgtctcctttgaatattcatagcacttcatttgtaacaatatcagaaattctaccctcttcctttgaataaagggattaccaacctgaaggacattacccagaatgaaaaatacggcatgatttcacttatgtgcagaatctttaaaaatcaaatttactgaaacagagagtagaaaggtggttgccaggggtgggcgggaggcagagataaggatatgttggtcaaaatgtgcaaagtttcagttatgtaggatgaataagttctagagatctaatgtacagcatggtgactatagttaataatactgcattatattgaaaatttgctaagagagtagatcttgagttctcatcacacacaagcacaaaaatgaatatattaacttgattgtagtaatcatatcacaattgtatatgtatatgaaaacatcatgttgcatatatatacaatttttattaaagagtaaaaattaa

SEQ ID NO: 34158 - DNA, 1313 bp, Homo sapiens
cagaatgaaacctatcccaggctccaagtaatcatccccaagggaattaaatagtccctaattaagaacaacactagtaaatcctagcctgaaccacgaaacaaccatactcaaggaatctacacccctcaatgaagaaaggctgttaatctatgctgacaccttcagcttgattttattttattggaaaaatgttatatgggttattatctcctggtttacataatcctacagttcctcgatgcaatatgaagtgagattcagagaagtttgaatttacaatcctatgcagctggtggagctgggactcaaattcaagaccacagaacaccgcactagtagatacatacttggaaaattcgagtttggtggggagttcctgggatgtgatccatcaaattgtctgaagtgaggtgtttgggaatttgtactacaagtgaatctaaactttaactaatttgacttaaaggttctgtgacctctcttaagtgggagactcccttgctctggtgtactttccctccatctttgtccgttgctaataatttagccagcgacaaggtatgcttaaagatcaactttttttcccgctacaaacatgacttcagtccaagtatttaagcacctgaactcaagtgaggataataaatgtcagaggaatatttatagcttggtatgtggagactttccaggtccctgttctgcaataacacagatccatctgctaagagcattagaattgtgtrttgttacttcttttttttcactcaagttgatagattctgaaaatagaaaattacaatatacaaatattttaacctttttttactcaaataattattaaattaggagttaattaccaagggcaaagtttctccgcaattccttgctattggaagcaagcccagaagaaaccttagctcagtcttatataagccccctgtcatcattatgctgacagatctacctgaggatttattgtaggattgtcagaccttgggggtctgaggttagtcgactccccaagtctgtcgttggggttatgattgtttttattgctgtaccataaacatagttaccactgatactattgtcagctaatgtattcttgttcaaagatctgaggaagagaacctttacacacaaagacagtttatatgtatttgtaccaggaggttatttaacccttctcctatgataagcaagggcaagaaggacctctctggttctgttccatctttgtatcctgacctaaagaattttcatagagctgactgatggtcagttagctattaaatagaaaattttatgca

SEQ ID NO: 34159 - DNA, 859 bp, Homo sapiens
ccagaatagaactgacagtatacaagagaattcacaatgtctaggatgatctctgaacatatatacaaagatgaaatgccatggaggggagaaaagttagaaggtcttaagaaagggttggccaatgccaatggtataggagaaaaagatggaaggaatggggaagcataattgggaggggagcagggagaaattcatgatgatattacatcctgtgttaatagaattgcttctagaggcaactgtgccagaagttactgcccccagaatttgcagatatcttatagaagggagaatgagaaccccaggggtcagttccccattttgccactggccagctgcatgatcttagaaatattaaatattctgcatttgttttcccagatatgtaaaaacagaaattgccacattacctactcgtcctacagaaatctctgaactagaattctttgaaagtccatgmgacttgtaacttatatgatacaatttcacagttaaaatttttgtcatccccattctaagactctatccaaggtgtaaacctcataagcactaaggccacacctcagcatcttggttctgcttcttaccttgcaggcaggctcaaaactgccacagaaccagagagaatgtcattagttttcttacttttatggttattatcgacccttaactacaggtctccctcttggtggcttccctcctccatggctcctcatgtcatgggctacatttttgttgtcagattacctccaaacacacggtcccccagcaaacattaagtctaataaaaacattaaccaaaaggtattaaaagttcagcctgcatttttacgtttcctctggagtcttattcttg

SEQ ID NO: 34160 - DNA, 562 bp, Homo sapiens
aaaactttttcagcatctattttactgactttcaaaatttgttttggacaacttcataaaaaacactctttataaaaccctcaacaaagctgggatggatttgtttggccacattaatatataaagtagcagctttatcgactgctagcaggaaacatgcctcaattatcaattctcatctataaactactatgataagattttcagaaatcagccatgccatttaaaacctagttttgacattatttttttttttttacaatgagttgaatgtattacactgcagtatgctttagcaatcatcccaattaagtaggtgtgccctttatctgagygttaagtggatttcttaatgttcgagaattgtgctaagtgcttgtttgttatagcataaaacaaatgctaatttatgataaattagtacttgaggaattttacatttctgctgctgttcaccttagcacatagcaaccaggatacaatccagtttaaaaataaaataatatggtttggatttaactgtgaaaattaaattcaggaaatttcaaataactattgaatg

SEQ ID NO: 34161 - DNA, 616 bp, Homo sapiens
ttagtatagcatttatctcggcctctgagatcacattttaaagtgttaaaattgaatcttctctttgggatgttgcggtgagaattgttttttaagggaaaaaaatggagraaaaatgggcaaaggaaattaacaagtaaaatctaaatagcttgaccaaaataaaattcgtttgaaaagaataaaaattaatgctttcaacctagtacaataactgagaactagataaatctatggactaagaggtccttgtagatactgcatgtgctaggatgaataaaagagattggaattagcaaatagattatgtgtcagtaaatatatgcttttaaattacttgaaggcacacaaaacagtttgtttaaaataacttgaagatcttagacattccctctcaaatgttatttacccactgcctcgctttgtttcagaaagctgtattccattcttttgctagaatgtaaaagtacacccatcatctttgtccctggtcctttaaggttaagtagaacactgacaaataatattcctctaatggagtctaaattaggagtaacaccttctcttataatgataaaatgagcactgagacctcaagattttaaaaagccatcat

SEQ ID NO: 34162 - DNA, 515 bp, Homo sapiens
gaaattattcgcttaaacttccaccagttatctcctggtggtagatttgcaagcgaattttttattctccctaagataggaaatagaaggcatggtgaacatacattttgtyaatcaggaaaaaaacaaaacatttaaaatgaaacaaaacttctgcttctagagaaagctctgataaagagccattgtgaagagaatgacctacctggtcattctgtgtgtgacacagaactaaacaggctctctgccacaaggcctggaatcttcggtcttggctgactggtagctgtgattacagatttaataaacaaagatgcttcttaggctttccttctgttttgaataaagtctttagcgctacaggtgccagtataatgtaaataccccaggagtgaaaacaatgtcccataatcaacgggagacagcaaatgttatatggacctaccactacctataactacgcttttattttttttaaatttgtttaattgttatttttaaataacatggtaggt

SEQ ID NO: 34163 - DNA, 728 bp, Homo sapiens
actgcctaaatccacccagaagcatattcaccagagtctcaaatagtagctcatcatggtcacagtcttcagtgtgttagagctgctcataccttcaggatactgcagaggtcttacttctagtcactcatgtttgcctttggatcatcaccaagaataaaacaatgtcaaatatgttaagcagataggacatcatagcacccacaaaatctcagtttagaaatgatagaaggatgcattttcttaaaaaaaaataaaatcacaataggggtaacctaaaataattggatggtcaaagccagtcttcactgtcacaatgtcaaatacatttagggacaaacaggtaacrttaatgtagtgtgatttaggacacctgagtgtcaggaacacgtactcaaacctgagagtccctgttctgtctgaacacactcagatttttctaaaatacatgtctggctaaataaaacttgtctgtgagctggtcctattcccaggccaccagttcgtgctcccaataagtttttttcaatattttcattggattacagtagacttcattgttggggtaagacatgatctcaggcttccattataattaaggggaagacaagatgggtcagtataggtgacttttagaacctgaaatgcctcactgggctcaaggattataatctgggatggttatcgtcgagcttggcgtgaagtgtggtggccacgagaatgatcca

SEQ ID NO: 34164 - DNA, 574 bp, Homo sapiens
aaattttttttgagacagggtctcactctgtcactcaagctggagtgcagtggtacaattgtggctcactgtagcctcaacctcccaggctcaagcgatcctcccaccaccagcttcccgagtagctgagactgcaggtatacatcatcatgcccagctaatgtttttatttttttgtaaggatgrggtcttgctatgttgcacaggctggtctcaaactcccaggctcaagccgccttgtcctccgtaagtgccaggattgcaggcatgagccactgcactcagcctgacaattttctaaaaaacataaaatatgagttggcagttcttttcctacaaacattaaagagaagactccatacagaaaataaaaattctaatacaggaaaagcaaaacaaaacaaaaatgtagtcctcaggtttcctcatactctgcttgaaaagagtagagcctgaacagttaaagccaaaaatataccaacacagagacaagctcaactctcctctctggggttaatttggcttttaaatatgcttttgaagtggggggctcagcttgagcctacaaaggatt

SEQ ID NO: 34165 - DNA, 574 bp, Homo sapiens
aaattttttttgagacagggtctcactctgtcactcaagctggagtgcagtggtacaattgtggctcactgtagcctcaacctcccaggctcaagcgatcctcccaccaccagcttcccgagtagctgagactgcaggtatacatcatcatgcccagctaatgtttttatttttttgtaaggatgaggtcttgctatgttgcacaggctggtctcaaactcccaggctcaagccgccttgtcctccgtaagtgccaggaytgcaggcatgagccactgcactcagcctgacaattttctaaaaaacataaaatatgagttggcagttcttttcctacaaacattaaagagaagactccatacagaaaataaaaattctaatacaggaaaagcaaaacaaaacaaaaatgtagtcctcaggtttcctcatactctgcttgaaaagagtagagcctgaacagttaaagccaaaaatataccaacacagagacaagctcaactctcctctctggggttaatttggcttttaaatatgcttttgaagtggggggctcagcttgagcctacaaaggatt

SEQ ID NO: 34166 - DNA, 574 bp, Homo sapiens
aaattttttttgagacagggtctcactctgtcactcaagctggagtgcagtggtacaattgtggctcactgtagcctcaacctcccaggctcaagcgatcctcccaccaccagcttcccgagtagctgagactgcaggtatacatcatcatgcccagctaatgtttttatttttttgtaaggatgaggtcttgctatgttgcacaggctggtctcaaactcccaggctcaagccgccttgtcctccgtaagtgccaggattgcaggcatragccactgcactcagcctgacaattttctaaaaaacataaaatatgagttggcagttcttttcctacaaacattaaagagaagactccatacagaaaataaaaattctaatacaggaaaagcaaaacaaaacaaaaatgtagtcctcaggtttcctcatactctgcttgaaaagagtagagcctgaacagttaaagccaaaaatataccaacacagagacaagctcaactctcctctctggggttaatttggcttttaaatatgcttttgaagtggggggctcagcttgagcctacaaaggatt

SEQ ID NO: 34167 - DNA, 519 bp, Homo sapiens
gctcctctataaaccagagaaaatgttctctgcacctgttaacaggtcatacgttggccaacttggtggggaaacctagctcccgtcggctagaattagactaggttgtaaagagaagtaggtcacacgtaggtcagcttaatttagagcagctcacatcactaacttcttcccccatagcaaaaaggactaacacccaaaaaggggttcaatytctctttctggtaaaagcaggaactgaaaccaggaagtgaacacattcaagaaacaactggaaaaaaacccagtggggctggagtttttgtgaatttgcttggaatttcctctaacctccctaggtatagatgaagtgcccaccattggcagggtgcttcacggggtgttccctaatccctgcatgaggctgggaatgtggatcttcatgcttcacctcagagaaatgagaggactgggcaaaatcgttattctcagactctccatgtcagttaccagtaatatattcaaaagacattttgagtg

SEQ ID NO: 34168 - DNA, 519 bp, Homo sapiens
gctcctctataaaccagagaaaatgttctctgcacctgttaacaggtcatacgttggccaacttggtggggaaacctagctcccgtcggctagaattagactaggttgtaaagagaagtaggtcacacgtaggtcagcttaatttagagcagctcacatcactaacttcttcccccatagcaaaaaggactaacacccaaaaaggggttcaatctctctttctggtaaaagcaggaactgaaaccaggaagtgaacacattcaagaaacaactggaaaaaaacccagtggggctggagtttttgtgaatttgcttggaatttcctctaacctccctaggtatagatgaagtgcccaccattggcagggtgcttcacggggtgttccctaatccctgcatgaggctgggaatgtggatcttcatgcttcacctcagagaaatgagaggactgggcaaaatcgttattctcagactctccatgtcagttaccagtaatatattcaaaagacattttsagtg

SEQ ID NO: 34169 - DNA, 680 bp, Homo sapiens
acatgacttttacagaaatgtgacaagagcaacaaaaagaaagaaagaggcaactttgaaatctcaatgctcttggattcattcttatcacatacttgtgtcctggcacccccagaaagaccttggggcagaacaggcagactctctgaggctgggtcactatgcaacgtttctaacactcaaaagccaccgcttcgcctttttccttttccacaccattgcccctcaggtcagtaggtaaatgccctctgcggtaggtaatatactaacaacataaaccagcagtccacagaccctgactactcacccatgcctgtcactggaagaagggggtgggagcacaaggtaaatacaattttccctctttagccacaaaggatttaattcccccaagccctcttgataggaaaattcacaattatamgacttggaacactaaggttcaaacaagtttagatttgacaaaattcactgaattgtaccttaggatttgtgcatttcctcatatgtaaattctaccttaaaaacaacaataaaaaaaaaaacacctgactacactctcaccaggctggttacaattttaaaaagactgactataccaagtgtcagtgaggatgtggatcaactgggatgttcattagtggttggtgcataaacttgtgcaaacacttggaaagcca

SEQ ID NO: 34170 - DNA, 1208 bp, Homo sapiens
aacaacagattaaagaacacacaaaccttttgccagtttcaagaacacctagagaaggaaattttcagcatccactacatctcaaatcagtatgtttctgtatgttctatccacagttagactgttaaatagcttagaagtgttttatgttgcttcttacatatgcttcacctttcctagcatcttctctcacagctgtgataccctaggaggctcaggaggcatgggataagagcttgtgtctctcaggctttcatcagcaccctcaatgtgacccattctctctacagcaagagaagaaaggttgttcctcttcagatgagaactgaatttgcttgtctctgcagctcctcaggatttagaagaatgaatgttcagtggcaatcagcagcccatatagacccactagaaacttagatatttctatatggtcaattgaaatagcagcaaagtgagagatgttttctatctatatgttttggcggaaaaaaatgaagaaaagagaagtggatgggcaagaactaggaaaatggggatcctgaagtatgcacaaggtacagaaagtcaattttgtctctctccacctaatcagtcgtttcacatcttgaatagatagttcccaaaatgttaatcatcacattagcttccctctaaatcctggctactaccatcctatcttttttaatcctgaaaaatataaaagcattaatattccagagaaaaartattaataattgcttatatagtttaattcaggttaagcttgttttctatgaggaatcacaaaagttctactgcgaggatccaagcacacacacaaaaaaactctaagagacaagagttaaaatctctcatttcagctgagttgtaatttaaaaaaaaaaaagaaaaagaaggagaagaagaaaagaaagttttacaaagattatttaagtttcacggaaggcatattggcatcaggtatgtctggttttcatctaacttgaaaaagccttcgatttcaaaaatgaaactatgcaaatgattagttagtcattttgtgtaaatgctttaggatttagatgttactgtggaaaataaagtaaaacaaaacagctttagtacagccccagtaagcttagtccatggacagcacattaaatcctgaattaaacactccaccaaactcttcctaatgagccatccaagtctctgatgtatataatata

SEQ ID NO: 34171 - DNA, 548 bp, Homo sapiens
tgttcagtaaatgaaaattatagatgctaaaacttaaactaaatttggcataaagtcagagaaaggtaaaatgtcaccatctgacatttggaatcagaatctaaaaacttcagttatgttaaaactgattttatatcattttagctgggttgtcacaagattctttgggtaacctttaaaacagttctcaaagagccttttgtaagcacctgaattaataatgataagacatgggatggcccacataaaactaataacattgattgcttcaagagaggaagaytgagccaagcacggtggctcacgcctataatctaaacactttggaaggctgaggccggcggatcatttaagatcaggagtttaagactagcctgagcaatatggcaaaaccctatctttacaaaaaaaaaatacaaaaaaaaatttagacaggtgtggtggtaggcacctgtagtcctgctacttgggagcctgaggcaggaggattgcttgagcctggaagggtgaggccgaagtgagccatgatcgtgccactgcactccagc

SEQ ID NO: 34172 - DNA, 632 bp, Homo sapiens
tttccgytgcaatgtaatgtaaggttaagagcatggaatgcaagaggtgccagtttcaactctagctctactgtttctagctctgtgtcctcgagcacattatgtcccgtactcttgcctcagttataccatctgtgtgtaataatgataatactacctcctttatagggttggttaactaatggtctgttttataaaggtctaaaaacattgtatacgttgaagggcttttaaaaatgctgtacttttagccaggtaaaaattcggttaagaattcaaactagcaaaagatgattctactttggcccaaaggcagtggtttcctgggtttgtgtcatcttgctttgcagcgtgtagacaattcttcaggagttgcagagagaaaaataacatgccagattttggggtcacagtgccatctgctgaagaaaggagtgttgctcgaacaatgagtccacatgatcacaatttgcgtaagtactaggcctagccaaaaaacaaaacaaaacaaaacaaaaagaatgcaataagttatggactcttgtacattgtagtggagtgaattcctcaacagcttacgctgtattatatattactgtattaatctctaaatacattatcacttatttatt

SEQ ID NO: 34173 - DNA, 632 bp, Homo sapiens
tttccgttgcaatgtaatgtaaggttaagagcatggaatgcaagaggtgccagtttcaactctagctctactgtttctagctctgtgtcctcgagcacattatgtcccrtactcttgcctcagttataccatctgtgtgtaataatgataatactacctcctttatagggttggttaactaatggtctgttttataaaggtctaaaaacattgtatacgttgaagggcttttaaaaatgctgtacttttagccaggtaaaaattcggttaagaattcaaactagcaaaagatgattctactttggcccaaaggcagtggtttcctgggtttgtgtcatcttgctttgcagcgtgtagacaattcttcaggagttgcagagagaaaaataacatgccagattttggggtcacagtgccatctgctgaagaaaggagtgttgctcgaacaatgagtccacatgatcacaatttgcgtaagtactaggcctagccaaaaaacaaaacaaaacaaaacaaaaagaatgcaataagttatggactcttgtacattgtagtggagtgaattcctcaacagcttacgctgtattatatattactgtattaatctctaaatacattatcacttatttatt

SEQ ID NO: 34174 - DNA, 1205 bp, Homo sapiens
ggatccaaatgcaggactgtccttggccataccgccttctggatgtccctacagtggctctgcccagtcaagagcccctgttgcccggggagacccctcttcacatcctcatgacaatgacaatcccacgagttaaacatttcacatggattcttgcctttagtttttcccaacarcctgcaggggaggggcaatcatcacacccattttacagacgaagaaactgaggcacccagtggttgcttagctgggggcccagcagagcctgtgccttggtttgctaacctgtagaatggggtcataacacagccttgcagggtgcttgaggactgtgcaaggctgtggaagccaggggctctcggaaacacccctgagggctgtcctcagacaaggccggaggcccgattgtgtttttctcgactcgccagcatccagtcagggcctggcctgctgaaggaagggccccatgtctccttgaacatttcctcagcccggggatgccgagaaaacgatgagtcatccacccaagcagaggcctcccaggagcttgtgtcgggtcccagccgggaggggagggctccaagctggagagggggcccgggtaacacgatgactcccgcgctggccccgaggcctaagtcacggggtcccctccacggcctcccaccgccacaggctgccagcctaccggacacccttggatgctgtgccccagatcctgcccctgcgccttcaccccagatctgcaccccggtttcctaaaccactcttcccacccacgaatcccagggttgcctgcgaccctctagcctccctcaccccactcccacctcacctagccccagccactcaaccgctggtccgtcgaggaaacccgtcacgcctttctcccctcacctcactatgcctctgcctggttttccttctccatcgccctcttgcctctcaccacagaatctgagcgttccttctaaaaccccaacgtgaccttagctccctccacgtgagaaccctcctgtgagctccctgctgtgcctgatgcgatgggctcttcagatctctctcctccatctggccccaaccaatcttgccagctcaccccttcaggaccccactgtggttctcaagctgacttggccatttactcatctccactccatctagaatgttcttccaaacatgcttctctaagaaaattggccctg

SEQ ID NO: 34175 - DNA, 1205 bp, Homo sapiens
ggatccaaatgcaggactgtccttggccataccgccttctggatgtccctacagtggctctgcccagtcaagagcccctgttgcccggggagacccctcttcacatcctcatgacaatgacaatcccacgagttaaacatttcacatggattcttgcctttagtttttcccaacaacctgcaggggaggggcaatcatcacacccattttacagacgaagaaactgaggcacccagtggttgcttagctgggggcccagcagagcctgtgccttggtttgctaacctgtagaatggggtcataacacagccttgcagggtgcttgaggactgtgcaaggctgtggaagccaggggctctcggaaacacccctgagggctgtcctcagacaaggccggaggcccgattgtgtttttctcgactcgccagcatccagtcagggcctggcctgctgaaggaagggccccatgtctccttgaacatttcctcagcccggggatgccgagaaaacgatgagtcatccacccaagcagaggcctcccaggagcttgtgtcgggtcccagccgggaggggagggctccaagctggagagggggcccgggtaacacgatgactcccgcgctggccccgaggcctaagtcacggggtcccctccacggcctcccaccgccacaggctgccagcctaccggacacccttggatgctgtgccccagatcctgcccctgcgccttcaccccagatctgcaccccggtttcctaaaccactcttcccacccacgaatcccagggttgcctgcgaccctctagcctccctcaccccactcccacctcacctagccccagccactcaaccgctggtccgtcgaggaaacccgtcacgcctttctcccctcacctcactatgcctctgcctggttttccttctccatcgccctcttgcctctcaccacagaatctgagcgttccttctaaaaccccaacgtgaccttagctccctccacgtgagaaccctcctgtgagctccctgctgtgcctgatgcgatgggctcttcagatctctctcctccatctggccccaaccaatcttgccagctcaycccttcaggaccccactgtggttctcaagctgacttggccatttactcatctccactccatctagaatgttcttccaaacatgcttctctaagaaaattggccctg

SEQ ID NO: 34176 - DNA, 1205 bp, Homo sapiens
ggatccaaatgcaggactgtccttggccataccgccttctggatgtccctacagtggctctgcccagtcaagagcccctgttgcccggggagacccctcttcacatcctcatgacaatgacaatcccacgagttaaacatttcacatggattcttgcctttagtttttcccaacaacctgcaggggaggggcaatcatcacacccattttacagacgaagaaactgaggcacccagtggttgcttagctgggggcccagcagagcctgtgccttggtttgctaacctgtagaatggggtcataacacagccttgcagggtgcttgaggactgtgcaaggctgtggaagccaggggctctcggaaacacccctgagggctgtcctcagacaaggccggaggcccgattgtgtttttctcgactcgccagcatccagtcagggcctggcctgctgaaggaagggccccatgtctccttgaacatttcctcagcccggggatgccgagaaaacgatgagtcatccacccaagcagaggcctcccaggagcttgtgtcgggtcccagccgggaggggagggctccaagctggagagggggcccgggtaacacgatgactcccgcgctggccccgaggcctaagtcacggggtcccctccacggcctcccaccgccacaggctgccagcctaccggacacccttggatgctgtgccccagatcctgcccctgcgccttcaccccagatctgcaccccggtttcctaaaccactcttcccacccacgaatcccagggttgcctgcgaccctctagcctccctcaccccactcccacctcacctagccccagccactcaaccgctggtccgtcgaggaaacccgtcacgcctttctcccctcacctcactatgcctctgcctggttttccttctccatcgccctcttgcctctcaccacagaatctgagcgttccttctaaaaccccaacgtgaccttagctccctccacgtgagaaccctcctgtgagctccctgctgtgcctgatgcgatgggctcttcagatctctctcctccatctggccccaaccaatcttgccagctcaccccytcaggaccccactgtggttctcaagctgacttggccatttactcatctccactccatctagaatgttcttccaaacatgcttctctaagaaaattggccctg

SEQ ID NO: 34177 - DNA, 794 bp, Homo sapiens
ggatcccttgaacctgggaggcagaggttgcagtgagccgagattgtgtcactgcactccagcctgggtgacagagcaatactctgtaaaaaaaaaaaaaaaaaaaaaaaaaaaaaaaaaaaaaaaaaaaaaaaaagattaaaaaaagaaaaamctatacttctttaatattttttaaaactgacttttcaaaaagatttaaaattcttatttaagaacagacaaaactaatctacggtgacagaaatcagaacagtaattgcctctgggtagggaatttgaccagaaatggggagaaaggaactttctgaggtggtaaaaatattctacatctcgatttttgtgttggttactcaattgcacacattttacaaaacttgttgacctatatacttaagatttatatgtttgactccgtattaattatatctcaaccaaatacataatttgtcttttcactgggaaattcatatgtgttcataattcttactcattcaaagatttttgtgaaggtaaaagggaagaaatatattcactgttttatttcagctcaaaaagctttaggtatcaaggataagaatgccccggagaaacaggagcacagcaaatggagaaggtcttaaggtctgcagagcctctgcctcggctgtcctctgtcccaggaaccactagttagttccatagtcttcttgatgcaactcttccctctatttgcactttcgcagccctgtcgtggagttaaactgcccccatttcatctgatgtaaccaaataggactgttatataaggaagt

SEQ ID NO: 34178 - DNA, 628 bp, Homo sapiens
cacacaacggttgaatacaaaacacagtctgtgccatattggtgcttgtaatcaatttagtaattcaasacttactcatatcaaataattatcagtaatataatcagattcttaaatctttttgaacacacactttaaaatataaaatttggtccaggcacagagtttcttgcctgtaattctagcaacttgggaggccaaggtgggagggtgacttgaagccaagagttcaaggccaacctgggaaacctaatgagactccatctctaccaaaacgttaaaaaattaaccaggcatggtagcacatgcctgtaatcccagctactcgggaggctgaggtaggaggatcatttgagccaaggaggtcaaagttgtagtgagctatgatcgttctgctgtatgccagcctgggtgacagaacaagaccatgtctcaaaggaaaacaaaatggtatatatatatatatatgggctttactccattataaaagtaatacatttccaattatagagattttggataatatgcaaaagcaaggaaaaaaaagaaaagaaaaaccatacacacccctgccaccgaaatataaccaagtaaacatcctggtacactcctctgcagtctctttact

SEQ ID NO: 34179 - DNA, 532 bp, Homo sapiens
agtctccaaaataaataaataagtaagtaagtaaataaataaataaatagtgatgcctggatttaatgtatctgagagaaagaggtttaaagaggttgggttgctcaggcgtggtggctcacacatgtaatcccagcacgttgacaggtttaggtggaaggattgcttgagcccaagagttggagaccagcctgggcaacatagctagacctacttcatcactrcaactaatgtaaaaaattagcccggtgtggtggcaagtgcctgtggtcccagctaggtgggaggctgaggtgggaggatcacttgagcccagggaggtcaaggctgggtgacagagtgagaccctgtctcaaaaaaaaaaaaaaaagaaaaaagaggttgggtcataggagaagcccataagatgaatgcggttgacactgaggtcaccttttccaggccttacaagtgatttgagcctttaccatttttattcttgttatattttcccatgaaatgagaaactcagtcttatgtttcatatgtagaa

SEQ ID NO: 34180 - DNA, 623 bp, Homo sapiens
ttttcatcattactagaatataacaaccttggccaggtgtggtggcacacacttctaatcgtagcactttgggaggccaaggcaggaggattgctttagcccaggagttcaaaacccacctgggcaacacagtgagacccagtctctagtttaaaaaaaagaaaagaaacaacttcatttgtctccaaattttgcattggtcgtatttgcctttctcaatattttccgaatgtcaagtatagatttcttaatagagtgtcctagtcagttctagctgctataacaaaataccatagactggtggcttatcaacaacagaaattaatttctyacagttctggatggtgaaagtccaagatcagggtgccaacacagtccggtcctggtgagggccctcttccagactacatgctgccaactgctcgttgtatctcacatggtggaaatagggtgagagatttctctgaacagctgggactacaggcatgcaccatcacgcctggcaaatattattttttattttttgtggaagtgggatctggtctctctgtgttgctcaggctggtcttaaaactcctgggctcaagcgatccttctgccttggcctctcaaagtgctgggat

SEQ ID NO: 34181 - DNA, 881 bp, Homo sapiens
taattacatataaccacagaataaagtggaagtgtcccaagcaatccaggacttatggtctctgccagtgggcctacctaccattttaaaacttctaaagttaacttatacacttataaagcatatacttataatttatcacttatataaagttaacttacttatataacatatactkaaactgtaagtcacaatttcttttttgcattatttcttcttttcttctttctgcccccatatgatccgcagaaaattttgcatggttttaaactaaaaatagcaatgttaattttactcaagttcagttttcagcagtgttttcttgcatttaaacatttcagcaacctattcaaatgtcttcaaaacttgacagtgaagtcttgtactcacagcaaactccattcagtcatagcctcattacctaaaatagataataccaaattacttcataaaatctgtttctataaaacaagccaagaactgccagcacctttggcagaaggctattagaattttttggttattttaggcactgtaactcctacaaggcttactgcattttggggggtcgtggttggactccagatgaaccatttatcttcagtgtatatcacctgcatctacatgatgcactgtacaaaagtctcactaccttggaagggttaactgctcatctgtttcacccaacttaaaagcggcaactgaaaagctctctttgaattaaaaactctaaatatgggaaatcgaaacaacactccaagggaactgtgatttatccacactttctttctgtctctctctccctccttccccatctctctctctctttcatacttatatatgcattgtttacagaagcatcattaaaaatctggtcttgg

SEQ ID NO: 34182 - DNA, 881 bp, Homo sapiens
taattacatataaccacagaataaagtggaagtgtcccaagcaatccaggacttatggtctctgccagtgggcctacctaccattttaaaacttctaaagttaacttatacacttataaagcatatacttataatttatcacttatataaagttaacttacttatataacatatactgaaactgtaagtcacaatttcttttttgcattatttcttcttttcttctttctgcccccatatgatccgcagaaaattttgcatggttttaaactaaaaatagcaatgttaattttactcaagttcagttttcagcagtgttttcttgcatttaaacatttcagcaacctattcaaatgtcttcaaaacttgacagtgaagtcttgtactcacagcaaactccattcagtcatagcctcattacctaaaatagataataccaaattacttcataaaatctgtttctataaaacaagccaagaactgccagcacctttggcagaaggctattagaattttttggttattttaggcactgtaactcctacaaggcttactgcattttggggggtcgtggttggactccagatgaaccatttatcttcagtgtatatcacctrcatctacatgatgcactgtacaaaagtctcactaccttggaagggttaactgctcatctgtttcacccaacttaaaagcggcaactgaaaagctctctttgaattaaaaactctaaatatgggaaatcgaaacaacactccaagggaactgtgatttatccacactttctttctgtctctctctccctccttccccatctctctctctctttcatacttatatatgcattgtttacagaagcatcattaaaaatctggtcttgg

SEQ ID NO: 34183 - DNA, 576 bp, Homo sapiens
ccaagcatctgtctccctcctcaaacgatatcagctgcactgatgcccagctgcctgtcaagcttcctgataggagtcccagggcacagactgttcttgcccttttctcccattggggttggatttaaagatcacataggtggctgctcagaggagctgaggagaagctccatcctccccatgcaccttcaccaggtggcctaaagagcttccctgaaccccacactcagtagcaagatgaggcttcattcttggaatgcatctccacacacaaggtgagggcaacttgcaagaacccagaggttggaaagaatggtcttgactgcaaacatcgccccagcttcaagtgcaggaagacctttgatgacatgaagatgggctgcgttcaaggcacctgtcatatctgcaggtagcctcgacatttcccttcaacctgaaacttcctggccaccaggccaccaggccctggccayactagctggtcagcactgtgtacgcaccagcgagatctttgtttcttgagacatttccttccactcaaggaagcgccatagagacaggctgtcagctgggtac

SEQ ID NO: 34184 - DNA, 556 bp, Homo sapiens
ttctattcagagggcattagccagacccagagcagccgagggacacactactccagccaggactccctgggaacacaacggacaggacggggagcagtgtctgagtccattctggctgccggaccatagactgggtggcttctaaagaacagaaattcatttctcacagctctggtggccaggaagtccaacgtcagggtagagtcagtgtctggtgacagccctatcctcacagacagtgccttctcactgcgtcctcacaccgcggaggaaaaacaatctcccttggccttttataagggyacttagatctaatcacatcccagaggccccacctcttataccagcaccttggggtgaagtttccacataggaatttgggggagacacaaacattcagaagatagcgaacagccaccagccaactcctcctcctggaagtcttccaggataccacatcttttgagcccccaaagtttctgcgtcttgacttcccctttacttcacctccaggccaggctctcgggacatgtttttatctatagcagcagccctg

SEQ ID NO: 34185 - DNA, 562 bp, Homo sapiens
ggaagcccaggaaacaaggggccttgagaaggaggccaaggccagcagagccaggagctggtggtcagagcccaaggaaggggaacccagagcagcctctgttaaaccacacaaaggtcatgggggaactcagccagagctgatcgcgcagcctggttggagtggaaatcaggtgaacggtgcctgctgtcggcagcccttctcactctccmacactggagtctttcctcagccagggaaatgttattctatctttctttgattatttcccctcttcctcccattcttggttcttttttttgagacggtgtctggttctgtcacccaggctggggtacagtggagccatcatagctcactgcagcctcaaactcctggcctcaagcgatcctcccgcctcagcctcccgaagggattaaaggcatgggctgccacacctagctaatttttttcttaatttttcttttatagagacagggtcttgttatgttaaccaagctggtcttttactcctggcctcaagtgattctctcacctcagcctcccaaagtgctgggattac

SEQ ID NO: 34186 - DNA, 562 bp, Homo sapiens
ggaagcccaggaaacaaggggccttgagaaggaggccaaggccagcagagccaggagctggtggtcagagcccaaggaaggggaacccagagcagcctctgttaaaccacacaaaggtcatgggggaactcagccagagctgatcgcgcagcctggttggagtggaaatcaggtgaacggtgcctgctgtcggcagcccttctcactctccaacactggagtctttcctcagccagggaaatgttattctatctttctttgattatttcccctcttcctcccattcttggttcttttttttgagacggtgtctggttctgtcacccaggctggggtacagtggagccatcatagctcactgcagcctcaaactcctggcctcaagcgatcctcccgcctcagcctcccgaagggattaaaggcaygggctgccacacctagctaatttttttcttaatttttcttttatagagacagggtcttgttatgttaaccaagctggtcttttactcctggcctcaagtgattctctcacctcagcctcccaaagtgctgggattac

SEQ ID NO: 34187 - DNA, 1098 bp, Homo sapiens
actaagtcaacagagctagatggctacatctccttgtggcccctgccaacttgagggtcgtctggtctcagaggctttgtgggccagcaatggtgatgggcctagggacactctcacccctgacgggactgcctctgtgcccgctcctgggggtggtctccaggtctgtgctgstaggagagggccatggaaggagagggcacccctgccagccttgcccatggctccctcctgccctctccagggtggtcaatgtgacgccagtgcctggggacctgctccgggagaacaccgaggatgtgctacagggagagcacctgagtgaccaggagaatgcacccccaattctgcccgggaggccctctgaggggctgggccccagtccccaccttgtcccccaccccgggggtcctgaggctgaagtctgggaggagacagatgtcaaccggaacaaactccggatcaacatcggcaaagtaactgccgccagggcgaagggcgtgggtggccttttctctcacccccgattcccagccttgtgcccctgccctgttcctcctaagcaccctgtccccggccatctgcctgcttgccctgcctctgtttcccggtccctccccgcactagcctcgctgtgtcttccatcatcatcatcctctgtctccttcaccctgaggagaccatccgcccacagccgcctcatcagccccagctcatggcactcccctctcctgcagagcccctgtgtggaggaggaacagagccgaggcatgggggtccccagctccccagtgcgtgcccccccagactcccccacaaccccagtccgttctctgcgctaccggagggtgaacagccctgagtcagaaaggctgtccacggcggacgggcgagtggagctacctgagaggaggtgggtctggggccaggggcatggttggggcccaaggccctctccgccttcacgtggctggtctggaggaaaagttagatgtgtggcggaggtgggcagaccctgggaagtgctgagagggttatacttgggcctggggtcagactcagttggggccagagacagggcctgggagaaccagtggg

SEQ ID NO: 34188 - DNA, 616 bp, Homo sapiens
ttagtttattaattatgcrgttcttgtttttagccatctgagaggattattggaccatctgtttgagctttttcctttactatcataaattcaggaaattatccttaaggtttgcacatttatctatttcatgaattctacacagattttttcctaagcgttcagtgacttttttaaaaaaacatgattaatatatggtataaagggcaacttctgaagagtataactgtgttaggcaagatgttttggtttttgtttattttaaggccttcactttttaaacaacaggaaatgcgccaactacagtttcctaaagcagtcagactacaaggtaattgttctttctggttaactttgccaggcaaaagtagacaatgagatcctggattacaaggatttagcagccattccgaaggtcaaggcaatttatgacattgaacgtccagatcttattacctatgagcctttctacacttcgggctatgatgacaaacaggagagacagagccttggagaggtaatacattcctactggttgtgagttgtacaacaatttaccttcccttttgtcacatttgtaataactaccatttggagttcaggtaaatcaggtggt

SEQ ID NO: 34189 - DNA, 941 bp, Homo sapiens
ttgtacctgatcagaagacagggagatgtggagggatgctggcaggtacatgttggctaatatttacagctgactctgataaacaactctaattaaaactggcaaagaggccaggcgcggtggctcacgcctgtaatcccaaaactttgggaggctaaggggggcggatcatgaggtcagaagatagagaccatcctgactaacgcagtgaaaccccatctctactaaaaatacaaaaaaagtagctgggggtggtggckgcgcctgtagtcccagctacttgggaggctgaggcaggagaatcgcttgaacctgggaggcggagattgcagtaaaccgagattgcgccactgcactccagcctgggcgacagagcgagactccatctcaaacaaacaaacaaacaaacaaaacggcaaagagttaacaaacattgtgactttaaattctcttttatttttctagtctccgaggactttgtctcctactccatcagcagaagtaagtaccatttctttttatcattttaatgggtggaatttgagaattgcttggcccttccctagactgggatttttgaaaaagaacataacatacaaaagaacagaaaaactgcatgtggggttatggtggctttggggattacctccgtgaaagaggagactctaagacacagcaatatatttctcttaaattggagaccagggagtaaaaatggcctcactttaatctgtgtctgtgcctgtaagtggaagcaaagtgtctgcaggaacataagtcacttgtcccaatgtggggctctttgtccgcatctataattaatttttctgaaccctaatatactgaaatggccaacagccatcatggcgtattctataagcagagccatcttgatgggaggttactctgtttagtctgaaatcaatcatctgatcctaaaa

SEQ ID NO: 34190 - DNA, 941 bp, Homo sapiens
ttgtacctgatcagaagacagggagatgtggagggatgctggcaggtacatgttggctaatatttacagctgactctgataaacaactctaattaaaactggcaaagaggccaggcgcggtggctcacgcctgtaatcccaaaactttgggaggctaaggggggcggatcatgaggtcagaagatagagaccatcctgactaacgcagtgaaaccccatctctactaaaaatacaaaaaaagtagctgggggtggtggcgrcgcctgtagtcccagctacttgggaggctgaggcaggagaatcgcttgaacctgggaggcggagattgcagtaaaccgagattgcgccactgcactccagcctgggcgacagagcgagactccatctcaaacaaacaaacaaacaaacaaaacggcaaagagttaacaaacattgtgactttaaattctcttttatttttctagtctccgaggactttgtctcctactccatcagcagaagtaagtaccatttctttttatcattttaatgggtggaatttgagaattgcttggcccttccctagactgggatttttgaaaaagaacataacatacaaaagaacagaaaaactgcatgtggggttatggtggctttggggattacctccgtgaaagaggagactctaagacacagcaatatatttctcttaaattggagaccagggagtaaaaatggcctcactttaatctgtgtctgtgcctgtaagtggaagcaaagtgtctgcaggaacataagtcacttgtcccaatgtggggctctttgtccgcatctataattaatttttctgaaccctaatatactgaaatggccaacagccatcatggcgtattctataagcagagccatcttgatgggaggttactctgtttagtctgaaatcaatcatctgatcctaaaa

SEQ ID NO: 34191 - DNA, 941 bp, Homo sapiens
ttgtacctgatcagaagacagggagatgtggagggatgctggcaggtacatgttggctaatatttacagctgactctgataaacaactctaattaaaactggcaaagaggccaggcgcggtggctcacgcctgtaatcccaaaactttgggaggctaaggggggcggatcatgaggtcagaagatagagaccatcctgactaacgcagtgaaaccccatctctactaaaaatacaaaaaaagtagctgggggtggtggcggcgcctgtagtcccagctacttgggaggctgaggcaggagaatcgcttgaacctgggaggcggagattgcagtaarccgagattgcgccactgcactccagcctgggcgacagagcgagactccatctcaaacaaacaaacaaacaaacaaaacggcaaagagttaacaaacattgtgactttaaattctcttttatttttctagtctccgaggactttgtctcctactccatcagcagaagtaagtaccatttctttttatcattttaatgggtggaatttgagaattgcttggcccttccctagactgggatttttgaaaaagaacataacatacaaaagaacagaaaaactgcatgtggggttatggtggctttggggattacctccgtgaaagaggagactctaagacacagcaatatatttctcttaaattggagaccagggagtaaaaatggcctcactttaatctgtgtctgtgcctgtaagtggaagcaaagtgtctgcaggaacataagtcacttgtcccaatgtggggctctttgtccgcatctataattaatttttctgaaccctaatatactgaaatggccaacagccatcatggcgtattctataagcagagccatcttgatgggaggttactctgtttagtctgaaatcaatcatctgatcctaaaa

SEQ ID NO: 34192 - DNA, 941 bp, Homo sapiens
ttgtacctgatcagaagacagggagatgtggagggatgctggcaggtacatgttggctaatatttacagctgactctgataaacaactctaattaaaactggcaaagaggccaggcgcggtggctcacgcctgtaatcccaaaactttgggaggctaaggggggcggatcatgaggtcagaagatagagaccatcctgactaacgcagtgaaaccccatctctactaaaaatacaaaaaaagtagctgggggtggtggcggcgcctgtagtcccagctacttgggaggctgaggcaggagaatcgcttgaacctgggaggcggagattgcagtaaaccgagattgcgccactgcactccagcctgggcracagagcgagactccatctcaaacaaacaaacaaacaaacaaaacggcaaagagttaacaaacattgtgactttaaattctcttttatttttctagtctccgaggactttgtctcctactccatcagcagaagtaagtaccatttctttttatcattttaatgggtggaatttgagaattgcttggcccttccctagactgggatttttgaaaaagaacataacatacaaaagaacagaaaaactgcatgtggggttatggtggctttggggattacctccgtgaaagaggagactctaagacacagcaatatatttctcttaaattggagaccagggagtaaaaatggcctcactttaatctgtgtctgtgcctgtaagtggaagcaaagtgtctgcaggaacataagtcacttgtcccaatgtggggctctttgtccgcatctataattaatttttctgaaccctaatatactgaaatggccaacagccatcatggcgtattctataagcagagccatcttgatgggaggttactctgtttagtctgaaatcaatcatctgatcctaaaa

SEQ ID NO: 34193 - DNA, 941 bp, Homo sapiens
ttgtacctgatcagaagacagggagatgtggagggatgctggcaggtacatgttggctaatatttacagctgactctgataaacaactctaattaaaactggcaaagaggccaggcgcggtggctcacgcctgtaatcccaaaactttgggaggctaaggggggcggatcatgaggtcagaagatagagaccatcctgactaacgcagtgaaaccccatctctactaaaaatacaaaaaaagtagctgggggtggtggcggcgcctgtagtcccagctacttgggaggctgaggcaggagaatcgcttgaacctgggaggcggagattgcagtaaaccgagattgcgccactgcactccagcctgggcgacagagcgagactccatctcaaamaaacaaacaaacaaacaaaacggcaaagagttaacaaacattgtgactttaaattctcttttatttttctagtctccgaggactttgtctcctactccatcagcagaagtaagtaccatttctttttatcattttaatgggtggaatttgagaattgcttggcccttccctagactgggatttttgaaaaagaacataacatacaaaagaacagaaaaactgcatgtggggttatggtggctttggggattacctccgtgaaagaggagactctaagacacagcaatatatttctcttaaattggagaccagggagtaaaaatggcctcactttaatctgtgtctgtgcctgtaagtggaagcaaagtgtctgcaggaacataagtcacttgtcccaatgtggggctctttgtccgcatctataattaatttttctgaaccctaatatactgaaatggccaacagccatcatggcgtattctataagcagagccatcttgatgggaggttactctgtttagtctgaaatcaatcatctgatcctaaaa

SEQ ID NO: 34194 - DNA, 941 bp, Homo sapiens
ttgtacctgatcagaagacagggagatgtggagggatgctggcaggtacatgttggctaatatttacagctgactctgataaacaactctaattaaaactggcaaagaggccaggcgcggtggctcacgcctgtaatcccaaaactttgggaggctaaggggggcggatcatgaggtcagaagatagagaccatcctgactaacgcagtgaaaccccatctctactaaaaatacaaaaaaagtagctgggggtggtggcggcgcctgtagtcccagctacttgggaggctgaggcaggagaatcgcttgaacctgggaggcggagattgcagtaaaccgagattgcgccactgcactccagcctgggcgacagagcgagactccatctcaaacaaacaaacaaacaaacaaaacggcaaagagttaacaaacattgtgactttaaattctcttttatttttctagtctccgaggactttgtctcctactccatcagcagaagtaagtaccatttctttttatcattttaatgggtggaatttgagaattgcttggcccttccctagactgggatttttgaaaaagaacataacatacaaaagaacagaaaaactgcatgtggggttatggtggctttggggattacctccgtgaaagaggagactctaagacacagcaatatatttctcttaaattggagaccagggagtaaaaatggcctcactttaatctgtgtctgtgcctgtaagtggaagcaaagtgtctgcrggaacataagtcacttgtcccaatgtggggctctttgtccgcatctataattaatttttctgaaccctaatatactgaaatggccaacagccatcatggcgtattctataagcagagccatcttgatgggaggttactctgtttagtctgaaatcaatcatctgatcctaaaa

SEQ ID NO: 34195 - DNA, 523 bp, Homo sapiens
tttttcagttttcactttaaaatctcagtcacggtttgtgctgggtgcctggttggttacctaagttccccagcttccttgaaggaacamttaaggaagatttggcagtggtggttttctaaaagacttcttaattcttccttggaatcgcagatttagttgtgatgtttggagacctcccccaacccctcccaacagcatgtagaaatatttttcttagttatactagcacctaatgtggatggagccctccccacaagccaggcacggcgctaagggctgtacatcactgcctttagtttccccgatatccctgtgacatgggtattattatgatctctttcatagaggtgaagaagctacggctgggcgcggtggctcacgcctgtaatctcagcactttgggaggctgaggcgggcggatcacgaagtcaggagttcgagacgagcctggccaacatggtgaaactccatctctactaaaaaaaaaaaaaaatagctgggcttggtggcaggggcctgt

SEQ ID NO: 34196 - DNA, 1249 bp, Homo sapiens
aatgggttagtttgatcagggctagtttgttagttgttgcttgtgttatttcattctggctgctatagcaaattactttaggctgggtaatttgtaaacaaaagaaatgtatttcttacagttctgaaggctgggaagtccaagatcaagttaccagtagataacagtgtctggtgagggtctgctctctgcttcagagatggtgccttctagctgtgtcctcacatggtggaagggcaaaaaagctcccttaggcttcttttataagggcagtgctatggttggtatgtctttgtcccctctaaaacttgtgttgaaatgtaattcctaatgcaacagtgttgggaggtggggcctcatgggagatgttcaggtcacgaaggctccaccttcataagtgaattaatactactatacaaagggactgtgggaatgggctcaccctttcttgttcttctgccacgtggggacacaacattttttctgctttcctttctgtcttccactatgtgaggacacagcaagaaggccctcaccagataccagatgctagtgccatgatcttggactttccagcattcagaactgtgagaaatatatttctgttgtttttgaattacccagcttgtgatattttgttatagcagcaaaaaagaactagtacaggtactaatcccattcatgagggctctgccttcatgacctagttacttcccaaagtccccacctcttaatagcaacacatcagggattcaattttaacattgtttgagggacacaaacaatcaggccatagcagggcttttacaaagcttcagtgaatattkttatatatgtctcttgatgcacatgtacatgcttttctgttcggtatgtattcagaagcagaattggtcccctcccttttattttaccatacttttgtaactccatgctttcttctaggtatgttcttctgaaatatatttcagttaactaattcttctactgtatctaatctttgtttaatccaaccactaatttttattctcaattattgcatttttttacttttataatttatattttaaaaatctgagttctcatgtctctgttctcagtttaaattttcaatcctttcccttatctcccagaaactagtaaacatagttatttttaaatcaatgtctaaaaattttgacatctggagtcttgtagttctatttctatgctttgttgttgtttctgtttcttgttcaagttgccttat

SEQ ID NO: 34197 - DNA, 1435 bp, Homo sapiens
ggaaaaatataatcttttgaaagcattcgtgttaaaaagaattagacgtgatttatctcatttagacctgttctttttcaatgtgtctttaaaatgtaggtacagtatataagaattcatactaaaggatcaactgagactttgatttaaatatgttataaattatagtatggaggcctgcataatatactacatatttttttttcctaagaagcttatttaaatggttctgttaagtgtaggaatgttctgatgattatctttttaattaaaatgagaaatctttgtttaaagtggcactcgtttttttayggcctgttacagtctctgtaacaatcatttcttaagtctgaacgttttatttccaggaatccatttatataaaactatgtttagacttaattaaggaacgattcttacaaagcttgtaaatagccaggaaaaaagggacagaaaataaaactgacattcacatttaacaaaatgattgttacaaggtatgtaataagctataaaaatacaataaagccctttttataagagttcatattttttgatccttgttttcaaaggtatttaagaaaaatatcaaagctttgcaaagtgacatctgtttgctgaatggactagttataacttcttttgtttataactgacaatacgagaattctacctgttttgttagtgtgtcttctttgaaataccttgtaattagtttagattggtaggtaaattttacgttgtaccatagtgaaaacaagacctggttttcaggttctgcttcctagatgtcatagatattgggcatgttgcttaacctccttgagtctcactttcctcatatagaaagcaaagataatatctacttttgtacctcaaagagctgttatgaggagtaaatgaaattattataaatagagcaaatattttggaaattataaaggactgtaagcatccagatcatgtgtctcttaaagatgaattagatttaacaacctcttttttttttttaattaaaaagtaaactttaatgtcaaaaatgcaaacttggggagggcagaaagatcacacacaaggctgtgccttcacacttggagggttgcacagcagccgggcagaggtactcctcacttcccagacggtggggcggctgggcagaggcactccccacttcccagacagggcagcggctattaagaacctcttttaattagcaaacttccttctcttgttcatgcattctgtcaagtacatacatgtacatcctttttgaaatgacacttatttttccatttccttgtctaagtataagtgattgaaaccactattggcatagtggaaattacacaagaattggagtcagaagaactggtttcaagtcctgtcttaactacagtcatgcattgcttaacaatatgtgatacattatgagaaa

SEQ ID NO: 34198 - DNA, 559 bp, Homo sapiens
gttttaatgaatcatttattcagattatcatttattgaactgtagctcaagaggtttagataatgatgtcacaacttctaacttgttttgaaaagccacattagttacagatagagtccatctaaggggggataaaaggaaaggggcagagagatgagtaaatactggaatgaagtaatttaaaaatgttaagatcccarcctcaataatgttcatctttccttagctctgaacctatttcaagtcatttgttcatgctgaattgcattttcttctcatgtccttacgagagtcacttgtcagatccctgaagtaatgagacctttatgactagtgttgttactgtcatagatacattttaaaatatctattaagaaataaaatgtacttaacatattatgtcttcctcagtaagtattccattctcatttttacacatatcattgagttcaaaatgtaattctttacatcaggcataaatcttatttcctttcatgaagttaaaaaagaaaactaaacttcccagatagtctgtaatgttttcctgtgtaattaacac

SEQ ID NO: 34199 - DNA, 561 bp, Homo sapiens
tttgtatgatttgatcaacattatgtttatgagaaacatttatattgttgcatgtagttcaatttcattcattttcattgctatcaaatatatacttttccattgtatgaataaaccacattttttttatttctacctctaatgggtatcttgattgttattttagattttttaaaaaactcatatccacagttaaaaggtgattacacttttctaaaggatgcacactacatattttggaggttttcctagagacattatctaacatttttatataaaaatggagaattggagagagggtagtagaagggcaatgaggaaaggaactaatatttattagaactaccatgtactggacattttggtaaaaatagttgttttcttttgaattgtggtaaaaaatatataacataaaatgtaccatccttaccacttttaagtatacacttcagtagtgtcaagtatattcacattgttgtgaaacagatctccagaacattttcatygtgcaaaactgaaactctataaacattaaacaactccttttttttcctcttcctt

SEQ ID NO: 34200 - DNA, 640 bp, Homo sapiens
acattttacttcacttataaaaacagcttaaccatctaaagggaagaaaagagctaatgtgcttcrttcagtatatgtaattacaatagggcttagggcagtgctttccaaattttagtgagcataaaaattatctgaagtagttttaaaaatgcagattcgtggctccgacccccgggattctaaaccgtgaattctaggatgaagtccaggaatatgcatgtttaacacccaaactcaccctcaaataactcatacaaaattagaattcagacccctcttggacaacaccaacataagatgacagatgtacttgttattgcatccgaaaccacagaatcatcagataaaatacccatcttagaccatctttcatatactttatattactttgctaaagaaccaaggtagatagcatttaaagggctgctgataaaagttaaggtttattcatttcaggtactatacttctcattatggtccttaaaaattggcccacagcttttaaaattgatatttaaaagtcatgtggaattggaattgtttcttaactttctgttcatttttactgtcttcaatattcccatttaatattgtttgatattaaaatataatggagtcacagtatttatcatctatt

SEQ ID NO: 34201 - DNA, 640 bp, Homo sapiens
acattttacttcacttataaaaacagcttaaccatctaaagggaagaaaagagctaatgtgcttcattcagtatatgtaattacaatagggcttagggcagtgctttccaaattttartgagcataaaaattatctgaagtagttttaaaaatgcagattcgtggctccgacccccgggattctaaaccgtgaattctaggatgaagtccaggaatatgcatgtttaacacccaaactcaccctcaaataactcatacaaaattagaattcagacccctcttggacaacaccaacataagatgacagatgtacttgttattgcatccgaaaccacagaatcatcagataaaatacccatcttagaccatctttcatatactttatattactttgctaaagaaccaaggtagatagcatttaaagggctgctgataaaagttaaggtttattcatttcaggtactatacttctcattatggtccttaaaaattggcccacagcttttaaaattgatatttaaaagtcatgtggaattggaattgtttcttaactttctgttcatttttactgtcttcaatattcccatttaatattgtttgatattaaaatataatggagtcacagtatttatcatctatt

SEQ ID NO: 34202 - DNA, 640 bp, Homo sapiens
acattttacttcacttataaaaacagcttaaccatctaaagggaagaaaagagctaatgtgcttcattcagtatatgtaattacaatagggcttagggcagtgctttccaaattttagtgagcataaaaattatctgaagtagttttaaaawtgcagattcgtggctccgacccccgggattctaaaccgtgaattctaggatgaagtccaggaatatgcatgtttaacacccaaactcaccctcaaataactcatacaaaattagaattcagacccctcttggacaacaccaacataagatgacagatgtacttgttattgcatccgaaaccacagaatcatcagataaaatacccatcttagaccatctttcatatactttatattactttgctaaagaaccaaggtagatagcatttaaagggctgctgataaaagttaaggtttattcatttcaggtactatacttctcattatggtccttaaaaattggcccacagcttttaaaattgatatttaaaagtcatgtggaattggaattgtttcttaactttctgttcatttttactgtcttcaatattcccatttaatattgtttgatattaaaatataatggagtcacagtatttatcatctatt

SEQ ID NO: 34203 - DNA, 846 bp, Homo sapiens
atccatgaaattttaaggaaatgtggattaattgcaaaatatggataatacaaaacacagtacaattagatgacaaaaaaaacctaaaaactcagtaacagcataaaatcaaaacttctctaagttccagttttttcatctctaaaatgagataatattccctaggggattttcaaggatgaaatgaagtcatatatatatagccacataagcttggctgatcctatttatatttgtttatggtgatatggaacactgtagatatatgtcaattgcctcactcttaccaaattctayacttggtggagaaagcttttataatcaaaagagaatgaaatgccatgggaattgggattccctaaggattgaagggcttccaaagggagtcagaccaccagtgtggacaaagtgctgacatttactgccatctgttgggtgatgagcaaactgtcccactctttaaaacacagaaatacgcctctgaaagatttcttcctcaattcaaaaggcatccttagctcatcactgtttgcatctgctatgaaataaatatcagccccactcctagagggacaagaccagtcgctgtttcagtaaagagcgtaagttaagtcgcaaccctaaacagccacacctgaaggctgcaaaagaaaacataaattccagggcctgctataagctcagctacatttgccactacagggcacatacccaaggctcaattcaatatcccaaaggttgggacccatgtggtcatgccctgggctctttcaaagcactgcctctagaccagacaacgctattggcttcctgactaccaaaccaataattacaaaagacctctcc

SEQ ID NO: 34204 - DNA, 517 bp, Homo sapiens
acacacaatagaaatgtgcaactttcaaattatatggaactaaaaaggatcattcgcaggtgttgcattaaggcactgaagatacattaacaagacacttcctagccccgccggagttgacacaktctaccctagtaccacccagcaactcattttcctagcgaagtttgctaatcttggctgcgtgtatcatgacacttttgtttgtgattatgcttcagtccacaatgaatttagtctttccattcccagccttattaatacacccttagtacttacagtcctaaagcttcctggtaaagctttttcatcatattaaaatcagataagaatagcatctgcttgtgctatagtgttcatcttcagatgtatccgaccacaagaagacctaatattcaacaatcagaatgagagggcctcagcctttgctacagcctagcatcggctgcagacctcagactgcagcaggactgggcatcctctcagaggcctcaaaacagtgctgggtcttgggtag

SEQ ID NO: 34205 - DNA, 517 bp, Homo sapiens
acacacaatagaaatgtgcaactttcaaattatatggaactaaaaaggatcattcgcaggtgttgcattaaggcactgaagatacattaacaagacacttcctagccccgccggagttgacacagtctaccctagtaccacccagcaactcattttcctagcgaagtttgctaatcttggctgcgtgtatcatgacacttttgtttgtgattatgcttcagtccacaatgaatttagtctttccattcccagccttattaatacacccttagtacttacartcctaaagcttcctggtaaagctttttcatcatattaaaatcagataagaatagcatctgcttgtgctatagtgttcatcttcagatgtatccgaccacaagaagacctaatattcaacaatcagaatgagagggcctcagcctttgctacagcctagcatcggctgcagacctcagactgcagcaggactgggcatcctctcagaggcctcaaaacagtgctgggtcttgggtag

SEQ ID NO: 34206 - DNA, 508 bp, Homo sapiens
tttttttttgagatggagtctcgctctgtcccccaggctggagtgcggtggcgcgatctcggctcactgcaagctccacctcccgggttcatgccattctcctgcctcagcctcctgagtagctgggactacaggcgcccaccaccacgcccggctaattttttatatttttagtagagacagggtttcactgtgttagccaggatggtctcgatctcctgaccctgtgatctgcccacctcggcctcccaaagtgctggggattacaggcgtgagccaccacgcctagctragagcagagcttcttaaaggtcctacttcccaatactgccacattggggattaagtttcagcatgagttttagaggggatatttaagtcatggcagttacttagctttacagaaggatacagaaaaggggatacagggagctcaacgtcatgttctcctcagcaaggccagcagttacccaactgcacagcctcgtaggcctcaagtagccccagc

SEQ ID NO: 34207 - DNA, 1670 bp, Homo sapiens
gctggagcctcagcaaattttagaaatgagagaaatattaaagattatgtaattcaaacttcatattttgtggttgaggatgttcaacccaagtgcgcaaaactagagagctagatgtagcaggtgtggacctggaatcccaacctcctaacaatcactccaacattctttctagcacacagtgcttcaggtacaagccttctactaaggtagtcctacaaagttatggtccaactaatgtggattacatttcgctattaggctatttgatggttttaatttgcaaatttacaagtcaaaattatatgtttctaccaacttgtttcttcctcagaatttttccatgtgttgtcctgataaaaaacaatcaaatataattttcagggtttatttctatttattttggtttagatcactatgaattttttttctaactttaaaattctatgaaaataacaatttgaggtcttagtattcaatttgtggtttaaatgctgacattagggaatgaacagttcttatttatctcaagactactattatgatgcaatttcctttttacaaaaaataaaaacctcaagcttttattgatttatagaggatgaactcatgcttgtatttcaagaggaaaaataaccactaatttaaaaagcaaattatcttcagttgtattatcttccaatgagtctgggtagggattcaaaaataagctcctattttctgctggaaaatctacttgagatatttttgaatttctctcccaagttatgaggagaaaaaaatctaaactctagaatcctttgtgcatttgttgatgggaactgatactttctggctatcctttcactgatcatttgaaactttttactttgattaaaaagagtaaaatatcagtttccaagaaaagatgaaagctttccttcagaatatgtgtttacaacaatcagtattactcttggaaaattatgcaaagaaggtgtcaaaacaaagagattttcccacctctacaaataaaaaaattggatacaatagcaaaaaattatatatgcaaatatgtgtatatgtatatacagtcaatccgcattattcccagattctatatttgctaattcactcactaaaatgtattttaactacaaaatcaatactacgggcacttttgcagtcattcacagatatgcatagagtggcaaaaaaaaaaaagtatgtctctgaaacatgcacgttcccacaaatgtgatattttcccacacatatgtatacgcacacacacacacacacacatacatatatattaaataaagtgactaaacagaaaaactcataaaacaaagtttcatattatggattggttgataaaaatatcacaagaggcttatgggaacttaaccctgtatttcccctaggagcaatagttcagtgtttattaatttagtgtatgtggcaattttgtaaagcataactatcaaaagtaacaagaattgactgtatacatacatrtatatatatatatatatatatatatatatatatatatatatatgaacacatgtataaaacaaaacctacaatttggaagatgagatttagaaaacattatttatgatgtatttcttgtctcactatattctcaaactttagtgttccatttagaactcatagctagaaat

SEQ ID NO: 34208 - DNA, 987 bp, Homo sapiens
atgcataggatggcatgtttttgcaagttcatctgtacgcagcatgccactaacaggactgtcaagagtactaatcacaggctgaggcttggaaacagcagggccagaggacacaggtctcccctttggtaacagaactcaaagcttttgggtacccagcatgggcctggcatgcaggggtgacagccttttaatggagttccaccaaagggactaaggtctttgtcatgtcagaacagcaagtctcctggggactgtccagggtcctgggccatctctgctttagggtctgtaggctctctgggccctatatctggggtgggccatgacccttctgtttttttttgttttttgttttttggtttttttttttttttgagacggagtctcgctctgtygcccaggctggagtgcagtggcgcaatctcggctcactgcaagctccacctcccgggttcacgccattctcctgcctcagcctcccgagtagctgggactacaggcacctgccaccacgcccggctaattttttgtattttcagtagagacggggtttcatcgtgttacccaggacagtctcgatctcctgacctcgtgatccgcccatctcggcctcccaaagtgctgggattacaggcgtgagccaccgcgcccagccgacccttctgtgtttaataattttagttcagctacctgtctctacctgggctttatatgaatctccccactttttgtctgcatccacccttgtattccttggcccacttgcctgctccttttccaggcaggtggtatagccatttccaaaaggggaagctatctgctgaatgttcaggttcccagatcttttggattagaggatgcccatgggcctgtcacaggcctctgaaaggccacatgggctcacctgtctggatggcattcagggctgcatccttctcccactggaaaagattgttcacttgagcaccaaactcctctctatgc

SEQ ID NO: 34209 - DNA, 806 bp, Homo sapiens
tgagccaaagaagagactttaatggttccagtttctccgtattctaagcaggttgggcaagaagagagagaagtgggtgtggagaagtctcacggcctgaagaaaagagagtcatttctcctctattgggggagttgcaggagttatcatcaagtcacctcgggggcagcggcaacagcacaggctgggtgtgtgtctctctctgccctccctcttctggggctggctgactcattgcsgggtcaggcgacaggggctgggatgcaggatcacactgagaatgaccaggcatttaagggctggactgcacaagcaaatcaagtgcttccaggcactcagaatgccccagggagaagacaacagcaacaaacaacaaaaatagttccctgttccttaaacagcaaatacctatttcaaacaactgtattacaaccaaatagcgtcagccagtgttccctctaagacacagaagctttaggggaacctaaaggacttttattttagttttaccttttctactctttaggtgttaaaatgttttcttctatgggataagggtggtaatagacagttgcatctataaatcacttttctttaattttaaactttctagcccacagaattaaaaaatctagaagcccatgaaagaaaggactgttggtcattttcttttttctatttgttttttgaaacagagtctcactctgtcacccaggctaaagtgcagccgcgtgatcttggcttactgcaacctctgcctccccagtccaagcaattttcctgccttagcctccccagtagctggg

SEQ ID NO: 34210 - DNA, 806 bp, Homo sapiens
tgagccaaagaagagactttaatggttccagtttctccgtattctaagcaggttgggcaagaagagagagaagtgggtgtggagaagtctcacggcctgaagaaaagagagtcatttctcctctattgggggagttgcaggagttatcatcaagtcacctcgggggcagcggcaacagcacaggctgggtgtgtgtctctctctgccctccctcttctggggctggctgactcattgccgggtcaggcgacaggggctgggatgcaggatcacactgagaatgaccaggcatttaagggytggactgcacaagcaaatcaagtgcttccaggcactcagaatgccccagggagaagacaacagcaacaaacaacaaaaatagttccctgttccttaaacagcaaatacctatttcaaacaactgtattacaaccaaatagcgtcagccagtgttccctctaagacacagaagctttaggggaacctaaaggacttttattttagttttaccttttctactctttaggtgttaaaatgttttcttctatgggataagggtggtaatagacagttgcatctataaatcacttttctttaattttaaactttctagcccacagaattaaaaaatctagaagcccatgaaagaaaggactgttggtcattttcttttttctatttgttttttgaaacagagtctcactctgtcacccaggctaaagtgcagccgcgtgatcttggcttactgcaacctctgcctccccagtccaagcaattttcctgccttagcctccccagtagctggg

SEQ ID NO: 34211 - DNA, 1018 bp, Homo sapiens
caaggtatccttctgttgtatgttagccatagggcacaggcttctctttattgatttcaagttatggaactgggctaaagcaagctcatcttcaacactccttttcgcttgctctctctcaggcacttagggagcattacaagttatcatctgcctgctggaagaattatactgtcttttcttacgggcaagtgcttagcaaataatttggtcctgtttaaagagagatctggctttttccttggggtatctgggagacactttatgtcatacctgattagagtgtcattgtttaggtgtgagtggccacattggatcttagagtgggcaggcatacctagtagttttgaggggtccttctggccatgttagaaagaccaaccatatgatttaaggtagaggcttcatggggtatcagtcaacctgggcactgaattcaaacatgtggacaattaatcaaacaatcatgtctagataatgacttccaaataaaaactctggaccaaaattgtgaaatttctcttgttaacagtacttgcatatgatcacattaaggcccagagggcaacccctcccaactccacgggagaggacaatggaagctttgcatttataaatctcccagactctgccctatgtatgcatctcttctttttgctgattttaatctgtattcttttcctgtaatcaaccttaaccatgagtctaatagatttcatgagttttgcaagttctattagaaaattatctaacctaagggtggttttggaaatcctccaaaattgcagctggcataagaaatgaggagtcttagccaggkgcagtggctcatgcctgtaattccaacactttgggaggctgaagcaggaggactgcttgagtctaggagttcaagcctgggcaacaaactgagaccctgtctctaaaagaaaaaaaaaaattaattgaaagaaaaaaaaatagccaggtgtgatagtatgtgcctctagtcccagctacttaggaggctgagatgaga

SEQ ID NO: 34212 - DNA, 994 bp, Homo sapiens
cttcattctgctccattgctctaagggcctttatgccaatgtcatgctgttgtgcttactacagctttgtaacatatttttaagtcagggagtgtgaggcctccagcacctgttttgtctttatacctcgaaatctcaggacactgggcatcatttaacaatgatgatggagaaggggacgccaggactcctagggcccaacattagataacagagtgttggccatgaaccaacctcaaagatttcctttgagtagaagacaggcatcctcatttcctcacctctctcctgtcctgtgttctaggaaactcttcaagtagttcatcttcacccactgaaccaagctccaaaactggtgagtaaagatccctcttatctctgcttttggaaacctggggaggttggtatcttggattcaagcattggctcagcacctcccagctctgtgattgtgggcctgtcttctaacatctctgacccccagacactacaacagcgaagggtatctgaggacagcaaagggctcagtgaagtctcttcatttcaaatttctgcagctgagacctcctccaagctagacggacgagtacaaatctgacatccttctcagggataawgtggtgttttttctgcctgcattccaaattggaggataaatttgaggggacttgagagagggaggggaagggaacatctgatgagggaaaggtgatttagagaagttccacttgccaaggaatgagcccctgttggtcatgatgcgaccttggctgagtcagcagagcaagagccttgcagtaagaaggaacgtagttcatccacaaatatgacacttccacttactcacttattcagccactgccctgtgctctgactgtacagtgtggaaccctttcctgctgttgccataataaatctccacaatcttcatggatgacaacaacacagcttttaaaattatcttacagtgttatagctcagaaatatgaaatgc

SEQ ID NO: 34213 - DNA, 994 bp, Homo sapiens
cttcattctgctccattgctctaagggcctttatgccaatgtcatgctgttgtgcttactacagctttgtaacatatttttaagtcagggagtgtgaggcctccagcacctgttttgtctttatacctcgaaatctcaggacactgggcatcatttaacaatgatgatggagaaggggacgccaggactcctagggcccaacattagataacagagtgttggccatgaaccaacctcaaagatttcctttgagtagaagacaggcatcctcatttcctcacctctctcctgtcctgtgttctaggaaactcttcaagtagttcatcttcacccactgaaccaagctccaaaactggtgagtaaagatccctcttatctctgcttttggaaacctggggaggttggtatcttggattcaagcattggctcagcacctcccagctctgtgattgtgggcctgtcttctaacatctctgacccccagacactacaacagcgaagggtatctgaggacagcaaagggctcagtgaagtctcttcatttcaaatttctgcagctgagacctcctccaagctagacggacgagtacaaatctgacatccttctcagggataaagtggtgttttttctgcctgcattccaaattggaggataaattygaggggacttgagagagggaggggaagggaacatctgatgagggaaaggtgatttagagaagttccacttgccaaggaatgagcccctgttggtcatgatgcgaccttggctgagtcagcagagcaagagccttgcagtaagaaggaacgtagttcatccacaaatatgacacttccacttactcacttattcagccactgccctgtgctctgactgtacagtgtggaaccctttcctgctgttgccataataaatctccacaatcttcatggatgacaacaacacagcttttaaaattatcttacagtgttatagctcagaaatatgaaatgc

SEQ ID NO: 34214 - DNA, 994 bp, Homo sapiens
cttcattctgctccattgctctaagggcctttatgccaatgtcatgctgttgtgcttactacagctttgtaacatatttttaagtcagggagtgtgaggcctccagcacctgttttgtctttatacctcgaaatctcaggacactgggcatcatttaacaatgatgatggagaaggggacgccaggactcctagggcccaacattagataacagagtgttggccatgaaccaacctcaaagatttcctttgagtagaagacaggcatcctcatttcctcacctctctcctgtcctgtgttctaggaaactcttcaagtagttcatcttcacccactgaaccaagctccaaaactggtgagtaaagatccctcttatctctgcttttggaaacctggggaggttggtatcttggattcaagcattggctcagcacctcccagctctgtgattgtgggcctgtcttctaacatctctgacccccagacactacaacagcgaagggtatctgaggacagcaaagggctcagtgaagtctcttcatttcaaatttctgcagctgagacctcctccaagctagacggacgagtacaaatctgacatccttctcagggataaagtggtgttttttctgcctgcattccaaattggaggataaatttgaggggacttgagagagggaggggaagggaacatctgatgagggaaaggtgatttagagaagttccacttgccaaggaatgagcccctgttggtcatgatgcgaccttggctgagtcagcagagcaagagccttgcagtaagaaggaacgtagttcatccacraatatgacacttccacttactcacttattcagccactgccctgtgctctgactgtacagtgtggaaccctttcctgctgttgccataataaatctccacaatcttcatggatgacaacaacacagcttttaaaattatcttacagtgttatagctcagaaatatgaaatgc

SEQ ID NO: 34215 - DNA, 994 bp, Homo sapiens
cttcattctgctccattgctctaagggcctttatgccaatgtcatgctgttgtgcttactacagctttgtaacatatttttaagtcagggagtgtgaggcctccagcacctgttttgtctttatacctcgaaatctcaggacactgggcatcatttaacaatgatgatggagaaggggacgccaggactcctagggcccaacattagataacagagtgttggccatgaaccaacctcaaagatttcctttgagtagaagacaggcatcctcatttcctcacctctctcctgtcctgtgttctaggaaactcttcaagtagttcatcttcacccactgaaccaagctccaaaactggtgagtaaagatccctcttatctctgcttttggaaacctggggaggttggtatcttggattcaagcattggctcagcacctcccagctctgtgattgtgggcctgtcttctaacatctctgacccccagacactacaacagcgaagggtatctgaggacagcaaagggctcagtgaagtctcttcatttcaaatttctgcagctgagacctcctccaagctagacggacgagtacaaatctgacatccttctcagggataaagtggtgttttttctgcctgcattccaaattggaggataaatttgaggggacttgagagagggaggggaagggaacatctgatgagggaaaggtgatttagagaagttccacttgccaaggaatgagcccctgttggtcatgatgcgaccttggctgagtcagcagagcaagagccttgcagtaagaaggaacgtagttcatccacaaatatgacacttccactyactcacttattcagccactgccctgtgctctgactgtacagtgtggaaccctttcctgctgttgccataataaatctccacaatcttcatggatgacaacaacacagcttttaaaattatcttacagtgttatagctcagaaatatgaaatgc

SEQ ID NO: 34216 - DNA, 994 bp, Homo sapiens
cttcattctgctccattgctctaagggcctttatgccaatgtcatgctgttgtgcttactacagctttgtaacatatttttaagtcagggagtgtgaggcctccagcacctgttttgtctttatacctcgaaatctcaggacactgggcatcatttaacaatgatgatggagaaggggacgccaggactcctagggcccaacattagataacagagtgttggccatgaaccaacctcaaagatttcctttgagtagaagacaggcatcctcatttcctcacctctctcctgtcctgtgttctaggaaactcttcaagtagttcatcttcacccactgaaccaagctccaaaactggtgagtaaagatccctcttatctctgcttttggaaacctggggaggttggtatcttggattcaagcattggctcagcacctcccagctctgtgattgtgggcctgtcttctaacatctctgacccccagacactacaacagcgaagggtatctgaggacagcaaagggctcagtgaagtctcttcatttcaaatttctgcagctgagacctcctccaagctagacggacgagtacaaatctgacatccttctcagggataaagtggtgttttttctgcctgcattccaaattggaggataaatttgaggggacttgagagagggaggggaagggaacatctgatgagggaaaggtgatttagagaagttccacttgccaaggaatgagcccctgttggtcatgatgcgaccttggctgagtcagcagagcaagagccttgcagtaagaaggaacgtagttcatccacaaatatgacacttccacttactcacttattcagccactgccctgtgctctgactgtacagtgtggaaccctttcctgctgttgccataataaatctccacaawcttcatggatgacaacaacacagcttttaaaattatcttacagtgttatagctcagaaatatgaaatgc

SEQ ID NO: 34217 - DNA, 709 bp, Homo sapiens
aacagtgaagttgtcacgtggacagagtcaggacctctggttagccagggtgttgcaggtggtggaattacctattgttttctccttctttggagcagggtttttctgttatgagttgctgtaatggcttgagttggttgacctccagccaggaggtggtgcttttaagagagcatcagctgcagaagtagaagggagatacagtcttgccctacattggccaggatgagtattcgggtttctcaggtgatgggccgggccataragctcccaaaagtttatgtcttttgtctttggagttttttcgttgtctcgtggcatctgcagtggcaagctgcttctttctatgttcagaatcttatattttgttcatattatatttcttactacccagcaccaactgagccattcaaatctttcttgaggatagaatatagtctgaaatatctccataaactacttaaacagatatggaaaagtcaagagtgagtggagccaaacaatagtaacagaaggaaaagattagggttggcttgcccattctttgggctaccatcagaactctgattttatggcttgcacacattagaagttacagggagactcaactacatattgatcctcagggaatcatggtatttgcttcacagttttcccttgatttacctttgacaaaaaggccctgggagtccagtctcagctctgtcaa

SEQ ID NO: 34218 - DNA, 759 bp, Homo sapiens
aaaaaaccaaacaccgcatattctcactcataggtgggaactgaacaatgagatcacatggacacaggaaggggaacatcacactctggggactgtggtggagtggggggaagggggagggatagcattgggagatatacctaatgctagatgacgagttagtgggtgcagcacaccagcgtggcacatgtatacatatgtaactaacctgcacattgtgcacatgtaccctaaaacttcaagtataataatacaatttttaaaaaaagataaaaaaaataaggagaaaatgttaccttacgcttgcctgatgaagctggacatgtccttcatacagaaggaagatttcgcaccgtgacacactttggcctctmcagccagggccctcctcctcttgtgtgatcctagcccttagtcacagttcactggagctgaacaaagcagaggcataagattcacttggaatcagggcatgcgagtgaacattggaagtggacatactatgccgaggtctgtgccaggagccaggaggtatgggaagctacctcctgggaagatgaaacagagtttcctactctaggaacaagtttacatgtgcaagcactgccgggggcagcagtttcgttctgtgtcatatgaggaacgtagatcggtggttctaagtcctggttacacaccagaatcacctgggaagacacattttttaataggatgtcgaagccccagcccaacccaattaaatcagaatttctagagtat

SEQ ID NO: 34219 - DNA, 759 bp, Homo sapiens
aaaaaaccaaacaccgcatattctcactcataggtgggaactgaacaatgagatcacatggacacaggaaggggaacatcacactctggggactgtggtggagtggggggaagggggagggatagcattgggagatatacctaatgctagatgacgagttagtgggtgcagcacaccagcgtggcacatgtatacatatgtaactaacctgcacattgtgcacatgtaccctaaaacttcaagtataataatacaatttttaaaaaaagataaaaaaaataaggagaaaatgttaccttacgcttgcctgatgaagctggacatgtccttcatacagaaggaagatttcgcaccgtgacacactttggcctctacagccagggccctcctcctcttgtgtgatcctagcccttagtcacagttcactggagctgaacaaagcagaggcataagattcacttggaatcagggcatgcgagtgaacattggaagtggacatactatgccgaggtctgtgccaggagccaggaggtatgggaagctacctcctgggaagatgaaacagagtttcctactctaggaacaagtttacatgtgcaagcactgccgggggcagcagtttcgtyctgtgtcatatgaggaacgtagatcggtggttctaagtcctggttacacaccagaatcacctgggaagacacattttttaataggatgtcgaagccccagcccaacccaattaaatcagaatttctagagtat

SEQ ID NO: 34220 - DNA, 1273 bp, Homo sapiens
tggtgtccatcatgcaggtawgggaatcccctttatattcaggttcactttatttccagtcatatatagcctcctttaagagtggatggggcaggtagggaaaactttatggaagaggcagaaatacacgtcaacaactacagctgtcgacaacatgccaaatgcaaccaggtactgagaagatcaaggtgaaaagataccaaccctgcaagttcacaatctagaacataaatgccatgtagggtagttattataaatcttttctggaaaacctattttctttctcagtaacctgatagtttacatagtaaaactatgaaattttaactatttcttctgtttgcagtttatcttgctaaaattgctaacatagtcaaactctcaaacctcaaaaaaacagtacaagacacagaaatggctaaatgaataatcaacatgtgaatgacatcatcaaaacacatttattgggtgccttctgtacagcgtctacgtcccgttatttgtttggttttgttttattttgtttgtttttgagacagaatctcgctttgtcgcccaggctggagtgcagtggcacaatctcggctcactgcaacttccgcctctcaggttcaagcgattctcccatctcagcctcccgagtagctgggattacaggcccccgccaccatgcccagctagttttcgtatttttagtagaaacgtagttttgccatgttggccaggctggtctcgaacttctgaactcaagtgatctgccttggcctcccaaagtgctgggttacaggcatcaaccactgcacccggcctacatcctgtcattaaagatattaatacataagtacaacataaggcaataaagtacaggaataatgcagaggaaaaaatatcacttaatgatataaagtatcggaaaagctttgaagaagggacatttttagccacatactgaaaaatactttcataggcaaaaatggtactttaaggaaggattccaggcaaaacaaatggactggcaaagggacaaaggtgagaaaacccacgtgtagaggaacacaggagaggcagggccacactggagaactgccaagctaagaattaaggatgtatttcactgacagaataattaacacaatgtacaggtgctggtaacccaagaagaagtaagacagagtatttgtaaccacagcttacagtctggtggaggaggcaaacgacaatttcagtagagtgtactaagtactgtaatgagggatgggtgctgtcaaatgca

SEQ ID NO: 34221 - DNA, 2251 bp, Homo sapiens
tgaagccctagagaagggatacctgtccgtcattgcccagaggggtgagggaatagccagggytcttttctattttcagactgccagtgaaccagcttgagtacgctttggcaattgagggtgtctgaccgagggcactccctggtgttacctaaagccaagacaaaagagtgaatttgctattgctcatcagggtggcaagcccacttttactttaacactctgtaaattgtgccttggaaacaagcagcaacgatttcaactcaactctgcgcagacacatgctactagttgcagacctaattttggattcaatttcatcacaagcactgcatcccaagttatgggtgagttctccttcacattaggttggagctgaccactcaaacaagggcacgcctggactggtcctccaggcaagggcaggccctctatccgtggtgggatgcccccaagtagagtgagccaaagggaaaaggaaggtccaaatccctcagggatgcctcggggatcttctagtcccttatctaaacccaacacggatgcaattcattcttcaattcattccaattcacccttgggttgcattcttaaaaattcatcccattttaacccacaaactctcaaaaagaagtgtgtaattttcttttgtatttagaggtcccatatgttcaggtctttttggctttatcccaaaacccaaaattacataaaaattgtcacacatgcttccaaggaacttcctctctccccaattcttttttttttttttttgagaccgagtctggagtgcagtggcacaatctcggctcactgcaacctctgcctcccactctctcaccaattctgatgtcgtagatgatctttccttttgcctgtcacactctcctcagcctgcacctgcttcacctataccctctccatttgctccatccccgagtcaacgcccctccatatccagacacttcatccccctcacatactctcatgggagtcacatatgccactagtacagagtcctcagaatatcccaataatgttttgcctttccatgaggtgacaaatggaaacttgggaacaattcaagtcatgtccctttcacaaatttaatccaagttgggttcatttagccaggatccctttaagctcattaaagaattgtgggcttttgactattgcctttgatttaacctggcaagacatgtttgtggtattaactacttgttgttcccacaaagaaaaatcatgcatatggtctttagcttgagtttttgggcagatgaagctcatgctcataattaatggtaatagagccagggcagtaggtgaccacaacacagaaaccagctggcaatatcaggctgctgatgccagcccaaacagaggcgggattacatgatagcttgcttgttggaaggaatgaaaaagcctgtaataaaacctattaatttttcttttttctttttcttttctttttttttttttttttttttgagatggagtctcactctgtcgcccaggctggagtgcagtggcgcaacctcggctcactgcaacctccacctcctgggtttaagcaattctctgcctcagcctccagaatagctggcattacaggtgcatgccaccacgcccggctaatttttttgtatttttaatagagacggggtttcaccatcttggccaagctggtcttgaactcctgacctcatgatccacctgtctcagcctcctaaagtcctggaattacaggcgtgagccactgcaccgggccaatttttctaaattaccggaaattacccagcagccatctgagaaccccacccttttccaaattagactggtggaggccatacataaatatacaaatttagatcctgaaagccctgagggccagttcactctggccatacattttataagtcaggcttccccagacatcagacaaaaactccaaaaattagagcaaggcccacagattccctttccgactttattaaatacagcctttaaggttttcaataactgggaggaaacctcaaaaataaaaaagactcaattggaggaagaacaatgccatcgccaagctaattacgtggtaacacagcattgacacgttctttttcgttagttaataaccccaaggcatgtccctataatactaacagaatgggggcctgtcatcactgcagaaatccaggatattggcgtagagaacattccaaacctccaggttacaaagctgccccca

SEQ ID NO: 34222 - DNA, 2251 bp, Homo sapiens
tgaagccctagagaagggatacctgtccgtcattgcccagaggggtgagggaatagccagggttcttttctattttcagactgccagtgaaccagcttgagtacgctttggcaattgagggtgtctgaccgagggcactccctggtgttacctaaagccaagacaaaagagtgaatttgctattgctcatcagggtggcaagcccacttttactttaacactctgtaaattgtgccttggaaacaagcagcaacgatttcaactcaactctgcgcagacacatgctactagttgcagacctaattttggattcaatttcatcacaagcactgcatcccaagttatgggtgagttctccttcacattaggttggagctgaccactcaaacaagggcacgcctggactggtcctccaggcaagggcaggccctctatccgtggtgggatgcccccaagtagagtgagccaaagggaaaaggaaggtccaaatccctcagggatgcctcggggatcttctagtcccttatctaaacccaacacggrtgcaattcattcttcaattcattccaattcacccttgggttgcattcttaaaaattcatcccattttaacccacaaactctcaaaaagaagtgtgtaattttcttttgtatttagaggtcccatatgttcaggtctttttggctttatcccaaaacccaaaattacataaaaattgtcacacatgcttccaaggaacttcctctctccccaattcttttttttttttttttgagaccgagtctggagtgcagtggcacaatctcggctcactgcaacctctgcctcccactctctcaccaattctgatgtcgtagatgatctttccttttgcctgtcacactctcctcagcctgcacctgcttcacctataccctctccatttgctccatccccgagtcaacgcccctccatatccagacacttcatccccctcacatactctcatgggagtcacatatgccactagtacagagtcctcagaatatcccaataatgttttgcctttccatgaggtgacaaatggaaacttgggaacaattcaagtcatgtccctttcacaaatttaatccaagttgggttcatttagccaggatccctttaagctcattaaagaattgtgggcttttgactattgcctttgatttaacctggcaagacatgtttgtggtattaactacttgttgttcccacaaagaaaaatcatgcatatggtctttagcttgagtttttgggcagatgaagctcatgctcataattaatggtaatagagccagggcagtaggtgaccacaacacagaaaccagctggcaatatcaggctgctgatgccagcccaaacagaggcgggattacatgatagcttgcttgttggaaggaatgaaaaagcctgtaataaaacctattaatttttcttttttctttttcttttctttttttttttttttttttttgagatggagtctcactctgtcgcccaggctggagtgcagtggcgcaacctcggctcactgcaacctccacctcctgggtttaagcaattctctgcctcagcctccagaatagctggcattacaggtgcatgccaccacgcccggctaatttttttgtatttttaatagagacggggtttcaccatcttggccaagctggtcttgaactcctgacctcatgatccacctgtctcagcctcctaaagtcctggaattacaggcgtgagccactgcaccgggccaatttttctaaattaccggaaattacccagcagccatctgagaaccccacccttttccaaattagactggtggaggccatacataaatatacaaatttagatcctgaaagccctgagggccagttcactctggccatacattttataagtcaggcttccccagacatcagacaaaaactccaaaaattagagcaaggcccacagattccctttccgactttattaaatacagcctttaaggttttcaataactgggaggaaacctcaaaaataaaaaagactcaattggaggaagaacaatgccatcgccaagctaattacgtggtaacacagcattgacacgttctttttcgttagttaataaccccaaggcatgtccctataatactaacagaatgggggcctgtcatcactgcagaaatccaggatattggcgtagagaacattccaaacctccaggttacaaagctgccccca

SEQ ID NO: 34223 - DNA, 842 bp, Homo sapiens
cagttgytgatttaaccctttttttgaagaatgcaaatagtcctagtaaggcaacatgaactgtctaacacattagtatgaatgactttattaggcaagattgagaaaacactgggtaacttgaaggggtaggaaagaccaaattctaagagggggaataataaacccaaagataaaaaagaataaaaatttttttttctaccttaccatcttgtgtaggtttgacaacgctaatgttatgtttaacgatggtaaacaaaactgtctttaaaaaaagattatttcttaaagatagatgtttcctttttatagaattttaaaaattcaaaagggctaatatatcatgcctgaaagttaacctaaaaattattttttagataatcaattatgcaattacgtagctcatttattatctcaacttagaggaagctcacaaccaccccaagttaagtgcttaaaagatttttcttctaccttttccaagtaatttttggcctctcttatagttcattttagcttatctggtgctttgggggaggagttgatagggtatacattaataaatatttatttatttgatagaaattccagaatatagaaaaactaaagcttaaatgttgagaagtcccaatcactgagaatagtagtaaataaagacaaacatctcttaattctctcaattattttaaacccttgccatcttacccagttctaaacctatatttgcttcctcctgtgttattccctctgggttctaacttttaggtctctgcctaaacttcctaagagtttctcttctatttgtaaaaatatcaccaattgtaacttttgaatttgtattt

SEQ ID NO: 34224 - DNA, 842 bp, Homo sapiens
cagttgctgatttaaccctttttttgaagaatgcaaatagtcctagtaaggcaacatgaactgtctaacacattagtatgaatgactttattaggcaagattgagaaaacactgggtaacttgaaggggtaggaaagaccaaattctaagagggggaataataaacccaaagataaaaaagaataaaaatttttttttctaccttaccatcttgtgtaggtttgacaacgctaatgttatgtttaacgatggtaaacaaaactgtctttaaaaaaagattatttcttaaagatagatgtttcctttttatagaattttaaaaattcaaaagggctaatatatcatgcctgaaagttaacctaaaaattattttttagataatcaattatgcaattacgtagctcatttattatctcaacttagaggaagctcacaaccaccccaagttaagtgcttaaaagatttttcttctaycttttccaagtaatttttggcctctcttatagttcattttagcttatctggtgctttgggggaggagttgatagggtatacattaataaatatttatttatttgatagaaattccagaatatagaaaaactaaagcttaaatgttgagaagtcccaatcactgagaatagtagtaaataaagacaaacatctcttaattctctcaattattttaaacccttgccatcttacccagttctaaacctatatttgcttcctcctgtgttattccctctgggttctaacttttaggtctctgcctaaacttcctaagagtttctcttctatttgtaaaaatatcaccaattgtaacttttgaatttgtattt

SEQ ID NO: 34225 - DNA, 1264 bp, Homo sapiens
aagttctctatgcaaaaaataaaaccatgcaagtactggaagaagacatcagttaattcctttataaactcagtagaggagtagaggaggtcttctgactatgactcaaaatcacaagccataaaaataattttaaaaataaattttactatacataaatttttgcatggtaaatgcatcataaccaaactcaaaaaaatacatgggaaacgggaaagtatttacaatgcmtaccagaaatgattaattactttatgagctcctagaaattgagaggaaaaaaagaggcaaagggtacaaatagataattctcagaaaaaatacatatggctttttaagcatgtgaaaagatgttcggcctcattcagtaaagaaaaaaagaaaattaactctacaatgagacactactactcacctatgagacaggcaaatgcccagaagtttgagaatacgttctgtggagaaacaggcactctcaaacaatgctgatgggaatgtaaaatggtacaacttctatggaagtgtatttggcaaaattagagatggcaaaaaaggatgggtgtggtggcccatgcctgtcatcccagcacttttggaggccgaggtgggcagatcacttgaggtcaggagttggagaccagcctagccaacatggtgaaaccctgtctctactgaaaaaatacaaaaattagccaggtgtggtggcatgcatctgtagtcccagctactcaggaggctgagtcaggagaatcacttgaacccaggaggcagaggttgcagtgagccgagatcaacatcactgcgctccagcctgggcaacagagcgagactccatctcgaaaaaaaaaaaagaagagatggtgaaaacacagacccagcaatctcccttcatcaagcctacaggttttttcccccaaacaagtagaaaatgacatacgtgcaagttatccctgaagcatcctcataagaaaagataataaacaataacccaaggatcccttcacagggaaccagttaagtatacaatggaatggaacgaaggactgtgcaggaataaaaaaaagaacaaggaaaagctttatgaattatatggtgttcatatgttatgttacattacaaccacgttatattatgttaaaaccagtatcagggcgggcgtggtggttcacgcctgtaatcccagcactttgggaggccaaggcgtgcggatcacctgagggtcaggagttcaagaccagcctggccaacacagtgaaaccccgtc

SEQ ID NO: 34226 - DNA, 732 bp, Homo sapiens
tagaacaaattccccacaattactgagggaccactgtactcacatatactatataatttttttttttgccacacttatacaaaaactttgctagggaagggataagattagctgtttaatgttacaaggtctagaatatttactctgtttatctgctactacyaacatgtgcactgatgaaagcatccttatctatatattggtaaacaagcaatttgggtttattactaacagtgaatatgacacaaggaactttaaaacaattatgttgtagattgtagattgttttactgtcaccatgctatataaattaaaacttgatagactgcaagagctgcataaagtatatgtataaaaaatatagatatagatatatataaaaccaccttcatatactatttcagataattaccaattgcagtacaatgtctaacaaatgacagactgtttttaatatttcttcagatttgtgaatttataaaaaaatattcagttttttgatggcttttatgtttccatgccacaggaaagctatatacatgtaatgccacagggcattacatgtatatagcttcaaggtaaattttttcccagatttctgaatcatagtctactcctgtaaaccagtcatgttctctgtaagtaatgctttatcttcctgtaagagccaaggtgaggatcttaccactgggtatactggagtaaacaaccagttgtgtgctattgttatat

SEQ ID NO: 34227 - DNA, 1443 bp, Homo sapiens
aggaaattagatattttgttcaaagatgtttgttctttttttgtgtggagggaggataatacagggtcttactctgttgatcaagctgaagcacagttgtgcaatcacagctcactgcagccccaacttcccaggctcaagtgatcctcccaccttagcctcccaagtagctggggctacaagcacatgccaccacacccagataattttttgtattttttgtatagacagggttttgccatgttacccaggctggtctcaaactcatgggctcaaatgatccacctgcctcggcctcccaaagtgcagggattacaggcgtgagccatcatgcccagatcaaggatatttatacttacatattgaaatatgtagccattttaccattaaaattgcagtagttcacgtccgtaatccccacactctgggaggctgaggtgggtggatcatctgaggtcaggaattcgagaccagcctggccaaaatggtgaaaccccgtctctactaaaaatacaaaaattagctgggcatgatggtgggtgcctgtaatcccacctactcaggaggctgaggcaggagaattgcttgaacccaaaaggcagaggttgcagttagycaagactgtgccattagactcctgcccgggtgacaagagctaaactcagtctcaaaaaacaaaaaaaagttttaaaatatcgttttcccttcattccaagtctgatccctaaatattgatttgtaaacatattttagaacagtttgctccatagaagatgcaaagaggctattgagaagagatggatttattaatctataaatgggtctattctgattatattaacgttacctgcattcagataaaaatatttagccctgaaaaaaagacattgtcttgcaaaaaatagaacaatgcatttttttagaaaatacatttattctggcatgataattttgccagaattctctataaactttctcctaaatgcgaaggaagcactatgtcacagtaagactgcggatatctctgttcatcttgtagctacaagtaggagcatgactgcaagaatcaagtgaactgtcacctacttttgaatgcagatggaattgcacatacatagtatgcatatgtagccttctttcttagcaaggaacggagccgatctagctcactagccaagttagaattttttgtagtgagatatatttcactccaaaataaaaataataactgtcttcttattagcgatgattcagatcataatcaatatgaagctcacaagttgttgcagaataataaaagtcatttgattagatgcagtcacttatcactccatgtgcatcaattttagctcctttcctggtagtggttttctatacgacacagaataatgccaggaaaacgtgaagcccctaaggggacaggaagccaaaggcaattgtttt

SEQ ID NO: 34228 - DNA, 990 bp, Homo sapiens
cataaaaatgttagttgaggctcaagagaagtaggccacaggccaggtttggcccaagaaccaacagtttgcagacccttgccctaaaggattgtgtttgtgttcttgcctcctagacgttggtcacagataatgatcattcaaagttcaattatataaagtttaattaatatatacctgtgtatatggacatataaaggatgtaacatatatctatagagatttttagactttttgacttgcaaattttgtttattttcatacagctaacatcttatttcagagttcaaagtgctttgcatgccataggataattgccttttttatttttttttagacatatggcctccataagtgtttttttgaaggttttccaaattatattctaacttggaaaagctatgttatgtcttcacattcatttcagatacattttcatgatggaaattctgcaaaaatgtcagtgttttgaaacatccttaatgatctttaactttttttcaattttcgtctttgtaaaatgtcccctcttttgtactgcccgcaaatcatcactcatcakggagctgggatgagatatgtacagttagctgtcacaagctggtacaagccagctccagcacaccactggcctacgtcagtgtttatgaccacgggcaaaaaataaataaacaaaagctattaaggactatcttattcacagtatttgtagctggtctgcagctgtcattttcaatgtttctgttcagaccacagcccagaaataactagccttgtgtgctgagtgatgatattagtagatgtttttaagcatggcacgtaaacactgggtttggtggaatcaatgaggcatttagtaacacttttctccaatgggtagtaaggactttgatcttttagagcagttgtcccaatatttttggcaccagggaccggtttcatggaaggcagtttttctatggataggttagagggatggtttcaggagga

SEQ ID NO: 34229 - DNA, 639 bp, Homo sapiens
tcttttatttccttgttgatcttactcttagttgttctatccatcattgaaaatggggcattggccaggcgtggtggctcacgcctgtaatcccagcactttgggaggccaagaccagcagatcacttgaggtcaggggttcgagaccagcgtggctaacatggagaactcctgtctctactaaaaatacaaaaattagtcaggtgtggcagtgcgtgcccgcctatagtcccatctacttgggaggctgaggcaggggaattgcttgaaccctggagtcagagtttgcagtgagctgagatcatgccactgcgctccagtctgggtgacagagtgagactcraaaaagaaaaaaaaaaaaaaaaaaaaaaagaaagaaaatgagacattggatttgtaagtttctgacaggttcattttgcctgctgcccagatagagccgatttatgaggacagggaaattgcaatagagaaagagtttaatacatgtagaactggctaaacaagagactggagttttattattactcaaatcagcctccacaaaaatttggaggctaggtcttttcaaagatagtttggtgggcaggggtttgtgtactaagaaactaaatgtttcttgtgtactaagtcagcttc

SEQ ID NO: 34230 - DNA, 600 bp, Homo sapiens
gaaaactaattatggaacattccagcattcttcataaaaagtgagcttggggagtttatcgggtcctggggagtcataagaaaaggatcaatccaagaggtggagcagaaaacaatcaggggacttggagtttgccagctggaaaaaaagttaaaagcggccaaagagccctggaarataatagaagctatattcagattcccaagttgtattctgagtttttgctccttggaatatccatagtctccatttcagttccaaagtaccccttctcctaagaactcaagaggctacccaatttttctcacaatgtccatacagagaagggggatgaaaggccaggtattgttatttcaatgtcaggcacacacagaaactcaggcataggaaagtaaactgctcaggatgacaaagtgttgttaggtgatataggcttcaattttattttttactcttcaaaaacttttatttggtcaagtgatatttgagagagatataaaaaaaatcttctttataaaaatgtcagtgccttccaggccatgtgtattcttccctgttttaggaattatcaggaactattgggaacaactgaggcctctt

SEQ ID NO: 34231 - DNA, 538 bp, Homo sapiens
ttatagccatagatgtaagtctttgggatttattttctgggtttcaaggataaatttctgcttttccaaattgaagttcatcagggagtagagaaaaaatgaattactctatttttttttgaaaaaggcatgtttttcatacgacaccaataatacaaataaaggccacttttatttgtatcagttattcaagtgacaccctcagcaatgtatttgatgtctgaataatctgaacccttcttttctgggcagaaacattttattccaaagacatctaaatatttgaaagaaataccaaacatttgccactgttcttaatgacaattaattttaaatagggcttctctagtacagtacaaataaagactaagaaaagaaacaagttgggatgtgaaactggaagcctctgggagtaaccattaccacgacatttaaattgtgactgaaaatgtgcaaataacaggttctctttaactgatawgaaatgatttttaatttaaaaaaattttatataaatttgtttttaatgtttaaaaat

SEQ ID NO: 34232 - DNA, 560 bp, Homo sapiens
gaacaccaaatgcttgttcgctgagccaaccccatcagttccactgattccccaaacctactgggttttcctaactcagcttgaggttacaggggggcagctgaggatggtgagcaggacccagtggactgaccccactgctgtcccagcctcctcacatacagttggtctctttggtgataacacttagcttcctctcagtaggttaaaaaaaaaaaaaaaaaaaaaaaaagaatgaagaacaggactacttggccgacatactagctaagagaaacyttggaggcagctggagggctactgcccatttgacaggggccatgcttccaaacacaaatattaaccttggcaatctgactgtcttctgcttcatgacttacacagtgctttttggggtcatgtttaagttgggaaagagagaggtgaaggaaaaaagatacaaagtctcctggaacaactgagcttttgatttctagagagtatttaactggtaccagtgttcaaaatccaccctggttaaaggccactacttttctgcttttcttgggcagaatggattg

SEQ ID NO: 34233 - DNA, 1192 bp, Homo sapiens
ttcctggccccttcctggctctggtggccggcagtccctggtgttgcttggtgtgtagaggcatcgccacgatttttgccttgttgtcccatgacggccttctctctgcgggtctcagtcctcacatggcattctcttcttcttataagaacaccagttatgctggactagggcccaccctaatgatctcatcttaactcagttacctctgcagagaccctattcctactaaggtcacattcgcaggttctgaggggtaggacttcagcgtatcttttgtggggacacaattcaacccagaataccctttgtgttgggtcaagttctctagaagtagagcctgaggtgagattcttgttcaagcaatggattaaagatgtaccttccagagaaggagggtgagagaatcaggggagggcaggggcaaagggaagcaaggatgtggtctcagaggaaggttagcctcagcctgrctccacagggtctctgaagaatgaattctgccatacagtcagtccatttttaggcctgtgagccagcttcctacacactcatgtcactctgtcgttggctaggagcctccatgggtgtcatctcccaagcacggcggtcccatctgctgaggacagttatctggagaaaaggaagacattctctgctgtgagaagacaattctcaccgcagctgggcatctgtgtggggcatggatgtcagccccagcacttccagcagctggtttgcagagggggccacagacgtgcctgctgccttcccgcccctccccctccactgcccatcgtctcttaagtttatacattgaatgattaaatgttacttttggataaatcagattattgccaacttcccacttaataaatacagagcagtaagcaatattttacattaagcattaagtttatacagttgatccttgaacaacgtgaacttgaactgcatcggtccacttatatgcagattttcttctgtttctgccgctcctgagacaccccccacttcctcattttcagcttattcaatgtgaagacattgcacaaggatgaagatcttagtgatgatccacttccacttcatgaataataaatatattttctcttccttatgattttcttttctttttaagaagtgcagtgatgcaattatggctcactgtagcctcaaacttctgatcaag

SEQ ID NO: 34234 - DNA, 1192 bp, Homo sapiens
ttcctggccccttcctggctctggtggccggcagtccctggtgttgcttggtgtgtagaggcatcgccacgatttttgccttgttgtcccatgacggccttctctctgcgggtctcagtcctcacatggcattctcttcttcttataagaacaccagttatgctggactagggcccaccctaatgatctcatcttaactcagttacctctgcagagaccctattcctactaaggtcacattcgcaggttctgaggggtaggacttcagcgtatcttttgtggggacacaattcaacccagaataccctttgtgttgggtcaagttctctagaagtagagcctgaggtgagattcttgttcaagcaatggattaaagatgtaccttccagagaaggagggtgagagaatcaggggagggcaggggcaaagggaagcaaggatgtggtctcagaggaaggttagcctcagcctggctccacagggtctctgaagaatgaattctgccatacagtcagtccatttttaggcctgtgagccagcttcctacacactcatgtcactctgtcgttggctaggagcctccatgggtgtcatctcccaagcacrgcggtcccatctgctgaggacagttatctggagaaaaggaagacattctctgctgtgagaagacaattctcaccgcagctgggcatctgtgtggggcatggatgtcagccccagcacttccagcagctggtttgcagagggggccacagacgtgcctgctgccttcccgcccctccccctccactgcccatcgtctcttaagtttatacattgaatgattaaatgttacttttggataaatcagattattgccaacttcccacttaataaatacagagcagtaagcaatattttacattaagcattaagtttatacagttgatccttgaacaacgtgaacttgaactgcatcggtccacttatatgcagattttcttctgtttctgccgctcctgagacaccccccacttcctcattttcagcttattcaatgtgaagacattgcacaaggatgaagatcttagtgatgatccacttccacttcatgaataataaatatattttctcttccttatgattttcttttctttttaagaagtgcagtgatgcaattatggctcactgtagcctcaaacttctgatcaag

SEQ ID NO: 34235 - DNA, 919 bp, Homo sapiens
aaaggcattgggagattgggatggtggagtggattagtcactttagatctacttatyccaactgggagcatccagaagatatacctttgaccaatgccttgcaaaatagatttgtgagggcagcacctgcatctctgaagagccctgtaattgctcttctcagatctcacagtgggaaactacaacagcccaatccaggtaggactacaaattgcccagactctttaggaatgaaggtttggcttactccacaaggaaaaaaaaaacacacacacacaacctgctgaggcacttgctaaaggcaaagggaatacagaatgggtagaagaatgtagtcatcaataccagctatgaccacaagaccagaagcgtgaccagacctttttatatatataaaggggagtttatatgtgtgtgtgtgtgtatatgtgtgtgtgtatatgtgtgtatgtatatgtgtatatatatatgtgtgtgtgtgtgtgtgtatatatacataaaaatatatatagatatatatcctattagttctgtccctctagaaaacgctaatacagttggggaagaaaacctgacaccaagtgcagggccagtgttgggcagggggagccttggactgtggtgctgactgaggaaggctccgccaacccagagattgcccattagaggcgtccaatgctgggtgcactgagttgggctgcagcaccagccaagtgcaggccgtggcagggatggcctgcaaagagtttgtctgagtaggaaagcaggggcagatcctggtggcagccagtgaaggctgcagaaacccgccttccttgcagctgggcaagttctcccttgaggggaagagaggtattccacagtgctccccaccactgctccctccaaatcgccactcaaaccaattcctgctctggat

SEQ ID NO: 34236 - DNA, 919 bp, Homo sapiens
aaaggcattgggagattgggatggtggagtggattagtcactttagatctacttattccaactgggagcatccagaagatatacctttgaccaatgccttgcaaaatagatttgtgagggcagcacctgcatctctgaagagccctgtaattgctcttctcagatctcacagtgggaaactacaacagcccaatccaggtaggactacaaattgcccagactctttaggaatgaaggtttggcttactccacaaggaaaaaaaaaacacacacacacaacctgctgaggcacttgctaaaggcaaagggaatacagaatgggtagaagaatgtagtcatcaataccagctatgaccacaagaccagaagcgtgaccagacctttttatatatataaaggggagtttatatgtgtgtgtgtgtgtatrtgtgtgtgtgtatatgtgtgtatgtatatgtgtatatatatatgtgtgtgtgtgtgtgtgtatatatacataaaaatatatatagatatatatcctattagttctgtccctctagaaaacgctaatacagttggggaagaaaacctgacaccaagtgcagggccagtgttgggcagggggagccttggactgtggtgctgactgaggaaggctccgccaacccagagattgcccattagaggcgtccaatgctgggtgcactgagttgggctgcagcaccagccaagtgcaggccgtggcagggatggcctgcaaagagtttgtctgagtaggaaagcaggggcagatcctggtggcagccagtgaaggctgcagaaacccgccttccttgcagctgggcaagttctcccttgaggggaagagaggtattccacagtgctccccaccactgctccctccaaatcgccactcaaaccaattcctgctctggat

SEQ ID NO: 34237 - DNA, 919 bp, Homo sapiens
aaaggcattgggagattgggatggtggagtggattagtcactttagatctacttattccaactgggagcatccagaagatatacctttgaccaatgccttgcaaaatagatttgtgagggcagcacctgcatctctgaagagccctgtaattgctcttctcagatctcacagtgggaaactacaacagcccaatccaggtaggactacaaattgcccagactctttaggaatgaaggtttggcttactccacaaggaaaaaaaaaacacacacacacaacctgctgaggcacttgctaaaggcaaagggaatacagaatgggtagaagaatgtagtcatcaataccagctatgaccacaagaccagaagcgtgaccagacctttttatatatataaaggggagtttatatgtgtgtgtgtgtgtatatgtgtgtgtgtatatgtgtgtatgtatatgtgtatatatatatgtgtgtgtgtgtgtgtgtatatatacataaaaatatatatagatatatatcctattagttctgtccctctagaaaacgctaatacagttggggaagaaaacctgacaccaagtgcagggccagtgttgggcagggggagccttggactgtggtgctgactgaggaaggctccgccaacccagagattgcccattagaggsgtccaatgctgggtgcactgagttgggctgcagcaccagccaagtgcaggccgtggcagggatggcctgcaaagagtttgtctgagtaggaaagcaggggcagatcctggtggcagccagtgaaggctgcagaaacccgccttccttgcagctgggcaagttctcccttgaggggaagagaggtattccacagtgctccccaccactgctccctccaaatcgccactcaaaccaattcctgctctggat

SEQ ID NO: 34238 - DNA, 876 bp, Homo sapiens
tgcacctctaacaagccccaagatcagactgagagttaccctggcccccaggggctccaggggcagaggtgactgtggggacccatgcatgccaggggcacatccaggtgttactggtggaaggtgtccaggttcttggcgtcttgaacaaataattggacaaaacgcacaaagtgaggaaagcaaaagcacagatttattgaaaatgatagtacactccacagtgtgggagcaggccggagcataggggctcatgagcccyggttacagaattttctggggtttcaatactctctagacgttttccactggttacttggtatatgttctatgtatatgaagacaatgaagataagttacaaagtcatttactcagaatgtgcccagaatatgtaaatggagaggatgttatttggtgtgtgcggtctatgtaaatgcagaggacgaatatgaagttacaaagtgtaaatggagcggatgtcacttggcgtgtgtggtctatgtaaatggagaggatgtcactgtgtgtgcggtttatgtaaatggagaggatgaatgtgaagttacaaagtgtaaacggtgtaaatggagaggatgaagtgaggttacaaagccatttatattccatttgattttgttctaggaagtcagcatggatcagccttacgttcatggcctccaggccctattctcctgcctcacagggaccggccaggatctctatccttacagcacgttggaatgtatatgctcctctccccacatcgccttagggagcaggcaggtgtcaggggcagcacaaggacggccaacaggacaggtgcataagtaagactgatacaatttgagggctcagctctgagaatactctaaaca

SEQ ID NO: 34239 - DNA, 876 bp, Homo sapiens
tgcacctctaacaagccccaagatcagactgagagttaccctggcccccaggggctccaggggcagaggtgactgtggggacccatgcatgccaggggcacatccaggtgttactggtggaaggtgtccaggttcttggcgtcttgaacaaataattggacaaaacgcacaaagtgaggaaagcaaaagcacagatttattgaaaatgatagtacactccacagtgtgggagcaggccggagcataggggctcatgagccctggttacagaattttytggggtttcaatactctctagacgttttccactggttacttggtatatgttctatgtatatgaagacaatgaagataagttacaaagtcatttactcagaatgtgcccagaatatgtaaatggagaggatgttatttggtgtgtgcggtctatgtaaatgcagaggacgaatatgaagttacaaagtgtaaatggagcggatgtcacttggcgtgtgtggtctatgtaaatggagaggatgtcactgtgtgtgcggtttatgtaaatggagaggatgaatgtgaagttacaaagtgtaaacggtgtaaatggagaggatgaagtgaggttacaaagccatttatattccatttgattttgttctaggaagtcagcatggatcagccttacgttcatggcctccaggccctattctcctgcctcacagggaccggccaggatctctatccttacagcacgttggaatgtatatgctcctctccccacatcgccttagggagcaggcaggtgtcaggggcagcacaaggacggccaacaggacaggtgcataagtaagactgatacaatttgagggctcagctctgagaatactctaaaca

SEQ ID NO: 34240 - DNA, 876 bp, Homo sapiens
tgcacctctaacaagccccaagatcagactgagagttaccctggcccccaggggctccaggggcagaggtgactgtggggacccatgcatgccaggggcacatccaggtgttactggtggaaggtgtccaggttcttggcgtcttgaacaaataattggacaaaacgcacaaagtgaggaaagcaaaagcacagatttattgaaaatgatagtacactccacagtgtgggagcaggccggagcataggggctcatgagccctggttacagaattttctggggtttcaatactctctagacgttttccactggttacttggtatatgttctatgtatatgaagacaatgaagataagttacaaagtcatttactcagaatgtgcccagaatatgtaaatggagaggatgttatttggtgtgtgcggtctatgtaaatgcagaggacraatatgaagttacaaagtgtaaatggagcggatgtcacttggcgtgtgtggtctatgtaaatggagaggatgtcactgtgtgtgcggtttatgtaaatggagaggatgaatgtgaagttacaaagtgtaaacggtgtaaatggagaggatgaagtgaggttacaaagccatttatattccatttgattttgttctaggaagtcagcatggatcagccttacgttcatggcctccaggccctattctcctgcctcacagggaccggccaggatctctatccttacagcacgttggaatgtatatgctcctctccccacatcgccttagggagcaggcaggtgtcaggggcagcacaaggacggccaacaggacaggtgcataagtaagactgatacaatttgagggctcagctctgagaatactctaaaca

SEQ ID NO: 34241 - DNA, 876 bp, Homo sapiens
tgcacctctaacaagccccaagatcagactgagagttaccctggcccccaggggctccaggggcagaggtgactgtggggacccatgcatgccaggggcacatccaggtgttactggtggaaggtgtccaggttcttggcgtcttgaacaaataattggacaaaacgcacaaagtgaggaaagcaaaagcacagatttattgaaaatgatagtacactccacagtgtgggagcaggccggagcataggggctcatgagccctggttacagaattttctggggtttcaatactctctagacgttttccactggttacttggtatatgttctatgtatatgaagacaatgaagataagttacaaagtcatttactcagaatgtgcccagaatatgtaaatggagaggatgttatttggtgtgtgcggtctatgtaaatgcagaggacgaatatgaagttacaaagtgtaaatggagcggatgtcacttggcgtgtgtggtctatgtaaatggagaggatgtcactgtgtgtgcggtttatgtaaatggagaggatgaatgtgaagttacaaagtgtaaacggtgtaaatggagaggatgaagtgaggttacaaagccatttatattccatttgattttgttctaggaagtcagcatggatcagccttaygttcatggcctccaggccctattctcctgcctcacagggaccggccaggatctctatccttacagcacgttggaatgtatatgctcctctccccacatcgccttagggagcaggcaggtgtcaggggcagcacaaggacggccaacaggacaggtgcataagtaagactgatacaatttgagggctcagctctgagaatactctaaaca

SEQ ID NO: 34242 - DNA, 549 bp, Homo sapiens
cacaatggaaggagcaaataaggcttccttgaacctctttcataagtgcactatccccattcatgagggctctgctctcaggactgaatcacttccaaaaagtcccacttctgaatactattgcattaaggattaggtttcaacatatgaattttaaatgtttgggaggacacagacatgtataccatagcaatcaacttatctttctctagcttcataagatagaaatttatgccgttgacttaatttttttctaatataaaacatttaaaactrtcaatgtaaatttaaaagtagtcaaaagattaatgacagatggtgaaagtcttagtagcctgaacaacagataaagcagtatatccttacatgcaaaaatatcttataaaatcaatctgaaaaataaaacacccaataaaaaggacaaggatatcaacaagtagctcactaaaaagaagtttgaatatgaaaaaatgttcaacttgcaaataattaaagcaataaaatgaaaatagattccctttttccccctgttagaatggcaaagatttg

SEQ ID NO: 34243 - DNA, 549 bp, Homo sapiens
cacaatggaaggagcaaataaggcttccttgaacctctttcataagtgcactatccccattcatgagggctctgctctcaggactgaatcacttccaaaaagtcccacttctgaatactattgcattaaggattaggtttcaacatatgaattttaaatgtttgggaggacacagacatgtataccatagcaatcaacttatctttctctagcttcataagatagaaatttatgccgttgacttaatttttttctaatataaaacatttaaaactatcaatgtaaatttaaaagtagtcaaaagaktaatgacagatggtgaaagtcttagtagcctgaacaacagataaagcagtatatccttacatgcaaaaatatcttataaaatcaatctgaaaaataaaacacccaataaaaaggacaaggatatcaacaagtagctcactaaaaagaagtttgaatatgaaaaaatgttcaacttgcaaataattaaagcaataaaatgaaaatagattccctttttccccctgttagaatggcaaagatttg

SEQ ID NO: 34244 - DNA, 540 bp, Homo sapiens
agaaagattgagttatatctcatgataggtaatgcttaaggccaagcttcgtgtttaaaattctttattatctctaatagtttataaaataatttcccaactgtaagaacaagagagaaataaatgtattatatttagaatacatcaaaatacatctactgatrtgacagtacatttaactaaaaaattgcaaaacagatttgtgttttttaatttcagactttatatgaacactatagtggtggtgaaagtcataattcttcatcctccaagacttttgaaaaaaaaaggggaaaaaaatgatttgcagttattcgtaatgtcagataccacctataaaatatattggactgttatactcttgaatccctgtggaaatctacatttgaagacaacatcactctgaagtgttatcagcaaaaaaaattcagtagattatctttaaaagaaaactgtaaaaatagcaaccacttatggcactgtatatattgtagacttgttttctctgttttatgctcttgtgtaatctacttgacatca

SEQ ID NO: 34245 - DNA, 540 bp, Homo sapiens
agaaagattgagttatatctcatgataggtaatgcttaaggccaagcttcgtgtttaaaattctttattatctctaatagtttataaaataatttcccaactgtaagaacaagagagaaataaatgtattatatttagaatacatcaaaatacatctactgatgtgacagtacatttaactaaaaaattgcaaaacagatttgtgttttttaatttcagactttatatgaacactatagtggtggtgaaagtcataattcttcatcctccaagacttttgaaaaaaaaaggggaaaaaaatgatttgcagttattcgtaatgtcagataccacctataaaatatattggactgttatactcttgaatccctgtggaaatctacatttgaagacaacatcactctgaagtgttatcagcaaaaaaaattcagtagattatctttaaaagaaaactgtaaaaatagcaaccacttatggcactgtatatatygtagacttgttttctctgttttatgctcttgtgtaatctacttgacatca

SEQ ID NO: 34246 - DNA, 2906 bp, Homo sapiens
gtgatgtgttagaatgatacaaaagacataaaactaggtccccccacccccattgaggaggaagaggttgacatcagtcatacttgcagtcaccctaatgcccaactcagtgtctgcattcaagaagttctagtatagtagtgaggatagtaaggatacttagcccacggtcatcagaaagggacaaatattctggggcttgtaggacgagaaaggggatcagagataacagtcacttggtcagatgataccgtatattttaaaatgcttcttgcaaaattatagcttattgctatgagttcatattattcatgattttccctcttggctgtaaacttgtgtgctatagctgtgtctaagccttaaacatcctagatggttttttcttaattgtgtcattattcatagtttttttgtgctaaggactggtcattgtttactgccaaggagagggtccttgaaagagaaagggaaagtactgcccaaaccttcatatgtggcattagaaggacttggccttttgtcataatttgatgcatagtgaccttaaaattaagggggacctcaggtgctgcacctgtgcaatgcagaaagcatggttacgtccccacctgcctattgggctgtgtggtcaagctccatcttgactcaagccttttctcttcctgggctcttctccatctgaaaatgatgtagggaagggcatgcccctgacttccagggaggtgacattaggttccctttctttccctctctctccaggtgccaagctctcctgatgaaatgtgttctgccccactgggctccagggacagtgtctggtgctgttgaagcccttattcgaactttccagaatggatagtcccccaaagctgactggagagaccctcatcgttcatcacatccccctggtgcactgccaagtcccagacaggcagtgctgtggaggggcaggtggaggtggtgggagcacaagacctaatcccttctgcccacctgagctgggcatcacccagcccgatcaagacctaggacaagctgactccctgctattcagcagcctgcactctrctccaggaggaactgcacggtctatagacagcaccaagagtaggagtcgggatggaagaggccctggagcccccaaacgacacaaccccttcttgctgcaggagggtgtgggtgagccaggacttggtgacctgtatgatgacagcattggtgacagtgccacccagcagtccttccacctgcatggcactggccagcccaactttcatctatcctctttccagctgccaccatctggccccagagtgggcaggccatgggggacaacacgcagtcgggctggagtggtggaagggcaggaacaggagccagtgatgaccttggatactcagcagtgcggcaccagccactgctgccggccagagctggaagcagagactatggagctggatgagtgtgggggacctggtgggagtggcagtgggggtggagccagcgatacctctggcttttcctttgaccaggaatggaagctcagttcagatgaatccccaaggaaccctggatgctccggctcaggggaccagcactgccgctgcagtagcacatccagtcagtccgaggcagctgaccagtccatgggctatgtgagcgactcctcctgcaacagttcagatggtgtgctggtcaccttcagcaccctctacaacaagatgcatggcaccccccgtgccaatctcaactctgccccacagtcctgcagcgactcttccttctgcagccactcagaccctggcgccttctatctggatctgcagccctccccatttgagtctaagatgtcttatgagtcccatcaccctgaaagtggaggaagggaagggggctatggttgccctcatgcctcttctcctgagcttgatgccaactgcaactcctaccgcccacactgtgagccgtgcccagcagtggctgacctcacagcctgcttccaaagccaggcccgtcttgttgtggccacacaaaattactataaacttgtcacctgtgacctatcttcccaatcatccccaagccctgctggctcttccatcactagctgctctgaggaacacaccaagataagtcccccaccaggccctggcccagacccaggccccagccagccctctgagtattacctattccagaagccagaagtccagccagaggaacaagaagcagtgagttcctccacccaagcagcagctgctgtgggccccactgtgcttgagggacaagtatacacgaatacttcaccccccaacctcagcactggacgtcagcgctcccgcagctatgatcgcagcctgcagcgcagccctcctgtccgcctgggctcgctggaacgtatgttgagttgcccagtgcgcttgagtgagggccctgcagccatggccgggcctggctccccacccaggagggtcacctcctttgccgagctggccaagggccggaagaaaactggaggctctggctcgcccccacttcgtgtgagtgttggggactcctcccaggagttctcacccatccaagaagcccagcaagatcggggggccccactggatgagggcacttgctgtagccatagcctgccacccatgcctttggggccaggcatggacctacttggcccagacccaagtccaccctggtccacccaggtctgtcagggaccccactccagtgagatgcctcctgctggcctcagagctactgggcaaggccccctggctcagctgatggatccagggcctgctctcccagggagcccagccaacagccatacccagagggatgcaagagctagagctgacggtaaggagcctaagggttagcaaatatgtggctattca

SEQ ID NO: 34247 - DNA, 631 bp, Homo sapiens
ttatatattatcttcttctggattgtagaattctgagagggaagaaagcaggtctaactgccttctgccacaagttgttccaaggctccccaccttgtccctgtgccctctactaagactgcatttgaagttacttcttcactggggctggtggggtctggcttctcagatactattcaccctacaggatctaccggctgccgtatcctacttcccctttctgtgtcacctgaacacttcaaaacctagactgtacatactgttacgaatagctgatttttaaatactttatacataatacataaattcatagtatttatgaatagtaatgtttgagcaccatgttaaacctaacatcatgttaacatagtaggcactatttattgcctggcacagagtaagcatttcataatgttagcagcaaactgctgggctctgtgttgagcattttgaattctttaattcattttatcctgtttacctgatgaggaatgagaaattagagtccccaagacaaaatctagttaagattgtatggtaagtggcagaactgatcggaaccttctagrgtccctgttcttagtccctatactgcactgctcctgggactatcacatgtaaatagacttca

SEQ ID NO: 34248 - DNA, 456 bp, Homo sapiens
  misc_feature (1)...(456): n = A,T,C or G
acnnnnnnnnnnnnnnnnnnnnnnnnnnnnnnnnnnnnnnnnnnnnnnnnnnnnnnnnnnnnnnnnnnnnnnnnnnnnnnnnnnnnnnnnnnnnnnnnnnnnttctttttgagatgcccagcttcatgctgcaaagcatccctgctaggggaaccagtctacctgaaaatgattccattgttgttctaactaactatatgttcttctaaacaatgtaaacacatatttcagaggtaacccctttagatcagtgcaggtccatcccagagaaaactcttgggcctccgcaaagggctttctattcaggaattcaaatacacaygagagtgtcaacctgtctctcttgagtctcctccactacagtttctattaccagattaaaatgttaagctgaagcttcttgagaagcaagggtattctaggtgagaatgtgttcaagtcttgcagattggatag

SEQ ID NO: 34249 - DNA, 563 bp, Homo sapiens
ccctgactagctgtgtagcaaataaataaactttacctcagttctctcatctgtaaaattagatattaatgacagtacctgtctcattagactattaagaggataaataagattgcacatgtaaagcctttatcacagtgtctggtacatgttattaggcaatgtgatacatatatgagtcaggaatgaatggattcattcgtttatttttggggtaagaacataaaggcatgaattatttttattggccatttttgttttgttttgttttactgtgattaaaaaataattgaatggctactgttcagagatcatgacttcctttcccttttagctttaactctgtgtcagccagcagaattttcctgacaggtattccagcagacttcttccaagacaccgtttctgaaactgcatgyccatacgtggtcttactttcccttctttcccttcagatgttgtcagtatttttctttgtgaagagagaaaagcattgatttctcaagtgtattaattctccaagtagttttattttataggagacacttaggatttgcaaggaa

SEQ ID NO: 34250 - DNA, 650 bp, Homo sapiens
gcaggcacagcatgaatttaatgtctcttggggcaaattttgccaacgggagaaaggagatgggaaaaagctggtagataaattccttgcccttcaaagattccaagaggcctgggtacggtggctcatgtctgtaatcccagcactttgggaggccgaggcgggtggatcacttgaggtcaggagttcgagaccagcctggctaacatgrtgaaaccctgtctccactaaaaatacaaaaattagccaggcgtggtggctcgcgcctgtaatcccaactactcgggaggctgaggcaggagaattgcttcaatccgagaggcagaggcggaggttgcagtgagctgagatcacaccactgcactccagcctgggcaacacagtgagactccatctcaataaaaaacatagcaaaacaaacaaaacaaaaccaaaaaaacccacaaagattccaaggggcagggattccaactagcctctctggtgatatcccacgttaccaagaaacttgttagatctctttcataggtgtggccagctcagtaaacacacaatcaatcttgtgttactattttctcctttcctgcctcacctgccttttcccctcactcttacctccctgggactgaatcgctaacaaagaattagca

SEQ ID NO: 34251 - DNA, 775 bp, Homo sapiens
acaattattaagcctattaatactagtttgaagactgacaggaaagatgctatgtgtctatacattggttgagggaggtaattctctccttcaatacggatrtctgggtacccctggctagtaacccacatgtactcctcaaacacccgcctataacctcaggaaacacaaatctggaacttgagcagtggccccgtggcgtactgcatctttaatctcgctgggcacgccacccagattggccgaggcctcgctccggaccatcacagacaccgccactctctatgtttttttcagggtaactgtgaaacagcctcaggcagatttttccaggtattccagaaaaagacctcattatcatagaaggtgacagttctatgtgtgttattgcccctgaagaaattccagtgggacaagatgtggaggtggaagacagtaatattggcgatcctgactctgtgtaggcctaggctaaggtgtgtgtgtcttagtttttaacaaaaaagtttaaaaagtaaaaaaaagaattaaaaaatttaaaaaatagaaaaaagcttatagataaggatataaataaaatacttttatacagttgtacaatgtttgtgtatgtaaaaagttatgtacataattgcatgtgctatagttttatatgcctggcagtgcagtaggtttgtttacaccaggatcatcacaaacatgaggaatgtgttgtgctaggatgttatgatgattatgtcataagtaggtaataggaatttttcagctccattat

SEQ ID NO: 34252 - DNA, 775 bp, Homo sapiens
acaattattaagcctattaatactagtttgaagactgacaggaaagatgctatgtgtctatacattggttgagggaggtaattctctccttcaatacggatgtctgggtacccctggctagtaacccacatgtactcctcaaacacccgcctataacctcaggaaacacaaatctggaacttgagcagtggccccgtggcgtactgcatctttaatctcgctgggcacgccacccagattggccgaggcctcgctccggaccatcacagacrccgccactctctatgtttttttcagggtaactgtgaaacagcctcaggcagatttttccaggtattccagaaaaagacctcattatcatagaaggtgacagttctatgtgtgttattgcccctgaagaaattccagtgggacaagatgtggaggtggaagacagtaatattggcgatcctgactctgtgtaggcctaggctaaggtgtgtgtgtcttagtttttaacaaaaaagtttaaaaagtaaaaaaaagaattaaaaaatttaaaaaatagaaaaaagcttatagataaggatataaataaaatacttttatacagttgtacaatgtttgtgtatgtaaaaagttatgtacataattgcatgtgctatagttttatatgcctggcagtgcagtaggtttgtttacaccaggatcatcacaaacatgaggaatgtgttgtgctaggatgttatgatgattatgtcataagtaggtaataggaatttttcagctccattat

SEQ ID NO: 34253 - DNA, 775 bp, Homo sapiens
acaattattaagcctattaatactagtttgaagactgacaggaaagatgctatgtgtctatacattggttgagggaggtaattctctccttcaatacggatgtctgggtacccctggctagtaacccacatgtactcctcaaacacccgcctataacctcaggaaacacaaatctggaacttgagcagtggccccgtggcgtactgcatctttaatctcgctgggcacgccacccagattggccgaggcctcgctccggaccatcacagacaccgccactctctrtgtttttttcagggtaactgtgaaacagcctcaggcagatttttccaggtattccagaaaaagacctcattatcatagaaggtgacagttctatgtgtgttattgcccctgaagaaattccagtgggacaagatgtggaggtggaagacagtaatattggcgatcctgactctgtgtaggcctaggctaaggtgtgtgtgtcttagtttttaacaaaaaagtttaaaaagtaaaaaaaagaattaaaaaatttaaaaaatagaaaaaagcttatagataaggatataaataaaatacttttatacagttgtacaatgtttgtgtatgtaaaaagttatgtacataattgcatgtgctatagttttatatgcctggcagtgcagtaggtttgtttacaccaggatcatcacaaacatgaggaatgtgttgtgctaggatgttatgatgattatgtcataagtaggtaataggaatttttcagctccattat

SEQ ID NO: 34254 - DNA, 781 bp, Homo sapiens
cacttattcccagagaaaggagccaggcagctgcatgtgaaggtgctcccatggacgaggcagtccccaccgtgttcacaggggttgggctggcatggatctaagacacacaggaagaaggcaatgttggtaaggaaaggcaggtgagaagcgcccccctccaaatttttcatcaaatttcagtctcctgccccaaatgagagagtaactactgagccagaaactggggaaaggaggaaaacatatgttgtccctaaacagcaaggaaaactgcagtcacctgaccagagagagggattcaggttagtgagaggagaggcgagaaggaaccamgactgtctcccctcggcctggctttggacggggcctttctcattgagaaactccccttttccctcatcagtgtttttctcctcccagtcttgctgggagtgccacagggtctgtctctgatgctgaaggtatttcacaagcctgaagacctcccctacttccagtgcccaggggtggaggtcaggagtggggaaagaaaacccacccctaatgaaacgcaagctttctgaacatcaggagagaagaccaaaggcaagagggtgacagaagaattggcggcaaggaggaaatgacccagtggccttcatctttcttcaactacttgttcagttagattttgtcatatttcatctgtgcctgtggcttttcatggttgtctgaatggatcttcccttggggaattctttatccttctgttcacacacattgttctttggttcaggaacta

SEQ ID NO: 34255 - DNA, 591 bp, Homo sapiens
gtttaatcctagaagtggagaaaccctcccagatgatactcctgtaaagcaccttcaaatcacatggcagcccatcccaaatggaaaggatctttgtgactttccttgcacagccaccagctggatggcttcttccaccctggctacctggggccactgagctctgctcgttctatccatcttgactgaggcccatgggccctagagaataggaagcctttcttagcagsaatatgattcaaagcctatgtattttatttcttctttggcttcactgagaggtaagcagaccttgttaataggtctggattcaagtcaaaatcctctaacagacatttcattcatccctcgtcacctggaaaagtcacaccataccatctacatcagaatcttccccatttctaaatatctgcaaaagaagtaattcttaatggccttgccaagattagctggtctgactgccaacctgtgggagagatgggagaaattacagaagcaacctgaagggcatttatctataaacatctgttggaaaaacaaaaataaattcttcaaagaacaagaaataactaagcaatgcaatcagctcct

SEQ ID NO: 34256 - DNA, 641 bp, Homo sapiens
ttcaaagtcctgcaggaggaatcatgtgtctctccagctctgcacagtgaggggagtggaaaggagggctcaggctttgcatcttttcacttgggggacgctatgacccggcaaggtagtgttgacatttagcagggtcatgagcacctgattggaagtgaagagatgaagcgaagtccagctttctactcccttgaacttaggwaagccaactgtattatcaagtcttgattttctcatctttgaacagcaggaagaggattgggacctagcacgtctacagggtcctacatggggtctgcccggggtcagatcacactatacttgagtgcctggttgcctcatcctgtggataatatttcttgatgggacttcattagtcaccaagctgaatgaaatcaaagaaaactcatcatttttcttttggtcatggtcaagcattatctacagagtcattttaacagataacattttttgagcctttattatgtaccatgccctgtgctaagcactttacatgcaccatctaacttcatcttcataaaaatctaggaggtgtattgttcactctaagttgagaaacctgaggctgacagagattgagtaacttggccaaggacacatagttactaaagggcagg

SEQ ID NO: 34257 - DNA, 618 bp, Homo sapiens
ttgggtatgggttcttattgaacaagatgttcaaatcttccaattgtttctccatgaacatcatatgttccctttgtgaatgcatctggttctagccataggaaagggccgttcatttcctccttggttctttggccctttgcctgttatcatttaacatgagattgcttgtgcctcaactcttggattttattttattttaattttttaggaaggtcctctcagtttgacatcttctcatctagatgtgctcctatgttcaagtccagggatgagctgcctcaatttccttattgtagcatagtgagaaggaatggaagttgaaaacagtgtgatttcaactacattaaaataaaaataaaacatttatgtagaaaaagacggaaattcaccaacattgaggctaggcctgtcatatgtttgtctgagagaagaaaggagtgaataactgaaaatactaaagtatcaatagtagttgactttggatggtgcaactataggaatttcttttcctcaaccacttttttaaacttccttatgtttttcaaacttagaatgagcccgtatttctttcataaggggaaaaaaaaaccttatcyttgaaatcttatgagaacg

SEQ ID NO: 34258 - DNA, 1064 bp, Homo sapiens
ctgaactaacagggctgttttaccactgccttgctttgttcctccatcccctcagcctggagcactccccagtcacactctctagatcatcttcccaggccaattccttcttcttaggacttgactctgtccttcaaaaacccacactgaccatctcagaccaggccagggtccttccttgtggttctggctgccsttgcacatgcctctttcaaaatctcaagagtggggatgaatgaaaattgtctgcccttgtgtttctccccatgaaaggttacagacatggggactatgcttcatttcctttatgtctgtaaaacccagaacacagcaggagctttatctcccgtgcctggcaaagagatgttcaacatgctttccttccttaactgggtggctgttattttgcagtttaataaactggaaaaacataaatgtttcctgtcaaggactcctgtgttcccatggatagtactggaatcctgaggtcttggaaaatttctctatagaatagggagagcctttccaggattcagaaatactataaatgggtcttttcacactgttgggtatcccttagaaagtgatccttcctccatgttctcttcttatgagcagtatggcacagtgaagtcagaccaacctgtgtccaaatccctgtcctatcacttacgaccctgggcaagtgaaggctcttccaactccctgcctcacatttcctcaccttcaacctagggctgagaatacgatctcctaaggttgtaaatgtggcaaatttattgtaaggtatcaactaacatattactttcccataccctttacattcttcttctcctttttttttttttttttcttttgggacagggtttcattctgtcacccagcctggagtgctgtggtactatcacaactcactgcaacctggaactcctggactcaggcaatccttctgcctcagcctctggaggagctgggtctaaaggcatgagccaccacacccagctatttttaaaaaaatttttagtagagaggctatgttgccaggctggtctagaactgttagg

SEQ ID NO: 34259 - DNA, 723 bp, Homo sapiens
tgttgcccagactagtctcaaactcctgggctcaagcgatcctcctgctttggcctccaaaagtgctgggcttacaggcatgagccaccagacccagcctagagcagcattctaatttctgatgcctgtttgcagctgagctgcatgaggcttcaacgaaggagttggaggtctgaagttccagcgttggctctgctacccctcagctgtgggatttggtgaatcaccttcaacactgacttctctgattcctatcctattaaaatgttttattcatctttgacacatccctcctccccccaagtgcytagcatggtgcctttccttcatcgatacccaataagtgcacattgaataaatgtcagtttctcaaaaataaaactggtgtatgccgtctccttccattctctcattacaaataacatcaagcatttgaacgagagaattacaaactgtgaagcatgtgtgctattataagaaatgcttattaagttctgtatgtggcagtggttataaaaagggaaaagagaagttaccttcttgcagggtttatgttctgtgactttctaaatttttttaaaggctttgggaagaagaaatattattttccttctatctgatgtcattatgactttaataagtatgaatacaagtcagaaagacatgccgctgagtctcaatttaaatttcctggttgtgccaggcagaaagcttcgagctttc

SEQ ID NO: 34260 - DNA, 723 bp, Homo sapiens
tgttgcccagactagtctcaaactcctgggctcaagcgatcctcctgctttggcctccaaaagtgctgggcttacaggcatgagccaccagacccagcctagagcagcattctaatttctgatgcctgtttgcagctgagctgcatgaggcttcaacgaaggagttggaggtctgaagttccagcgttggctctgctacccctcagctgtgggatttggtgaatcaccttcaacactgacttctctgattcctatcctattaaaatgttttattcatctttgacacatccctcctccccccaagtgcctagcatggtgcctttccttcatcgatacccaataagtgcacattgaataaatgtcagtttctcaaaaataaaactggtgtatgccgtctccttccattctctcattacaaataacatcaagcatttgaacgagagaattayaaactgtgaagcatgtgtgctattataagaaatgcttattaagttctgtatgtggcagtggttataaaaagggaaaagagaagttaccttcttgcagggtttatgttctgtgactttctaaatttttttaaaggctttgggaagaagaaatattattttccttctatctgatgtcattatgactttaataagtatgaatacaagtcagaaagacatgccgctgagtctcaatttaaatttcctggttgtgccaggcagaaagcttcgagctttc

SEQ ID NO: 34261 - DNA, 681 bp, Homo sapiens
gtacaacctactggattttgatagcaacattatactcactacataaaaatcatttaatttttttttcctatgctctggtaaagtttaaggaacactggaagtatctagtgtttaaggctaatagctattaaactcaactggacctggagttttttggagggaggggggcagctctgtggcaattttcttgagttcatctatggaaaaaaaaaaaagtctgtttgaactttatatatctctgttaaggtcagttttggtgaattattttcctagaaaattcacttttttaaaattaaaggcttgaatgcagaaaattgacaattgcagctagattttctcacgtatttccagagtgtgtgmaaaatagatgattatttatttgagacagggtctcactttgttggccgggctggagtgcagtgacacatttatggctcactgcagcaatcctcccacctcagcctcctgagcagctggaaccacagacatgcaacaccacacccagctgatttttaaatttttttgtacaggtggagtctccctatgttgtccaggctggtctcaaactcccagactcaagtgatcttcctgcctcggcctcccaaagcgctaggattacaggtgtgtgtcactgagcccaacctatttcttcttttgatgactagtaccttatttattaca

SEQ ID NO: 34262 - DNA, 1233 bp, Homo sapiens
acaggccgggcgtggtggctcatgcctgtaatcccagcactttgggaggccaaggcgggtggatcacctgaggtcaggagttcgagaccagcctggtcaacatggtgaaaccctgwctctactaaaaatacaaaaaatagccaggtgtggtggttcgcgcctgaaatccagctgcttgggaggctgaggcaggaatcgcttgaatccgggaggcgaaggttgcagtgagccaagatcgtgccatttgcgctccagcctgggcaacaagagtgaaactccatctcaaaaaaacagaaacaaacaaataaaaaaactaagagacgaaactgaaataggaataatcaaagtgatttttttttaattacgctttgaaattctgctttaaaattaactttgagtatatgtaaatgataaccagaaaattcttttcaaatagaatgttaaagtagcatattactgttgaaagtggtgtattactgttgaattattttaaagctctgatattaaaatgtccatcatttataaccatttttttatacctcttttatttcagggatggggaaagacaccatagtcataaaagaagaaagcaaaaaatataaatgaagtacttgtacctatattaattatgcttacgccatgataaccaatatacagatatattaattggaattcctttgcataggagaatgtttttatgatctgtttagtgcttattattttttttatgatctgtttagtgcttattattttccagtaaatatgcttcaaaccatgagtacactattaggccctacaactttgttttccttatattttattagatgatttgcttcctataactgatgttgttttgttcgttttgctaatatatgtatctcaaaattctttaagtcaatatttatcatatgtaaattaaacatgaatacattctcatcttataactacatcttataaataaggctaataacccttagaacaccacctgcggttctgtcctcaccccagtggtgactactgtttaccactacactggtgaattgtagtagggaaaaacaatctaaatattgaagaggaatggcctaattaaaatatgatgtagtcataggatagattattgtattggagttaaaagaaataatctagatccatattaacctggattggtctcaaaaacataatgctcagtgaaaatagcaagttgtagaaagttatatacaaattatatatatg

SEQ ID NO: 34263 - DNA, 1233 bp, Homo sapiens
acaggccgggcgtggtggctcatgcctgtaatcccagcactttgggaggccaaggcgggtggatcacctgaggtcaggagttcgagaccagcctggtcaacatggtgaaaccctgactctactaaaaatacaaaaaatagccaggtgtggtggttcgcgcctgaaatccagctgcttgggaggctgaggcaggaatcgcttgaatccgggaggcgaaggttgcagtgagccragatcgtgccatttgcgctccagcctgggcaacaagagtgaaactccatctcaaaaaaacagaaacaaacaaataaaaaaactaagagacgaaactgaaataggaataatcaaagtgatttttttttaattacgctttgaaattctgctttaaaattaactttgagtatatgtaaatgataaccagaaaattcttttcaaatagaatgttaaagtagcatattactgttgaaagtggtgtattactgttgaattattttaaagctctgatattaaaatgtccatcatttataaccatttttttatacctcttttatttcagggatggggaaagacaccatagtcataaaagaagaaagcaaaaaatataaatgaagtacttgtacctatattaattatgcttacgccatgataaccaatatacagatatattaattggaattcctttgcataggagaatgtttttatgatctgtttagtgcttattattttttttatgatctgtttagtgcttattattttccagtaaatatgcttcaaaccatgagtacactattaggccctacaactttgttttccttatattttattagatgatttgcttcctataactgatgttgttttgttcgttttgctaatatatgtatctcaaaattctttaagtcaatatttatcatatgtaaattaaacatgaatacattctcatcttataactacatcttataaataaggctaataacccttagaacaccacctgcggttctgtcctcaccccagtggtgactactgtttaccactacactggtgaattgtagtagggaaaaacaatctaaatattgaagaggaatggcctaattaaaatatgatgtagtcataggatagattattgtattggagttaaaagaaataatctagatccatattaacctggattggtctcaaaaacataatgctcagtgaaaatagcaagttgtagaaagttatatacaaattatatatatg

SEQ ID NO: 34264 - DNA, 1233 bp, Homo sapiens
acaggccgggcgtggtggctcatgcctgtaatcccagcactttgggaggccaaggcgggtggatcacctgaggtcaggagttcgagaccagcctggtcaacatggtgaaaccctgactctactaaaaatacaaaaaatagccaggtgtggtggttcgcgcctgaaatccagctgcttgggaggctgaggcaggaatcgcttgaatccgggaggcgaaggttgcagtgagccaagatcgtgccatttgcgctccagcctgggcaacaagagtgaaactccatctcaaaaaaacagaaacaaacaaataaaaaaactaagagacgaaactgaaataggaataatcaaagtgattttttttwaattacgctttgaaattctgctttaaaattaactttgagtatatgtaaatgataaccagaaaattcttttcaaatagaatgttaaagtagcatattactgttgaaagtggtgtattactgttgaattattttaaagctctgatattaaaatgtccatcatttataaccatttttttatacctcttttatttcagggatggggaaagacaccatagtcataaaagaagaaagcaaaaaatataaatgaagtacttgtacctatattaattatgcttacgccatgataaccaatatacagatatattaattggaattcctttgcataggagaatgtttttatgatctgtttagtgcttattattttttttatgatctgtttagtgcttattattttccagtaaatatgcttcaaaccatgagtacactattaggccctacaactttgttttccttatattttattagatgatttgcttcctataactgatgttgttttgttcgttttgctaatatatgtatctcaaaattctttaagtcaatatttatcatatgtaaattaaacatgaatacattctcatcttataactacatcttataaataaggctaataacccttagaacaccacctgcggttctgtcctcaccccagtggtgactactgtttaccactacactggtgaattgtagtagggaaaaacaatctaaatattgaagaggaatggcctaattaaaatatgatgtagtcataggatagattattgtattggagttaaaagaaataatctagatccatattaacctggattggtctcaaaaacataatgctcagtgaaaatagcaagttgtagaaagttatatacaaattatatatatg

SEQ ID NO: 34265 - DNA, 1233 bp, Homo sapiens
acaggccgggcgtggtggctcatgcctgtaatcccagcactttgggaggccaaggcgggtggatcacctgaggtcaggagttcgagaccagcctggtcaacatggtgaaaccctgactctactaaaaatacaaaaaatagccaggtgtggtggttcgcgcctgaaatccagctgcttgggaggctgaggcaggaatcgcttgaatccgggaggcgaaggttgcagtgagccaagatcgtgccatttgcgctccagcctgggcaacaagagtgaaactccatctcaaaaaaacagaaacaaacaaataaaaaaactaagagacgaaactgaaataggaataatcaaagtgatttttttttaattacgctttgaaattctgctttaaaattaactttgagtatatgtaaatgataaccagaaaattcttttcaaatagaatgttaaagtagcatattactgttgaaagtggtgtattactgttgaattattttaaagctctgatattaaaatgtccatcatttataaccatttttttatacctcttttatttcagggatggggaaagacaccatagtcataaaagaagaaagcaaaaaatataaatgaagtactygtacctatattaattatgcttacgccatgataaccaatatacagatatattaattggaattcctttgcataggagaatgtttttatgatctgtttagtgcttattattttttttatgatctgtttagtgcttattattttccagtaaatatgcttcaaaccatgagtacactattaggccctacaactttgttttccttatattttattagatgatttgcttcctataactgatgttgttttgttcgttttgctaatatatgtatctcaaaattctttaagtcaatatttatcatatgtaaattaaacatgaatacattctcatcttataactacatcttataaataaggctaataacccttagaacaccacctgcggttctgtcctcaccccagtggtgactactgtttaccactacactggtgaattgtagtagggaaaaacaatctaaatattgaagaggaatggcctaattaaaatatgatgtagtcataggatagattattgtattggagttaaaagaaataatctagatccatattaacctggattggtctcaaaaacataatgctcagtgaaaatagcaagttgtagaaagttatatacaaattatatatatg

SEQ ID NO: 34266 - DNA, 1162 bp, Homo sapiens
tcaggaataaagaaggagaagacatggacagaaattcatacttctgccacttgtgagcatttgcaattctaattctctttctttggacaacagctcctttattacaagtattccttacctctttcaaaactctccttgtcattttgatgctagccacatgcttctcttttcactcagttaatgctttcacaatactattttaatgatgtaaagagtcctaaattagtatcagttttaaagataaataaggaaaaaatgtgtgctttagcataatatactacatattgtgtgcagaaacccaagatagcttcaagaaataatagaatttgggctggattttaaataataactacaaacctatgagagctcacaaaaggcacttaatttttgttgaatgaataagttattcaggaagggtaggagaaggtcatttaagtataggaaaagtaggtaagtttcaaagggcaggaagatgccaaagaagataagatgctagggtgtttcaaaagattacgtgggtaaagcaaagggtacaagggaagcgcatgagaaaagaatgttgggtcaatgaggaacatgcctgttaggccatgctaaggaactggaaaatttttcaatgggcaatgggtaaagtcttttaaaaaattaaggcattatgaaagatagttatggaaagataattttagcacagcagagacagaggacttagagactgaacactgaggtcaatagcaacaatttaagcaaagagtaatagggcttgaattaaagcaaacgcaatagagaggacgtgacaaaactgtgagccttttaggagggagaattggcagactttagtgctagttrgatgtgaaagaaatgatgggaaagaaagaagagatgaacaccactctgagttttcagcttgggagatggtggataaggatgccattaaaatatatgtaagagaattaaaagaggaaaacaaaatttaaggaggtgggtaagtttggttttggatttgaggtggcaatgggccattcaaatggaaacgtgtaataggaagtcaaattcataaaaaaggtgtgcgctagaagtcattagcatatcagcaagagtcaaagctgggaaaggtaagagaaactaggataagcatataaaaccaggagatgatcagctaaag

SEQ ID NO: 34267 - DNA, 535 bp, Homo sapiens
ggcataagatgaataaataaataaaaatccatatagtacttagaggtagaaatgccctgaaatatgttactgcttcctaagtgcaacttacagtaaattctgcaggtctgcacaaatcttagcataaaagaaatgcagtttctaataaaaccacacgatggcactgtttactatgtgaaagtgagttttttgctttttttttttaatggctttttttctttgctctaaatcagtatggaaggtgttatggaaaaaggcattaacagatttataaaagggtgatcatcgatagcacactggaccaggtgattgctaaggccactctcaaattacttactcaccatagccaacctggtggctrttcagccctttgactataaaacttctaaaatctctctctaacctccaatatggattaaatgtctcaactggattttaacagcatctgttctatagcacataataatgtaggtaacaggtctgtatagaaattaaattggagggcagctatatacaatgtctaatttatctatga

SEQ ID NO: 34268 - DNA, 627 bp, Homo sapiens
acagaacttattccatgacatgttctattacgtttttgctcatctgtgataatgttacacatttttgtatatttgttttaaaaatctagtcacttagctaaactctcaataattccagtttttcaattgattctctttagtttttctggctagacaatcayatcagctatatgttttgtttcttcccttctttcttatttttgattattgttactgaattggttagaactttccagaataataattgttatagcaggtgtctttgtcctggtcctgactcttaaaaaaaagccaggactaattttcagccagtttattggcatgccttcaggcaagtgaagaactacagtcctgacacccctcaagaagtccccagactcccaccaaaaacgtcaatgcctggcacagcaggaaactttaaagaactctgcttcagcacaaaggctcctggccatcctcatcgatggtgcctgcactgtgcttaacagtggttaaagcttctcatatttcatagtaaggaaacaggctgttaggtgaaggtatgtagctgtaaatatattaagaaagaattcttttcttccctagtttaatagcaggaaaaaactatgttgaatatttcttgacaca

SEQ ID NO: 34269 - DNA, 627 bp, Homo sapiens
acagaacttattccatgacatgttctattacgtttttgctcatctgtgataatgttacacatttttgtatatttgttttaaaaatctagtcacttagctaaactctcaataattccagtttttcaattgattctctttagtttttctggctagacaatcatatcagctatatgttttgtttcttcccttctttcttatttttgattattgttactgaattggttagaaytttccagaataataattgttatagcaggtgtctttgtcctggtcctgactcttaaaaaaaagccaggactaattttcagccagtttattggcatgccttcaggcaagtgaagaactacagtcctgacacccctcaagaagtccccagactcccaccaaaaacgtcaatgcctggcacagcaggaaactttaaagaactctgcttcagcacaaaggctcctggccatcctcatcgatggtgcctgcactgtgcttaacagtggttaaagcttctcatatttcatagtaaggaaacaggctgttaggtgaaggtatgtagctgtaaatatattaagaaagaattcttttcttccctagtttaatagcaggaaaaaactatgttgaatatttcttgacaca

SEQ ID NO: 34270 - DNA, 663 bp, Homo sapiens
tgaataaatatttactaggcagctatagtaaactctgaaatagaattgttcttagttctttcaaggaggggcaacaaaatagaaatatctctgcatgtcatggtacaaattattaaatatataaacaataatctaagacaggtgttgtaaggtggggaaagtgaagcctagagcagttaagtaacgcaattgcccaagatcccacagctrgtatatgagacagcttaatttcttgcctgtctaacttcaatgactgtgacctttattactctactaactattcagcaaatgctggtgatatattacgttgtcttttaggactgtaaatgtgagcttactttaaccacaaacatgggagcactacagctgtatctgggtcaaactcctctctttcagaacactgtgaatatagatgctgccatatatagatgagactttgaaaagaaatttgatgatcccaattaagaagaacaaattgggtatctttccttaagagacatgctttgcaaggaaatagaatacctggacattggcaaagtcgacacggttgaggtcactaagcatctggttgatttgggaagtgttctgaagcactgcacgagctgcctgggccaggtgattaagcgacgtgtatcttcgcagagtctgggcaaaggcacttac

SEQ ID NO: 34271 - DNA, 573 bp, Homo sapiens
tatttttattttctttctgagaccaggtcttgccctgtcacccaggttggagtacagtggcaccattgaggctcactgaggccttgacctcctgggctccagcgatcctcccacctcagcctcccaagtagctggaattataggcacaggccaccacacccagctattttttagattttttgtagagactgagtcttgctatgttgcttaggctggtcttgaacttctgggctcaagcgatcctcccacctctgcctccacctccaaaagtgctggaattacaagcgtgagccaccatgcccaacctcatgayttatcttttttatgaaaagggtaaataactgtttatctctgcttccagcccagaagaatttacagagactgaattatgctcccacttaaaacaactgaaaaaaataatcttaagaaatttgacatcagtcatcagagaacagtaatgtctgagacatggaaacaagtgaggtgatttccccagcttactaccttaaaaatttccaggctgcagctcagggtaaggggatgccgtcagagctatgcaaactcccaacttaa

SEQ ID NO: 34272 - DNA, 573 bp, Homo sapiens
tatttttattttctttctgagaccaggtcttgccctgtcacccaggttggagtacagtggcaccattgaggctcactgaggccttgacctcctgggctccagcgatcctcccacctcagcctcccaagtagctggaattataggcacaggccaccacacccagctattttttagattttttgtagagactgagtcttgctatgttgcttaggctggtcttgaacttctgggctcaagcgatcctcccacctctgcctccacctccaaaagtgctggaattacaagcgtgagccaccatgcccaacctcatgacttatcttttttatgaaaagggtaaataactgtttatctctgcttccagcccagaagaatttacagagactgaattatgctcccacttaaaacaactgaaaaaaataatcttaagaaatttgacatcrgtcatcagagaacagtaatgtctgagacatggaaacaagtgaggtgatttccccagcttactaccttaaaaatttccaggctgcagctcagggtaaggggatgccgtcagagctatgcaaactcccaacttaa

SEQ ID NO: 34273 - DNA, 573 bp, Homo sapiens
tatttttattttctttctgagaccaggtcttgccctgtcacccaggttggagtacagtggcaccattgaggctcactgaggccttgacctcctgggctccagcgatcctcccacctcagcctcccaagtagctggaattataggcacaggccaccacacccagctattttttagattttttgtagagactgagtcttgctatgttgcttaggctggtcttgaacttctgggctcaagcgatcctcccacctctgcctccacctccaaaagtgctggaattacaagcgtgagccaccatgcccaacctcatgacttatcttttttatgaaaagggtaaataactgtttatctctgcttccagcccagaagaatttacagagactgaattatgctcccacttaaaacaactgaaaaaaataatcttaagaaatttgacatcagtcatcagagaacagtaatgtctgagacatggaaacaagtgaggtgatttccccagcttactaccttaaaaatttccaggctgcagctcagggtaaggggatgcmgtcagagctatgcaaactcccaacttaa

SEQ ID NO: 34274 - DNA, 546 bp, Homo sapiens
tgattatctgatttagtggagaacatagtaaaaagaataaaatggatgatataaaaattgcaccagcatatacttaactaaggtagctatatccttttcaatttctttatacataaaagaaagttgctataccaggtaatcttaatatttccatccaattttaatattccatgtattgagaataatagctaatatttattcattggtctacatgcatcgactcatttgtaaatatcatatggttgcagayttacctttaggccagtattaacattagtccacattctgaaagggaatgctggttaaaatttatcatgcatgagaatcacctggagagagtgttaaaatgcagattgctgggctctgcccccagtgattctgatttagcaggcctagtgcagtgcccaagaactgttatttctaataaagtcttaggtactgctggtgctgccattctgacacctgtggacttaaagcagctctgttctaagcttgggaggggcggcgtccaaagtcaggctgcacattaaaaagtacagcagctaa

SEQ ID NO: 34275 - DNA, 465 bp, Homo sapiens
attgctcagttaaactcctttaaatttaatctggctgaagtgtttcttttatcacaaggcagaacaggccagtgtgatctccaggttgcaacaccaaagtgaaattaggccttcaggaatgtttccttggccagtacagtatatagtgtatagcttttttttttttttattagacagagtctccctctgtcccctacgccagaatacagtgttgcaatcacagctcactgcagcctcaacctctgggttcaartgatcctcccacctcaactgagactacagtcatgcaccaccatgcctggctaatttttttttaatgttttatagagagagggtctcactatgttgcccaggctggtcttgaactcctgggctcaagcaatcctctttccttggcctcccaaagtgattacaagtgtgaaccaccacacctggcctcagtacatcattttttaatttttaatt

SEQ ID NO: 34276 - DNA, 546 bp, Homo sapiens
ctgcctaggtttcccagcattgctctgttgaatttccctttacttaaaagaacaaaaatgttctagaattgtatttcaacatttcaggatacccagaaggcaagtagccacagcactgaaaaaaaaaaaaacaaaaaagaaacctgttctctctctctgtggaaggtgccagaagaaatgtgtactmtggttttattattgctttatatcttgggcagtccctggtattaggggctaggaaagatgctgggtaaattattccataagcacagtgcttcacactgagccactcaacaaagtccagtctagagtgaaaaaaaatctaaaggcaagaatctcaatgaataagcaatgtttcctgggttttttaatccagtggccctaagatctctgaaacctgtcaaattgcacctattgctttcctgagaatatggtaatcaaattctaaatgcacatacatactctttaatccagaaattccagtgctaggcatttatcctacaggtatactttacatagaagaaatactttttacaaagctgttca

SEQ ID NO: 34277 - DNA, 546 bp, Homo sapiens
ctgcctaggtttcccagcattgctctgttgaatttccctttacttaaaagaacaaaaatgttctagaattgtatttcaacatttcaggatacccagaaggcaagtagccacagcactgaaaaaaaaaaaaacaaaaaagaaacctgttctctctctctgtggaaggtgccagaagaaatgtgtactatggttttattattgctttatatcttgggcagtccctggtattaggggctaggaaagatgctgggtaaattattccataagcacagtgcttcacactgagccactcaacaaagtccagtctagagtgaaaaaaaatctaaaggcaagaatctcaatgaataagcawtgtttcctgggttttttaatccagtggccctaagatctctgaaacctgtcaaattgcacctattgctttcctgagaatatggtaatcaaattctaaatgcacatacatactctttaatccagaaattccagtgctaggcatttatcctacaggtatactttacatagaagaaatactttttacaaagctgttca

SEQ ID NO: 34278 - DNA, 1859 bp, Homo sapiens
agttctcatcaggagactatgagcacccatgatatgctcaacttgaatctaaaagacctctttccttcctgctagatgtaagttgcaaagattggagcatctcaggataatgtgttttgaggatggtgagctgctcaggtcacctggttctggatttgataccttgtggatggacctgcctatccaccstagactaccactggacagagaaggaaacttctatgtggtattgcaatgaaccattgcatttgaggtcaatttgttagagtagtttattttctactcatatgtgcttgtttgtttcttgttttacacttgcttgagtcacttctttgcagatcgaaatgccatttatttgtagaactgagtaaggctcacagggcaagggtacaaaacaaaacaacacagcaaatcttagggtaggcattctccatgcctaaagaatttatgcgatatttttttctaaaaagtcaaaagaatttgtacaggaaacacataagtgataaagtgtataataagtgcctatttgaatagtattggcaattagggttctggaaccctaacaggaagcctacttaggatcttctagaaagtcagagccaacttgagaagggaaaaatcaaagctggagtggaggcttccaggaggagagaacttgagtccaatctgaagggctgtgaagcatctgagggaagagggactcacctgcacctgagccaggagggggtcattctcaccaccatcctcattgcacatgatcctcccttctgtgtttcccctaggacaggggtgaatcttccaggctaatacatcaggcatgccagtcctgtagttacatgtgagaccacagagtagcaattcctttatgatgtggggcttgcatgtgcctctgcgtagcacaatcttccttgctgttatcttgccagggttttcttgtgcccacggggatccttgcatggccctgggtctaggttatgtgctttccacacagaagcaccctgcactcccagccatagaccttgtagcataagatttcagtttccagttagctgagtgtatcttctatggaactgtcagacttatgtaggctttctcatgccttttagccaaagaatcattcccaatgcttaggataatttctggaataaagtagtctcaatgaaaatatttcagataaattaatacatatatatgaacgttttggatgagctcaaaattgggacggaactgcactgaaacctatcctatggcggatgatactaagtatcttttcagaaaggtggacattttaaaaattataagttgttctattagcaatatgtggtcacatgggagtttgttaaattttttagtcttttttgggagcttaaaatatgaaatgagttcacagaggtggaatggtttcaagcaatagaagaccaagattcaacagcttcttatttcccctctgagaacgaatcattgatctctagtggaactatcagagtcctggataaaaataaaaatgtgaatttttaaaatagggctcacttttagaaatactcttccaaaatgaatcatgcagtttggccttttcatatgaactattctgatgcaattttccccataaagatacattttgtatcagaagcagcctctctgttgtgggatttagtaccttgggaggctctgttggtgaaattgcttgctaaaactcagcctcacctgctctgtgttgaatggatgcatagacagctctcagccctcattttctttgaaaatggagagataatttactgaactatgaatccagtggattatttctttgggcaccgcatagcagctactagttaaaaagttgaaaagtaggtaagcgttat

SEQ ID NO: 34279 - DNA, 1859 bp, Homo sapiens
agttctcatcaggagactatgagcacccatgatatgctcaacttgaatctaaaagacctctttccttcctgctagatgtaagttgcaaagattggagcatctcaggataatgtgttttgaggatggtgagctgctcaggtcacctggttctggatttgataccttgtggatggacctgcctatccaccctagactaccactggacagagaaggaaacttctatgtggtattgcaatgaaccattgcatttgaggtcaatttgttagagtagtttattttctactcatatgtgcttgtttgtttcttgttttacacttgcttgagtcacttctttgcagatcgaaatgccatttatttgtagaactgagtaaggctcacagggcaagggtacaaaacaaaayaacacagcaaatcttagggtaggcattctccatgcctaaagaatttatgcgatatttttttctaaaaagtcaaaagaatttgtacaggaaacacataagtgataaagtgtataataagtgcctatttgaatagtattggcaattagggttctggaaccctaacaggaagcctacttaggatcttctagaaagtcagagccaacttgagaagggaaaaatcaaagctggagtggaggcttccaggaggagagaacttgagtccaatctgaagggctgtgaagcatctgagggaagagggactcacctgcacctgagccaggagggggtcattctcaccaccatcctcattgcacatgatcctcccttctgtgtttcccctaggacaggggtgaatcttccaggctaatacatcaggcatgccagtcctgtagttacatgtgagaccacagagtagcaattcctttatgatgtggggcttgcatgtgcctctgcgtagcacaatcttccttgctgttatcttgccagggttttcttgtgcccacggggatccttgcatggccctgggtctaggttatgtgctttccacacagaagcaccctgcactcccagccatagaccttgtagcataagatttcagtttccagttagctgagtgtatcttctatggaactgtcagacttatgtaggctttctcatgccttttagccaaagaatcattcccaatgcttaggataatttctggaataaagtagtctcaatgaaaatatttcagataaattaatacatatatatgaacgttttggatgagctcaaaattgggacggaactgcactgaaacctatcctatggcggatgatactaagtatcttttcagaaaggtggacattttaaaaattataagttgttctattagcaatatgtggtcacatgggagtttgttaaattttttagtcttttttgggagcttaaaatatgaaatgagttcacagaggtggaatggtttcaagcaatagaagaccaagattcaacagcttcttatttcccctctgagaacgaatcattgatctctagtggaactatcagagtcctggataaaaataaaaatgtgaatttttaaaatagggctcacttttagaaatactcttccaaaatgaatcatgcagtttggccttttcatatgaactattctgatgcaattttccccataaagatacattttgtatcagaagcagcctctctgttgtgggatttagtaccttgggaggctctgttggtgaaattgcttgctaaaactcagcctcacctgctctgtgttgaatggatgcatagacagctctcagccctcattttctttgaaaatggagagataatttactgaactatgaatccagtggattatttctttgggcaccgcatagcagctactagttaaaaagttgaaaagtaggtaagcgttat

SEQ ID NO: 34280 - DNA, 1859 bp, Homo sapiens
agttctcatcaggagactatgagcacccatgatatgctcaacttgaatctaaaagacctctttccttcctgctagatgtaagttgcaaagattggagcatctcaggataatgtgttttgaggatggtgagctgctcaggtcacctggttctggatttgataccttgtggatggacctgcctatccaccctagactaccactggacagagaaggaaacttctatgtggtattgcaatgaaccattgcatttgaggtcaatttgttagagtagtttattttctactcatatgtgcttgtttgtttcttgttttacacttgcttgagtcacttctttgcagatcgaaatgccatttatttgtagaactgagtaaggctcacagggcaagggtacaaaacaaaacaacacagcaaatcttarggtaggcattctccatgcctaaagaatttatgcgatatttttttctaaaaagtcaaaagaatttgtacaggaaacacataagtgataaagtgtataataagtgcctatttgaatagtattggcaattagggttctggaaccctaacaggaagcctacttaggatcttctagaaagtcagagccaacttgagaagggaaaaatcaaagctggagtggaggcttccaggaggagagaacttgagtccaatctgaagggctgtgaagcatctgagggaagagggactcacctgcacctgagccaggagggggtcattctcaccaccatcctcattgcacatgatcctcccttctgtgtttcccctaggacaggggtgaatcttccaggctaatacatcaggcatgccagtcctgtagttacatgtgagaccacagagtagcaattcctttatgatgtggggcttgcatgtgcctctgcgtagcacaatcttccttgctgttatcttgccagggttttcttgtgcccacggggatccttgcatggccctgggtctaggttatgtgctttccacacagaagcaccctgcactcccagccatagaccttgtagcataagatttcagtttccagttagctgagtgtatcttctatggaactgtcagacttatgtaggctttctcatgccttttagccaaagaatcattcccaatgcttaggataatttctggaataaagtagtctcaatgaaaatatttcagataaattaatacatatatatgaacgttttggatgagctcaaaattgggacggaactgcactgaaacctatcctatggcggatgatactaagtatcttttcagaaaggtggacattttaaaaattataagttgttctattagcaatatgtggtcacatgggagtttgttaaattttttagtcttttttgggagcttaaaatatgaaatgagttcacagaggtggaatggtttcaagcaatagaagaccaagattcaacagcttcttatttcccctctgagaacgaatcattgatctctagtggaactatcagagtcctggataaaaataaaaatgtgaatttttaaaatagggctcacttttagaaatactcttccaaaatgaatcatgcagtttggccttttcatatgaactattctgatgcaattttccccataaagatacattttgtatcagaagcagcctctctgttgtgggatttagtaccttgggaggctctgttggtgaaattgcttgctaaaactcagcctcacctgctctgtgttgaatggatgcatagacagctctcagccctcattttctttgaaaatggagagataatttactgaactatgaatccagtggattatttctttgggcaccgcatagcagctactagttaaaaagttgaaaagtaggtaagcgttat

SEQ ID NO: 34281 - DNA, 1859 bp, Homo sapiens
agttctcatcaggagactatgagcacccatgatatgctcaacttgaatctaaaagacctctttccttcctgctagatgtaagttgcaaagattggagcatctcaggataatgtgttttgaggatggtgagctgctcaggtcacctggttctggatttgataccttgtggatggacctgcctatccaccctagactaccactggacagagaaggaaacttctatgtggtattgcaatgaaccattgcatttgaggtcaatttgttagagtagtttattttctactcatatgtgcttgtttgtttcttgttttacacttgcttgagtcacttctttgcagatcgaaatgccatttatttgtagaactgagtaaggctcacagggcaagggtacaaaacaaaacaacacagcaaatcttagggtaggcattctccatgcctaaagaatttatgcgatatttttttctaaaaagtcaaaagaatttgtacaggaaacacataagtgataaagtgtataataagtgcctatttgaatagtattggcaattagggttctggaaccctaacaggaagcctacttaggatcttctagaaagtcagagccaacttgagaagggaaaaatcaaagctggagtggaggcttccaggaggagagaacttgagtccaatctgaagggctgtgaagcatctgagggaagagggactcacctgcacctgagccaggagggggtcattctcaccaccatcctcattgcacatgmtcctcccttctgtgtttcccctaggacaggggtgaatcttccaggctaatacatcaggcatgccagtcctgtagttacatgtgagaccacagagtagcaattcctttatgatgtggggcttgcatgtgcctctgcgtagcacaatcttccttgctgttatcttgccagggttttcttgtgcccacggggatccttgcatggccctgggtctaggttatgtgctttccacacagaagcaccctgcactcccagccatagaccttgtagcataagatttcagtttccagttagctgagtgtatcttctatggaactgtcagacttatgtaggctttctcatgccttttagccaaagaatcattcccaatgcttaggataatttctggaataaagtagtctcaatgaaaatatttcagataaattaatacatatatatgaacgttttggatgagctcaaaattgggacggaactgcactgaaacctatcctatggcggatgatactaagtatcttttcagaaaggtggacattttaaaaattataagttgttctattagcaatatgtggtcacatgggagtttgttaaattttttagtcttttttgggagcttaaaatatgaaatgagttcacagaggtggaatggtttcaagcaatagaagaccaagattcaacagcttcttatttcccctctgagaacgaatcattgatctctagtggaactatcagagtcctggataaaaataaaaatgtgaatttttaaaatagggctcacttttagaaatactcttccaaaatgaatcatgcagtttggccttttcatatgaactattctgatgcaattttccccataaagatacattttgtatcagaagcagcctctctgttgtgggatttagtaccttgggaggctctgttggtgaaattgcttgctaaaactcagcctcacctgctctgtgttgaatggatgcatagacagctctcagccctcattttctttgaaaatggagagataatttactgaactatgaatccagtggattatttctttgggcaccgcatagcagctactagttaaaaagttgaaaagtaggtaagcgttat

SEQ ID NO: 34282 - DNA, 1133 bp, Homo sapiens
caagcatggggtccctgggattgggggcactgcctccagcctgggctgcatgttttatattttctctgtttattcccttgatgagacttattactatctgtaattatgcatcctttgtttatgtgaatattggtttcctccagtaagtcacactctctatggaaacagcagcttcatttgcacccttcactgccacaccttggctgccatgatggcacgcagrgaaggcaggtgctgctggatgctggggacatgagaaccttgctctcgaagaggaagatcctgcctctcttcaccaaattcttacatccccatttccataagctgcgtcattgtctctgctgaccctcagcttctcggcctatccttgttgccctggctcctggggccagcagggctggtggctgcaggaatttatgagggcatgtacctgtgaagagcgaacagtggtagtgcctgatggccaatttttgagatgcctaaaagctttctcagggcgcctgggcatgaccattaggaaaggagcatgcattatgaagagtgtggtccttttctagctcagcgagatttacttccccaggtggagctggtaaaagcacaagcaccctcgataaaccctgaggagctcaggtggttgcccagggagtggagcctggtgaggacatttccctggagatcaggcaccggaatgtctgcttcctagcttttctgggagtaggggatgcagaaagcagaagtgaatggaacaagttccttatgacctttcaccatttggcaaatgtgtgtgatagaatatgcagaagaatggaccaggcaaggtggttcatgcctgtaatcccagcactttgggaggccaagccaggaagatcgcttgagcccaagaattcaagaccagtttgggcagcaaagttagaccccaactctacatatataagaaattaggtgtgtaatcccagcactttgggaggccgaggcaggtggatcccctgaggtcgggagtttgagactagcctgaccaacatggagaaaccccgtctctactaaaaaatacaaaattagccaggtgtggtggtgcatgcctgtaatcccagctactcaggaggctgaagcaggagaatggcttgaacccggga

SEQ ID NO: 34283 - DNA, 2013 bp, Homo sapiens
tcccactcctttgatctccacattccttcctgcagagggcttgggtctggctgggttgacagggcagtgatcacaggaggtaagggcaggggctctgactcagactgcctgcgtttgaatcctggctctgtcatttacaggctgatgtactggggcaagtcactgaaccctctaagcctcagtttcctgacccataaaatggggataaggagagtggcttgtactcagcgttgttctgaggagtcaatgtaatggggtttacaaaatccaatgccaggcacaaggtaaactctcaataaatacacaatgacaatagcttcatagctggagaaatttacttttaactgggtgaggaaactggagcacagagaaaagcagtttttccagctgtgccgataagaaatgtttaaattaccttcctgactataagctccttgaggctaaggaacacatatataacatccctttgggaaatatttggttaattaaattgatgtttataatggtactgtcttgtatggcaatagcagcaagtcgtacaggccctatccacctctctgtcctgtggtctcctcccttgaggactctgctctattgctgatctcccttctgtgtagcccagtgttgatcacattgacagactccagaagtaaggagctcagtaagtgtgtggggatggtgaagggatggtgaagaaagggctctgtgggtcacagctcagccaggtgaggtgtgtgaataggttcgctccttcaggtagcaagaggcttcttagaatagcctcatagttmtttctgggaactggtccactgcaagaatgagtgcagctttaataattcactccacaagttctgaggttgcatcttacatgatttctggattacgtatttaaccatgcatttgcggcagtccttgtaactttcaagacttttgcttttttagtatttataaaagatgctttgagacctttaaagcgtgaatctaaacgaatgtcacaaaaagtctttgctctcttggcttttgctttcataagcaggaaaggctcaaataaggatgttagcctcgtggagtattctcaatggccaggagaaaggtgagaagtagctgattcacttggagggatcctaaggtggaaatggaccattggcagtctttccccatcttctgaaaaggcacagcttttcctctgaatgggtacatcatggagcagagtatataacaaactctcagaagacatgagttcaagcgttggttctgccaagaaaggaacttgatctctaagtcttagtttgtttaactgaaactgaaattaatagtacctttcccacctgtctcacagggtcataagaggatcagggagaaattgcaggagataactttctgatagacattgtttacatagacaataaagatcatcattcccttttatcagcacccaactcagatgccatctcttccatgaaggcttctttaatttctgtagcttaaagtattctctctgcctctgaaattctatggcacttatttatgcctctctcttgacacttgcatagctctatcttgttgtatcattatttgtaccacgtgttaggctacctcaggaaagaattcataaaattccattatagaaccttgctcaagaaaactcttgcattacttaaaaataaattataataattctacatttttctcatcagagcagtttatggcaatgggactgccaggtgcttcataattatttgcttttaatcttttcatttatgtttatttataattttagttttaatatgttgcttttaggtctatcaaagcataatttacatacagtaaaattcactatttttagtgtaaatttctataggttttgacaaatatatatacttgtatcaccatcatcaaaatcagcctccaaaattccctcatgctcctttctgtcaactcgtttccccaaccctacaatcctaacccctggcaaccactgatttatttcctgtccctatagttttgcctttt

SEQ ID NO: 34284 - DNA, 560 bp, Homo sapiens
gtagaaaaataatttctcatggtttctaagctttgttacctgtatgacatcgattatttcatcaaagttagttcctggaaacttcacctcttcttcatctaccttcataatttctggagtctaagaaagcattttcagaaagtttttgttgtgcttaacacttttaaaatttataagtaatttatcatatttccacctatagtataagcttataattacatggtcctttttaatcattttaataccctattcagaattgatttaattagtaaatgaaatccaagctagtccccaagccattaggtcaacatttcaatagctttaaaaaattaatcagctgtttttctgtaaaggactccatcagcaatatcacttaattgatcaacaggttgatataattgagacttctcttccagaattaagataaaggaaagtgtttacatgtgtagatctctaagtataaacatatatgaactcacacgaagakggatacagaatcaaataattcaggaaaaaaaacaaaatagtcattttacaaatctaatcattaggcctcatta

SEQ ID NO: 34285 - DNA, 1192 bp, Homo sapiens
  misc_feature (1)...(1192): n = A,T,C or G
caggctctttcctgagttttggtggggcccatattcttgctgtttcttgggagagagcacagagaggggactgatgaatattacatttgtggtacatgtcagagaagatgaagactccattgtcacaaggtgggttccttgatggagatgagtgtatgggagtttactagggatgttcttgggatcaccgctctggaagggaaggagtcagaattgagtgaaggcagaagctgagctgagctgccatctcagtgatcctctaggttkttctggacctgggatgggccttcagagttgtccctaattggggcaaggggctgggcctttatatgcatataagaatcaatcactggatttggggcactctgggaagtggtgtgacctcacacaaagcacctctcttcagcagagggaatcactgtgtgggctggaggggtctgggcannnnnnnnnnnnnnnnnnnnnnnnnnnnnnnnnnnnnnnnnnnnnnnnnnnnnnnnnnnnnnnnnnnnnnnnnnnnnnnnnnnnnnnnnnnnnnnnnnnngaagtggtgtcactcacacaaagctcctctctacagcagaggcaatctctgtgtgggctggagtgggtctggcagcacgacacagcatccgccacagttcgctcggaggctgcttgcatgctcttcttgtataagtagtggggcagttcctccagaatccaaagggcctgtggaaatttagaagatagaagtcagtgtaataaactgcagctctcgcctttgacgctgttataatgttcatcgacatcttcctctactctcctcttgagattcctcctttaagctaggacctttggtggtctctgtggcttaattgggcacatgacacagccctttatcctagagtatgtgaacttctggtcaccgtgcctttcttaggctgtagctgccgcatgtgttcatataagtaaaaaaaatcaagagaggatcaagatgtccaagcagatagatttatttattcctgatcctatggtatcattatggccaaacctcctgacaatcaggattaatatcccctgccaggatggtcacccctcttcacacctgccaatcttttggaaggagggggtctaacaggcccagttttcaatcatagcttggagtttaatgggacttgctgtgtccactgggagaacatttccccctttg

SEQ ID NO: 34286 - DNA, 562 bp, Homo sapiens
attataaatwtataaaacattaaattatgcctttatatcttagtgctaattaaaagtagaacaactaaaaggaatgatatacaatgaccaagtaagatttatcttagataggcatagctagttcagctttcaaaaatcaatcacatcaacagcctaaaggagaaaaatcatatgatcataccaactgatgtggaaaatgcatttcaaaaaaattcatcacccattcacaacacacactctcagcaagctcaaaatgagggagaattacttcaacttaatgaagaacatctatagaaactatacagtttttaatatattatgcttattgggagaaactggatactgtcttattaaggttaagaagaagtcaaggatgtcttctctcatcattcctattcaacattgtactgaaagtcctggctagtatgataagatgagaaaaggaaataaaatgaacacaaattaggaagaaagaaataaaacttccttttcacagattacatggttgtctgcgtagaaaatcccaaaggattgacaggaaaattcttggaattaatatgca

SEQ ID NO: 34287 - DNA, 562 bp, Homo sapiens
attataaatatataaaacattaaattatgcctttatatcttagtgctaattaaaagtagaacaactaaaaggaatgatatacaatgaccaagtaagatttatcttagataggcatagctagttcagctttcaaaaatcaatcacatcaacagcctaaaggagaaaaatcatatgatcataccaactgatgtggaaaatgcatttcaaaaaaattcatcacccattcacaacacacactctcagcaagctcaaaatgagggagaattacttcaacttaatgaagaacatctatagaaactatacagtttttaatatattatgcttattgggagaaactggatactgtcttattaaggttaagaagaagtcaaggatgtcttctctcatcattcctattcaacattgtactgaaagtcctggctagtrtgataagatgagaaaaggaaataaaatgaacacaaattaggaagaaagaaataaaacttccttttcacagattacatggttgtctgcgtagaaaatcccaaaggattgacaggaaaattcttggaattaatatgca

SEQ ID NO: 34288 - DNA, 1067 bp, Homo sapiens
cagcatttatcacagagcctgggagatggcaggcacctagtagatatttgatggctgaatgagtgaatgaatgaatgccattccaggcagagagagggccaggctgtcacatacatgcagtcaggcctcccactgcccagatgcagctccccacatttctcaccagctgccaggccatcccatcagactcaggttttcaaatagaagcgaggagttgagtgtatgaagctaaacaaagcagtgggctgagccaaacttgcctcgaggcaagctgcttcctgctgccaccccggctggcaccccatagtctggagccaggcctgtcccacagccaaccctcagcttccaaaatctgcacccagccagagaatgtagggtgaggggcttctgggagggaggtcacctgccacactcccatcctggatggcagggtcagaccaccctactcatggcccayacacccagatccggaggtagaggtgggaggaagcctacatcctgtggtgggatacaaggaaagaaggaaggagactccacacctccttgcacccatcaggagcacagctcggtgctgggcactgcatgtgtgttatcttgttcaaaagtcattacaagtcacagaggcaggggttgttattctcttttacagatgtggaaactgagactcagagagggcaagaacttgccaaggccacaattctggtcagtgacagaactgatttgagctcagctctgtctgattccagagcctgaggtttggtctcaagctgtggaggtttctgttcccacactcacctgtcttcctcattagttcccatctcttcttcagtccacataagatgccaccaggatactgccctggtgtttttgtttgtgtgtgtttgttttttattttaaggctaagataaggaaggaggggagtggtagggaggtcagccattcactccctggtgtgaatcattctaatccattgctttccttctggcctccagctgagtctcacctgcctggagcaggtagaaatgttggggaaagtgtggctgcctgggagtcaaggtcgctttgaa

SEQ ID NO: 34289 - DNA, 1067 bp, Homo sapiens
cagcatttatcacagagcctgggagatggcaggcacctagtagatatttgatggctgaatgagtgaatgaatgaatgccattccaggcagagagagggccaggctgtcacatacatgcagtcaggcctcccactgcccagatgcagctccccacatttctcaccagctgccaggccatcccatcagactcaggttttcaaatagaagcgaggagttgagtgtatgaagctaaacaaagcagtgggctgagccaaacttgcctcgaggcaagctgcttcctgctgccaccccggctggcaccccatagtctggagccaggcctgtcccacagccaaccctcagcttccaaaatctgcacccagccagagaatgtagggtgaggggcttctgggagggaggtcacctgccacactcccatcctggatggcagggtcagaccaccctactcatggcccatacacccagatccggaggtagaggtgggaggaagcctacatcctgtggtgggatacaaggaaagaaggaaggagactccacacctccttgcacccatcaggagcacagctcggtgctgggcactgcatgtgtgttatcttgttcaaaagtcattacaagtcacagaggcaggggttgttattctcttttacagatgtggaaactgagactcagagagggcaagaacttgccaaggccacaattctggtcagtgacagaactgatttgagctcagctctgtctgattccagagcctgaggtttggtctcaagctgtggaggtttctgttcccacactcacctgtcttcctcattagttcccatctcttcttcagtccacataagatgccaccaggatactgccctggtgtttttgtttgtgtktgtttgttttttattttaaggctaagataaggaaggaggggagtggtagggaggtcagccattcactccctggtgtgaatcattctaatccattgctttccttctggcctccagctgagtctcacctgcctggagcaggtagaaatgttggggaaagtgtggctgcctgggagtcaaggtcgctttgaa

SEQ ID NO: 34290 - DNA, 1211 bp, Homo sapiens
tggggcctgtagcccctttattttggccaaattctcctatttggaatgagagtgtttacccagtgtatcttggaatacctccaatgtatcttggaataatgaaattctaacttttttttccagaaacattctaaggcatggcttttcaaattcttatctaagaacaagcataggagaagtgggacctggagaaatttttacctttaaaaaccctagaaaccaagcatataagatgataaaatgattgcttttaaaataataaaataatattttgactttaaaactttatttttaaaagcaagaaaaattgctattactggccttaattgtacctattcatttttctatttgtgactgaaataagcatttaaggtgatcattttcaagtataaaagtttacactacattatacaatctgtgcaatcaacctcactataaactcaagacatagaaattaacagaagtgggtgggcacagtggctcatgcctgtaatcccggcactttgggaggctgagtcaagtggatcacttgaggtcaggagtttaagaccagcctaggcaacatggtgaaacccccatctatactaaaaaaaagttcaaaaattagctgacatgctcacttgaacccaggaggcagaggttgcagtgagcagtgggccaagatcgtgccactgcacatcagcctgggtaacagagcaagactctgtctcaaaaaaaaaaaaaaaggaaaaagaaagaaaaaagaaaaagaaattaacagaagtcaccaaaatcatgttgaaatcataattaaggcaataagcagtttaagcaggcagggttgggaaaattatgtyttagattatgcttctctataaaaaatgaattaatttgttcatactgaaactttgtctaacactattgtctgttgcatagctcttggaataaggcagatccacagtagaaaattaaaacgtttcacttctagtacaggtttatggcctgtaccacagagaaagattagaaatggcatcagtatatcaaataagcgtttacaaatgaacaataaaattttgtctccattttttaaagcacagccttttaccttgagaccaatacacaacactctagatgaaataaatcagcattatttacttcagcttgatataatattaattgttatatggctaaacaaaatgggtatttgtatgataatatttagcttaacttac

SEQ ID NO: 34291 - DNA, 1211 bp, Homo sapiens
tggggcctgtagcccctttattttggccaaattctcctatttggaatgagagtgtttacccagtgtatcttggaatacctccaatgtatcttggaataatgaaattctaacttttttttccagaaacattctaaggcatggcttttcaaattcttatctaagaacaagcataggagaagtgggacctggagaaatttttacctttaaaaaccctagaaaccaagcatataagatgataaaatgattgcttttaaaataataaaataatattttgactttaaaactttatttttaaaagcaagaaaaattgctattactggccttaattgtacctattcatttttctatttgtgactgaaataagcatttaaggtgatcattttcaagtataaaagtttacactacattatacaatctgtgcaatcaacctcactataaactcaagacatagaaattaacagaagtgggtgggcacagtggctcatgcctgtaatcccggcactttgggaggctgagtcaagtggatcacttgaggtcaggagtttaagaccagcctaggcaacatggtgaaacccccatctatactaaaaaaaagttcaaaaattagctgacatgctcacttgaacccaggaggcagaggttgcagtgagcagtgggccaagatcgtgccactgcacatcagcctgggtaacagagcaagactctgtctcaaaaaaaaaaaaaaaggaaaaagaaagaaaaaagaaaaagaaattaacagaagtcaccaaaatcatgttgaaatcataattaaggcaataagcagtttaagcaggcagggttgggaaaattatgttttagattatgcttctctataaaaaatgaattaatttgttcatactgaaactttgtctaacactattgtctgttgcatagctcttggaataaggcagatycacagtagaaaattaaaacgtttcacttctagtacaggtttatggcctgtaccacagagaaagattagaaatggcatcagtatatcaaataagcgtttacaaatgaacaataaaattttgtctccattttttaaagcacagccttttaccttgagaccaatacacaacactctagatgaaataaatcagcattatttacttcagcttgatataatattaattgttatatggctaaacaaaatgggtatttgtatgataatatttagcttaacttac

SEQ ID NO: 34292 - DNA, 579 bp, Homo sapiens
tgctgaatgaacagattgtgagagaaaggaagatatcattctttggtcctgttggttagcaactgggccggaaagcaactcagaggccctgtactgctttcaattcctctattgtttgaaggttggccctgaggatatttttgtggtggtttgtatgtgtgtgcatgtktgtgtgtgggcacaagtgtgtgtgtgttcatatgtatgtgtgtgtatgtgtgtgaaagagagagacttacagacatgcagaaagagaaggataccattggagctatcaaattcatacctatcagttaagcaatcctagattcactctttagtaaataaaaaggcataactggaaacattgaagatggaaacattaataaccctgcatattttcatcatttatcttcctgaaggtatggtgttagaccagatactttaaaatattttctttctgttctattttctgaattgaaattattccttagcccccataccttataattctttcatctcatgaagtaagtcctatatcatgctctaaaaatacaccttgtcaatggaattatagaatattgtctctggaaagcagtt

SEQ ID NO: 34293 - DNA, 579 bp, Homo sapiens
tgctgaatgaacagattgtgagagaaaggaagatatcattctttggtcctgttggttagcaactgggccggaaagcaactcagaggccctgtactgctttcaattcctctattgtttgaaggttggccctgaggatatttttgtggtggtttgtatgtgtgtgcatgttygtgtgtgggcacaagtgtgtgtgtgttcatatgtatgtgtgtgtatgtgtgtgaaagagagagacttacagacatgcagaaagagaaggataccattggagctatcaaattcatacctatcagttaagcaatcctagattcactctttagtaaataaaaaggcataactggaaacattgaagatggaaacattaataaccctgcatattttcatcatttatcttcctgaaggtatggtgttagaccagatactttaaaatattttctttctgttctattttctgaattgaaattattccttagcccccataccttataattctttcatctcatgaagtaagtcctatatcatgctctaaaaatacaccttgtcaatggaattatagaatattgtctctggaaagcagtt

SEQ ID NO: 34294 - DNA, 1519 bp, Homo sapiens
aattaaatggggaatggtagcaagaagtagtccttggtccttcattgtagggagaaaaagttttagarggaggatactgcagaatggagtttctgatggaaaatgtttccaccctcacagattttaaataactcttctttagggaggtcagtgaggctacagggagccagagggtggcccctgctgactgtttcaaggctgtccttcccctcttctcaggcctttcacctgttggtgtcatttcacatgcgtgataatcttcaaacccagctctgccaccatctaccttccccattgctgcccttctgccccaaaggatttgagaacaacataaaacaataaatactcagctccccatgagctgccattcacttcaacttggctctcaccagtgcttgacacatcttctctccatttctccctggcaggtctccaaaagggctgctttaaaccattcctctctccttagcccccagtcccacatgctgagagtcaagagaacatgtgtgagaacgtaggtgtgggcatcagatggaactcagcactcaccagctgcaggaccttggttgcatttcctaactacatctggaaaagaaagatgatcataactagaacttaacctttgaaggttttatgagcatgaaaagatgtctggaaagaacttagcccaccaggacagggctccgtgaatgtcatctgtgactgtgggtacccttccttcaaatgagtgaacaataccctcctcattgacttggaaaacaagtgcccctagcatgctccttcaactacttgatattaatttccacatataactcactctttccacttaatcgccttttccaaaatgtacctccacccctgtgttactggatgccattgtttgtgcctcaggctccttgttgttgtcattatcccaccttctctgggactttccttggcctttaggaaaactttatactttgaaacaagtgggctgaaattctgtcttctcttggatgacctggcaccatcgctactatgtgtcacttgtgtcccccacttcttcctgtgtcatctcctgtggttcagttcttagtgtttcagtctttgcttttgacccattcactccaagggcttccagaggatgttgaatgggacaaaatattgctatgtgacccacatttgagaagatccaatgacagttggatccaggcacctccctatgacttaccactgggaggcagaactacccagttaaggaaggtggtatttgtccttttccaaagatagcatagtggttaagtgcacagatatttggagtcagactacttgggtttgaatccagcctctgccacttactaactgtatgcttttagttgagtcacttaacctagttgaattatttaacttctctgtgcctctggtttctcatttgttaaatagagataataaaagtttcttactccataggtcaattgaattaactgaatccactattaagaacagcaattatgtcactataattccccaatccttctgc

SEQ ID NO: 34295 - DNA, 1519 bp, Homo sapiens
aattaaatggggaatggtagcaagaagtagtccttggtccttcattgtagggagaaaaagttttagagggaggatactgcagaatggagtttctgatggaaaatgtttccaccctcacagattttaaataactcttctttagggaggtcagtgaggctacagggagccagagggtggcccctgctgactgtttcaaggctgtccttcccctcttctcaggcctttcacctgttggtgtcatttcacatgcgtgataatcttcaaacccagctctgccaccatctaccttccccattgctgcccttctgccccaaaggatttgagaacaacataaaacaataaatactcagctccccatgagctgccattcacttcaacttggctctcaccagtgcttgacacatcttctctccatttctccctggcaggtctccaaaagggctgctttaaaccattcctctctccttagcccccagtcccacatgctgagagtcaagagaacatgtgtgagaacgtaggtgtgggcatcagatggaactcagcactcaccagctgcaggaccttggttgcatttcctaactacatctggaaaagaaagatgatcataactagaacttaacctttgaaggttttatgagcatgaaaagatgtctggaaagaacttagcccaccaggacagggctccrtgaatgtcatctgtgactgtgggtacccttccttcaaatgagtgaacaataccctcctcattgacttggaaaacaagtgcccctagcatgctccttcaactacttgatattaatttccacatataactcactctttccacttaatcgccttttccaaaatgtacctccacccctgtgttactggatgccattgtttgtgcctcaggctccttgttgttgtcattatcccaccttctctgggactttccttggcctttaggaaaactttatactttgaaacaagtgggctgaaattctgtcttctcttggatgacctggcaccatcgctactatgtgtcacttgtgtcccccacttcttcctgtgtcatctcctgtggttcagttcttagtgtttcagtctttgcttttgacccattcactccaagggcttccagaggatgttgaatgggacaaaatattgctatgtgacccacatttgagaagatccaatgacagttggatccaggcacctccctatgacttaccactgggaggcagaactacccagttaaggaaggtggtatttgtccttttccaaagatagcatagtggttaagtgcacagatatttggagtcagactacttgggtttgaatccagcctctgccacttactaactgtatgcttttagttgagtcacttaacctagttgaattatttaacttctctgtgcctctggtttctcatttgttaaatagagataataaaagtttcttactccataggtcaattgaattaactgaatccactattaagaacagcaattatgtcactataattccccaatccttctgc

SEQ ID NO: 34296 - DNA, 1519 bp, Homo sapiens
aattaaatggggaatggtagcaagaagtagtccttggtccttcattgtagggagaaaaagttttagagggaggatactgcagaatggagtttctgatggaaaatgtttccaccctcacagattttaaataactcttctttagggaggtcagtgaggctacagggagccagagggtggcccctgctgactgtttcaaggctgtccttcccctcttctcaggcctttcacctgttggtgtcatttcacatgcgtgataatcttcaaacccagctctgccaccatctaccttccccattgctgcccttctgccccaaaggatttgagaacaacataaaacaataaatactcagctccccatgagctgccattcacttcaacttggctctcaccagtgcttgacacatcttctctccatttctccctggcaggtctccaaaagggctgctttaaaccattcctctctccttagcccccagtcccacatgctgagagtcaagagaacatgtgtgagaacgtaggtgtgggcatcagatggaactcagcactcaccagctgcaggaccttggttgcatttcctaactacatctggaaaagaaagatgatcataactagaacttaacctttgaaggttttatgagcatgaaaagatgtctggaaagaacttagcccaccaggacagggctccgtgaatgtcatctgtgactgtgggtacccttccttcaaatgagtgaacaataccctcctcattgacttggaaaacaagtgcccctagcatgctccttcaactacttgatattaatttccacatataactcactctttccacttaatcgccttttccaaaatgtacctccacccctgtgttactggatgccattgtttgtgcctcaggctccttgttgttgtcattatcccaccttctctgggactttccttggcctttaggaaaactttatactttgaaacaagtgggctgaaattctgtcttctcttggatgacctggcaccatcgctactatgtgtcacttgtgtcccccacttcttcctgtgtcatctcctgtggttcagttcttagtgtttcagtctttgcttttgacccattcactccaagggcttccagaggatgttgaatgggacaaaatattgctatgtgacccacatttgagaagatccaatgacagttggatccaggcacctccctatgacttaccactgggaggcagaactacccagttaaggaaggtggtatttgtccttttccaaagatagcatagtggttaagtgcacagatatttggagtcagactacttgggtttgaatccagcctctgccacttactaactgtatgcttttagttgagtcacttaacctagttgaattatttaacttctctgtgcctctggtttctcatttgttaaatagagataataaaagtttcttactccataggtcaattgaattaactgaatccactattaagaacagcaattatgtcactataattccccaatcyttctgc

SEQ ID NO: 34297 - DNA, 730 bp, Homo sapiens
tattttctcccattctgtagactgtctgtttactttgttgatagtttatttttctgtgcagaagcatgaaatactacacagccataaaaaagaatggaataatgtcctttgcaccaacatggatgcagatggtggccataatcctaagtgaattatcacaggaayataaaaccaaataccttatgttcttacttataaataggagctaaacactgggcacacatggacataaacttgggaacaacagatgctgcaggctaatagagggtggagggaggaatgggggcgtggggcaaaaactaccttactagtactatgctcaccacctgagtgatgagatccatacccctaacttcagcatcatgcaacatactcatgcggtaaacctgtacctgtatccctgtatctaaaattaaagttgaattttaaaaaacttgcattatttctgtatcttttatcacgtgacatatacatgtatactagattgtaagctccataaatcaagggcatgcctgtctcttctaaccatgtactctcagcctttaatacattgtttggtacacagttcatgctcaagaaatctaatttaatgaatgattgcaggaggttagtcatctggttttcagacatatataaatgtagttcaaacatgtattttatttgcgcatttaaaagtctataattgaagttagtttttagaatattctttaatgttttatggtgcaaggat

SEQ ID NO: 34298 - DNA, 1217 bp, Homo sapiens
catcagtgacattttcagaacaatgaaatctaagtgcatcacagatgaaagaagagaaaagtgacttaagggactgtctgattacaaatgcaaatgcaaagctgctcctgacaataacccattgctaatcaatttcctataactttcactacagtttcctattccaaacattsttcactatccacaagtcccctttgctaaactattaactgacaaaataaatcaagtactttcttttatacatatataattttttaaatttagattcagaggatacatgtacaggtttgctacatgggtattttgcgtgatgctgaggtgtaatttggatttcctttaagcagagtctgacatgatgatttgggtgaagttagtctaggatttaattccaggaaacagaagtgagggagtagggaaggatgaaagacaataaagtgtgcttcactgagctggttgctgatttaggcaaatggaaatcaatctttttggagaccctctgaggagtcctgtagaacctacctcagaattaccacactgaaagacaggaaggctggtaaaattagactcatttcacccattggttgaaaatggtccttgggtgcacacaaacccaaaggcacatacactttggagctgagagagtgtgttttagagaaagcctaaggcaaaaaagcagaaataccccatgatatgtgcttcaggtgggatgctggaaagatgcaaagaactatctatctcagcttcagctcttctgaaattggttgggcaaaagaaaggtgccaccagtggccagatataagctttttctccacctctacctctctttctaaatgttattccacacatcattacatatattggcatggttcccatggccttattcacttcggtattaactttcattctcctatggctgtacactgtacacacatttctaaacttgcccttcataaccaaaaccaggtctcccttaatagcatggagactttgacacaactctgtcattaaaattacatattaggctgagtgcagtggctcatgcctgtaatcgcagtcctttgaaaagccaaagtgggagcatcacttgaggccagaagtccaagaccagcctgggcaacagagtgacacccccaactctgcaaagaaaccttaaaaaaagtagccatgtatcatgtcacacacttgtagtcccagctacttggaaggctgaggcagga

SEQ ID NO: 34299 - DNA, 657 bp, Homo sapiens
ttacaggcatgagccactgcacccagccccgatactagtttattatcaaaatcaattgcattcctggctaccattttaagcagaaaagcgaactgtaggtaatcatatcccgttttctaggtcatcgtaggatcttcctgaaaattctcctgttcgttccttctttctgctgatggttccctgtgaccacctctggacattgagcctagygtgctatttcacattcaaacgaaagccctgcatttgcattatttttaaacctctttgttttttctcttatttgggggtatgggtggttctagtttttttacatgcactgaaaatgaggcatggcacccaggaaggctgtaagttctgtctctaatttcttttgcctcctgggagctttgccttcttggtgcctggggagtgcttattcgtggtttgagaagtcgtaccactgaggggcccccaggaggtgccatttactagctgatgtggtaggatttcaagatgtcaccagctggtgcagatgtaccggcatttggtagcccgaatgtcagcccgtcagcctctggagctagactaggtgaaaaccaggctctgcttcccagccactccggggcatcttacttaactctgcctcactttgcttattaacttgaaaatgggggtaaa

SEQ ID NO: 34300 - DNA, 657 bp, Homo sapiens
ttacaggcatgagccactgcacccagccccgatactagtttattatcaaaatcaattgcattcctggctaccattttaagcagaaaagcgaactgtaggtaatcatatcccgttttctaggtcatcgtaggatcttcctgaaaattctcctgttcgttccttctttctgctgatggttccctgtgaccacctctggacattgagcctagcgtgctatttcacattcaaacgaaagccctgcatttgcattatttttaaacctctttgttttttctcttatttgggggtatgggtggttctagtttttttacatgcactgaaaatgaggcatggcacccaggaaggctgkaagttctgtctctaatttcttttgcctcctgggagctttgccttcttggtgcctggggagtgcttattcgtggtttgagaagtcgtaccactgaggggcccccaggaggtgccatttactagctgatgtggtaggatttcaagatgtcaccagctggtgcagatgtaccggcatttggtagcccgaatgtcagcccgtcagcctctggagctagactaggtgaaaaccaggctctgcttcccagccactccggggcatcttacttaactctgcctcactttgcttattaacttgaaaatgggggtaaa

SEQ ID NO: 34301 - DNA, 576 bp, Homo sapiens
tctgtcactctgactcaggctggagtccagtgacatgatcataactcacggcctcccaaagctgccgcattacaggtgtgagctaccgcgcccgacctctcaccctcacttcttggaacggagcctttagtagagggccgcaaggaattgcaggggtgtggctaggggactctcacttggacccggcagatgtgcgggacactgtttcagggtttgggtttggcgtggggttgaggaagggaccaccccatgtctctgctggcggggagcaaaaaaaaaaagggggggttctctggccgygtgcggtggctcacgcctgtaatcccaggaggcagaggttgcagtgagccgagatcgcgccacactgcattccagcctggcggcagagtgacactccgtctcaaaaaaaaaaggggggggggtctacttatgagcccctctcatccctattcctacccgagcccggcccccagctcaatccccggtacactgcgggcaaagatcagaacactgcggaaaaaaatcagaactttctcggctcgcaaagttccggtcctcgcaccctccgcggcatgg

SEQ ID NO: 34302 - DNA, 756 bp, Homo sapiens
ccccgaagcagacataggactaggcagagggcctggggtctgccaaaattctgggtctacttttagggtgtcagcttaatcccagaattatcttcttaatcttttaaataatttcttaattataaatgtaaatgttgatggtagaaaatttggaagctatagagaagtatacagaaaataatatcatatgaagtcttaccacccagaaattatcactgtctgtattttgctggttttattccagtagttaaaaaaaaaaaaaaaaaaaaaaaaaaaaaaagctaggcatggtggctcatgcctgtaatcccagcactttgggaggccgaggcgggcagatcacgaggtgagattgagaccatccyggctaacacagtgagaccccgtctctactaaaaatacaaaaaattagctgggcgtggtggcaggcgcctgtagtcccagctactcgggaggctgaggcaggagaatggcgtgaacccaggagacggagcttgcagtgagccaagatcgtgccactgcactccagcctgggcgacagagcgaagactccgtctcaaaaaaaataaaaataataaaaaaagtaaatataaaaaaggctgggtgtggtggctcacgcctgtaatcccagcattttgggaggctgaggtgggcaaatcacctgaggtcgagagttcaagaccagcctaaccaacatggagaaaccctgtctctagttaaaaaaaaaaaatatatatatatatatatatatatata

SEQ ID NO: 34303 - DNA, 1279 bp, Homo sapiens
ttctaaagttttgtctgagaactcatagggtaaaactctgaggttgctgggagatgtgaacagagtgagtgagagggtgcctggtggggatatggggtgacagcaagaacacrgaggcccagttccatgggggacttcagggtcagacacccctgaatcctaactctgttctgccccttcaatccatgtggcctgggtaaatgaccattgtctctgagctttcatttcaacagctagaaaacggggctaatcttcccactttccagagtggtggggaagcttaaagggaattaaagtgacgaagtagaaggtgccacagaaggcactatcaactttggttcttctcctgtccctcactgcctgctgccaagagagcgcagtgtcggtacacaccaggctcaagtccctaaggacgtgaggaggacgatgagctgtttcgccgctgcctccttctagacacagccctccagatgagccactagtactgtgaatgcaccaaccatccaccctctgtatagtcccaggggcctgaaaccaaaggcccaacccagaacttctgcaggccacggaggggcatcagaggcacttcatctgccaggtacggtggggcctggggcctggggcctggggccagtgcaagaaggaagtcacctggacccagacgtgtccatggaaaggtagcagctctggcatgggccttagctagggtaagggggaccagcaggcctgacggggccccatacacctggattctacccttcactatatgctttagagatgtccatcctgcggttccctgcagcagcctccctgacccacaactaagtggcacggatgcactcgcaggcatgcccctcagtggctgcagggctcccgggaggacaaactgctaccttcgaagtagcaaaatttccatcagcaccagtgaggcttcagctccctctgaccgccaatttccttccattttcacgggttcaaatgtttcctctcagcctcaaattcagccagacacaacttagtccttctcaggcatgccccgccaggtgtgcccatcttcctgtgggccaccccttgcagaatcctgaggccacagctgctggtctcaaggccaagtggggctatggacaggataaggctctggggctgggctcctggtgtctaggcctggctcttcctctggctgacaggtggctgttggttcacctctctgagcctcaagatcctaagccgcaaaacagagaaggtggtatctcctcctcaaggttgcagggagcattaa

SEQ ID NO: 34304 - DNA, 1279 bp, Homo sapiens
ttctaaagttttgtctgagaactcatagggtaaaactctgaggttgctgggagatgtgaacagagtgagtgagagggtgcctggtggggatatggggtgacagcaagaacacagaggcccagttccatgggggacttcagggtcagacacccctgaatcctaactctgttctgccccttcaatccatgtggcctgggtaaatgaccattgtctctgagctttcatttcaacagctagaaaacggggctaatcttcccactttccagagtggtggggaagcttaaagggaattaaagtgacgaagtagaaggtgccacagaaggcactatcaactttggttcttctcctgtccctcactgcctgctgccaagagagcgcagtgtcggtacacaccaggctcaagtccctaaggacgtgaggaggacgatgagctgtttcgccgctgcctccttctagacacagccctccagatgagccactagtactgtgaatgcaccaaccatccaccctctgtatagtcccaggggcctgaaaccaaaggcccaacccagaacttctgcaggccacggaggggcatcagaggcacttcatctgccaggtacggtggggcctggggcctggggcctggggccagtgcaagaaggaagtcacctggacccagacgtgtccatggaaaggtagcagctctggcatgggccttagctagggtaagggggaccagcaggcctgacggggccccatacacctggattctacccttcactatatgctttagagatgtccatcctgcggttccctgcagcagcctccctgacccacaactaagtggcacggatgcactcgcaggcatgcccctcagtggctgcagggctcccgggaggacaaactgctaccttcraagtagcaaaatttccatcagcaccagtgaggcttcagctccctctgaccgccaatttccttccattttcacgggttcaaatgtttcctctcagcctcaaattcagccagacacaacttagtccttctcaggcatgccccgccaggtgtgcccatcttcctgtgggccaccccttgcagaatcctgaggccacagctgctggtctcaaggccaagtggggctatggacaggataaggctctggggctgggctcctggtgtctaggcctggctcttcctctggctgacaggtggctgttggttcacctctctgagcctcaagatcctaagccgcaaaacagagaaggtggtatctcctcctcaaggttgcagggagcattaa

SEQ ID NO: 34305 - DNA, 1011 bp, Homo sapiens
ggatccaggtcaggctagggccccgccaggaggaggagccacccgagggagcccacactcagccctgctccgcactccgctgtyggacctcgggaaggtcattcacggcctcagggcctcagtttcctctgctgtaagatggaggtcacaaggggggacctgaagagccagaggaccaggcccaacccagcccagctgcttgatgacgatgaactttttttttttgcccaggctggagtgcagtggcacgatcttaactcactgcaacctccgcatcccaggttcaagcgattctcctgcctcagcctcctgagccactgcgattacaggtgcctgccaccacctccagctaatttttgtatttttagtagagacggggtttcaccatgttggcaaggcttgtcttgaactcctgaccacaggtgatctgcctgcttcggcctcccaaagtgctgggattacaggcgtaagccaccgctcctggcctgacaatgaactagtaacagcatgttctgccactgctgctttcacaaactagcccctggcctgcaccaagccccaagtccacgtaggagaatgtcgccaagtactgctccggacaggtctctgagctagaccctaaagactccacccaacactgccttcaaggggtgcctggcctggaggagacagaaatgcagtgcatgggtccctcctccgactttcaaagacctgaacgctacctctagaccctctgctggaggtgggaacctccttctgaggcccctctagctgccagatgtcctggctccagacctcagaggaacccatgagattggcagaactattcccatgtggaaggtgagagagctgagacccagcggggagcctggcatcacctgctgggcagcggaggcaggcccagcatcccctccctgtctccctacccagcccctggccccagacctacgcgctctcggtgatacgtatcccggacgcagtgccagatgcctgtgtactttggctccgtct

SEQ ID NO: 34306 - DNA, 1011 bp, Homo sapiens
ggatccaggtcaggctagggccccgccaggaggaggagccacccgagggagcccacactcagccctgctccgcactccgctgtcggacctcgggaaggtcattcacggcctcagggcctcagtttcctctgctgtaagatggaggtcacaaggggggacctgaagagccagaggaccaggcccaacccagcccagctgcttgatgacgatgaactttttttttttgcccaggctggagtgcagtggcacgatcttaactcactgcaacctccgcatcccaggttcaagcgattctcctgcctcagcctcctgagccactgcgattacaggtgcctgccaccacctccagctaatttttgtatttttagtagagacggggtttcaccatgttggcaaggcttgtcttgaactcctgaccacaggtgatcygcctgcttcggcctcccaaagtgctgggattacaggcgtaagccaccgctcctggcctgacaatgaactagtaacagcatgttctgccactgctgctttcacaaactagcccctggcctgcaccaagccccaagtccacgtaggagaatgtcgccaagtactgctccggacaggtctctgagctagaccctaaagactccacccaacactgccttcaaggggtgcctggcctggaggagacagaaatgcagtgcatgggtccctcctccgactttcaaagacctgaacgctacctctagaccctctgctggaggtgggaacctccttctgaggcccctctagctgccagatgtcctggctccagacctcagaggaacccatgagattggcagaactattcccatgtggaaggtgagagagctgagacccagcggggagcctggcatcacctgctgggcagcggaggcaggcccagcatcccctccctgtctccctacccagcccctggccccagacctacgcgctctcggtgatacgtatcccggacgcagtgccagatgcctgtgtactttggctccgtct

SEQ ID NO: 34307 - DNA, 749 bp, Homo sapiens
aaggcacagggaggttggactgaggaaagggaggccctctccagagcagggcctggggcctatcatatcagctcatgtgggcaaaggaagggattgacttctgtctgttattccttcattcattcactcgtgtgcaccttctcatgccaggccccacgctgggcaggggagccagagatgccaccctcgcccacctgtggccccagcctggctggagagtgtgtaatctattactgcataacaaattgccccaaaatttagctgctttaaacatcagacattggcagggcgtggtggctcacgcctgtaatcccagcactttggaaggccaaggcaggcggatcacgaggtcaggagatcgagaccatcctggctaacatggtgaaaccccgtgtctactaaaaatacaaaaaaattagccaggygtggtggcgggcgcctgtagtcccagctactcgggaggctgaggcaggagaatggcatgaacccgggaggtggagcttgcagtgagccgagaccgcaacactacactccagcctgggcgacagagcgagactcctaaaaaacaaaacaaaacaaacaaacaaacaaaaacaaaacaacaaaaatcgacatttatgatctcataactcctgagggtccagaagccatgaataaactggctgggtggctctggatgaggggctctcatgaggctgcagtcatctggagactaggctaggttgggaggacccctgccgaagtgaccc

SEQ ID NO: 34308 - DNA, 1259 bp, Homo sapiens
catctaatgcagctggggggcatggagggcttcgtgggaaaagggctgtctcacaaagtcaggaaggatgaagctgaagaagagagtaggaggaaggaatgtcccaggcagaggacaggcacaggtgaaggctggccaggcagggtgaaggacagcacggctccacatagccagagcagcagagaggaggaggaggagggccccaaggtggcagggacaggttccagaaggccttggaagacacattgatggaccgggcttttatctggagaccaagggggagttgctgaagggttttaagcaagcccccgagtgatcagctcatgtatgaaacccctctgcctgagatttcactagctgccactagagaaaccaccacacaagtaatagacactggaccccagctggcagtttcctagggctgggatagctaatggcagggcagcacccataccaggcggcattgctggggcaggggcgtatcttttgtttctctgtgcccggttgccttgcacaatgcctggcacctagcaggttctcagtaaatggggtggggctggggggcagcagtcttcctcttccatgggaaagatggatagccggactctgggaccaggaaacttgctccagaggctccaacagatcccattctaggatagctgtggggctcagggaaggggyagagtgaagagctctggagaactcggctctaatccgccttccaatcctgcgcaaaatacgcggagaacacttgacaaatgtgggctgggcgcacgcaggcgtctgagtactttattgacttttgacagctctgcacgcctgcctgaaatacagtgccacagtgccattgtcgaagattcatgctttcttcagagaacttggaacacaaatttataacttgttgtcaaacagatgcccacagttctttggaagggcaatcccatttgggaaaagtagccaataactcttccgagttggaagcccattctcaggttgatttcccaaagcacaaaaaaagaaaaacaaagaaaagtgtaattgcagaaaacaataaccctacagacataacccaatacagagcccattatcttctctacactgacttttcaataattttgtgatggattctcccagaaaacttaatttgtacttttaaccacaagagttagtgggccagaaaaaattaattccaagctttggcttgtagagagagaaataaaggacatatctattaattttttaaactaccccatgtgaag

SEQ ID NO: 34309 - DNA, 1259 bp, Homo sapiens
catctaatgcagctggggggcatggagggcttcgtgggaaaagggctgtctcacaaagtcaggaaggatgaagctgaagaagagagtaggaggaaggaatgtcccaggcagaggacaggcacaggtgaaggctggccaggcagggtgaaggacagcacggctccacatagccagagcagcagagaggaggaggaggagggccccaaggtggcagggacaggttccagaaggccttggaagacacattgatggaccgggcttttatctggagaccaagggggagttgctgaagggttttaagcaagcccccgagtgatcagctcatgtatgaaacccctctgcctgagatttcactagctgccactagagaaaccaccacacaagtaatagacactggaccccagctggcagtttcctagggctgggatagctaatggcagggcagcacccataccaggcggcattgctggggcaggggcgtatcttttgtttctctgtgcccggttgccttgcacaatgcctggcacctagcaggttctcagtaaatggggtggggctggggggcagcagtcttcctcttccatgggaaagatggatagccggactctgggaccaggaaacttgctccagaggctccaacagatcccattctaggatagctgtggggctcagggaaggggcagagtgaagagctctggagaactcggctctaatccgccttccaatcctgcgcaaaatacgcggagaacacttgacaaatgtgggctgggcgcacgcaggcgtctgagtactttattgacttttgacagctctgcacgcctgcctgaaatacagtgccacagtgccattgtcgaagattcatgctttcttcagagaacttggaayacaaatttataacttgttgtcaaacagatgcccacagttctttggaagggcaatcccatttgggaaaagtagccaataactcttccgagttggaagcccattctcaggttgatttcccaaagcacaaaaaaagaaaaacaaagaaaagtgtaattgcagaaaacaataaccctacagacataacccaatacagagcccattatcttctctacactgacttttcaataattttgtgatggattctcccagaaaacttaatttgtacttttaaccacaagagttagtgggccagaaaaaattaattccaagctttggcttgtagagagagaaataaaggacatatctattaattttttaaactaccccatgtgaag

SEQ ID NO: 34310 - DNA, 552 bp, Homo sapiens
tgtctttttggtaagagacaggaaaaaaagaaattatgtaaatttagtgcctcaaaatatctttgtttttttagagagggggtcttactatattgcccaggctggtctcaaactcctggcctcaaacaatcctcacttccaaaaaactgggactacaggcgtgagccactgcacccagcctcaaaatatcgtatctgactgtactcacctattttcagactgcagttgaccatggataactgaaaccatggaaatcaaaactgtggataacgggggactactgtagctataataataatagtaattaggtgctcaacaattcctcaagattgctagtgtctaagggcctggcgggtaagatgtatttattcaacaggtattaatctattacctaccacatgtaaagcactgtggggaacataagatgartaaggcatggattctgcattcaatttgtagagctgtaactgttgatgagagctaactgcaagaaagatgctgaaggtcccaaattctgtagaaggatcaagctacttcctgggcaaggcgaca

SEQ ID NO: 34311 - DNA, 517 bp, Homo sapiens
tgtgttttcaaaatataaccctgactgtagtttggaggcagaactcagcgtgtgtgtttggtggtggtgctgggagagaagtggtagtagtagggaagagactggattcagaaatactaatttggaggctctttcagtaatccacatggaagatgatgytatatttaatagggtagtattggcaaacgtggagataaatgggaagattcaaggtatatttaggaagtaaaatgtataaaaatggtaataaagtaaggaaggaaggtgagggaaagggggacatcaaatgctacacttgggataggggaaccttttcaaatatcataatcgatattcagtttttggtatcatcctgcactctggtttgtaattcatttgtgtttgtgaaattaaatgacacgattatttgccagggctcctaaaatagaaaatctgatttcattggtagctctccaaaatatattgtgtccatttcaaaagtggtgggaaattcaggttccattgctcccatgatttc

SEQ ID NO: 34312 - DNA, 740 bp, Homo sapiens
tgagtgattttccccagtggcccctggggatgtgccactgtcactcagaagggcaagctaggcagggcccatacaacagcaggggtctgcaggttagacgttccctgccctgggacgctcacccctgggcaagaggctggaagttcacaccatccaaaatttatccttgttttttttctgatgctaattagcctctcccgattttatgacatcttgtgttgatctttttcaaaaactcattttcttttttttccttctcttttctccttcttgtagcacatatctttcsttaaagatcagatcaataaaatattttatttattcattaatttaacaaaaaaaacagagcatttagtttgtggcaaaaacactgagctttcgaatatgaatcatgtgctttaggtgggaattgtgaattctgaagatacagatgacagtgacgaatgccttctgtctcatgattgacagggaaaaggaaggttgaccatagcatcctagaaggctcatcaggtgatcattacctagcatccatgaagcacctgaaattatttgcaaaatgttacgctttggaccatttttccggggaaggagatccagaactttttaccagattttcaaagacatctgtgactcccaaaagttaacaatcactgatgtggttgttgtatccctcatccaaccccagaacactttctgtaatctgagttttttaatggcaagtggcctatatttagcacctg

SEQ ID NO: 34313 - DNA, 1443 bp, Homo sapiens
gaaccctttctatgcagaacttaacactggactagagaactactgacaaccctttccagagtaggggtcggcgtcagtcagggccggcactaacaggaaaagcacctggttccttgtatcttcacatctttaccatcactgccaacccctttccactggctagggctaattagggttttggggccaacaggcaaatgaactgaggtttgagacaggctctgctctcatgaaaaactgaagtgttaacaagacagaaatgtaggcagaggcccagttataaggtacagaggcacccagcaggggtgggactcagtggcccccagacctgtagcatgctgacaggcccacgcaaagccaagatcaaacctacagcagcccttctccatcagcccagcaccctgagtcgcattccttggtcaggctctggaaatggtagaggcagctgctgtgggaaggtgaaccccgggggttctggcccagcttgtttggggcaaatgcaggagctgacaacttacaatcacagcctgtccccactcacctgctacagaggactcagtcatttcatttccctgatttctccaggtctctagtgggggttccctggtgccgacaccattccatccaggagctgatgaaaacccctcttctctgaagcacaggcagaatgtatccttagaaaggaagccagggggccgggtatggtggctcacgcctgtaatcccagcactttgggaggctgagatgggtggatcacctgagatcgggagtccaagaccagcctggccaacatggtgaaaccccatctctactaaaaatacaaaaattagccaggcatcatggcgtgcacctataatcccagctactcgggaggctgaggcaggagaatcacttgaacccgggaggtggggattgcagtgagccgaggttgtgccactgtactccagcctgggtgacacagggagattccatctcaaaaaagagagaaagaaagaaagaaagaaagaaaacacagggttgctaaggccaaggcatcacacacttaacaccaccaagtcattccagagtgaaaggaacgcaaatccagtctcaggctgtctgattgacgaagcttctggatgcacagcttttacatttttatattttattctctgtgatgtgcccagctcaggagccgcaggtttcggccagttgttctgctctagtcctgagcrccctggcatgttttacagttctgagactgtcctatattcagggcctgtaccatggacagatgcaaagccactaaatgtgtgagctggaatagacaagaacagttatattgagtgtttactacatgctcgtcctcacaacgttacgtgctaagcactaggagtcgcagtttttggggtgcagaggctgaggatgagggcagttacatatcttgtcaagtctccccctggcaag

SEQ ID NO: 34314 - DNA, 622 bp, Homo sapiens
ggacagggactgaatgtatggagactgttcaaaccaggggcgctcaggggcaaacctgtgaaatcggtttcctgcttccagttcttagcaattagatcctacccccagggactgaaatcagtcccactcccaaaaggtaaccacaaaatgccaaagatctgttcatcttcactctcagcacaataccatgtatcataaatgagaggcaaaggcagaatttctaatttacttattattaaaatgcatcatcaacaaacacaccatagtggggaacacgaagcgatgtgttgcagtgtagtgttgctcaaatgtgaaaaagcagcgacccctgagagtctcctttgttttgttacctctctctctagaaaaagcactgcattgtaagtgacttggtccaaccagtgaaaaatacaaacaggaccattcatagacaaaaaagtgaagaataaaattcagtggtcactcaagtataataaatagacccaaatgatcagaaatgtgtttatgytgattgttttagagcattaaaaaatccaaaaatttgggaggctaaggtgggtggattgcttgagcctaggagtttgagaccagcttacacaacatagtgagaccccatctctac

SEQ ID NO: 34315 - DNA, 725 bp, Homo sapiens
gggctgacaacactttcttgccctttctccccaaaagcgtaataaagtgtgggtgaaattgtttgtactaatatatgaacaccttttatagatcattaaggaaaagacaaacatccccattgaaaaacaggctatagaaggaggatcccaagatctacgccccagaatctcgtcccaaagcctagcaccaaaacagcaaagcagtcstccttcaagaaaactgaaggcagctggtcatggtggctcacgcctgtaatctcagcactttgggaggctgagacaggcggatcacgaggtcaggagttcgaaaccagcctgaccaacatggtgaaaccgtgtctctactaaaaatacaaaaattagctgggcatggtggcacgtgcctgtagtaccagctactcgggaggctgaagcagaagaattgcttgaatctgggaggcagaggttgcagtgagccaagatcacgctactgcactccagcctgggcgagagagagagagaaaaaaaaaaaaagggacaagaattagagactggaattgtggcagtgggcagtgaggaacagacggtgatgtgaactggagaagggtaatgcccagcttcagagagggcgtggcacagccactgggcctcaagatttctcaacgaaaaaccattcacaggtgttaggtgggatgcatggagagccagccaaggcccaggttttctgtgacagctgtgcttcaccc

SEQ ID NO: 34316 - DNA, 725 bp, Homo sapiens
gggctgacaacactttcttgccctttctccccaaaagcgtaataaagtgtgggtgaaattgtttgtactaatatatgaacaccttttatagatcattaaggaaaagacaaacatccccattgaaaaacaggctatagaaggaggatcccaagatctacgccccagaatctcgtcccaaagcctagcaccaaaacagcaaagcagtcctccttcaagaaaactgaaggcagctggtcatggtggctcacgcctgtaatctcagcactttgggargctgagacaggcggatcacgaggtcaggagttcgaaaccagcctgaccaacatggtgaaaccgtgtctctactaaaaatacaaaaattagctgggcatggtggcacgtgcctgtagtaccagctactcgggaggctgaagcagaagaattgcttgaatctgggaggcagaggttgcagtgagccaagatcacgctactgcactccagcctgggcgagagagagagagaaaaaaaaaaaaagggacaagaattagagactggaattgtggcagtgggcagtgaggaacagacggtgatgtgaactggagaagggtaatgcccagcttcagagagggcgtggcacagccactgggcctcaagatttctcaacgaaaaaccattcacaggtgttaggtgggatgcatggagagccagccaaggcccaggttttctgtgacagctgtgcttcaccc

SEQ ID NO: 34317 - DNA, 725 bp, Homo sapiens
gggctgacaacactttcttgccctttctccccaaaagcgtaataaagtgtgggtgaaattgtttgtactaatatatgaacaccttttatagatcattaaggaaaagacaaacatccccattgaaaaacaggctatagaaggaggatcccaagatctacgccccagaatctcgtcccaaagcctagcaccaaaacagcaaagcagtcctccttcaagaaaactgaaggcagctggtcatggtggctcacgcctgtaatctcagcactttgggaggctgagacaggcggatcacgaggtcaggagttcgaaaccagcctgaccaacatggtgaaaccgtgtctctactaaaaatacaaaaattagctgggcatggtggcacgtgcctgtagtaccagctactcgggaggctgaagcagaagaattgcttgaatctgggaggcagaggttgcagtgagccaagatcacgctactgcactccagcctgggcgagagagagagagaaaaaaaaaaaaagggacaagaattagaractggaattgtggcagtgggcagtgaggaacagacggtgatgtgaactggagaagggtaatgcccagcttcagagagggcgtggcacagccactgggcctcaagatttctcaacgaaaaaccattcacaggtgttaggtgggatgcatggagagccagccaaggcccaggttttctgtgacagctgtgcttcaccc

SEQ ID NO: 34318 - DNA, 1255 bp, Homo sapiens
  misc_feature (1)...(1255): n = A,T,C or G
tnnnnnnnnnnnnnnnnnnnnnnnnnnnnnnnnnnnnnnnnnnnnnnnnnnnnnnnnnnnnnnnnnnnnnnnnnnnnnnnnnnnnnnnnnnnnnnnnnnnnttgaattgaaatcacagaagagaataactggggaatggttatatacaaagggcaagaaggacatttcagggaaactaaacagtataaacaaaggtcccatagcacttctttcaagaaggcagctgattaggtgcgagaatctccactcccatggagatacacatattgttccacattaaggcacagttgsgctcaaaaaagaaaggacatctctatatgccaagaattaataagggactcaaaattacaaagataagcagttttcgaaaccacccagaccttgagagaaattagaccagacataattttaagggctggtgtgttcatacctttgtggaagaggaattgattcctcaggccccaaatacatcaaggagtagaaaaggggaatcctgcttagcactaattgcccaaaaatgtgctgaaaatcttatgaacatcacctggaaattttctccagcaggccaagagttacaggaaaaagtaagctgacttcctggggctctcagaagcagagattccaacagctgtcctaccacacactgagaagcttgaatcttgaacccgcatcatgcactaccacaaaatcaaccacctttttattgcccatgcaccatgggaatcaggagctaagagcctagtataaacaatggtttggaatcagtgaactcagtaggacttgggcaagggcaatggtgaacctctgccatgaagaggcctccgcaatatctggacatggacaagactccctctaaaggtaactcctcctgaagataagcttgtagacctaaactatgaaacacatgaagaaatacaaaataaaaagggaaatttggacaaagaatttatgtctgggaaaccaaaaatatgagtattgttaaatagattttttaatgaatattttaactgtacaaaaagaaaagaaaatgtagaatctaatttttataagatacaaaataaataagaacagattgatttcaaaatgaaccaagtggaaacatccagaagtgaaacatgtagccaaaatagaaagaacaataaacaggttaaacaatagactcagataaaaaaataattcatgaatgggaatatggatctgaggaaatcactcagaacacagctcagatcagtaaagaaacggaaaatatgaaaga

SEQ ID NO: 34319 - DNA, 1255 bp, Homo sapiens
  misc_feature (1)...(1255): n = A,T,C or G
tnnnnnnnnnnnnnnnnnnnnnnnnnnnnnnnnnnnnnnnnnnnnnnnnnnnnnnnnnnnnnnnnnnnnnnnnnnnnnnnnnnnnnnnnnnnnnnnnnnnnttgaattgaaatcacagaagagaataactggggaatggttatatacaaagggcaagaaggacatttcagggaaactaaacagtataaacaaaggtcccatagcacttctttcaagaaggcagctgattaggtgcgagaatctccactcccatggagatacacatattgttccacattaaggcacagttgggctcaaaaaagaaaggacatctctatatgccaagaattaataagggactcaaaattacaaagataagcagttttcgaaaccacccagaccttgagagaaattagaccagacataattttaagkgctggtgtgttcatacctttgtggaagaggaattgattcctcaggccccaaatacatcaaggagtagaaaaggggaatcctgcttagcactaattgcccaaaaatgtgctgaaaatcttatgaacatcacctggaaattttctccagcaggccaagagttacaggaaaaagtaagctgacttcctggggctctcagaagcagagattccaacagctgtcctaccacacactgagaagcttgaatcttgaacccgcatcatgcactaccacaaaatcaaccacctttttattgcccatgcaccatgggaatcaggagctaagagcctagtataaacaatggtttggaatcagtgaactcagtaggacttgggcaagggcaatggtgaacctctgccatgaagaggcctccgcaatatctggacatggacaagactccctctaaaggtaactcctcctgaagataagcttgtagacctaaactatgaaacacatgaagaaatacaaaataaaaagggaaatttggacaaagaatttatgtctgggaaaccaaaaatatgagtattgttaaatagattttttaatgaatattttaactgtacaaaaagaaaagaaaatgtagaatctaatttttataagatacaaaataaataagaacagattgatttcaaaatgaaccaagtggaaacatccagaagtgaaacatgtagccaaaatagaaagaacaataaacaggttaaacaatagactcagataaaaaaataattcatgaatgggaatatggatctgaggaaatcactcagaacacagctcagatcagtaaagaaacggaaaatatgaaaga

SEQ ID NO: 34320 - DNA, 488 bp, Homo sapiens
agcctggccaacatggtgaaaccccgtttctactaaaaatacaaaaaataagccaggcatagtggcatgcttgtaatcccagctactcaacttgggtgcctgaggcacgagaatcacttgaacagggaggcagaggttgcagtgacccgagattgcaccactgcactccagcctaggcaacagagcragactctgtcttaaaagaaaaaaaaaagcaataatatgcatttccctccttaattaaatggtgaataaacttcatttattctataactaaaattagtggcatttgccagttgtacatatgtgtcatatgattctttcagggataatatgaggtatcgaatgttaataaatgtagaaatatttataaaaatcaatgtaatacttagagcaacatcataaacacatttatagtagttttgatgagttagtcacaaggattgtgcctttgtgatatcaaaggatcacaaagctgacagccttcc

SEQ ID NO: 34321 - DNA, 529 bp, Homo sapiens
  misc_feature (1)...(529): n = A,T,C or G
tnnnnnnnnnnnnnnnnnnnnnnnnnnnnnnnnnnnnnnnnnnnnnnnnnnnnnnnnnnnnnnnnnnnnnnnnnnnnnnnnnnnnnnnnnnnnnnnnnnnntaatattgttgtctaatatttgaatactccatatttgaattttcccggtaattcttttatgacagctttttttttgagatgaagtctcgctctgtcacccaggctggagtgcagtggcgcgatctcggctcattgcaacctccgcctccccrgttcaagcaattctcctgcctcagcctcttgagtagctgggattataggcatatccgccaccatgcctgactaattttgtatttttagtagagacgggatgtcaccatgttgatcaggctggtctcgaactcctgacctcaggtgatctgcctgccttggcctcccaaagtgctgggattataagcatgagccactgcacccagcctatgacagcttttttctttttaaaaaatctatttcaggatctagtctggtattaagcattgcatgtgagt

SEQ ID NO: 34322 - DNA, 1093 bp, Homo sapiens
ccttcattgggaaaatggaaatggcgtccagtacttctgcacagaatttggtaaagttaaaacaaaatatctttcaataaaacataatatagtatttgtttgataattagagttggaagaaaaaagagagaatttcttttgggcagtgaaaataaagcagttaacagtcctaactggctctggtcttctgattagtcggcccatggctctgcatggtgagcgtgggttctgtgtggtgagcgtggcctctgcacatggctctgcatggtgagkgtggcctcttcccgtgggttctgcgtggtgagcctggcctcttccctaggttctgcatggttagtgtggcctctgctcgtgggttctgcatggtgaggcctctgcccatgggttccacgtgccgagcatggtctctgactgtgggttctgcttggtgagtgtggcctctgcctgtgggttctgcgtggtgagcgtggcctctgaccatgagttctgtgtggtaagcgtgacctctgcctgtgggttctgtgtcgtgagcatgggctgtgtccgtgggttctgtgtggtgagtatgggctctgcacatgggttctgtgtggtgaccgtggtctctgcccgtgggttctgtgtggtgaccgtggcctctgcccatgggttctgcatggtgagcatggcctctgtcccaggacctttgtctctgtgcacagcatggcttctgggccctcctcccacagttgatgattgaacaactgaggcagggctccagaggctgcctgtcctgggaattgactctgcatgtatcagactcctaagatcccaggaccccacggttataagatcctagaagaatgaggatgcttccaaggcaattcaagattccagataacctcagcagcctgtgatgccccatgtgaggactcctgggaccagccggaatgccctgatctagagtggtctcttttatccgtgaaaccagggagctgggggctttcatcccacccagagcttcaccagccaccacttgtctctattttcacaagagacgcagtgtgctgtgacctcaccttctaagaaatgtcacagggttgacttcctggga

SEQ ID NO: 34323 - DNA, 513 bp, Homo sapiens
  misc_feature (1)...(513): n = A,T,C or G
gcggacgcggnnnnnnnnnnnnnnnnnnnnnnnnnnnnnnnnnnnnnnnnnnnnnnnnnnnnnnnnnnnnnnnnnnnnnnnnnnnnnnnnnnnnnnnnnnnnnnnnnnnnatgcgcagccgcccccggcgggtaaggggcgggcagggcccgaaaggccacacgggcctggtgcggcaccggtctctcgtgagccgctctaccttcccgcctgcggggaacacttccgccgcttcgaggccattttatctcygtcctccgtccccaaggcccgggttgagaggggtgctctggcggccggagagaccggccactcacggaggccggaggatgccctccccgggctgagcggcggcgctcgttttttcctcgcctcggggtcgcccccttcacctcccttgggcctctcctgaggacctggcggcactaacgagttcagcaaggaaaaaaagaaacattcgttccctacatttcatgtcacgcagtaggatgttactacgttctcttgtagact

SEQ ID NO: 34324 - DNA, 713 bp, Homo sapiens
cctctgtacatctttgctctgcttccattgctaattccctagtaaagtgttgtatattcaaagttccaaagaaacagaatatccaagacatcaccaatcatccaaaacacagtgtaggaggccacagttaagagaagcaagaccattagctctttttataggctcgagaacaacaggatgctttggtcctgtatcagcaggacgcttttcgggtagatcctactgccaccctagctatgggcacatgtcagagtcccatgtaataaaggagacaaaaggaaaccaccacgagtataaactaagaaaagtactccaaggtttctaagratggagctgtataactcactttgccccatttgttacttctccacggtacttaccaccacctattacatatattttgtttatagtcagtcttccctcattacaatgaaagttccgtgaggataggaatatacagtcagccctcagtatccatggaggactagtttcaggatctcctgaggataacaaaggatactcaagtccctgatataaaatgacatagtatttgcacatcacctttgcacatcctcccatatacttcatatcaactctagatcactcataatatccgatgtaaatgtcatgcaaatagttattgtactatattgtgtaaggaataaggacaagaaaaaagtctgtacacgttcagtacagacgcaatttttttt

SEQ ID NO: 34325 - DNA, 713 bp, Homo sapiens
cctctgtacatctttgctctgcttccattgctaattccctagtaaagtgttgtatattcaaagttccaaagaaacagaatatccaagacatcaccaatcatccaaaacacagtgtaggaggccacagttaagagaagcaagaccattagctctttttataggctcgagaacaacaggatgctttggtcctgtatcagcaggacgcttttcgggtagatcctactgccaccctagctatgggcacatgtcagagtcccatgtaataaaggagacaaaaggaaaccaccacgagtataaactaagaaaagtactccaaggtttctaagaatggagctgtataactcactttgccccatttgttacttctccacggtacttaccaccacctattacatatattttgtttatagtcagtcttcccycattacaatgaaagttccgtgaggataggaatatacagtcagccctcagtatccatggaggactagtttcaggatctcctgaggataacaaaggatactcaagtccctgatataaaatgacatagtatttgcacatcacctttgcacatcctcccatatacttcatatcaactctagatcactcataatatccgatgtaaatgtcatgcaaatagttattgtactatattgtgtaaggaataaggacaagaaaaaagtctgtacacgttcagtacagacgcaatttttttt

SEQ ID NO: 34326 - DNA, 713 bp, Homo sapiens
cctctgtacatctttgctctgcttccattgctaattccctagtaaagtgttgtatattcaaagttccaaagaaacagaatatccaagacatcaccaatcatccaaaacacagtgtaggaggccacagttaagagaagcaagaccattagctctttttataggctcgagaacaacaggatgctttggtcctgtatcagcaggacgcttttcgggtagatcctactgccaccctagctatgggcacatgtcagagtcccatgtaataaaggagacaaaaggaaaccaccacgagtataaactaagaaaagtactccaaggtttctaagaatggagctgtataactcactttgccccatttgttacttctccacggtacttaccaccacctattacatatattttgtttatagtcagtcttccctcattacaatgaaagttccgtgaggataggamtatacagtcagccctcagtatccatggaggactagtttcaggatctcctgaggataacaaaggatactcaagtccctgatataaaatgacatagtatttgcacatcacctttgcacatcctcccatatacttcatatcaactctagatcactcataatatccgatgtaaatgtcatgcaaatagttattgtactatattgtgtaaggaataaggacaagaaaaaagtctgtacacgttcagtacagacgcaatttttttt

SEQ ID NO: 34327 - DNA, 713 bp, Homo sapiens
cctctgtacatctttgctctgcttccattgctaattccctagtaaagtgttgtatattcaaagttccaaagaaacagaatatccaagacatcaccaatcatccaaaacacagtgtaggaggccacagttaagagaagcaagaccattagctctttttataggctcgagaacaacaggatgctttggtcctgtatcagcaggacgcttttcgggtagatcctactgccaccctagctatgggcacatgtcagagtcccatgtaataaaggagacaaaaggaaaccaccacgagtataaactaagaaaagtactccaaggtttctaagaatggagctgtataactcactttgccccatttgttacttctccacggtacttaccaccacctattacatatattttgtttatagtcagtcttccctcattacaatgaaagttccgtgaggataggaatakacagtcagccctcagtatccatggaggactagtttcaggatctcctgaggataacaaaggatactcaagtccctgatataaaatgacatagtatttgcacatcacctttgcacatcctcccatatacttcatatcaactctagatcactcataatatccgatgtaaatgtcatgcaaatagttattgtactatattgtgtaaggaataaggacaagaaaaaagtctgtacacgttcagtacagacgcaatttttttt

SEQ ID NO: 34328 - DNA, 713 bp, Homo sapiens
cctctgtacatctttgctctgcttccattgctaattccctagtaaagtgttgtatattcaaagttccaaagaaacagaatatccaagacatcaccaatcatccaaaacacagtgtaggaggccacagttaagagaagcaagaccattagctctttttataggctcgagaacaacaggatgctttggtcctgtatcagcaggacgcttttcgggtagatcctactgccaccctagctatgggcacatgtcagagtcccatgtaataaaggagacaaaaggaaaccaccacgagtataaactaagaaaagtactccaaggtttctaagaatggagctgtataactcactttgccccatttgttacttctccacggtacttaccaccacctattacatatattttgtttatagtcagtcttccctcattacaatgaaagttccgtgaggataggaatatacagtcagccctcagtatccatggrggactagtttcaggatctcctgaggataacaaaggatactcaagtccctgatataaaatgacatagtatttgcacatcacctttgcacatcctcccatatacttcatatcaactctagatcactcataatatccgatgtaaatgtcatgcaaatagttattgtactatattgtgtaaggaataaggacaagaaaaaagtctgtacacgttcagtacagacgcaatttttttt

SEQ ID NO: 34329 - DNA, 713 bp, Homo sapiens
cctctgtacatctttgctctgcttccattgctaattccctagtaaagtgttgtatattcaaagttccaaagaaacagaatatccaagacatcaccaatcatccaaaacacagtgtaggaggccacagttaagagaagcaagaccattagctctttttataggctcgagaacaacaggatgctttggtcctgtatcagcaggacgcttttcgggtagatcctactgccaccctagctatgggcacatgtcagagtcccatgtaataaaggagacaaaaggaaaccaccacgagtataaactaagaaaagtactccaaggtttctaagaatggagctgtataactcactttgccccatttgttacttctccacggtacttaccaccacctattacatatattttgtttatagtcagtcttccctcattacaatgaaagttccgtgaggataggaatatacagtcagccctcagtatccatggaggactagtttcaggatctcctgaggataacaaaggatactcaagtccctgatataaaatgacatagtatttgcacatcacctttgcacatcctcccatatacttcatatcaactctagatcactcataatatccgatgtaaatgtcatgcaaatagttattgtactatattgtgtaaggaataaggacaagaaaaaagtctgtacaygttcagtacagacgcaatttttttt

SEQ ID NO: 34330 - DNA, 692 bp, Homo sapiens
tgcattgaataaactccattcaggcgtgagtgctgtagtgccattggctgtgagttcartgttaatgaatgaacaatgtatattatttatttattcttcatttaattaattattattatttttttttgagatagagtctcactctgttgctcaggctggagtgcagtggtgcagtcttggctcactgcaacctctgcctcctgggttcaagcgattcccctgccttagcctcccaagtagctaagactacaggcatgcgccaccatgcctggctaatatatatatatattttttgtagttttagtagagacggggtttcaccacgttggccaggctggtctcgaactccagacctcaaatgatctgcccgccttggcttcccaaagtgctgggattacaggcattagccactgtgcctggccaacaatatatattaaataagcacacatacaacaaaagtaggtgttggtaagcttacaaaaatgtgaccagtagcttgctgaaacctaactttttatttgttcatggaactttctagaccgtaactacactgaataatgagaatctgctgtaatctttttaggtgctgtagatgagccattggattaaattattacagtatgtttcagactgctctatgttgaaccctagtgaaatgcctctcaaaccctcctaaggatcacaatctcatg

SEQ ID NO: 34331 - DNA, 692 bp, Homo sapiens
tgcattgaataaactccattcaggcgtgagtgctgtagtgccattggctgtgagttcaatgttaatgaatgaacaatgtrtattatttatttattcttcatttaattaattattattatttttttttgagatagagtctcactctgttgctcaggctggagtgcagtggtgcagtcttggctcactgcaacctctgcctcctgggttcaagcgattcccctgccttagcctcccaagtagctaagactacaggcatgcgccaccatgcctggctaatatatatatatattttttgtagttttagtagagacggggtttcaccacgttggccaggctggtctcgaactccagacctcaaatgatctgcccgccttggcttcccaaagtgctgggattacaggcattagccactgtgcctggccaacaatatatattaaataagcacacatacaacaaaagtaggtgttggtaagcttacaaaaatgtgaccagtagcttgctgaaacctaactttttatttgttcatggaactttctagaccgtaactacactgaataatgagaatctgctgtaatctttttaggtgctgtagatgagccattggattaaattattacagtatgtttcagactgctctatgttgaaccctagtgaaatgcctctcaaaccctcctaaggatcacaatctcatg

SEQ ID NO: 34332 - DNA, 692 bp, Homo sapiens
tgcattgaataaactccattcaggcgtgagtgctgtagtgccattggctgtgagttcaatgttaatgaatgaacaatgtatattatttatttattcttcatttaattaattattattatttttttttgagatagagtctcactctgttgctcaggctggagtgcagtggtgcagtcttggctcactgcaacctctgcctcctgggttcaagcgattcccctgccttagcctcccaagtagctaagwctacaggcatgcgccaccatgcctggctaatatatatatatattttttgtagttttagtagagacggggtttcaccacgttggccaggctggtctcgaactccagacctcaaatgatctgcccgccttggcttcccaaagtgctgggattacaggcattagccactgtgcctggccaacaatatatattaaataagcacacatacaacaaaagtaggtgttggtaagcttacaaaaatgtgaccagtagcttgctgaaacctaactttttatttgttcatggaactttctagaccgtaactacactgaataatgagaatctgctgtaatctttttaggtgctgtagatgagccattggattaaattattacagtatgtttcagactgctctatgttgaaccctagtgaaatgcctctcaaaccctcctaaggatcacaatctcatg

SEQ ID NO: 34333 - DNA, 692 bp, Homo sapiens
tgcattgaataaactccattcaggcgtgagtgctgtagtgccattggctgtgagttcaatgttaatgaatgaacaatgtatattatttatttattcttcatttaattaattattattatttttttttgagatagagtctcactctgttgctcaggctggagtgcagtggtgcagtcttggctcactgcaacctctgcctcctgggttcaagcgattcccctgccttagcctcccaagtagctaagactacaggcatgcgccaccatgcctggctaatatatatatatattttttgtagttttagtagagacggggtttcaccacgttggccaggctggtctcgarctccagacctcaaatgatctgcccgccttggcttcccaaagtgctgggattacaggcattagccactgtgcctggccaacaatatatattaaataagcacacatacaacaaaagtaggtgttggtaagcttacaaaaatgtgaccagtagcttgctgaaacctaactttttatttgttcatggaactttctagaccgtaactacactgaataatgagaatctgctgtaatctttttaggtgctgtagatgagccattggattaaattattacagtatgtttcagactgctctatgttgaaccctagtgaaatgcctctcaaaccctcctaaggatcacaatctcatg

SEQ ID NO: 34334 - DNA, 1380 bp, Homo sapiens
cacatcggtagcatcctgtgcaccatgaggacttagggacccacgggccattttcctgagagacagcagccagccagccctgaccgcaggagctcagacagccagatagccctaagcagctgagtctggtgggcgaacttttctgagtggctgccagtttgtgatggtccccacagaagcgcctctgttattttgtgcagtgtgtctctaagtattccagtgaggacacccaccacttctcttgaatgtacagactcctctgtgggggtttttctccctgcttgtcagcttcagtcttctttgttcagaatcttccctcttcctctggacttaccccttcaacacgaccacaacctcaagaatgtgatgtttgcacttacaacgttctatgaaatccagcaaaacagcctcagtggacaactcttctacttaaggagatttttgtttttctcttctcttgtttaaatctagcatagacacctttatcaagtacacgggtatgtcttaagtgacttttgtggcatttctaagctttaatgtgacttagattaaaggtgtttaaaaaggagaaaacaaagacaaattttgaactctccttcgaactaaaaaattgtgctgaactccttaatatttgaaatattgatattctgagaggtaaaagaatgttaagtaaatatttcacatggacaaataatttactgtcataatcgtcttttagaaatgctttgctcgtaaagagactcacagctgcctttctagtttaggtttcaatctgtacatcaaatgagcaattcagcaggacatcttggtacagggttcaagaagctgttaagaatggttgcttggggagggtcatttgagcccaggagttccaggttacaatgagccatgatcgcaccattgcactccagcctgggcgacaaagcaagacactgtctcattaaattaaaaaaaaaaaatagaaaaagaaagaaaagaaaaagaatggctgcctgtatacccccagggaactgaagcagtgcccttgagcatgcctacaggccaagacctgcactctgacaatatctcattaaattggcatgaaataaaaacagaaaaaggaggacctttttccatcccaatgaaaacagatggarggactgtggaaagggcaaggttttagcgatatatcagcctgggttcaaatttcagaccttcacttactaactacactgtgagcaagttacttaacccctctcataagaaagcaatgagtagtagaagccagcatagattcattaataacatcttaggtcaaaccgacataatattttttataaggttactatgcatagacagaatgtaacttaattttggcacagtattagaaagcacatctcc

SEQ ID NO: 34335 - DNA, 1291 bp, Homo sapiens
tgcatacctgtgcatatccacacacatgcaagctcactagatacaaatgaatatttactgaatgcccgttatgttgtaggttgatgctgaagtggtgaacttgactgacagtctttgtgctcacactgtttacagtctagtgtgacaataaataaataattaaatataatctttataggaaaagaaaaaaatagaattgagagacaatgacatttgctatttatagcgtcccattcagagaaaatagaacctgaaacatggaagaatttttgtttacttaccttaaagagagtacaatcatgcacttcctaatgatgtttcagtcaaagatggaccacacatcttatggtggtccataagattataatgctttatttttactgtaccttttccatatttgtatctacttagatacaaaaataattaacatcgtgtaaacgtttaaggcaaatgcaattgcctatggtattcaatacagtaacatgctatacaggtttgtagtttaggataagtaggctatgccccatagcctacgggtgtagtacgttataccacttaggtttgtgtaagtatgctatggtgttttcacaatgacagagccacctcatgttgcatttctcagaacatactgcatgattaagtaacacatgactgcataaagcaatgtggatgccagattacagaggctaaactattttgtatataaaatgggtaaagaaagcagttcttagggaagatgctgaaatagagagagtggagatggaagggctttgttggaaagtctataagattgaagacaaaagggatctgggaggactgaaaagaaaacccatgctatgtaatataaatcctttttcttgccccactgctgaatctccagaaaaatcctttttttttttttaaatcagggtccaatgaggtagattttcctttgggaatgaagagaattgctgaattctgcccaaggttgactagggagaatcacacccacccataaggtagcatctgttatgcaaaaagtaaaagaaaagtgtggagaatatgacaagttcagcacttgcttattcagtacttactctgtctcaggcctcctgggaaggtctggggtaaaaatggtaactaagccagtccctatgctcaataagcacatgatctatgggactyaaacagaaaaaatatttgatctgtttttcaatccatcattcatggatccaagacttctaaaaataaagtaaaacaaacaagctaactacatttaaacaagtatagaatctaagtatctatagtaaaa

SEQ ID NO: 34336 - DNA, 1944 bp, Homo sapiens
ttgacttttaatggtatctcattgcctggaagttaaataatgaatttttttgtttctatgttttcccatgacttttwgaaatttgggaattttaaaagaaaaaatgtgactcagtctcttaccttgatatgacacacaacgtaaagacaactggattacatggctaaaatagactcaatcctcctgaatactaaagtgaagtcagattctctcactgaacttaatattcataaaagagcagaattgggaaggctgtaatcatcatctagttgactgtacatctcagagatgaggaaacctgtggcagagacaatgctataaattcactaacttatttatactttccttggacatgcaaaaagactgatttgctagccctccttgaacctatttgctactgagttctattcaatggagtaggcagaaatggggtacctcacttccaggcctaaccttagaatgtattgtacaatcttctctctttctctctctgtctctgtctctgtctctcccagaagtttgctaagataaaagggaaagactcttttgccagacaaagttgcctagaagagcattggactttatgggaatgagaaattattttttatatatattcatttatttatttagagacaggagacagggtcttgctcctttgcccagctggggtgcagtggcataatcttggctcactgcagcctcaaactcccaggctcaagggatcctcccacctcagcctcccaacttgctgggactacagacatataccaccttgcctggcttgagaagccaggtattattgtattaagccttggaaattctgcaggattatttgtcaccacagcgtagactagcctatcttgatggataaataaactgaagttcataactacttagtagcttgcttagatttactcagggagtaaactatttgctgctggtgatgatactaggcaggtgcccccagtcaaatcatttttacaaatattcatctgtgttaacatagacccaggcctataaatattatttttattgacctaaatacagatgaactcacttcagtctatgttttcagagatccactgttacatacatatgtatttcattacataggaaaaggcctagaaatcgtggtggggaaaggaaagggacggagctgaggggaagaagtcaggaggagagggaaatagtgatgctttaacattaccaactgtattatttaaatatttttgcaatgaaaatgtattcatgtactactattaatatttaaaatagaaagaaaaaaagaaaaatcctgcatcgccataattactcctgcaactgctatgctcagtatttcaacacctattgaaatcctgtcaaccctttaaggctcactcaaatgctgtccactccctggatgtttttcctaaagctttccagaagcaatgatatttctttcttctaaacacctgcagaacccagtggctgcttatggaggcactgcctttgtctttgtcttgtatttgagttatgtggacaaacattctatttccttatttgatagaacttttctgaaaagtagagactatattgctcttcgtcagaaaaattgcactaaagtaaaaatcaggggatttctggaatggcaaagtaaatagcttggcaaatctcctcctcaaggagagaggataaaactggaaaagactgttaaaaaacaatgattttaggactctaggcatacaacaaattgagatgcatttattcaagaaaagttactgaactccaggtaaaaacagtgggagtctgtgatgttataacctgggttactccatccctcaattatagcacctccagctccatagccatggcagttccaccataactgagaaatccataaaaaccagcaacttccctgccaaaggaggctaacttcacttagaggcgagaatggaaaaaaatcca

SEQ ID NO: 34337 - DNA, 1944 bp, Homo sapiens
ttgacttttaatggtatctcattgcctggaagttaaataatgaatttttttgtttctatgttttcccatgactttttgaaatttgggaattttaaaagaaaaaatgtgactcagtctcttaccttgatatgacacacaacgtaaagacaactggattacatggctaaaatagactcaatcctcctgaatactaaagtgaagtcagattctctcactgaacttaatattcataaaagagcasaattgggaaggctgtaatcatcatctagttgactgtacatctcagagatgaggaaacctgtggcagagacaatgctataaattcactaacttatttatactttccttggacatgcaaaaagactgatttgctagccctccttgaacctatttgctactgagttctattcaatggagtaggcagaaatggggtacctcacttccaggcctaaccttagaatgtattgtacaatcttctctctttctctctctgtctctgtctctgtctctcccagaagtttgctaagataaaagggaaagactcttttgccagacaaagttgcctagaagagcattggactttatgggaatgagaaattattttttatatatattcatttatttatttagagacaggagacagggtcttgctcctttgcccagctggggtgcagtggcataatcttggctcactgcagcctcaaactcccaggctcaagggatcctcccacctcagcctcccaacttgctgggactacagacatataccaccttgcctggcttgagaagccaggtattattgtattaagccttggaaattctgcaggattatttgtcaccacagcgtagactagcctatcttgatggataaataaactgaagttcataactacttagtagcttgcttagatttactcagggagtaaactatttgctgctggtgatgatactaggcaggtgcccccagtcaaatcatttttacaaatattcatctgtgttaacatagacccaggcctataaatattatttttattgacctaaatacagatgaactcacttcagtctatgttttcagagatccactgttacatacatatgtatttcattacataggaaaaggcctagaaatcgtggtggggaaaggaaagggacggagctgaggggaagaagtcaggaggagagggaaatagtgatgctttaacattaccaactgtattatttaaatatttttgcaatgaaaatgtattcatgtactactattaatatttaaaatagaaagaaaaaaagaaaaatcctgcatcgccataattactcctgcaactgctatgctcagtatttcaacacctattgaaatcctgtcaaccctttaaggctcactcaaatgctgtccactccctggatgtttttcctaaagctttccagaagcaatgatatttctttcttctaaacacctgcagaacccagtggctgcttatggaggcactgcctttgtctttgtcttgtatttgagttatgtggacaaacattctatttccttatttgatagaacttttctgaaaagtagagactatattgctcttcgtcagaaaaattgcactaaagtaaaaatcaggggatttctggaatggcaaagtaaatagcttggcaaatctcctcctcaaggagagaggataaaactggaaaagactgttaaaaaacaatgattttaggactctaggcatacaacaaattgagatgcatttattcaagaaaagttactgaactccaggtaaaaacagtgggagtctgtgatgttataacctgggttactccatccctcaattatagcacctccagctccatagccatggcagttccaccataactgagaaatccataaaaaccagcaacttccctgccaaaggaggctaacttcacttagaggcgagaatggaaaaaaatcca

SEQ ID NO: 34338 - DNA, 626 bp, Homo sapiens
tacattcaaaccatgacactactttaactactttattattattcaccaaaggagaagtactaaattttatactgaaagacaactccaattgaagttcataagggtaatgtctataatatgcccatgaaataatttttaaggtgcatttaattatgaaactgtttggctgttcattgtgatattaccaagaaagtcaagtggatttttcacttaggtgttttggtgtagttgacgtagaaaatcattgctattaacaaggcaaattcaatcctgaacatcaaagattatgtatttgtatggcacataacttcagcatattatcaaatttggctcttttgtktgtaaaaatatcatttgaatgtgacaaaatagtcacatattgcttgtgcttaaaagaaagaagtaaggaagaaaggaaagaaggaagagagggaaggaggaaaaaatgaaggacagaagaaaagtaaatggacttctttggattttggattgggccttcttaccttttgttttactagtttacttggtgtacttttttccttgtcacgaattccaagaggctccaacaccaagacagatttctcctccggtatggcaaaaattacaaaaaaattgttaagtattta

SEQ ID NO: 34339 - DNA, 626 bp, Homo sapiens
tacattcaaaccatgacactactttaactactttattattattcaccaaaggagaagtactaaattttatactgaaagacaactccaattgaagttcataagggtaatgtctataatatgcccatgaaataatttttaaggtgcatttaattatgaaactgtttggctgttcattgtgatattaccaagaaagtcaagtggatttttcacttaggtgttttggtgtagttgacgtagaaaatcattgctattaacaaggcaaattcaatcctgaacatcaaagattatgtatttgtatggcacataacttcagcatattatcaaatttggctcttttgtttgtaaaaatatcatttgaatrtgacaaaatagtcacatattgcttgtgcttaaaagaaagaagtaaggaagaaaggaaagaaggaagagagggaaggaggaaaaaatgaaggacagaagaaaagtaaatggacttctttggattttggattgggccttcttaccttttgttttactagtttacttggtgtacttttttccttgtcacgaattccaagaggctccaacaccaagacagatttctcctccggtatggcaaaaattacaaaaaaattgttaagtattta

SEQ ID NO: 34340 - DNA, 626 bp, Homo sapiens
tacattcaaaccatgacactactttaactactttattattattcaccaaaggagaagtactaaattttatactgaaagacaactccaattgaagttcataagggtaatgtctataatatgcccatgaaataatttttaaggtgcatttaattatgaaactgtttggctgttcattgtgatattaccaagaaagtcaagtggatttttcacttaggtgttttggtgtagttgacgtagaaaatcattgctattaacaaggcaaattcaatcctgaacatcaaagattatgtatttgtatggcacataacttcagcatattatcaaatttggctcttttgtttgtaaaaatatcatttgaatgtgacaaaatagtcacatattgcttgtgcttaaaagaaagaagtaargaagaaaggaaagaaggaagagagggaaggaggaaaaaatgaaggacagaagaaaagtaaatggacttctttggattttggattgggccttcttaccttttgttttactagtttacttggtgtacttttttccttgtcacgaattccaagaggctccaacaccaagacagatttctcctccggtatggcaaaaattacaaaaaaattgttaagtattta

SEQ ID NO: 34341 - DNA, 537 bp, Homo sapiens
tgaatgtgtgtttatagcactttcaaggctaaggctgttatacagtaaatgatcagtaaacatggacatttaaaagctcattctctgctcagctatgaactgttttaaagctcaaatgtgattgcaagcctggggagaaaaatttgccatctagtatagtattctgagtgacacttagtggttgctatgccttaatatcgcaaagcacacacacacargcacacacacacatgcatgcacacgtacacactccagaaattacccctttataacagagatgcagactcagatacatggattatgtctgtaagtaatacgatgtggtagtgattccagttatcaaacctaggttaaatcaaaaccgtcccataattctaacccagagtacgagatagtgtcttaaatgacctccgccatccagtttttgtacttgaagaagtcaaatagttctcctctcaacttctgtctattttatacgttgctgttgaactgcctcattgtgattcttgaaggtgcaactgtatagtaattatccac

SEQ ID NO: 34342 - DNA, 539 bp, Homo sapiens
agggatagctgagctataaacaaagaaggaaatgtgagttataaaagacgtaaccacagagatgtttcataggtcactttcacagttgactcaatattgctcagtgtggaattaaactcctcaatgccaacttggcagcaagtgcactttttaatctctatatacaattatagtgttgacaagtcaaggggtcgagggggagacatgccacacagatttgtcttcaagaagagacttgttgcccagctgtggagagcatagtcagctgacagctggaaacggtcasctccctcagggtagaccgcagctgcaaaaagcctgctagtccaaaacttgggacatctctaacaaggaatatttgcttcagatgtcctccacctccactctggcatagggtggctgaggctatttggacctatagcaaactttggcctctctcactctgcccaagtgtgcttccttctaaccttcatgagtgtcgatacctaacaaacatcttgctccccaaatttagtctcaccatctacttctggagatct

SEQ ID NO: 34343 - DNA, 539 bp, Homo sapiens
agggatagctgagctataaacaaagaaggaaatgtgagttataaaagacgtaaccacagagatgtttcataggtcactttcacagttgactcaatattgctcagtgtggaattaaactcctcaatgccaacttggcagcaagtgcactttttaatctctatatacaattatagtgttgacaagtcaaggggtcgagggggagacatgccacacagatttgtcttcaagaagagacttgttgcccagctgtggagagcatagtcagctgacagctggaaacggtcacctccctcagggtagaccgcagctgcaaaaagcctgctagtccaaaacttgggacatctctaacaaggaatatttgcttcagatgtcctccacctccactctggcatagggtggctgaggctatttggacctatagcaaactttggcctctctcactctgcccaastgtgcttccttctaaccttcatgagtgtcgatacctaacaaacatcttgctccccaaatttagtctcaccatctacttctggagatct

SEQ ID NO: 34344 - DNA, 1208 bp, Homo sapiens
tgggaaaaaaaggaattaccttcttaaaacaaaatgctcttggctctatgttcatctctggctcttatttttgcagctcctgtcagtggacagcttggtgagttctcctgtctttggctcttcagcatctctggtaaagagtgtctcttcctaataaatagaaaacatttgtgatggctgcctgagctctctaatatctcctgttttcttgctgaggtcagcagggatttgaaagtgatgcctggtttactggcatcgcccaagggccaggatagctccatggtcaccccctgaccctccctgggggaagggatgaatgcccaagcagctcctggcttttgctaggccctgcatttactgttattgccaacagaccccatttagccaggcaggacatcttcaactccatggcaagtgtgctggactcaggataggatcctctccaatcagcgagccagaaaaatcctctgaaaacattccactgtgctgatgccagcaggaatgctgcrttttctacactttggagttaatcctccaggacatccaataactgggtccttacaaaaaagaaaggcacagaaaggggagatggggagaagacaagttatctgcatcccacatttaattagttctggctctcactgccattcctttggctcagagtggataattgagaatccatgaacagcaagaaccctctactaccgctctccttgtccaaatcagtggccccagctgtaaccttgtcctggtcacctctggatgtcagtgagtgacttgtctcttctttgctctgacacaattagctatggtgggattcttctgggcatttgaatcatcatttacaaaataaagatgttaggtaagttgagctctcaaggttttctcagggacaaatcttaagataatatgatttattctcttagggaaagtgcaaaattgtgattttatcatcacctttggagttttttatgagtgtatgaacatgatgaaatggcagcgtagtgttgattttctctgggacccactcccatgtaaggctacctaactgtgatatttgatggcgaatcctgctggtgtcaccttcctgaaatcattttgctcattgccatccctggtcaatttctcccttgggcgaggtgagggccatagactgacagggagctttaagttatcagtgaccctcccagaggacctctttcagatcc

SEQ ID NO: 34345 - DNA, 645 bp, Homo sapiens
agaattgcatattgactttttaagaaacacagatgatccacagtttggggatagggtccaggcatctgtgtttttaaaagctctgcatggcatggtggcgggcacctgtagtcccagctactcaggaggctgaggcaggagaatggcatgaacctgggaggcagagcttgcagtgagccgagatcacgccactgcactccagcctgggcgacagagcaagactccatctcaaaaaaaaaaaaaaaaaaaaaaaaaaaaaactctgcatgtgttctaatgaacagccagggttgttagcaattcaaaggattgttcatttggatcagttagaccaaaagttcactttgcctgtactgtctacacaaatccagagatgattaagagtgatttcaataaagatcctgaaggggttgtttcaacacaatagaatgctaaaaggggagaatggacataaaaactgtaactggttaccaagataacaagcctcttgttgrcataatgtggctttatccatttgaagcacagcactgaccatgtcacttgtgtgctaaaaaactgtgatagacaaactctttttctgttaaatattacagagaatctgatgatacaaaaaaaaatctcagaaaataacctctgttaactgtt

SEQ ID NO: 34346 - DNA, 1186 bp, Homo sapiens
tattggtgtggtgctgaaacagtgaggggtaacatccacaagcacagtccctcgctacagatccatgtgcagcgtgagtgttggagagccaggcatcttccctgcctctctctgccccttgggctctgtaggcatggggactatgtagcagagatgggttttatcatcctgacagaggcaccaggcttaggccaagaagtgcagtactataataaaagaaatacatgacttcttttctacctccattttcctaaaaactcagtcttcctttgaaattctatcacttcagaatcacagctgactcatggagttaggtttgagagctatggaaaacaaaacaaaacaagaaaatgaggtgccctgctagggatttggcagattctagaatggctagatcttaaggataactatttagaagacaagcatccaccttttcctggtcagtagcaatgaacagtgtgagtgcctatgatgtgtacagcagaaaagaaggagagatagatagatagataggcccaataaatatcacttaggtacaaaattatgacttttgaaaacagatgtggtccagcctagtgccatgatggctgctattgctattacctgyccctcaaaacaactcagacctccagccaggatgtcagacaaaacccaaatgcttcttcagggttagtccttttttctttcctggggcctcgtatatcaggatggaaagcttatcacatttagtgatattctcagcgctaaatctgtggtctattggccacaatgctagtgcctgctgaagagtatatcttgaagtcacataaaaagtaaccctgcccaacaccccagctacctagccctgccctccttcacacccgacccccacctgtggtctcattttcacatagggatccctgtgtctggggtgctcctggagacccagccctcagggggccaggctgttgaaggggagatgctggtccttgtctgctccgtggctgaaggcacaggggataccacattctcctggcaccgagaggacatgcaggagagtctggggaggaaaactcagcgttccctgagagcagagctggagctccctgccatcagacagagccatgcagggggatactactgtacagcagacaacagctacggccctgtccagagcatggtgctgaatgtcactgtgagaggtgag

SEQ ID NO: 34347 - DNA, 507 bp, Homo sapiens
gggagatatacctaatgctagatgacacgttagtggstgcagcgcaccagcatggcacatgtatacatatgtaactaacctgcacaatgtgcacatgtacactaaaacttagagtataataaaaaaaaattaaaaaaacaaaacaaacaaacaaaaaacaatattaggtcttccaatctatgaacaaaaaaaaaaaaagaaattttctaagatatctctggtgacaagaatgctttaagtccagactgggatggtgtgggtcccatccccattatttcccttcaaggccctctctgatcctctactcattgtgggattggacagataccctgagaagctataggttcagagggtaacctgatgagtggatcattcttgctggccagcacaatatttcttttgtggtatgatatggagactgggcctccagaatggtactgacatggtgatttttgggtgactctcactcatgtcagatacagaacaagttcaaggctctggactttg

SEQ ID NO: 34348 - DNA, 1111 bp, Homo sapiens
agcagattctgaggctcctctaggctttattttttctttatttttaaattttttaaaaactagttttctcaggttaaatcctccaggctctagaccactgagaaagaatactctctaagcactggtattatttgggttctagaactgcaccctagcccctcgatgaggggcatgaaaagcatctgactttccgtctttgctatgggtagcatttcctccctggctctcttgctgctggacagctccttcctccatagccctagacccactgctcatgccagccgtggctttaacttctgcaccaccagtaacaccatttcctctttgtccttccagccctgcaggtggagtggcctccagctgtcactaatctttatgtggcttctccgcggttccatcacctgtgtaaccaatcctctttcatgattccctctgtttgaaatgtctggggtgaattctgttttcctgacgtgatcctaactgatataacatgaaacataatgaaaggcctctgtaaagcggcacttccccatctcttgtgagatggtgcctatggtgtacagggaggcagagaccaaggttgctgggaaaaggatgttcacttcctgcatctgaagcatctggaacagaaattttcatagatgggccatggcctgcctgcatccaactcacctgggaagcaattcctggctgtcaccacaaaacggctgaatcaaattctctggctggggtcagaaactgtcaatttaaagaagttcctcctgagttgatatgtctcctaatacatgcagccaggcttccatagaaagctgccggtaacaggacacatagttcttgccaggcacacttcttacaggttcagtttcagttccgmctctaacttgtgatctcttgcagaaggggaatgtccttccctatacagggcagtcatttgggggatgactgatctatggttggaaaagcacaaacttacatgcagctctctcaaaaatcacagtagttttggaatcaggggagtggcttgtgtataaagcagtgtgacctgccagagagcaaagggcatgagtctttgaccctttcaggcctgcattcagatctaagctcagaaaac

SEQ ID NO: 34349 - DNA, 1427 bp, Homo sapiens
atacatgcaagtgtatggtcactgcagcactattcacaatagcaaagacgtggagtcaacccaaatgcacttaatgacagactggataaagaaaatgtggtacacatataccatggaacactatgcagccataaaaaggaatgagatcatgtcctttgcaggtacataggtggagctggaagccattaccctcagcaaactaattcaggaacagaaaaccaagcatctcatgttctcacttataagtgagagctgaatgaggagaacacatggacatatggggaaacagcacacattgggacctgtcgtgggggtcccacgataagaaactgaggcacagagaggttaaatcacttgttcaaagtcacatagctagtgagtggcagagccagaatgtgagctcaggtctctctgatgtggttttgtaggtcagaacctaatggtaaattcggcagaggagagaacaagcaaaaaatggtaactgtggcctcttcttggccctggatccatggttctcccttgaaatgacttatctcacacactggctttgccttttttttttttttttttcccagaaagacatgtggggagaaagcaaatgtgggactgctggattgctgtggaagatcgagtgggggtgagcttgttgcttctctctcagtgctgctggcaccaatagacaatataggactcttggaagtaaaaaagttcttcgtttgattgtgaaatcaagccaggccaaatggggatcagcagcaaatcagctttctgcattcctgttgagtaattctatgtgctggcctcctggctatatttagaagcaattcatggtctctatctttgctaaggagatggtacaacccaggggacgatgtctctgaagccaccccatgcaggcagagcttgacgtctgcagtcatacctttcctgtcgccccgccccctcttctcccattgcaaatgtcaagcttcccagcatctccgaggagaagttaacctccctggacacttattttgttgcctctagagttacttcagtgaaatgacctcatattaccttgagatcttttccctctaaatatgagtatttgggtgcacgtgatttccttcaggagggagggtcagcatcctggcagttgaagttctctgcagtttgtcatctgttctccttctctctagctctgggagacccctccctcactggattctttactacaatgctgcagccttctgtgtggtctgactttgaagtgctgttgccagttggtgatactggaaccttgggggaacaggcttggcaaaacagagctgggtgattccaggtggatgatggaaaccatggcctagtggggttgtgtygtagctgggttagcaaagacaattcgtggaaggtagcagaaagatattttaagatggagggtgggatcc

SEQ ID NO: 34350 - DNA, 574 bp, Homo sapiens
taacttttatcgtgattttcaccatgatgtatgtcttagaagaccagtgtgcctaaggtgtaagttagagggcctagagagagaacacaagaccaagaacacactctctcagcctctgcttctgccttgacctgccctggtgcactataagtgcatacatatgtgtggggttatgaattaatgatttcttcccaaatagagtgcttagcatcatgaaggcaaggaccaggtcttggttgttgacttctatatttagggctatggcatatggtagacaacaaaaaaatatttgcatgactaaataaataaatggataaatagcctcccctattaatcttcagttcaggaatgccatcgtagctagggaattccaagcttctcaacctcttttgtacccactgatctctatatcccaaacttctgggtaaagagcaactggttagacccagtgctgggakaactgatatgaattggattagtatagggcatataagttctcctattttgttgaatgcagccagaactaaacaatttcttttcatttcaggctttttgaagaaacaatatgtatcat

SEQ ID NO: 34351 - DNA, 1504 bp, Homo sapiens
tgaacattctcactgaggcttcttcacagtttgtacctgaagaacagaaatgatgattacatggagaaccttgttctgacccctaagatgaagtgggtgggttttgatttcttgttaccaaggtaacctctttcaatgagccttgaaaagataattactcagtgtgaagacttttgctttgcatggcacaccaatacagttcacagacaatcatttacataagaaacaaccggcacacacagattcaccttgattttatgaagtgcaactattcggagcataaacatatatctataaaagaacttaatcagcattaatttataagtatctcatcttaacatttaagataagtttttagagctctaaggattcaaaacaacaagcttgcccaatttccccattttataaatgataccggggcctaaaaattaaattataagcccaataatctcagagcatattaacagcagaaatgggactaaaaattaggtttcctgactcctggtccagtgttcttctcatcactttgtgtattttttatagctctccaccaatgaggcagactatatttttaaaatattatttttagttatttcaggtagaaattagtaattgacaacacttcaaaaataaagagaagctcaaattacaataaaatatcatgtagtctttccatccataaatagccatgttaattttccatatacatccaggcacctttctacagatggatcctatatttttaaaaaaggaagagagatcacattgtactgtattttaacctacttttttcctttaatattttattgtaaatatgagttccatgtcattaaacttgcatttgtggcagcatcttgctgacatagtttatttcccatcgcagtaaattttacacatgcagactcagtgaaattgaatctcaaattgggcctaccctgaattttttatgcccaaaagtcagcctcaatttgctccagacacaactctagtaaatcttggaatccaaaaagagaaaaactgtcttagtcacggcctaaggaaaaacagtgaaacccacagctcttagacagcgggaaaattgctcagtgctgtttataagagaaatgcatattaaaattgcaattaccgtttttctrttattaaattggaaaaggtcaacaagcctgacaacacattgtatgagagagcacgcagcgtggggggaaatcagcactcttatgtattgctgtgggaaaaaaaatcaatacagcctctatggagagaaactgagcaaaatctattaacattacaagtacaaacatccttcaattcagcaatatctttctaattctaggaaatattactcatatttatcttccaaagtgcaaaatgatatgtgcttgaagttaatgattgcatcacagtttctaatcaagaaagactgaaattatcttaaatacctataaataggggattggtgggcttatccatagaatgcaaaaccatgtagccacaaagaatgtgg

SEQ ID NO: 34352 - DNA, 1543 bp, Homo sapiens
tgtttttgtttttgagatagggtttcgctctgtcaccctggctagagttcggtggtgtgaacatggctcactgcagtcctgagctcccaggctcaagtgatccttcccacctcagcctccccagtagctgggactacaggtgcataacaccacacccaactaayttttttgtattttttgtagagacaagatttcactgtcacccaagctggtcttgaactcctggactcaagtgatccacccaccttggcctcccaaagtgctgagattacaggcgtgagccaccacgcgcagccataaagggtacatttttaaaagcacttcacaaatacgtattattcaagaacagtttttttctttttttttttttttttttgagaccaggtctcactctgtcaccacgctggagtgcagtggcgtaatcagagctcactgcagcctcaacttctcaggttccagcgatcctcccacctagcctcccaagtagctaagaccacagtcgcattccaccacacctggctatttttgtattttttttggtagagatggagtttcaccaggttgcccaggctgatctgcaactcctgagctcaagcgatccacccacctcggcctcccaaagtgctaggattataggcatgagccaccacgcccggctaagaacagttaattttccacacactcaaagaaatgttccattctttgatggatatatctgttacttaaacaaaaatccacctaagtttttcaacattctatacaattctgcagggaatttaaaaaatccattcagatgtaactaaatcagtcctgtcaaatacactcttccataataaaagatgaagacacagagacaacaaagagaagacagaggacagagagaagaaattcccttccccaatcccatacagacagacaacagacacaagaaggaaccacatggacagagaaagagagaaatgaagaaccacaaggctagtgagaaagactgatatatgtgctaggttgggagtggacaaaaaagtaagtactaaggcgggatggaggcactctgcccaggagaaggtagaggcaggcatagcaaatctagctttggtagtaaattcaagtctgtaacaaatttcctacaaggaatttctttatatctagtttaaattatttgccctgtaggtggagctatttcctcttacctgatttttcagtagaaattaagctcccatcttctctaatatttcacgcaacatttaactcttgattatttaaaagagagaatatattattctaaagtaagaaaattcacttacatttggctttaggatacaactaatcagatgaatacaaacatacacatgggtccacaaatccaccctcgtaaactctgtcctccctccttgccctctcctgtcagtctaaaacgtaaaagaatggactctgaaacaggcaacagaaagcaatcaccaagagttactttatcagaaaatcctactttccaatgcctagaactctgggtaaccatgtggaagattttttggttataagggta

SEQ ID NO: 34353 - DNA, 1543 bp, Homo sapiens
tgtttttgtttttgagatagggtttcgctctgtcaccctggctagagttcggtggtgtgaacatggctcactgcagtcctgagctcccaggctcaagtgatccttcccacctcagcctccccagtagctgggactacaggtgcataacaccacacccaactaatttttttgtattttttgtagagacaagatttcactgtcacccaagctggtcttgaactcctggactcaagtgatccacccaccttggcctcccaaagtgctgagattacaggcgtgagccaccacgcgcagccataaagggtacatttttaaaagcacttcacaaatacrtattattcaagaacagtttttttctttttttttttttttttttgagaccaggtctcactctgtcaccacgctggagtgcagtggcgtaatcagagctcactgcagcctcaacttctcaggttccagcgatcctcccacctagcctcccaagtagctaagaccacagtcgcattccaccacacctggctatttttgtattttttttggtagagatggagtttcaccaggttgcccaggctgatctgcaactcctgagctcaagcgatccacccacctcggcctcccaaagtgctaggattataggcatgagccaccacgcccggctaagaacagttaattttccacacactcaaagaaatgttccattctttgatggatatatctgttacttaaacaaaaatccacctaagtttttcaacattctatacaattctgcagggaatttaaaaaatccattcagatgtaactaaatcagtcctgtcaaatacactcttccataataaaagatgaagacacagagacaacaaagagaagacagaggacagagagaagaaattcccttccccaatcccatacagacagacaacagacacaagaaggaaccacatggacagagaaagagagaaatgaagaaccacaaggctagtgagaaagactgatatatgtgctaggttgggagtggacaaaaaagtaagtactaaggcgggatggaggcactctgcccaggagaaggtagaggcaggcatagcaaatctagctttggtagtaaattcaagtctgtaacaaatttcctacaaggaatttctttatatctagtttaaattatttgccctgtaggtggagctatttcctcttacctgatttttcagtagaaattaagctcccatcttctctaatatttcacgcaacatttaactcttgattatttaaaagagagaatatattattctaaagtaagaaaattcacttacatttggctttaggatacaactaatcagatgaatacaaacatacacatgggtccacaaatccaccctcgtaaactctgtcctccctccttgccctctcctgtcagtctaaaacgtaaaagaatggactctgaaacaggcaacagaaagcaatcaccaagagttactttatcagaaaatcctactttccaatgcctagaactctgggtaaccatgtggaagattttttggttataagggta

SEQ ID NO: 34354 - DNA, 1543 bp, Homo sapiens
tgtttttgtttttgagatagggtttcgctctgtcaccctggctagagttcggtggtgtgaacatggctcactgcagtcctgagctcccaggctcaagtgatccttcccacctcagcctccccagtagctgggactacaggtgcataacaccacacccaactaatttttttgtattttttgtagagacaagatttcactgtcacccaagctggtcttgaactcctggactcaagtgatccacccaccttggcctcccaaagtgctgagattacaggcgtgagccaccacgcgcagccataaagggtacatttttaaaagcacttcacaaatacgtattattcaagaacagtttttttctttttttttttttttttttgagaccaggtctcactctgtcaccacgctggagtgcagtggcgtaatcagagctcactgcagcctcaacttctcaggttccagcgatcctcccacctagcctcccaagtagctaagaccacagtcgcattccaccacacctggctatttttgtattttttttggtagagatggagtttcaccaggttgcccaggctgatctgcaactcctgagctcaagcgatccacccacctcggcctcccaaagtgctaggattataggcatgagccaccacgcccggctaagaacagttaattttccacacactcaaagaaatgttccattctttgatggatatatctgttacttaaacaaaaatccacctaagtttttcaacattctatacaattctgcagggaatttaaaaaatccattcagatgtaactaaatcagtcctgtcaaatacactcttccataataaaagatgaagacacagagacaacaaagagaagacagaggacagagagaagaaattcccttccccaatcccatacagacagacaacagacacaagaaggaaccacatggacagagaaagagagaaatgaagaaccacaaggctagtgagaaagactgatatatgtgctaggttgggagtggacaaaaaagtaagtactaaggcgggatggaggcactctgcccaggagaaggtagaggcaggcatagcaaatctagctttggtagtaaattcaagtctgtaacaaatttcctacaaggaatttctttatatctagtttaaattatttgccctgtaggtggagctatttcctcttacctgatttttcagtagaaattaagctcccatcttctctaatatttcacgcaacatttaactcttkattatttaaaagagagaatatattattctaaagtaagaaaattcacttacatttggctttaggatacaactaatcagatgaatacaaacatacacatgggtccacaaatccaccctcgtaaactctgtcctccctccttgccctctcctgtcagtctaaaacgtaaaagaatggactctgaaacaggcaacagaaagcaatcaccaagagttactttatcagaaaatcctactttccaatgcctagaactctgggtaaccatgtggaagattttttggttataagggta

SEQ ID NO: 34355 - DNA, 1660 bp, Homo sapiens
tagattagagcagagatgggggcagggaccagccctcgtaggcttcctgggcccttcataggagtttgagatgagaaatgaaggcagttagtgtgagcttttgtggtagatacacctaaatctgagccttcttttctaggctccaagcaatattgtcacccttgtagttagatgcatctatgtgattgagttctaaacaatggaatgagaacaaaagtgatgtatactcctcccagtcctggccaataaaaaacttgcacaggtgccctcctgygcgctttcccttgcttctggctgcctgggatggaaacaaccacatcaatcctgaaagccacatgttgctggtggcagagttgccatcagtctgggtacccgagtgacccaggtcacccaagtgacccactgtttgaagcagaattctcaccaccatcctcaactcatcccttctgacctggaactgccttaaggtgttaaatataagacatcgatatcttattctctaaagcatcaaccttgttgctattgtagcatacacagcctaaactaatgcagccaagaggaccttgtcgaagaaacttgaagttgtgtgggtcacacaaaaagaggatagcgtgtccagggtaatattaaattatacaggttaataatgtatgtcacagatggacttgcctactgaggaaatatttctccaagactaacttttttttttttttttgacagtctcactctgttgcccaggctagagtgcagtggcacaatcctggctcattgcaacctcctcctcctgggttcaagagatcctcctgccttagcctcctgagaagctgggattacaggtgcccaccaccacatctggctaattttatatttttggtagagacggggtttcaccatgttgaccaggctggtcttgaactcctgacctcaggtgatccacccgccttggcctcccaaagtgctgggattacaggagtgagttactgtgccgggccatgagtaccttttaacagatgaagtaatcatagctccgaagaattagctgcttctcttgaagatacttgatggcagaaacttcataataaaccagaactcctaatttctagtccagggttctttccctgggactgaagggagggagctgggggaaggaacagacttggaagagaggcgagaataaatctccacttaggttctttggtcacccaagggctctgctcttcactgatgcctttaggacacttcagaaagaactttatttagctgcccttctaagtctttagacaagcatactctcccttcccatggctgaggacaccgaaatcctggcagtaatgctttgggctctgtctcagtttagggtctcagcaggaaactggtaacaacccaaactgtaaattccttcagaggcctgggtgggtttaggaaaccaactagggatgatgcaatgccttggggcctgcaatagtgggacccattgtcacccctaagtctgaaggagtgtatcagttacctattggtacaaattaccataaatgtagtggcttaaaacaacacactcttattatcctacaatcttggggggtcagaagtctgaaatgggtcccactgggtcaaaatcaaggtgttaccaggactgtattccttttggaggctccaaggg

SEQ ID NO: 34356 - DNA, 1660 bp, Homo sapiens
tagattagagcagagatgggggcagggaccagccctcgtaggcttcctgggcccttcataggagtttgagatgagaaatgaaggcagttagtgtgagcttttgtggtagatacacctaaatctgagccttcttttctaggctccaagcaatattgtcacccttgtagttagatgcatctatgtgattgagttctaaacaatggaatgagaacaaaagtgatgtatactcctcccagtcctggccaataaaaaacttgcacaggtgccctcctgcgygctttcccttgcttctggctgcctgggatggaaacaaccacatcaatcctgaaagccacatgttgctggtggcagagttgccatcagtctgggtacccgagtgacccaggtcacccaagtgacccactgtttgaagcagaattctcaccaccatcctcaactcatcccttctgacctggaactgccttaaggtgttaaatataagacatcgatatcttattctctaaagcatcaaccttgttgctattgtagcatacacagcctaaactaatgcagccaagaggaccttgtcgaagaaacttgaagttgtgtgggtcacacaaaaagaggatagcgtgtccagggtaatattaaattatacaggttaataatgtatgtcacagatggacttgcctactgaggaaatatttctccaagactaacttttttttttttttttgacagtctcactctgttgcccaggctagagtgcagtggcacaatcctggctcattgcaacctcctcctcctgggttcaagagatcctcctgccttagcctcctgagaagctgggattacaggtgcccaccaccacatctggctaattttatatttttggtagagacggggtttcaccatgttgaccaggctggtcttgaactcctgacctcaggtgatccacccgccttggcctcccaaagtgctgggattacaggagtgagttactgtgccgggccatgagtaccttttaacagatgaagtaatcatagctccgaagaattagctgcttctcttgaagatacttgatggcagaaacttcataataaaccagaactcctaatttctagtccagggttctttccctgggactgaagggagggagctgggggaaggaacagacttggaagagaggcgagaataaatctccacttaggttctttggtcacccaagggctctgctcttcactgatgcctttaggacacttcagaaagaactttatttagctgcccttctaagtctttagacaagcatactctcccttcccatggctgaggacaccgaaatcctggcagtaatgctttgggctctgtctcagtttagggtctcagcaggaaactggtaacaacccaaactgtaaattccttcagaggcctgggtgggtttaggaaaccaactagggatgatgcaatgccttggggcctgcaatagtgggacccattgtcacccctaagtctgaaggagtgtatcagttacctattggtacaaattaccataaatgtagtggcttaaaacaacacactcttattatcctacaatcttggggggtcagaagtctgaaatgggtcccactgggtcaaaatcaaggtgttaccaggactgtattccttttggaggctccaaggg

SEQ ID NO: 34357 - DNA, 1660 bp, Homo sapiens
tagattagagcagagatgggggcagggaccagccctcgtaggcttcctgggcccttcataggagtttgagatgagaaatgaaggcagttagtgtgagcttttgtggtagatacacctaaatctgagccttcttttctaggctccaagcaatattgtcacccttgtagttagatgcatctatgtgattgagttctaaacaatggaatgagaacaaaagtgatgtatactcctcccagtcctggccaataaaaaacttgcacaggtgccctcctgcgcgctttcccttgcttctggctgcctgggatggaaacaaccacatcaatcctgaaagccacatgttgctggtggcagagttgccatcagtctgggtacccgagtgacccaggtcacccaagtgacccactgtttgaagcagaattctcaccaccatcctcaactcatcccttctgacctggaactgccttaaggtgttaaatataagacatcgatatcttattctctaaagcatcaaccttgttgctattgtagcatacacagcctaaactaatgcagccaagaggaccttgtcgaagaaacttgaagttgtgtgggtcacacaaaaagaggatagcgtgtccagggtaatattaaattatacaggttaataatgtatgtcacagatggacttgcctactgaggaaatatttctccaagactaacttttttttttttttttgacagtctcactctgttgcccaggctagagtgcagtggcacaatcctggctcattgcaacctcctcctcctgggttcaagagatcctcctgccttagcctcctgagaagctgggattacaggtgcccaccaccacatctggctaattttatatttttggtagagacggggtttcaccatgttgaccaggctggtcttgaactcctgacctcaggtgatccacccgccttggcctcccaaagtgctgggattacaggagtgagtyactgtgccgggccatgagtaccttttaacagatgaagtaatcatagctccgaagaattagctgcttctcttgaagatacttgatggcagaaacttcataataaaccagaactcctaatttctagtccagggttctttccctgggactgaagggagggagctgggggaaggaacagacttggaagagaggcgagaataaatctccacttaggttctttggtcacccaagggctctgctcttcactgatgcctttaggacacttcagaaagaactttatttagctgcccttctaagtctttagacaagcatactctcccttcccatggctgaggacaccgaaatcctggcagtaatgctttgggctctgtctcagtttagggtctcagcaggaaactggtaacaacccaaactgtaaattccttcagaggcctgggtgggtttaggaaaccaactagggatgatgcaatgccttggggcctgcaatagtgggacccattgtcacccctaagtctgaaggagtgtatcagttacctattggtacaaattaccataaatgtagtggcttaaaacaacacactcttattatcctacaatcttggggggtcagaagtctgaaatgggtcccactgggtcaaaatcaaggtgttaccaggactgtattccttttggaggctccaaggg

SEQ ID NO: 34358 - DNA, 1660 bp, Homo sapiens
tagattagagcagagatgggggcagggaccagccctcgtaggcttcctgggcccttcataggagtttgagatgagaaatgaaggcagttagtgtgagcttttgtggtagatacacctaaatctgagccttcttttctaggctccaagcaatattgtcacccttgtagttagatgcatctatgtgattgagttctaaacaatggaatgagaacaaaagtgatgtatactcctcccagtcctggccaataaaaaacttgcacaggtgccctcctgcgcgctttcccttgcttctggctgcctgggatggaaacaaccacatcaatcctgaaagccacatgttgctggtggcagagttgccatcagtctgggtacccgagtgacccaggtcacccaagtgacccactgtttgaagcagaattctcaccaccatcctcaactcatcccttctgacctggaactgccttaaggtgttaaatataagacatcgatatcttattctctaaagcatcaaccttgttgctattgtagcatacacagcctaaactaatgcagccaagaggaccttgtcgaagaaacttgaagttgtgtgggtcacacaaaaagaggatagcgtgtccagggtaatattaaattatacaggttaataatgtatgtcacagatggacttgcctactgaggaaatatttctccaagactaacttttttttttttttttgacagtctcactctgttgcccaggctagagtgcagtggcacaatcctggctcattgcaacctcctcctcctgggttcaagagatcctcctgccttagcctcctgagaagctgggattacaggtgcccaccaccacatctggctaattttatatttttggtagagacggggtttcaccatgttgaccaggctggtcttgaactcctgacctcaggtgatccacccgccttggcctcccaaagtgctgggattacaggagtgagttactgtgccgggccatgagtaccttttaacagatgaagtaatcatagctccgaagaattagctgcttctcttgaagatacttgatggcagaaactkcataataaaccagaactcctaatttctagtccagggttctttccctgggactgaagggagggagctgggggaaggaacagacttggaagagaggcgagaataaatctccacttaggttctttggtcacccaagggctctgctcttcactgatgcctttaggacacttcagaaagaactttatttagctgcccttctaagtctttagacaagcatactctcccttcccatggctgaggacaccgaaatcctggcagtaatgctttgggctctgtctcagtttagggtctcagcaggaaactggtaacaacccaaactgtaaattccttcagaggcctgggtgggtttaggaaaccaactagggatgatgcaatgccttggggcctgcaatagtgggacccattgtcacccctaagtctgaaggagtgtatcagttacctattggtacaaattaccataaatgtagtggcttaaaacaacacactcttattatcctacaatcttggggggtcagaagtctgaaatgggtcccactgggtcaaaatcaaggtgttaccaggactgtattccttttggaggctccaaggg

SEQ ID NO: 34359 - DNA, 1660 bp, Homo sapiens
tagattagagcagagatgggggcagggaccagccctcgtaggcttcctgggcccttcataggagtttgagatgagaaatgaaggcagttagtgtgagcttttgtggtagatacacctaaatctgagccttcttttctaggctccaagcaatattgtcacccttgtagttagatgcatctatgtgattgagttctaaacaatggaatgagaacaaaagtgatgtatactcctcccagtcctggccaataaaaaacttgcacaggtgccctcctgcgcgctttcccttgcttctggctgcctgggatggaaacaaccacatcaatcctgaaagccacatgttgctggtggcagagttgccatcagtctgggtacccgagtgacccaggtcacccaagtgacccactgtttgaagcagaattctcaccaccatcctcaactcatcccttctgacctggaactgccttaaggtgttaaatataagacatcgatatcttattctctaaagcatcaaccttgttgctattgtagcatacacagcctaaactaatgcagccaagaggaccttgtcgaagaaacttgaagttgtgtgggtcacacaaaaagaggatagcgtgtccagggtaatattaaattatacaggttaataatgtatgtcacagatggacttgcctactgaggaaatatttctccaagactaacttttttttttttttttgacagtctcactctgttgcccaggctagagtgcagtggcacaatcctggctcattgcaacctcctcctcctgggttcaagagatcctcctgccttagcctcctgagaagctgggattacaggtgcccaccaccacatctggctaattttatatttttggtagagacggggtttcaccatgttgaccaggctggtcttgaactcctgacctcaggtgatccacccgccttggcctcccaaagtgctgggattacaggagtgagttactgtgccgggccatgagtaccttttaacagatgaagtaatcatagctccgaagaattagctgcttctcttgaagatacttgatggcagaaacttcataataaaccagaactcctaatttctagtccagggttctttccctgggactgaagggagggagctgggggaaggaacagacttggaagagaggygagaataaatctccacttaggttctttggtcacccaagggctctgctcttcactgatgcctttaggacacttcagaaagaactttatttagctgcccttctaagtctttagacaagcatactctcccttcccatggctgaggacaccgaaatcctggcagtaatgctttgggctctgtctcagtttagggtctcagcaggaaactggtaacaacccaaactgtaaattccttcagaggcctgggtgggtttaggaaaccaactagggatgatgcaatgccttggggcctgcaatagtgggacccattgtcacccctaagtctgaaggagtgtatcagttacctattggtacaaattaccataaatgtagtggcttaaaacaacacactcttattatcctacaatcttggggggtcagaagtctgaaatgggtcccactgggtcaaaatcaaggtgttaccaggactgtattccttttggaggctccaaggg

SEQ ID NO: 34360 - DNA, 1016 bp, Homo sapiens
cctttttctgggagcctcccctggctctctagtctgagagcagtgcttttcagatggtgtcgtaactgcctgttaactttatctgtgactctgtagctctcctcccttcaccatgctgcacacaccgcttgccctcccttaggctctggaggcccaggccgtgccattcttattctttgtatctctagtactttacacagcacttggtgaacatgagtgctcaataactatttgttgaatggatggaaggatattgtatacgatcaggcatcacttaatgacaggcacattctgagaaatgcattgttaggtgttttctcattgtgtgaacatcatggagtgtgtgtttacagaaaccttcatggtccagcctgatggtctagcctgctgctcctgggctacagacctgtacagcacatgactatagggaatactgcaggcagtggtaacacagtgttaaatattggtgtatctaaacatagaaaagataccataaaaatacagtattataattttgtgggaccacagacatctatgtggtccatcattgacagaaacacccgtgtctrgcccatgactgcatttcatttgaaagccacagccattcaagaactatgtaaacagcaccacctatgggtagacaattttaacaccacattttacactggaagatgagacttacgcattttttactgaaaaaaatgtttcactcttcaagccatggggtcatttatgttttaataaatttcaaaatgataagtgctaatattcttcatattgttttagttttgagactgttagctgaggagtctggaaatacaaaggtttttgcagtgaaaggaggaggaagagggaagccatattaattaataacatgttggacgcattgtaacatatcttatttaatcgtgccaataacctgttcctcacagtggttgtattcccatttttagattaaggaggttaagctggtggaggtgaagcccctcacccaagccctagaacacggatccagc

SEQ ID NO: 34361 - DNA, 573 bp, Homo sapiens
tttttttttttaccatgtctgcatgggatatggcaaagggtttggtttagtgtagrtaaaaagaatgctgcagaatcattcgctagaacctttagcatatgattgcaaagttggtgggtctttctctttttctctctatctcaaagttcagggcaagtataataataagttattgtgtttggaaacaaattcatgcttaagcattcttatgttatatcccctctctgttccccagacgtggtatgacatctacttgtggacacactctgctttctggtttttctgtttctgattagaaactcaaaaacaatatgagaaacatacctgaaaacagcagaagatctggatcattccggccagcaattcaaagtctgccaaagggaaatcaagtattgtagaaacctacggggcctctcagagcattttaccagaactgtggcagggtgactgattgtggtattctctttgtattctctatgctgaatcatttgccagaacttccaatatatgattgcaaaactagacttttttaatgttatcttgtctcagatttctaagcctgaaagattgagg

SEQ ID NO: 34362 - DNA, 573 bp, Homo sapiens
tttttttttttaccatgtctgcatgggatatggcaaagggtttggtttagtgtagataaaaagaatgctgcagaatcattygctagaacctttagcatatgattgcaaagttggtgggtctttctctttttctctctatctcaaagttcagggcaagtataataataagttattgtgtttggaaacaaattcatgcttaagcattcttatgttatatcccctctctgttccccagacgtggtatgacatctacttgtggacacactctgctttctggtttttctgtttctgattagaaactcaaaaacaatatgagaaacatacctgaaaacagcagaagatctggatcattccggccagcaattcaaagtctgccaaagggaaatcaagtattgtagaaacctacggggcctctcagagcattttaccagaactgtggcagggtgactgattgtggtattctctttgtattctctatgctgaatcatttgccagaacttccaatatatgattgcaaaactagacttttttaatgttatcttgtctcagatttctaagcctgaaagattgagg

SEQ ID NO: 34363 - DNA, 573 bp, Homo sapiens
tttttttttttaccatgtctgcatgggatatggcaaagggtttggtttagtgtagataaaaagaatgctgcagaatcattcgctagaacctttagcatatgattgcaaagttggtgggtctttctctttttctctctatctcaaagttcagggcaagtataataataagttattgtgtttggaaacaaattcatgcttaagcattcttatgttatatcccctctctgttccccagacgtggtatgacatctacttgtggacacactctgctttctggtttttctgtttctgattagaaactcaaaaacaatatgagaaacatacctgaaaacagcagaagatctggatcattccrgccagcaattcaaagtctgccaaagggaaatcaagtattgtagaaacctacggggcctctcagagcattttaccagaactgtggcagggtgactgattgtggtattctctttgtattctctatgctgaatcatttgccagaacttccaatatatgattgcaaaactagacttttttaatgttatcttgtctcagatttctaagcctgaaagattgagg

SEQ ID NO: 34364 - DNA, 1077 bp, Homo sapiens
ttgctctgcctctacctccgggaccattgtggatgagggatctgcctcttctttcccaggtcttgggcttcagatgaaacacagtccactgcctctgccccagccagctctgcatgctccatggcagggtgcctgcttgccctgcatttgcataactagtagggctgcttggcaatacaagaaggtcttgctctaaggcttctcatcaggccacttcatggaagtctcttctgagtccttccagcaaccctgcagggtagcaataaaattctcattttatagatgagaaaactgaagctcagagagacgctgttggaaggaacttgtccaggccctgtggctgataggaggtagaactgggcttggggcctgtactctgcagcgcacctcttgctctgctctgcagagcccatgggttctcagctggactcccactcagcccctctctggctctgggctccatggtcatttgcttctgcctcctccgtcttgcccagcaccatagagtagaaacacccactctttcctcatgcacagtctggaacccatagttcccttttcctgagggttcccagagaatattttaggggggcactgaatgcacccttaggcttcatgtccaaggccaagtgctaaatggatacttggctgaagctgggggcgcagtgactttcaccagtgaaagaactctgggaaatagcagaaatctgaaatcttattcaaacatgtacttattattaccattttgttcaatatttaacttgtcagcttttaattgtttaacatgacagtgcaggtacggyaatatttctgcactcagcatttttcttgtggctgcacatttgcgatactaaatagaggcttgctgtatttaattattcaaaagctctcagtcattagttttgcccataaaaccaaacttgcataagtatttctttttgcttatttcatactgagaacatgattacatctagaatatttacctgtgtttgaaagtggatattcagatattagtagtaaaccagaaagtcatggcatatgtttcggtgaaactgacatttccctggttgggtttca

SEQ ID NO: 34365 - DNA, 619 bp, Homo sapiens
ttttkttttttttttttttttccgtcttgaaactgttctgtgggaattatgagctgttctctagcccatcttggtattttaaaagcaaataataaatatatcacatagctagagatactttacagttgcaaagccctttccctcatgatctcatttgatatatttatattgacaagtagaaaatatgttgatgtttttactggcatacaaatattttcaccttaacagtctgccaggcaagttattctgagatagttgctttgcctgagcacttgcctaaaataaccatcgctatgagggccttccattcttgctgtgtgagtcattactatgaaggtaatggagcaaggctggaagtctgaatgcaggcccctagggtagaggggttcaggacagggttaagattaaggtcttagcagacaggaagaaaaaatgcaaataaacccagcactttaaacaaaagatgtcattttctcaaactcagttatgctatgccattttctttaaccacttggtagcttctccgggcccctggcctcttttttctatgagtcttagggtagacactgctttactgttatgcaccatgtcttagagtctgaggggaactataatcctt

SEQ ID NO: 34366 - DNA, 1691 bp, Homo sapiens
cagggacaccatgttcttgtaccacagtgggtacctctgggaggggttcattcctggggaagaggcaaggtcagacgatggaggcctgggaaagtcaggaccacattccccaaacagaaacagagatacatggtttgattcatataagcaagttgaggtgccaatgggacagaacatggagactcctagcctcatggtcacctccgaaggattccagaaagcctccctggattggcacttgggtttaggagctacatttcctctttgtctttctgagggaatctgtttatgcwccatcccagcagttctcaaagtgtggtccctggggccggcagcatcagcatccctgagagcttgttggaaatgcaaatgatggggcccctaccccagacctactggatcagaaactctgggcataggcccagcaatccgtattttttgttttgttttgttttggagacagagtctcactctgttgcccaggctggagtttagtggcgtgatctcggctcactgcaacctccgcctcctgggttcaagcgattctcctgcctcagcctcccgagtagccgggactacaggcgcctgccgccacgcccggctatttttttgtattttagtagagacggggtttcaccattgttgcccaggctggtcttgaactcctgagctcaggcaatccacctacctcggcctcccaaagtgttagaattacaggtgtgagccaccgtgcccggccagaaatctgtattttaacaagcccccagaggatttcgatgtccgctctagtgtttgccagtctctgtttggttttctcgtatctgaaatgaggcagcttgctggagccaggggatttgggatgaacaatggaaccataagaatatgtatcctgactcggttcttcagccacctgtctgaacctccttcacctgtgagatggggaatacgactgcgcccccttggcttttaggatgaagtccaaatcctcaaggccctctgcccgcttctgcagcacacctctcccctctgactgcctggtcattctggtctttttcccgtttccccatctatcattctttctgcctctgggcttttgtacttatggcctctcggctccaaatgctcttcattttccatttttcttggcctggttaccttccctcatcctgcagacctcagttcagacatcactccctacagaccacgttgggttcctctgttacacgtgctgctttcatggcctatgtgtgtctgctgggaaagttacttcctcatctgtaaaatggagacagtaagagtcctcctcctatgactgttgggaggatcacatgggctgatgcagctcaagtgctcagaatggtgcctggtacataacaggtgcccaagatctataggtggttgcttgtttcactcaccatcggacacccccaacgaagttggtgctgggtaagtatagctgagggaggggactgatgggagctgctgtgagtcttagataaatcttgccaaggatttgccctatcatttagtaccctccctggaggtctgtgctgcctccctcatcagattggaatcattcaaagggtagagctctcccctcctattccttcgtcatccttttctgtctttgctccctgtaccatgcctctgtctactcctcatcctgtcctgctggccccaagacagcctct

SEQ ID NO: 34367 - DNA, 1691 bp, Homo sapiens
cagggacaccatgttcttgtaccacagtgggtacctctgggaggggttcattcctggggaagaggcaaggtcagacgatggaggcctgggaaagtcaggaccacattccccaaacagaaacagagatacatggtttgattcatataagcaagttgaggtgccaatgggacagaacatggagactcctagcctcatggtcacctccgaaggattccagaaagcctccctggattggcacttgggtttaggagctacatttcctctttgtctttctgagggaatctgtttatgctycatcccagcagttctcaaagtgtggtccctggggccggcagcatcagcatccctgagagcttgttggaaatgcaaatgatggggcccctaccccagacctactggatcagaaactctgggcataggcccagcaatccgtattttttgttttgttttgttttggagacagagtctcactctgttgcccaggctggagtttagtggcgtgatctcggctcactgcaacctccgcctcctgggttcaagcgattctcctgcctcagcctcccgagtagccgggactacaggcgcctgccgccacgcccggctatttttttgtattttagtagagacggggtttcaccattgttgcccaggctggtcttgaactcctgagctcaggcaatccacctacctcggcctcccaaagtgttagaattacaggtgtgagccaccgtgcccggccagaaatctgtattttaacaagcccccagaggatttcgatgtccgctctagtgtttgccagtctctgtttggttttctcgtatctgaaatgaggcagcttgctggagccaggggatttgggatgaacaatggaaccataagaatatgtatcctgactcggttcttcagccacctgtctgaacctccttcacctgtgagatggggaatacgactgcgcccccttggcttttaggatgaagtccaaatcctcaaggccctctgcccgcttctgcagcacacctctcccctctgactgcctggtcattctggtctttttcccgtttccccatctatcattctttctgcctctgggcttttgtacttatggcctctcggctccaaatgctcttcattttccatttttcttggcctggttaccttccctcatcctgcagacctcagttcagacatcactccctacagaccacgttgggttcctctgttacacgtgctgctttcatggcctatgtgtgtctgctgggaaagttacttcctcatctgtaaaatggagacagtaagagtcctcctcctatgactgttgggaggatcacatgggctgatgcagctcaagtgctcagaatggtgcctggtacataacaggtgcccaagatctataggtggttgcttgtttcactcaccatcggacacccccaacgaagttggtgctgggtaagtatagctgagggaggggactgatgggagctgctgtgagtcttagataaatcttgccaaggatttgccctatcatttagtaccctccctggaggtctgtgctgcctccctcatcagattggaatcattcaaagggtagagctctcccctcctattccttcgtcatccttttctgtctttgctccctgtaccatgcctctgtctactcctcatcctgtcctgctggccccaagacagcctct

SEQ ID NO: 34368 - DNA, 1046 bp, Homo sapiens
tgggatctgctggctctctggcttcccatggggtgtttggaaaggctcttgagaaggcaggagcccagagggagtgatgaagttaagggggtggcctgtgagggtcaggggaggccatgttcaggaaagtgggtaggacacccaagaggtcctaagctttgttcacagacagccctggacttctaggcaaggggagctggcgagctttgagaggcagctcgcctgcccctcggctgagagcttcctgagggcagagatcctcttttcactaagattgttccaaagtctctgcccaggtctcccctctctttgatgctccctgccagccattcccatgggctctcatcaaccctggggctattcccatcatagcattttgggcactgtgttggggctgcctctttgcttgcctagcaactaaaggcacatcaagggcaggcacttccactgctgtatccccagaccctggcacagaccctggcacagcacctggcacatagtaggggcttggcaaatgcactgtgcacrtatcaaatgaggcaaaagtaaagtcatcctttgtttgtgtaaggtctcctggaagggggcatggggagggcagtggagatctggccactacctttgggtggaaggctgtggcaggggctctgggacaagggtacacctccccatccacacatgtctttaatcctatctcacgtctcctctctgttactttcttggatatacctgtctcctttctctcttgggagagctcctgagaccagccctggctgagaagtgagggggttgggagaggagaaagcagggctggaaatccagagagcagatagggtgggactggggaggatgaaaggggtttctgggccccccccgggggcctcatgcagagatggggatcttctgaggcctggggagcccactggggtcagaggctgccccatccttgacgccgaggcccctactgagcagccagagctggcagcatctgtgcagaagcagggggcccagtgggaggatcagcgccagccacgccaggcccagga

SEQ ID NO: 34369 - DNA, 1046 bp, Homo sapiens
tgggatctgctggctctctggcttcccatggggtgtttggaaaggctcttgagaaggcaggagcccagagggagtgatgaagttaagggggtggcctgtgagggtcaggggaggccatgttcaggaaagtgggtaggacacccaagaggtcctaagctttgttcacagacagccctggacttctaggcaaggggagctggcgagctttgagaggcagctcgcctgcccctcggctgagagcttcctgagggcagagatcctcttttcactaagattgttccaaagtctctgcccaggtctcccctctctttgatgctccctgccagccattcccatgggctctcatcaaccctggggctattcccatcatagcattttgggcactgtgttggggctgcctctttgcttgcctagcaactaaaggcacatcaagggcaggcacttccactgctgtatccccagaccctggcacagaccctggcacagcacctggcacatagtaggggcttggcaaatgcactgtgcacatatcaaatgaggcaaaagtaaagtcatcctttgtttgtgtaaggtctcctggaagggggcatggggagggcagtggagatctggccactacctttgggtggaaggctgtggcaggggctctgggacaagggtacacctccccatccacacatgtctttaatcctatctcacgtctcctctctgttactttcttggatatacctgtctcctttctctcttgggagagctcctgagaccagccctggctgagaagtgagggggttgggagaggagaaagcagggctggaaatccagagagcagatagggtgggactggggaggatgaaaggggtttctgggscccccccgggggcctcatgcagagatggggatcttctgaggcctggggagcccactggggtcagaggctgccccatccttgacgccgaggcccctactgagcagccagagctggcagcatctgtgcagaagcagggggcccagtgggaggatcagcgccagccacgccaggcccagga

SEQ ID NO: 34370 - DNA, 1046 bp, Homo sapiens
tgggatctgctggctctctggcttcccatggggtgtttggaaaggctcttgagaaggcaggagcccagagggagtgatgaagttaagggggtggcctgtgagggtcaggggaggccatgttcaggaaagtgggtaggacacccaagaggtcctaagctttgttcacagacagccctggacttctaggcaaggggagctggcgagctttgagaggcagctcgcctgcccctcggctgagagcttcctgagggcagagatcctcttttcactaagattgttccaaagtctctgcccaggtctcccctctctttgatgctccctgccagccattcccatgggctctcatcaaccctggggctattcccatcatagcattttgggcactgtgttggggctgcctctttgcttgcctagcaactaaaggcacatcaagggcaggcacttccactgctgtatccccagaccctggcacagaccctggcacagcacctggcacatagtaggggcttggcaaatgcactgtgcacatatcaaatgaggcaaaagtaaagtcatcctttgtttgtgtaaggtctcctggaagggggcatggggagggcagtggagatctggccactacctttgggtggaaggctgtggcaggggctctgggacaagggtacacctccccatccacacatgtctttaatcctatctcacgtctcctctctgttactttcttggatatacctgtctcctttctctcttgggagagctcctgagaccagccctggctgagaagtgagggggttgggagaggagaaagcagggctggaaatccagagagcagatagggtgggactggggaggatgaaaggggtttctgggccccccccgggggcctcatgcagagatggggatcttctgaggcctggggagcccactggggtcagaggctkccccatccttgacgccgaggcccctactgagcagccagagctggcagcatctgtgcagaagcagggggcccagtgggaggatcagcgccagccacgccaggcccagga

SEQ ID NO: 34371 - DNA, 563 bp, Homo sapiens
tggagtgcagtggcacgatctcagctcactgcaaactctgcctccagggttcaagtgattgtcctgcctcagcctccagagtagctgggattacaggtgcgcaccaccacacccagmtaatttttgtatttttagtagcgatggggtttcgccatgttggccaggttggtctcaaactcctgacctcgtgatccgccagcctcagtctcccaaagtgttgggattacaggcgtgagccaccatgcctggcttgtccctctccttcgttagaaggttccaagaatgctggcactttctctgtctctgtcacctctgactcctcagaacttagcacaatggatggcacatccttgtcaaaacaatgaccagatgaatgagacatgcttatgtttaaggaattacaaggagcattttttctgcctagatttgaaacacacacccattgcattttaaaaaatgtttctgtctatttactctatcaactgtgccatgcctggggctgtttctatttgttttttcttttttttttttttgagacagagtttcactcttgttgcccaagc

SEQ ID NO: 34372 - DNA, 810 bp, Homo sapiens
cttattttgttttgatttttatttatttgattactagtggagttgaagacttttctatatgcttgttaattatatttcatatttcattaattacatttcatatcttctcattatattttagagttttaatgctttttctcagtttcataggtcagtgcaagtatgtgggatataatgaatatcttaaagtgagcgttttatattttctgcagatattttatgtaaacaatggcaatcttggaggtagaaaggaaaaaaaagatctggaggaaaatgaaaatgctrtaaatagactcagctgattttataaatctgtcaagggccatctttgtttatgtggtatcattataaattaaaattaacccacccacattttttgaaggctaattttagaaatccaataattttggatatattttgtaatttttaaaatattctctaggtactatttgaacattattctaaaatagtagtaaactattgctaaattagctgatcattacttaagaaataattctttttgagataagaggcttgctctgttgcccagtctggagtgcagtggcatgatctcggttcactgtaacctccgcctcccgggttcaagcaattctcctgcctcagcctcccgagtagctgggactacaggtgtgtaccaccatgcccagctaatttttgtattttatttttataagagacagggtttcactatgttggccaggctggtctcgaactcctgacctcaggtgatctgtccaccttggcctcccaaagggctgggattataggtgtgagccactgcacccggcc

SEQ ID NO: 34373 - DNA, 566 bp, Homo sapiens
tcacaataataatagctaacatagcgcttactctttcgctgttttattaactcaatcctcagaacaaaccaatgatgtgaatactgtaattctcattttatggaaatgaaaatytaaatgaatacctctggtaattgtacgggactgtttgattagtatttaccattaattaattaaattttttttttttttgagatggagtctcgttctgttgcccaggctggagtgcagtggcacaatctcggctcacttcaacctccgtctcccaggttcaagcaattctcctgtctcagcctcctgagtagctgggactacaggtgcatgccactacgtctggctaatttttgtatttttagtagggatgggatttcaccatattggtcaggctggtctctaactcctgaacctcaggtgatccacccgccttggcctcccaaagtgctgggattacaggtgtgagccaccatgcctggcctattttagtatttttaataataaattccatgttagaaattttctactgatgtattttttaagtcaatatttcctacactcacaatccaaaa

SEQ ID NO: 34374 - DNA, 566 bp, Homo sapiens
tcacaataataatagctaacatagcgcttactctttcgctgttttattaactcaatcctcagaacaaaccaatgatgtgaatactgtaattctcattttatggaaatgaaaatctaaatgaatacctctgrtaattgtacgggactgtttgattagtatttaccattaattaattaaattttttttttttttgagatggagtctcgttctgttgcccaggctggagtgcagtggcacaatctcggctcacttcaacctccgtctcccaggttcaagcaattctcctgtctcagcctcctgagtagctgggactacaggtgcatgccactacgtctggctaatttttgtatttttagtagggatgggatttcaccatattggtcaggctggtctctaactcctgaacctcaggtgatccacccgccttggcctcccaaagtgctgggattacaggtgtgagccaccatgcctggcctattttagtatttttaataataaattccatgttagaaattttctactgatgtattttttaagtcaatatttcctacactcacaatccaaaa

SEQ ID NO: 34375 - DNA, 566 bp, Homo sapiens
tcacaataataatagctaacatagcgcttactctttcgctgttttattaactcaatcctcagaacaaaccaatgatgtgaatactgtaattctcattttatggaaatgaaaatctaaatgaatacctctggtaattgtacgggactgtttgattagtatttaccattaattaattaaattttttttttttttgagatggagtctcgttctgttgcccaggctggagtgcagtggcacaatctcggctcacttcaacctccgtctcccaggttcaagcaattstcctgtctcagcctcctgagtagctgggactacaggtgcatgccactacgtctggctaatttttgtatttttagtagggatgggatttcaccatattggtcaggctggtctctaactcctgaacctcaggtgatccacccgccttggcctcccaaagtgctgggattacaggtgtgagccaccatgcctggcctattttagtatttttaataataaattccatgttagaaattttctactgatgtattttttaagtcaatatttcctacactcacaatccaaaa

SEQ ID NO: 34376 - DNA, 566 bp, Homo sapiens
tcacaataataatagctaacatagcgcttactctttcgctgttttattaactcaatcctcagaacaaaccaatgatgtgaatactgtaattctcattttatggaaatgaaaatctaaatgaatacctctggtaattgtacgggactgtttgattagtatttaccattaattaattaaattttttttttttttgagatggagtctcgttctgttgcccaggctggagtgcagtggcacaatctcggctcacttcaacctccgtctcccaggttcaagcaattctcctgtctcagcctcctgagtagctgggactacaggtgcatgccactacgtctggctaatttttgtatttttagtagggatgggatttcaccatattggtcaggctggtctcyaactcctgaacctcaggtgatccacccgccttggcctcccaaagtgctgggattacaggtgtgagccaccatgcctggcctattttagtatttttaataataaattccatgttagaaattttctactgatgtattttttaagtcaatatttcctacactcacaatccaaaa

SEQ ID NO: 34377 - DNA, 744 bp, Homo sapiens
ctgaaaaggaggtacacagcaaggccaggaggcaaaccccgaggacawgggagagaaaggaaaattcctgcacccaaatatataatggcagcatatggattagaatccacagaataaagaattcatgagcccatagaaatcagggccagattaagacactaaacagatactgcaactcaatacaatacacagacttgacatggatcatgatgcagaaacacatgcggtgtaaaggagagtgttgggataattagggagactggagtatgaactgtagattacatcactggattggatcaatgttaaattttctgaatttgatcaatgtactgtggttttataagaacatctcttattcttagagacataatgtatatgatttactttcaaatggctcagagaaaaaaccctacatagggagaacgctaaggcaaatgtggcagaaagtattatcaaatggtgaacctggttgtaaagagtatatgaattttctgtactgtttttccaggttttctataagtttgaagtcatttccaaataaaaagtagaaaaagaaaaggaaacatacctctcttcaaggccttttaaaatctcaggaccaccactctcaactacctaatttttaaagaagacgtcattagaacggtagggaagtcaataataaaagtcatttcaagtcagttcaatgaaactcggaccattcactgaaaccttccacagcaactgttttctgacattacaatt

SEQ ID NO: 34378 - DNA, 744 bp, Homo sapiens
ctgaaaaggaggtacacagcaaggccaggaggcaaaccccgaggacatgggagagaaaggaaaattcctgcacccaaatatataatggcagcatatggattagaatccacrgaataaagaattcatgagcccatagaaatcagggccagattaagacactaaacagatactgcaactcaatacaatacacagacttgacatggatcatgatgcagaaacacatgcggtgtaaaggagagtgttgggataattagggagactggagtatgaactgtagattacatcactggattggatcaatgttaaattttctgaatttgatcaatgtactgtggttttataagaacatctcttattcttagagacataatgtatatgatttactttcaaatggctcagagaaaaaaccctacatagggagaacgctaaggcaaatgtggcagaaagtattatcaaatggtgaacctggttgtaaagagtatatgaattttctgtactgtttttccaggttttctataagtttgaagtcatttccaaataaaaagtagaaaaagaaaaggaaacatacctctcttcaaggccttttaaaatctcaggaccaccactctcaactacctaatttttaaagaagacgtcattagaacggtagggaagtcaataataaaagtcatttcaagtcagttcaatgaaactcggaccattcactgaaaccttccacagcaactgttttctgacattacaatt

SEQ ID NO: 34379 - DNA, 744 bp, Homo sapiens
ctgaaaaggaggtacacagcaaggccaggaggcaaaccccgaggacatgggagagaaaggaaaattcctgcacccaaatatataatggcagcatatggattagaatccacagaataaagaattcatgagcccatagaaatcagggccagattragacactaaacagatactgcaactcaatacaatacacagacttgacatggatcatgatgcagaaacacatgcggtgtaaaggagagtgttgggataattagggagactggagtatgaactgtagattacatcactggattggatcaatgttaaattttctgaatttgatcaatgtactgtggttttataagaacatctcttattcttagagacataatgtatatgatttactttcaaatggctcagagaaaaaaccctacatagggagaacgctaaggcaaatgtggcagaaagtattatcaaatggtgaacctggttgtaaagagtatatgaattttctgtactgtttttccaggttttctataagtttgaagtcatttccaaataaaaagtagaaaaagaaaaggaaacatacctctcttcaaggccttttaaaatctcaggaccaccactctcaactacctaatttttaaagaagacgtcattagaacggtagggaagtcaataataaaagtcatttcaagtcagttcaatgaaactcggaccattcactgaaaccttccacagcaactgttttctgacattacaatt

SEQ ID NO: 34380 - DNA, 744 bp, Homo sapiens
ctgaaaaggaggtacacagcaaggccaggaggcaaaccccgaggacatgggagagaaaggaaaattcctgcacccaaatatataatggcagcatatggattagaatccacagaataaagaattcatgagcccatagaaatcagggccagattaagacactaaacagatactgcaactcaatacaatacacagacttgacatggatcatgatgcagaaacacatgcggtgtaaaggasagtgttgggataattagggagactggagtatgaactgtagattacatcactggattggatcaatgttaaattttctgaatttgatcaatgtactgtggttttataagaacatctcttattcttagagacataatgtatatgatttactttcaaatggctcagagaaaaaaccctacatagggagaacgctaaggcaaatgtggcagaaagtattatcaaatggtgaacctggttgtaaagagtatatgaattttctgtactgtttttccaggttttctataagtttgaagtcatttccaaataaaaagtagaaaaagaaaaggaaacatacctctcttcaaggccttttaaaatctcaggaccaccactctcaactacctaatttttaaagaagacgtcattagaacggtagggaagtcaataataaaagtcatttcaagtcagttcaatgaaactcggaccattcactgaaaccttccacagcaactgttttctgacattacaatt

SEQ ID NO: 34381 - DNA, 929 bp, Homo sapiens
gcaccagccattcagaaagctaaaagcagccatatctaagcctttttaagttttcttagccattgactcatgccttatcccctcagttgatggcaacctgactttagccaagcaaacaatatgctaacagcacaaacaaaattggtccctctcctttttagagctgaggaatatacttaacaaaacctgtgtatttccatgcacataagtccctaagcactacatttcagtggtttacacatctaataacgtcaggagctactcttctacccaggctgtaaacctaaccagagctattttggcataacagatacagtttgcagggagatttaaatatgattgtggctcataactgtcaacaaataacacaaagccttatacccttcatcagaaaatctgaatttcaggtgtaaaagtttatcgaggagctgctccatctgccaggattgccttgcaaaatatggacagacatctagtttctttgtccctgtgttttggaatttccaggaagctggctttccacatttaattgggaaatgagaagggcgttggcggcagcattgcctgatgggaagcatcatggtagcttggtgggaggggctttgttctccttccaaaccatcccaaatgaatgaataagcagcgtgcttgctatgccagtgcagcayggaagtctcctacccaccttcagcaggttgcctttcattagctccccgctacaaagacattttgtggtgaaagtaaaggctgacttggtgaagttattggcaaatgtcctgaacctcgacctccacctagaatttcccactcacatacagtaatagaacaagccggaatgagtactgagctatgtatttgcatgaggctaagtctaattttaaattgtgaatccatttgagctgtgcagctcacttgaggaaggatggagg

SEQ ID NO: 34382 - DNA, 2873 bp, Homo sapiens
  misc_feature (1)...(2873): n = A,T,C or G
ctttatgttttgtgaaatgaaaataagcatttgggcagtttatttaattcttatttaaataaatagaattatgggtttaattaacagtataacatgactatatatacatatatatttaaagggaattctttcttacataatatatttgttttgatagagatgtagagttgggtgkgtgtttttgtcactctgaagtttagacctcattaaatatttgacatctacagttggataattttgccgcttagtgtccttttttatatacaatataacaaagtgagagaaatttatattactggcaatttcatttttggcagtctatttctgtatcatgtaccgcttttcttaaaacttaaattgcttattttgttgtgtaatgtcattgcttttgatttgctttgtgaaaggagataaacgtttcagtaattgtcagagcattttgttgcctcaggctgtgttacctcaatttcagagtaagtagtggttgattagtaatgtagtatacactggcagacatctagaatagtatgatgctttacatttaaatgaggttattcttttaaggacttttatttgtatgttttctgtaaggaataataaaataattgtaattaaggaatataccatactatattaaacacattcttcctattttgttagttatacactaaattcacatcacccgtgattatttcagttcagagataagtgaatcctcttcatgaccctgagtctttgcctggttcttaagaatcactgtcctttagttaacgccctgtgacctgaaccaatcactctatacatctttagatacgttgtctgttttcaaatgagcatggcaaggatgcatacatttccctcctttatcaactagaaacagtacattgttcaggaaaacatgagtgttagaattagaaagagatccaaattgtagttttgctgctcatcctattttctcctctccaagtctcagattcccatttataaaaggagcaatcatactgacataagattctatgattaaataaggtaatacatatataacaccttaataatcataggcacttgcgccaggcgcggtggctcacacctgtaatcccagcactttgggaggctgaggcgggaggatcacaaggtcaggagatcgagaccatcgtggctaacatggtgaaaccctggctctactaaaaaaatacaaaaaaaattagccaggtgtggtggcgggcgcctgtagttctagctactctggaggctgaggcaggagaatggcttgaacccgggagacggcgcttgcagtgagccgagattgccccactgcactccagcctaggcaacagagtgagactctgtctcaaaaaaaattaaaataaaataaaataaaaatcataggcacttagtaagtgtagtttncctggatggtaaagtatcagggaaagtggtttcctttctttttttttttttatnnnnnnnnnnnnnnnnnnnnnnnnnnnnnnnnnnnnnnnnnnnnnnnnnnnnnnnnnnnnnnnnnnnnnnnnnnnnnnnnnnnnnnnnnnnnnnnnnnnncgcgtaaaaggtatgaacacccatcctcattcgagctcggaacctccttttttttctcgttttttttttgagtacagagtctcaccttgtcacccaggctagagtgcagtggcacgatcttggctcactgcaacctctgcttcccaggtttaagcgattctcttgcctcagcctcccgagtaggtgggactacaggtgcccgccaccacgcccgtgtaatttttgtatttttagtagagatggggtttcaccatgttgtccaggctggtctcaaactcctgacctcatgatccacctccctcagcctcccaaagtgctggaattataggcgtaagccaccacacccagccagaaagtggttctcatgatgcttctcagaccggcaacatcagcatcactggaacttgttaaaaatggacactctcagaacccacaccagacccaccaaatcagtttgagaactgccattcagtagagaattatttgcctactgtaaattttctaaggatttatgatgggctatttttgacccataggctcagagaatcctgcaaaatccttttttattgtttattctgcagacaaaaatgtgacaatatgctttgaaaacatagatatacttgagtaacatttatttacataaatcccaaattctacctctgaaggtatatgaaatttaactatgtatgtattatgcattttgtctggctttctatcataattttaatttgtaaagaatgtgcttacttgggaaagcaaattaaagtgactactgtttgctatcgttatgatgttatctacctctttttaaaattcttttaaaatttaatttaattttattttattttgagacagtctcgctctatcaccaggctggagtgtaatggcacaatctcagctcactgcaacctccacctcccgggttcaagcaattcttctgcctcagcctcccaagtagctgggactacaggcgcacgccaacacgcctggctaattttcacacttttagtagagacggggtttcaccatgttggccagaatggtctcgatctcttgacttcgtgatccgccagcctcggccccccagagtgctgggattacaagcatgagccactgtgcccggcctctacctctcatttttttttaagccaaccttttgaaaaatcatattcttttctgcctctaattatacaacagagacatagtactaaaaatgatactgaagtttatgtccatgacaacagtttggtgaaatctaggtgtgtttttatctccatacatatcaaatttatcttaagaaaattacattg

SEQ ID NO: 34383 - DNA, 641 bp, Homo sapiens
taaaatataagtgacatcctaatttcagaaatgttagcaccgctgtggctcacgcctgtatcccagcacttcgggaggccgaggcgggtggatcatctgaggtcaggagttcaagaccagcctgccaacatggtgaaacsctgtctctagtaaaaatacgaaaattagccaggcatggtgccatgcacttgggaggctgaggcaggagaattgcttgaacacgggaggtggaggttgcagtgggccaagatcacgcaattgcacttcagcctgggcaataagagagaaactctgtctcaaaaagcaacaacaacaacaacaaaaactactgggcgtggtggcgtacacctgtagtcccagctactcaggaggctgaagtgggaagatcacttgagctggggaggtggaggctgcagtgatctgagatccggcaactgtactcaagcctgggtgacagaacgagaccctgtctcaaaataaataaataaaataaccaagaagtaatttcagaaatgttaaaatgtggaaatgaaaagtgtaactggccaggcacagtggctcacgcctgtactcccagcactctgggaggctgaggcgggcagatcacttgaggtcaggagttcgagaccagcccagccaac

SEQ ID NO: 34384 - DNA, 641 bp, Homo sapiens
taaaatataagtgacatcctaatttcagaaatgttagcaccgctgtggctcacgcctgtatcccagcacttcgggaggccgaggcgggtggatcatctgaggtcaggagttcaagaccagcctgccaacatggtgaaaccctgtctctagtaaaaatacraaaattagccaggcatggtgccatgcacttgggaggctgaggcaggagaattgcttgaacacgggaggtggaggttgcagtgggccaagatcacgcaattgcacttcagcctgggcaataagagagaaactctgtctcaaaaagcaacaacaacaacaacaaaaactactgggcgtggtggcgtacacctgtagtcccagctactcaggaggctgaagtgggaagatcacttgagctggggaggtggaggctgcagtgatctgagatccggcaactgtactcaagcctgggtgacagaacgagaccctgtctcaaaataaataaataaaataaccaagaagtaatttcagaaatgttaaaatgtggaaatgaaaagtgtaactggccaggcacagtggctcacgcctgtactcccagcactctgggaggctgaggcgggcagatcacttgaggtcaggagttcgagaccagcccagccaac

SEQ ID NO: 34385 - DNA, 556 bp, Homo sapiens
ttgcccaggcagatttctaacytgggctgaagcaatgccctttatgcagctcccagacctcagcccttgaagtctccaatccgtgggcagtcccatgggttagggctgaaaggcaaggatgagaaaagccctggcctcctgggacttggaggagtcactttctgtcaggccactgtccagcaatatggacagtgtggtccaggctgggcttgctgcttctcttggggaggatgagagccctagtctctgagggaagcagccaggagctgctggctaaccctgattccccagaaccctggagcacagtggactcccagggagccctgccttctgtctcatttttgtcttagctctgaggcaaaggagaatgaatgaacaaggtggtctggctgcaggctggactgtggctggtttgtctgtctagtagggaccaagcagggaaaggccacgaattggaagaggcaagtacagccccgcacagggaactcacagaagggtcttaaccctccccacctactgtgtcctgtacccaagcagcttcaatagctcaagagcc

SEQ ID NO: 34386 - DNA, 613 bp, Homo sapiens
tgcaggtgaggtgaggagcacaaaggagatgccaagtctccagagggtgctctggcctcagaggcctggatgagagagaaagcacctctctacccacagcctggagtctcttggaggaggggcctccgctgtggtgtatgaagaaaggagacccaacccagcagcttcagcagttccttgcagtccacggggtgaagtcctggccccgggaggcaatgaggtcctctgtgagtcggtgccagaggttttccagcctggccgcatcccaagggtgcatgaagctccagccacatcttccctgcttagtgtggctgagtgtctttccctgctctgtgggtggaggtgcttctygggagtgctgggagtataaaatgaaatcagatgcatgaaacagttgcccagggcctggtactctgcccccaaccccgttgccagtcacagccaatgacctgcatccttgaagacctgccctctgagcacggcatgtgtcccagtttagcactaggtgacaacagcacacctgggttcaaatcctggccctgcgcctcacacaaaattgtttaacctctctggctcagtcttctcatctagaaaatgagaataatcatagtgc

SEQ ID NO: 34387 - DNA, 613 bp, Homo sapiens
tgcaggtgaggtgaggagcacaaaggagatgccaagtctccagagggtgctctggcctcagaggcctggatgagagagaaagcacctctctacccacagcctggagtctcttggaggaggggcctccgctgtggtgtatgaagaaaggagacccaacccagcagcttcagcagttccttgcagtccacggggtgaagtcctggccccgggaggcaatgaggtcctctgtgagtcggtgccagaggttttccagcctggccgcatcccaagggtgcatgaagctccagccacatcttccctgcttagtgtggctgagtgtctttccctgctctgtgggtggaggtgcttcttgggagtgctgggagtataaaatgaaatcagatgcatgaaacagttgcccagggcctggtactctgcccccaaccccgttgccagtcacagccaatgacctgcatccttgaagacctgccctctgagcacggcatgtgtcccagtttagcactaggtgacaacagcacacctgggttcaaatcctggccctgcgcctcacacaaaattgtttaacctctctggctcagtcttctcatctagaaaatgaraataatcatagtgc

SEQ ID NO: 34388 - DNA, 643 bp, Homo sapiens
ggaccggtcagcggactcaccggccagggcgctcggtgctggaatttgatattcattgatccgggttttatccctcttcttttttcttaaacatttttttttaaaactgtattgtttctcgttttaatttatttttgcttgccattccccacttgaatcgggccgacggcttggggagattgctctacttccccaaatcactgtggattttggaaaccagcagaaagaggaaagaggtagcaagagctccagagagaagtcgaggaagagagagacggggtcagagagagcgcgcgggcgtgcgagcagcgaaagsgacaggggcaaagtgagtgacctgcttttgggggtgaccgccggagcgcggcgtgagccctcccccttgggatcccgcagctgaccagtcgcgctgacggacagacagacagacaccgcccccagccccagctaccacctcctccccggccggcggcggacagtggacgcggcggcgagccgcgggcaggggccggagcccgcgcccggaggcggggtggagggggtcggggctcgcggcgtcgcactgaaacttttcgtccaacttctgggctgttctcgcttcggaggagccgtggtccgcgcgggggaagccgagccgagcgga

SEQ ID NO: 34389 - DNA, 518 bp, Homo sapiens
agctctcctcttccaggaggtcttcctttcctgtttggacagttttacctgctggytagtcccatgcttcttcccctttccaggctctctcatagctttgcccttgaccttctgagcctttgtttactttttatgtgagtgacagagagcagcctccttcctcccttggccatagttctttgggggtcttcttcatcatactaggagctctctgaggatagggcaagctctcctttcagactgggggtccctggggttggaagtctttcttgggactccccctaggcttcccttggcagacccaacgttgcactagaggggtgactgtgcctggtgtggtgcccagttggctgtgtgtgtgcacacgtgtgtgtgtgtatgtgtgtattgtgtggggagggtttgcttttggttttccatcaccttccctgtcctttcctgatcagatcctctgagtgaggctggttagggagatggagcttggaatgagggaggaagatggggtggtatggcacccc

SEQ ID NO: 34390 - DNA, 518 bp, Homo sapiens
agctctcctcttccaggaggtcttcctttcctgtttggacagttttacctgctggttagtcccatgcttcttcccctttccaggctctctcatagctttgcccttgaccttctgagcctttgtttactttttatgtgagtgacagagagcagcctccttcctcccttggccatagttctttgggggtctycttcatcatactaggagctctctgaggatagggcaagctctcctttcagactgggggtccctggggttggaagtctttcttgggactccccctaggcttcccttggcagacccaacgttgcactagaggggtgactgtgcctggtgtggtgcccagttggctgtgtgtgtgcacacgtgtgtgtgtgtatgtgtgtattgtgtggggagggtttgcttttggttttccatcaccttccctgtcctttcctgatcagatcctctgagtgaggctggttagggagatggagcttggaatgagggaggaagatggggtggtatggcacccc

SEQ ID NO: 34391 - DNA, 518 bp, Homo sapiens
agctctcctcttccaggaggtcttcctttcctgtttggacagttttacctgctggttagtcccatgcttcttcccctttccaggctctctcatagctttgcccttgaccttctgagcctttgtttactttttatgtgagtgacagagagcagcctccttcctcccttggccatagttctttgggggtcttcttcatcatactaggagctctctgaggatagggcaagctctcctttcagactgggggtccctggggttggaagtctttcttgggactccccctaggcttcccttggcagacccaacrttgcactagaggggtgactgtgcctggtgtggtgcccagttggctgtgtgtgtgcacacgtgtgtgtgtgtatgtgtgtattgtgtggggagggtttgcttttggttttccatcaccttccctgtcctttcctgatcagatcctctgagtgaggctggttagggagatggagcttggaatgagggaggaagatggggtggtatggcacccc

SEQ ID NO: 34392 - DNA, 639 bp, Homo sapiens
tctcactacaagtttctatctttttgcctgagggaattctccaattcatcaatgcctttaccacaacagaaagccatagctttagtggctttcacaatacacgaagcaaaacaaatagaactgaaaggagaaatagacaaatccacaattacagttggagacttcaatactcctttcacagtgatcacagaaaaagtaggcaaccagccttggcaaggtggctcatgcctgtaatcccagcactttgggaggccaaggcgggaggatcacgaggtcaggagatmaagatcatcctggccaacatggtgaaaccctgtctctactaaaaatacaaaaattatccaggcatggcagcctgcaactgtagtcccagctactcgggaggctaaggcaggagaattgcttgaatccgggaggcagaggctgcagtgagccaagattgcaccacttcactccagcctgggcgaccaagtgagactccatctcaggaaaaaaaaaaaaaagaaaagaaaaagtaggccagtaaggttatagaagacctgaagaatactatcaaccaacctgacctaactgaaatttatagaatactccacccataagggcagaatacacattctgttcaaatacacagaaaacatt

SEQ ID NO: 34393 - DNA, 622 bp, Homo sapiens
ttaacttcggctggttagaattatgtttcacagaattcccttcccagtatggttctgagttagaattggccaaaagaaagttggccaaagcatgctcagtaaaaacagatgctgagatgccagttactgccagtggtcatcatgcttccctgctctgcattcagcccctcctcctgccagctggccctgctgaccagcatcgactgtggtccaccaccaggtgtaggagcaacatcttgcctggacttccccatcagctctccactgtccttcctctccagcatctggatctgctggcttcccggaatccctgcaagtgctgacttgcccatctgtcccartgcttcaggagggctgcatagggcattttcccagaacctccagctctcatgtcagacctttacttccagctcctcccacacttgtgtaaggtttaatccctgtaagaaagtcctattccatcatcctcattgtcattcctcttccctgattgaactttcattcatacacatgaaaagtatcctgtactcagcctgccaattaataatcatttctccagcattatcagcagcattttaaatatggatactttctttctaaatacttaatacacttgccttcc

SEQ ID NO: 34394 - DNA, 586 bp, Homo sapiens
tgaggggtggacctaacctagtctagatggtcaggaaggactcatctaggaatgatgtttaagttaggacctaaaatttgacttggaattagcctggagggaggatgagcgagggaaaaagaatgtccgggagagctgaacaccaaatgcaaaagcccaaaggtagtaaagaattcaaggcatgtaaagaactaaaaataaaaacagaactttcaattcaaaatagctgagatcttccccatgccactctcaaaaataacaattggggggaaatacacagaaacactcatttcatttttcttgaactgagactcacctcaaaccacaatgcctgaaaatagaaaatggatagaggctattaaaggacttagcagatccaaggaaggtcaagcctaagtgcttagagaagaagaaaacaaggagaagcaaggcacgtctccctgaggagccctggaaagactcaggtatcagaagcagtgacgtgcagagggaagttaaaggaagggagatagatgggagaaatgtagtgcttcaaaaaggacacttgtttgaaamtctgtttaagaagtagtcaggtctcccagag

SEQ ID NO: 34395 - DNA, 1219 bp, Homo sapiens
gaaaaaagaaaaactgtcgatgttcagttctgagagatggaggtcagagtatgctgaaatacctaaataaatctgtaagtggctcataaataattgaacagaccaacaagctagctcaattataccaaaaaatgattgctcagtaccccatattatatcatttgtggaagaaaaaatcttttgaagttaaatataaatttaaccccccgtcccactgtgtatggtttccaaaaaggcctgtctggtaaggtgaaattttccatgctcagtttcaggyccaaaggggaaacattgatggagacttgaagaaaacgctcagcaaagcctagtgatttatgaagggtaaaacaagtttttaattttatcctaaagaaattattttgggaaaacagagttaatggaagatatttgtgttagaatctctacatgaattggttacatactcagagatgttatcaaataatttggggaaatttcttttcactctatgataaaaatccatgtgtatatactcagaataaaaataccaactacatttagaacagtgtgacaaataaattatacacacttcataggtacacaacacttgggtgtgaaatgcatttttgccttgccagagtttaattatatttatcaatctctgtcgtaagcaaatactaagaaagccaccacttcaaaagtgactcttgacatcttatttctgacccagagtttgtaacaatgcacctcactgtcgcaactcatgactacacccccacctccttcatgacatcttccgggattaaccccatctgagtttacatgacgtcatcctcaagtgatcttttatgaagtagccctgagcagtgcattgtgctcccttctgtagattgtagaatttgtgagcacaggaatcagatctattactaattttattttttccaagctcctagaccaggagggtgaccttcatagatatgtaccatttatacccactccacccagcccctggccgagcttagaaaaaaataaccatctgtccatagaaaacatcctcacatcttctacacaagcgacactgtcattgaactagaaaaataaaacagaaaaggaattaagatttagtgactctatgaaaattatgataatagttatctttaaatacacgaaaatccatttacaaaaagattgaaactaatttagtgtgatttcgttggtgagtggaagtaaggggtatttt

SEQ ID NO: 34396 - DNA, 527 bp, Homo sapiens
gtcagtccaagaatgcaataaatatcactgttgttctgtttaccatataggtcagaaaagaaagaatgactactgacccttatcccacacacgcacacacacagaagctaaaaaagtatccccacatttggaagagacaaggactatagtcatagttagaggtcatcaaagtaaaatttttcaaattcctggggagggaagggcacactggcctgccactgccttcccctggtctgtctctgatcctgccagtccacctgctctgatggcatatgttagcagccacccagcacaaacaagaagcctgtgctttagctttcttccacctgtggaacatgaaaggaccctttttaataaatcagcaatgatcctaaattgtatcatccaaacatagtcttttccatcttcaaatcctgtgcctgggctcacttgacagaactgtgatrtcttgttaacaagatatcttattcaccaaatgctgctttgtttggctcctgaatcaatacagtctgcatgtttgcaataaa

SEQ ID NO: 34397 - DNA, 586 bp, Homo sapiens
ccataccacctaggtttgtgtaagtaggtttgtgatgttcccataatgatgaaatcacctaacgttgtatttttcagaaggtattcctgtcactcagcaacacatgactatactaagagggtgctgtgcagaggcaggatggtccgtcaggcagcagtctagctgagaacttgcttaaggtgaagtgccctcttagactaagtaatccatcaaagagcaratactggccatttccctaggcaaaggcagagaccaatggttcattcattcattaaacaaatatttattgaacctcaactatgtgctaagtaatattccttggggatacagataagttctgggtttcatggaacatatacactgtacatttaaatccctcaaagtgtctatttacagccacagataagttagaaataggggagagggaaacagaattcaatagttagaagccttgtcacctgttactgctaacagcctgacatgcactatgtcacttgaccctcttaacaaccctgtgaggcatgtattattatttctgtttcataaatgaggaaacagaggctcacagaggttaggaaacatgttc

SEQ ID NO: 34398 - DNA, 606 bp, Homo sapiens
ggaacaaacccaattggcatcaaaatcctggaatgtwcaggacggaatctcagatcagctgagactccttcaggcaggcaccaaggctctgggtacacatggttcagaatccaggagtcagagaccattgcactggagacctagacacagcaggtgaatgtcattcctggagcaggagctgttgctgttgacttgtattgccacatgctgggtgtgtgtgtctgtgtgtttgtgtgtgcatgcacacacacatcaagtgggggaaggggcaggaaactgggttccaggtgttcacaggagcgagaaatctaatggcctctggatgaaccctgctgccaactgaggcagggttagacttgcagtgtgacctctcagacatgtgagatttttcattcattttatgctgcctctgcctacagcatctaccaatctcaaatatttacaatccactttgaaataatataagcaaatatgtttcttcacagttcttttctgctgtccttgtttttccctatctattgagacccacatataatccagtcctgttccacacagccttggtcacataatagtaactccgacagaataatcatcctctgagaccca

SEQ ID NO: 34399 - DNA, 1090 bp, Homo sapiens
tacctccatctctgcctttatcttcatgtggcattctccccatgtgtatctatctctgtgtcaaaatgtcccctttttataagaacatagtcatacaccctaatgacttcatcttaacttgataatctgcaaagaccatgtttccaaataaggtcatattcacaggtcctgagaagtagggcttcaacatcttttagggggacagaattcaatccataacactacgcgagattcttctctttcctgatgaagctcttaaattctagttttattacaagcagagattttggagccattgaagagtagttagtccagaggttttcaaatagtgttccaagaatctataactctccaacaaagtatcttagaagaactcagggagtgaacagggctcctggttttatatctgttgcaattaatatttccatgtaacaaaccagcccaaaacttagcggtgtaaagcaactacattataacactcagattctgtaggtaaggaatctggcacagcaaagacctcttacttatgctccatgatgtgtgggacctcagttggcaagacttaatggctaggagctacaatcatctggaggcgtcttcactcccatgtctggtgtttgattctagctgttggcaggaacctcagctggggctatcagccatagcaaacctttccatgcagcctgggcttcctcccagcatgacagctgcagggtagtcaggcatcttacacaatagcttagggtccaaaacaagtattccaaaagacaaaaaggatgctgcatcatctttcatggcctgtcctcgaaagtcacattcctcacttctgccatgctcttattagttaaaacagtcataaatcttgccccgtttcggagcagcggcagagaagacacagaacccacgtttcagtgggagaagtgccagtgtcacatcttaagaatatgtggaacaggagttattgttgtagccatctatgaaaaatacaatctgtcacacaatctcacaccaaattcttcaaccatggagcagcacttytaaatgttttacatgtaaggacctctaactctttaatgtttgctaacattta

SEQ ID NO: 34400 - DNA, 1098 bp, Homo sapiens
tggatccctcacaaatggcttcgtgccttcctcgccctcgtagtaatgagtgacttcttgctctgttagttcccccaaaatctgattgttaaaaaggcctggcacctcctccccactcaccatatgatgcccacctcctttctccttctgccaagattggaagcttcctgaagccctcgccagaagcagatgatggcaccatgcttctggaacagcttgcagaactatgagccaaagtaaatctattttctttataaattacccagtctcaggtattcctttatagcaatgcaaatggactaagacagtaagtaaagtgtttctctgcattcttttttttttttcttgatggcaactgtgtttctctgcattctgtgagctgttatagcaaattaattgaacctaaggaaggggtcatggaaagccgcaatttataactcgctggtcagaagtgtgggtgacagtatactaattgtgactggtgtctgaagttggggcagtcttgaagggctgagcactcaccctgtgggatctgatgctacycccaggtagatggtgtcaaaaatgaattgaattagaggacacctgctggcatccgctggagaatctggtgtcagagtgttgtgttgcatgagagtagtgagcaggagaaacacttgggcttttttcctccctgtatctcctacttccactgctgttgctctagcctaagcccccacttttatttctcaccctcttttttttttttttttttttgagatggtgtttcactcttgttgcccaggctagagtgcaatgaaacaacctcagctcactgcaacctctgcctccctggttcaagtgattctcctgcctcagcctcccgagtagctgagattacaagcatgtgccaccatgcccagctaatttctgtatttttagtagagacagggttcatccgtgttggtcaggctggtctcgaactcccaacctcaggtgatccgcccgcctcagcctcccaaagtgctggggttacaggcatgagccaccacatctggccttctcaccctcttaaccacacccttcagtttgcttctacacagatatggcagcctgcag

SEQ ID NO: 34401 - DNA, 1098 bp, Homo sapiens
tggatccctcacaaatggcttcgtgccttcctcgccctcgtagtaatgagtgacttcttgctctgttagttcccccaaaatctgattgttaaaaaggcctggcacctcctccccactcaccatatgatgcccacctcctttctccttctgccaagattggaagcttcctgaagccctcgccagaagcagatgatggcaccatgcttctggaacagcttgcagaactatgagccaaagtaaatctattttctttataaattacccagtctcaggtattcctttatagcaatgcaaatggactaagacagtaagtaaagtgtttctctgcattcttttttttttttcttgatggcaactgtgtttctctgcattctgtgagctgttatagcaaattaattgaacctaaggaaggggtcatggaaagccgcaatttataactcgctggtcagaagtgtgggtgacagtatactaattgtgactggtgtctgaagttggggcagtcttgaagggctgagcactcaccctgtgggatctgatgctaccyccaggtagatggtgtcaaaaatgaattgaattagaggacacctgctggcatccgctggagaatctggtgtcagagtgttgtgttgcatgagagtagtgagcaggagaaacacttgggcttttttcctccctgtatctcctacttccactgctgttgctctagcctaagcccccacttttatttctcaccctcttttttttttttttttttttgagatggtgtttcactcttgttgcccaggctagagtgcaatgaaacaacctcagctcactgcaacctctgcctccctggttcaagtgattctcctgcctcagcctcccgagtagctgagattacaagcatgtgccaccatgcccagctaatttctgtatttttagtagagacagggttcatccgtgttggtcaggctggtctcgaactcccaacctcaggtgatccgcccgcctcagcctcccaaagtgctggggttacaggcatgagccaccacatctggccttctcaccctcttaaccacacccttcagtttgcttctacacagatatggcagcctgcag

SEQ ID NO: 34402 - DNA, 1268 bp, Homo sapiens
gatgtctcctgtctccctaaatgtataaaaccaagctgtgcccctaccaccttggacacatgttgtcaggaccgcctgaggctgtgtcacgggtgcgcatcctcaaccttggcaaaataaactttctaaattaactgaaacctgtctcagatatttggggttcacataacaataatccctacgttaggggacatttgccttgctggcccagggcatgggcacacaacccaggctcaactaagcctactcttctgtccaggactctgaacctgagacacatgatacagagacatgaggatggtggagaatttgtttagcagcagcagtggtggcagtggtggtggcagtggcagttgtggtgttatgatttagaaccaggtcttggcttcccctgtctcctgctcattttctgaacactccctgtcattctctgagatgcccaatatcctcttagtaaattgcttttgtgctgaaaccacccagagttggtttctgtcactaccaagaagctgactggtagctccacccaccttaccagcttgccctgaggaataaggaggcaaagcatgccaagccctggcacagtggatggcacctggaaatgccccattagtagcagcaaaagtgaacaatgcatccacttttgttttaacttgataaagcctcattctttcatcattgaattacaaattgtgacttccactaactcctgagcagctggtcatctttacattttcaaggcgaggagctcagccacctggatgttcttcctctgctcttggtcagaggccarttgttgtcctggccctctaaggacagcactaagatccatcccactcttctttctgtccgcaaaaccaaggcagactggcccccagacttctcccaacacttcatccaatttgtccatgagccaacgactccaaagctgttcaggactatctctccatttctttcttaacctgtcaagagatgggttaccagattccctctattaccactgataaattgaaaataaaacacatttcatcaaggccacaatttcttgcttgtggtcaaagctaacaagaaggatcccaccaggaacctagtaggataaattacataattaatgttattccttagtttgctgaagtcgaaatctgtccccagtagccttatttctcctgctttatatctttccttccagggctgtacactggtgttaccagtcttaggaagagtggaaataccttgtcattatttctttgaatccaagacatgcctcc

SEQ ID NO: 34403 - DNA, 1031 bp, Homo sapiens
gctcgctgtaacctcaacctcctgggctcaggtgatcctcccacctcagcctcctgagtagctgggactacaggcgcaagccaccatgcctggctaatttttgtatcttttgtagagatggggttttgccatattgcccaggctggtcttgaactcctgggctcaagcaatgcacctgcctcggtctcccaaagtgcatttatttaattattcatgaaattaatgttttagacattttcatttggaatttggaattccttttgtaactgttctcttcttaatctttgttcattcatctattagaaattttgtatttattgttttgcataaacttcttatatattaaggtaactgtcttattttgaataaatgtttatctagtttgatttaaaattttatatattattgttacagactgaatgtttatgcctccctttcccaattcatatgttgaaacctaatccccagtgcagtggtacctggaggtgggccctttgggaggtgattaggtcatgagggtgggccccttgtgaatgggattagtgcccttttaatactccttttgtgaaactccacttaccaggaggtgctcttggcattgttcaggtagttctaacatgagtttcttcttcacaatacctgattcatcacatcccccactatcagtcaagacatactgcactaccaatctagatgtcctttgaaaatatttgctgaggccgggcatgggggctcacacctgtaatcccagcactttgggaggccgaggctggcggatcacctgaggctgggagttcaacaccagcctgaccaacatggagaaaccctgtctctactaaaaayacaaaattagctgggcgtggtggtgcacgcctgtaattagagctactcaggaggctgaggcaggagaatcgcttgaacctgggaggaggaggttgcggtgagccaagatctcgccattgcactctagcctggacaacaagagcaaaactctgtctcaaaaaaagaaaagaaaagaaaatatttgctta

SEQ ID NO: 34404 - DNA, 926 bp, Homo sapiens
cccagcacggatagtttttcgtatgttatggccaaataaatgatagagggacaggtactgtgaaaaaggctggggctgggcatggtggctcatgcctgtaatcccagcactttcggagtctgaggcaggcatatcacttgaggtcaggggttcgaggatagcctggycaacatggtgaaaccctgtctctactaaaaacacaaaaattagccgggcgtggtggcgcatgcctgtagtcccagctactcaggaggctgaggcaggagaattgcttgaacccaggaggcggaagttgcagtgagccgagattgtgccactgcactccagcatgggtgacagagacttgtttttttaaaaaaaaaaaaaaaaaaggctggaaggaaggaagatgggcatcacccacaatctcctaagccccatgaaatggtacgatgataattgcagttttcaggtagtggtttaataatgtggggagaggtgtggctgagcagtcttcatgagagataacttaccagtaaattcaaggtgcacaccgtgccttaaacacaaatgcatatttattatatatttacactaaggagtggcaagggaaccactctatggatttttcaatcaaaatcatccctcgtgtttttaaaataagacttttttttttaagactcttgtcttcagagatttattttatatgaaagtcaggtgacatgtcccaggcaatgcctgtcattgtctgctgggcttctgtgcatttcctgtctccacccacagcattgccccaagctggagggagctttcactttgttaaaacattcactttcagaggtgctggagagatagatcgtcaacctcgagtacagctctgaattggtgctggggttttctctttttgttcctgtctttgaatctcaaagtaaaacttttgggagcgg

SEQ ID NO: 34405 - DNA, 926 bp, Homo sapiens
cccagcacggatagtttttcgtatgttatggccaaataaatgatagagggacaggtactgtgaaaaaggctggggctgggcatggtggctcatgcctgtaatcccagcactttcggagtctgaggcaggcatatcacttgaggtcaggggttcgaggatagcctggccaacatggtgaaaccctgtctctactaaaaacacaaaaattagccgggcgtggtggcgcrtgcctgtagtcccagctactcaggaggctgaggcaggagaattgcttgaacccaggaggcggaagttgcagtgagccgagattgtgccactgcactccagcatgggtgacagagacttgtttttttaaaaaaaaaaaaaaaaaaggctggaaggaaggaagatgggcatcacccacaatctcctaagccccatgaaatggtacgatgataattgcagttttcaggtagtggtttaataatgtggggagaggtgtggctgagcagtcttcatgagagataacttaccagtaaattcaaggtgcacaccgtgccttaaacacaaatgcatatttattatatatttacactaaggagtggcaagggaaccactctatggatttttcaatcaaaatcatccctcgtgtttttaaaataagacttttttttttaagactcttgtcttcagagatttattttatatgaaagtcaggtgacatgtcccaggcaatgcctgtcattgtctgctgggcttctgtgcatttcctgtctccacccacagcattgccccaagctggagggagctttcactttgttaaaacattcactttcagaggtgctggagagatagatcgtcaacctcgagtacagctctgaattggtgctggggttttctctttttgttcctgtctttgaatctcaaagtaaaacttttgggagcgg

SEQ ID NO: 34406 - DNA, 926 bp, Homo sapiens
cccagcacggatagtttttcgtatgttatggccaaataaatgatagagggacaggtactgtgaaaaaggctggggctgggcatggtggctcatgcctgtaatcccagcactttcggagtctgaggcaggcatatcacttgaggtcaggggttcgaggatagcctggccaacatggtgaaaccctgtctctactaaaaacacaaaaattagccgggcgtggtggcgcatgcctgtagtcccagctactcaggaggctgaggcaggagaattgcttgaacccaggaggcggaagttgcagtgagycgagattgtgccactgcactccagcatgggtgacagagacttgtttttttaaaaaaaaaaaaaaaaaaggctggaaggaaggaagatgggcatcacccacaatctcctaagccccatgaaatggtacgatgataattgcagttttcaggtagtggtttaataatgtggggagaggtgtggctgagcagtcttcatgagagataacttaccagtaaattcaaggtgcacaccgtgccttaaacacaaatgcatatttattatatatttacactaaggagtggcaagggaaccactctatggatttttcaatcaaaatcatccctcgtgtttttaaaataagacttttttttttaagactcttgtcttcagagatttattttatatgaaagtcaggtgacatgtcccaggcaatgcctgtcattgtctgctgggcttctgtgcatttcctgtctccacccacagcattgccccaagctggagggagctttcactttgttaaaacattcactttcagaggtgctggagagatagatcgtcaacctcgagtacagctctgaattggtgctggggttttctctttttgttcctgtctttgaatctcaaagtaaaacttttgggagcgg

SEQ ID NO: 34407 - DNA, 659 bp, Homo sapiens
aatttctgagcattggccatagtaaaggcctggctgtgtggcagtgagggtagtttgatataagcacccagggattccatctgtgttgaggcccagtgatgggacagtccatgagtgtagaacatcttctaatgacactaataggtgaatagggatttctgttgggagagctgctcagttgtcaacttcgaggagacgtagttcttctggtttcaggtctgtcgtaggggctacataagaatcgaagcctaggtcttcataatctgtatattcatagcttcagtatcattggtggccagttgttttgacagtgagagaggggttgttaatttcatctgttatgtacaggatacgtagggttgggagggcaattaacattaggattatagtgggcaagagagtccacacagtttctgcttcttagggatctatagtgctagtatrtattaatgttgttgtcaatatgagggaaacaatatatcaatatgagggaaataaaccttctttgagttcttcatgacatctccatactgttttccatagagactgtactaacattaccgcccacagtgtctaagccttccctttttaccgctttcgtgagaatatctattgtttattgactttttaataatggctattctggctagggaaagttg

SEQ ID NO: 34408 - DNA, 780 bp, Homo sapiens
taaaaatacaaaaaattagccgggcgtgttggcgggcgcctgtagtcccagctacttgggaggctgaggcaggagaatggcatgaacctgggaggcggagcttgcagtgagccgagatcgcgccactgcactccaacctggggaacagagagagactccgtctcaaaaaaaaaaaaaaaaaaaaaaaaaaaakttggcttacccaaaatctaaagggagatatcagggttaaatgtattatttaatgtttatctctctgacttttggaacttcttgctctccctcccccgccaacatggtgaaagagaaggattaaaaattcacctaaaagtgaaattatacaattggctaacaaataagaaaatagcaacttattccctgaaatataattacctgggtcactgttttgatctgtgatttaataaaacaaaattatatgaaaagccctacagctacagagatctgaaaaaatatacatcttaagcagtaatttacttggactggatacaaaaagttcagctcatcttatcatgacttttgcatattttaataaaaaatatgctattctaaatctttattagagctcttatgccctcatgcataagtttaattctatcatataggtatctgattataaaattctaggttaactgaaggagatatctaaaatattgttcataatatttatttttatcagaaaataagtccatatgaaagtaaattttaaaataattatcactttatttctacagcagaaggattatcactgttaccagtggg

SEQ ID NO: 34409 - DNA, 780 bp, Homo sapiens
taaaaatacaaaaaattagccgggcgtgttggcgggcgcctgtagtcccagctacttgggaggctgaggcaggagaatggcatgaacctgggaggcggagcttgcagtgagccgagatcgcgccactgcactccaacctggggaacagagagagactccgtctcaaaaaaaaaaaaaaaaaaaaaaaaaaaagttggcttacccraaatctaaagggagatatcagggttaaatgtattatttaatgtttatctctctgacttttggaacttcttgctctccctcccccgccaacatggtgaaagagaaggattaaaaattcacctaaaagtgaaattatacaattggctaacaaataagaaaatagcaacttattccctgaaatataattacctgggtcactgttttgatctgtgatttaataaaacaaaattatatgaaaagccctacagctacagagatctgaaaaaatatacatcttaagcagtaatttacttggactggatacaaaaagttcagctcatcttatcatgacttttgcatattttaataaaaaatatgctattctaaatctttattagagctcttatgccctcatgcataagtttaattctatcatataggtatctgattataaaattctaggttaactgaaggagatatctaaaatattgttcataatatttatttttatcagaaaataagtccatatgaaagtaaattttaaaataattatcactttatttctacagcagaaggattatcactgttaccagtggg

SEQ ID NO: 34410 - DNA, 627 bp, Homo sapiens
gggtggttgtggagggttattccrttagttgggagtggtttccaaggaacacttgctgtcagattccctattgtcagtgactcatttatgtgacaacccagcatgctcctggcagcgacaaagtcctcggggtagcagtgctttggggctcacctcttaccaacaggtgtgggcaatagcagaatccatcttgcaaattaaatgcgcttaggtatttttcaattttactgttatcactgtaagtggcagagaggggaattgaaccattattcttttaaaaactattacaaaatatgtattattactaatcaataaataggattttccactgcttcagttactccaggagaacaaggcagggagtttaggcatcttcctctgctccttcaaacccccaaagttgtcttccgtcctgtaaaagacaacttgaacttactaaccacacaaagcctggcagtatgaaaggttcatgcactttctcaaaagggcctgccctgtgccaggggcttgttgagggttcacatctttttttccatcttttaatgaatcttactataagcaaagcaatgggctctgagcctggaaggggagacacaaataagaaataagacacaaactttgcagcaa

SEQ ID NO: 34411 - DNA, 563 bp, Homo sapiens
ggatcagggcctcactctcatgacatcatttaaccttaattgtctccctaaaggccctgtctccaaatattgtacactgggagttagggatttaacatatgaatttttgagggccacaaagagatccatacccaacaaataacatcartatttcaggaggacattttacagcaatggcactgatgttcccatgaggtacagaacatcttctatagcagaaaactatgataccagaaagtgaattcactgaaaataggccaaagtttcataggaagtagtggagaaaagattttattggaattttattctgaaaagtgaagctaaaacatgtaaaaataagttgatttctatttttaaacacaattgaattaaaactagaactatatgctaatttttagaataataaagaaggaatctagtgttgattttttaaggtgtaaatattctaacaaagtagtatgatagtaaatataattttcttcacttctagtttgactttgaaagcacaattataatgaagatcatttttgcaaaacttattcagctgtctcccaggccttcct

SEQ ID NO: 34412 - DNA, 356 bp, Homo sapiens
ccctcattcatcctacaaacatcacaaagccatcatatgtttcaaaaactggaaaagcagtacttcaaagggaccacttatatgctgctggtgggaatgcaatttagtacaacctttatggaaaactctaaggagatttctcaaagaactaaaagtagatctaccattccatctagcaatcccactactgggtatctacccaaaggaaaagacatcattatacaaaaaagacwactgtgcttgtatgtttattgcagcacaatttacaaatgcaaagatgtggagtcaacctaaatgtccatcaattgatgagctgataaagaaaatgtggtgtatataaaccatgtaataatgct

SEQ ID NO: 34413 - DNA, 2949 bp, Homo sapiens
  misc_feature (1)...(2949): n = A,T,C or G
gctgcatccctcctgcgctttataccttgggaatatagctgtcggccttgatcctccctggtcatcgcctggttgagaacaaacatgtctcaatagcaacctaattattatgtaggtaagtcaagagatacttttgagaatttaaaggggtataaatgatggaggtggtagtttcctccatggcctttctcacaaactagagataatgaggttctatagattacacttcctcatgtatttgacgaggaagtaaagacttgctaatgtctagcatttaccgttatcgctttgaattcacacactatccttttgctttaagtttaaaacactctgtatgacattttctcagttttgaaaccagactcttaactctcaaggaattttgttaggttgcaataagatttgtactttgcattctaagttgaatgagaagtggtgcagaaagagaacatgttcacatccagtcatttaaaaaattaatcttgggcataatccttctaaacaagcatcccagtacaacacttaaatgctatccaaaccttagataaaacaaaatatgattttgatcagtnnnnnnnnnnnnnnnnnnnnnnnnnnnnnnnnnnnnnnnnnnnnnnnnnnnnnnnnnnnnnnnnnnnnnnnnnnnnnnnnnnnnnnnnnnnnnnnnnnnnagaacccctgtaagctttttctaagtatttatttctgaatttacatagttttgatatatttaccaaccatgcttatgcttcctgagttattaaatagataagctgctttacagaatgaaccaaactataaaccaattaaactttactaaggggcaaaattccctgcatttttctatgtttttgagtttcatggctgtgtgactatcccactctccccatcctatcaaccttcatttattgaagattttgccatctaattcacagaaggcctggcttccagaactcctgccataattatagatagtattaatattctggtgaagaatccatccagactttaacttggtctccttaacgtttcacttttacttctattctacatgagctatccatcctcaacttcattctcaccaagaacaacttcatttctgaagttgcaaaggtcaatatgaaaataacctgtgaccacagccttttggttctccagcttttacccaccatgcccagcgagtcctttggttcccaagctcccattcccctcattgcttcgcttccttctattccatccctggctagaaacgagggagcatctctcaaactgttctcctgcctgggccttcatttctgccagtggtatcaccctgctgtgttctgaccatggttaatgtaaaactggccttttctgtcccttgaagcaggtactgaatgttgttggaggaaatcacaggtcgttgtcaccacatacttttggtctccaatctcagtgaaatgctcaaagctatcctttggcgattctccagggaacagcctcttgctttcttcccagggattcttccctcttccttaagccccaacctccctgatgacatttcctttctctcggcagatgacactgcctcatgcttcattcacagtgaaaggcagacgctttcaggcacaaatatcaccacttctattcctcagggttcctgcttttcccgtgaggccacttggtggacacatatactgagatctcagctagacagaagggatttgtatttaactgaggcagagtcagggtcattatatcaggatgtcggaaaacatctttttgcagctacctttgttctgtttcatagcaactagctttccagctcacagataatgaaaatcaggactgggtaagagagtgggttatttactccacgggtatttgttgagcacacattatggaaatagcccttaggccccatggacccaatgatatcaacagtgtctcattcacgtttcatagatgctaactgaatgagtgaattagataaatgaatgaacaaatgtggtaaacaatccctgaagtgaagtaatgaatgaaaaattaagtgcaagttgagtatcccttatctaaaatgcttgtgactgtgtttcagatttcagtattttcagattttgagtatttgcatatacgtaatatcttggagatcggacttaaatctaaacacaaaatttatttacatttcatatacaccttatatgcatagcctgaaggtaattttatatgatatgtttaatattttgtgcataaaacaaagcttgtgctaagtacttatgtgtggaactttctgcttgtggtgtcaagtcagtgcccaagaacattcagattttggagcgtttcagaatttgggtcttcagattaggcatgcacaacccgtataagatgcgtaagaaatttttctgctcagaaggagcatatactctaatttagaaataccttaatatgacattatataataaagttttgaaatgtgtggaattaaaaattagagmcaagataatgtataagaaggtgctaattatatagtccaggcagggtaattcaggcagaaaagttctttttccttttttaatacaggagagatcacattattcagctttgcattttctaggttcacaatatatctcaggaaagagaaagaataaatacttcatgttgctagagaaaggggatgttggaccatgaaatttaaggcaatatagaaagaaaaagggaatttcttctagagagcacggctaaaggaagaccataaaaaaggcaatgtgaaaattgtgggcagtgaaaattgtatctggggaatgacaagatcagtttaccttgtccatcaaatttgatagatagaacgtgtgtgtgtgtgtgtgtgtgtgtgtgtgtgtgtgtgttacagaaattccaacttagggactagtttgttagaaatttagtaatactattgggacccacttagagcacagttatgatggtgca

SEQ ID NO: 34414 - DNA, 530 bp, Homo sapiens
acagaaagaataatttgttggtggctgtcctcacagatgatccaccgaagtgcttagctaggattgcatggtgggaagaccaatcttttccctggggaggatggattgtagccaggcaagaggcagaaagaccagtttggagggtgttgcagtgggacaagtaatagttgaaagtctaggctaatgaaggtctaggttaaagaaacagaagtggatgggtttgaaaggtgctttataaaaagaaaaatcgccgggcrtggtggctcacgcctgtaatcccagcactttgggaggccgaggcaggcggatcacaaggtcagaaggttgagaccatcctggctaacacggtgaaaccccatctctaataaaaatacaaaaaattagccgggcgtggtggtaggtgcctgtagtcccagctactcaggaggctgaggcaggagaatggcgtgcacccgggaggtggagctcgcagtgagccaagatcccaccactgcactccagcctgggcgacaaagcgagactctgtctca

SEQ ID NO: 34415 - DNA, 530 bp, Homo sapiens
acagaaagaataatttgttggtggctgtcctcacagatgatccaccgaagtgcttagctaggattgcatggtgggaagaccaatcttttccctggggaggatggattgtagccaggcaagaggcagaaagaccagtttggagggtgttgcagtgggacaagtaatagttgaaagtctaggctaatgaaggtctaggttaaagaaacagaagtggatgggtttgaaaggtgctttataaaaagaaaaatcgccgggcgtggtggctcacgcctgtaatcccagcactttgggaggccgaggcaggcggatcacaaggtcagaaggttgagaccatcctggctaacacggtgaaaccccatctctaataaaaatacaaaaaattakccgggcgtggtggtaggtgcctgtagtcccagctactcaggaggctgaggcaggagaatggcgtgcacccgggaggtggagctcgcagtgagccaagatcccaccactgcactccagcctgggcgacaaagcgagactctgtctca

SEQ ID NO: 34416 - DNA, 1141 bp, Homo sapiens
cagagggggacagtcgtggggaaggacattcttattcaagaggacattgcgtcccacagacattaaggagcatggtgtgtttagtagcctggtgaccactgaacacagaccatgaggtgggcagtgggtggacctgaggctagaaggtggattgagccagatcgtgacgtgcttccaatgagggatgtgggttttgttctatagatagtttagaaccaacagtttcacttcccacatctaactaaatgccaaggtccgagtggactcaacaaactaatgctcaaatctaatctattttctccaactccattgaccttgccttatttctggctttatttttggaggctcctagttaaatttcccttaatagaatgaggacatctctatctcatcctagccatcaaattaatgatattttccctctcttatagaaaacaaatggacttggtaatgtaaggcagtawcaggatctgtctacaaatttcctagaagacaatctatacataaagttatatatgttgcatttaattttcactaaaatcctgtgataaacctccctatccagaaattttgcttgctcattttaatctggctactagagaatggagaggcatttccacctgggtccagccttaaatgacaatatgagtggtcaatcatttctgccacccttgttgccccaagggaggtaataaaagtagttagaacacctgtcactgaacttggatgtgcatggtgagcaaagccctccatatcttcctattcaggaggagttgccacatctcctcagtggctcctaggctgcttaagcttttgatataccctatgtagacaaaagggtacaaaagcaaggttgctaacatctaactgttgccttgagtaaaaaacaaaaggaattacagaacaaacgtttggctaatttcaaagtgtcccttagtgcttgaaaactttgtcttattattttttatacagaatcaaagtaggcctatcttagaaaagggaacatccttaatgttggagaggttttaaaataggctctcactatttccaacccagattattgtgctgacaaactgatgttttccccacttcctgtctttcttctccagttatttcacattctactttctgattttgctgt

SEQ ID NO: 34417 - DNA, 1141 bp, Homo sapiens
cagagggggacagtcgtggggaaggacattcttattcaagaggacattgcgtcccacagacattaaggagcatggtgtgtttagtagcctggtgaccactgaacacagaccatgaggtgggcagtgggtggacctgaggctagaaggtggattgagccagatcgtgacgtgcttccaatgagggatgtgggttttgttctatagatagtttagaaccaacagtttcacttcccacatctaactaaatgccaaggtccgagtggactcaacaaactaatgctcaaatctaatctattttctccaactccattgaccttgccttatttctggctttatttttggaggctcctagttaaatttcccttaatagaatgaggacatctctatctcatcctagccatcaaattaatgatattttccctctcttatagaaaacaaatggacttggtaatgtaaggcagtaacaggatctgtctacaaatttcctagaagacaatctatacataaagttatatatgttgcatttaattttcactaaaatcctgtgataaacctccctatccagaaattttgcttgctcattttaatctggctactagagaatggagaggcatttccacctgggtccagccttaaatgacaatatgagtggtcaatcatttctgccacccttgttgccccaagggaggtaataaaagtagttagaacacctgtcactgaacttggatgtgcatggtgagcaaagccctccatatcttcctattcaggaggagttgccacatctcctcagyggctcctaggctgcttaagcttttgatataccctatgtagacaaaagggtacaaaagcaaggttgctaacatctaactgttgccttgagtaaaaaacaaaaggaattacagaacaaacgtttggctaatttcaaagtgtcccttagtgcttgaaaactttgtcttattattttttatacagaatcaaagtaggcctatcttagaaaagggaacatccttaatgttggagaggttttaaaataggctctcactatttccaacccagattattgtgctgacaaactgatgttttccccacttcctgtctttcttctccagttatttcacattctactttctgattttgctgt

SEQ ID NO: 34418 - DNA, 524 bp, Homo sapiens
tactgtgaatgtcatgaaacgcctctgggagcataaataactttattactaagctgtaaagtagagcaagttattaatattgtatgaawtgcattcaattcactttttacctctaatagggtgagatctcactatattctggaaagtatatccttcaaactgctgagtagcatgtattgaattaactgaattaggaagccccattgctgctggaaatttggactgcaagcttgttttaataagttcaagtttacttctgagatcatcattttctttaggaattcaattcaataaggctgcctaactctgacagtaagtacgagaaattagattttattgtgaagtataaacaggcctgcaattgatgatataagactctaaacatcatcaagaggcttgtggactgctttgctatgggaagtaattgacactgaaagcttttggaaactgaagtttatagcactgggcccaaatcaatgatattttattttattttatttgaggtatttgaatagggcattagt

SEQ ID NO: 34419 - DNA, 1038 bp, Homo sapiens
tttggctggttaaattccaagtaattttataattgacctaattgcaaagaggtagctgagcagcaaaatatatataattccctatggctgtggaatcaagtgtctgaagatggagttatggatttaagaaacagaaatgctgccactctgcccacccctgccatctcccacccagttccctccatctaggattcccattggtggagggagaagtggttgccaattctcacttccctatttaggcagatcctcaagcagagagactcctgcctgttttgtttctgctgatatggggaagtgggtacctctaaccacttccctagggagcaggcgctactgctgcctgaagccaaatatctcttccccgaaaaggaagtatagattagagagaggccctattctgggtagcttgaataaaatataagccctgtttctcagtctttgacagttgttaaatagcaagagtttggaaatccctaagctcagtccmagggcaatcatctgtatggacagttagtccagagaattggagagagcacaggttatggagtggccaatcttcctctgccacctaccacctgctccatgtcaggcaagtcccatttcctgtctgcatttcagttctttacctgtggaataataacattagctataattctctgaatgcttgggatgagtcaagcatatttgaggtattattcttcccttttcacaaataaagaaaatggaagttaaataactcacccataattacccaacaagagtcaggatttaaattcaagtttatctctaaaggagttagcacccttccctaaaccttgcatgtagtaggtactcaataaatcacagctattattattattattccaaagtgacattgacaacagttataagaaaaataaaaacagcagtaggacctattgtcttttttgcactgccacaataaatatcatgttaagctttgtagctagaactatcttagagaggaacagatttgctcttataattacagcctgaccagaaccttagctccagaaa

SEQ ID NO: 34420 - DNA, 595 bp, Homo sapiens
aacctgggagatggaggttgcagtgagccaagatggtgccattacactccagcctgggtgacagagcaagactccatctcaaaaaaaaaaagacaacaaagatattattaatcactgaacactattttctctcaattataagtaattgaaaattctaatcaaccttagattaacctcaaatgtgcgaaaaagtgaacaccaaaactcattgtgattttaarttctaatcatacacataaaagttttaataaactaataattataaaatgaggccgggtacagtggctcacgcctataatcccagcactttgggaggctgaggcagacagatcacaaggtcaagagactgagaccatcctggccaacatggtgaaaccccatctctactaaaaatacaaaaattagctgggtgtggtggcacatacctgtagtcccagctactcaggaggctgaggcaggagaatcacttgaacccaggaggtggagattgcagtgagccgaggttacaccactgcactccagcctggcaacagaacaagactccatttcaaaaaaagacaaaatgagaacaaggtcttgatcagtgattttgaaa

SEQ ID NO: 34421 - DNA, 603 bp, Homo sapiens
agcatttctaaatccaaagattttttttttttttttgaggtggggtcttgctttgtcacccagcctggagtgcagtggcctgatgacagcttattgcagccttggcttcccaggctcaaatgatcctcacacctcagccttcccaaggagctgggactacrtgtgcgcacctccacacccagctaattttttattgttattttttgtacaggtggggtcttgctatattgcccaggctggtctcaaactcctaggctcaagttattctcccacctcagcctcccaaagtgctgggattataggcataagccaccacatctggccttaaatccaagatttttaagtaatttattgaaaggaatatgttcatactgcctcccagttttcggataaaagaaacccatgccctcagacaatttactctgaagtcagttaaactttagtagtctttagagtgaaaataatatgttcatatgatactgaaatattttacataaaaaggaatattgtcacctacaaattgtatacatttttataaagctagctactgctagattaaaatgtggtattaatgataatgtcacaatttataatatgttgcca

SEQ ID NO: 34422 - DNA, 585 bp, Homo sapiens
acgtatataaattttcttacctgacatttttaccattatcaatatatcagtagctcacatcttaacatagaagaagcccattagctcaaatactggaaacttcaaacaaggaaataaattacaaaagcaaagcagttaatgaaaaaaacttgtctattgcctgcgtctttcatgtctactcaataggtcctgttgaggaggctagaatacaccatccggttaagaaaggggttgttttgttttgtttaagacagagtcttggtctgtcttccaggctggagtgcagtggctcaatcttggctcactgcaatctccacctccttggttcaagcaattcttgtgcctcagcctcccaaatagctgagattacaggcgtgtgccaccatgcccagctaatttttgtatttttagtagagatggggtttcascatgttggccaggctggtcgtgaactcctggcctcaattgatcctcctgcttcggcctcccaaagtgctggacttagaggcatgaaccactgcacccagccccatttaagagagttttatattcagcatctcatatggcctacaccatgattttaat

SEQ ID NO: 34423 - DNA, 977 bp, Homo sapiens
tcacaggcctttggactccaggacttaaaccagagactcgccaggtcttgaggctgtcacttccctggttctcaatgtaaaaatgtttaaacttcttcaataaatgaaggggtttttttgtatgtctgtatttatgaaaggtaaaatttctcaagatctcaggttttgggacgactgtatatgcagtggtgacccattgtgtgtgtgtgtgtgtttgaagcagggtctcactctgtcatccagactggagtgcagtggcaaaatcatggctcactgtagcctcaacctcctgggcttaagcaatcctcctgtgtcagcctccccagtagctgggactataggcacaaatcatcatgaccagctaatttttctattttttgtagagacgaggtctccttatgttgccacactggtctctaactcctaggctcaagtgatccagctgcctcagcttctcaaagtgctggaattactgatgtaattctgcactcagcagtgtaaaactgcactcagctcattgtagtttttgattgatttcatcaactcttggagttgtctgccactatatttcatatgactgcgattataatgctgggtacaataaccaaccacagtaatatgcatttatacattttgctttttgacctacttataaatatggtttgtctgctcttaactgttacatccatgtgactgttattatatccgtgtttgttaaatacaaatgtatcattgcctattttattatgtaaattggcctatgaagtattgtctttttttttttttttctttttgagacagggtctcagtctktcgcccaggctggtgtgcagtggtgtgacgatgtgatcatagctcactgcagtttctatttcctgggctcaagtgatcctctcgcctcagccacctgagtggctgggactacagggatgcaccacactatggtttagtagacacaggtcttattgttgcccagg

SEQ ID NO: 34424 - DNA, 558 bp, Homo sapiens
ttttttaagaaataagtttttaccatctcaatttgcactgaaccagcgtcttctgagaccatccctctgggtgcaaatctcagagtaagctcagttactcctaacgactggaaaaggaaagaacacaggaacacttgaactcctctgacaagcagacactttggctaaggcggcattcacatcttctacatcatccttcctggggaaagaagctctcagaaaagtccacacatagaagagccactttatggtcttccctcaattttctcagatcagcctgatttagtctatgattgtgcagacaaggagayggagccaagggacaaaaggaagataattgtcacacaaagaaaatgctcaagaccttgccaagggagagactgctctaaataataacaaggctattagcaaacacaggttgagacagggaacagaaaaagaaaagatgtcacatgtgaatatgaaaacaaaagctgacaagtaattccattcggtttgccaaggcacctgccaaaaatgtccccaaggaaaagggccatgtgctccatgacgctcttc

SEQ ID NO: 34425 - DNA, 558 bp, Homo sapiens
ttttttaagaaataagtttttaccatctcaatttgcactgaaccagcgtcttctgagaccatccctctgggtgcaaatctcagagtaagctcagttactcctaacgactggaaaaggaaagaacacaggaacacttgaactcctctgacaagcagacactttggctaaggcggcattcacatcttctacatcatccttcctggggaaagaagctctcagaaaagtccacacatagaagagccactttatggtcttccctcaattttctcagatcagcctgatttagtctatgattgtgcagacaaggagacggagccaagggacaaaaggaagataattgtcacacaaagaaaatgctcaagaccttgccaagggagagactgctctaaataataacaaggctattagcaaacacaggttgagacagggaacagaaaaagaaaagatgtcacatgtgaatatgaaaacaaaagctgacaagtaattccattcrgtttgccaaggcacctgccaaaaatgtccccaaggaaaagggccatgtgctccatgacgctcttc

SEQ ID NO: 34426 - DNA, 771 bp, Homo sapiens
ctactcgccgggcctcaggggctgagccttcgtcccaggacaagggagtggccagagcttggctggccccgttccagatgaggactgtgataccagtcaggtcaacgagcaccgatagaggtagggcccaatataggaccgtgtctcacaatggtgcagacccgcagtccaacacacaggaaggatgcttgttgctaagtcttagacacgggaactggaggagggttgagggcccccagcagtgggaaggcaggcatggcatgcagacggtggacgcggactcaagacaccaactctcatcactacaggtccgtggtttggaaagtcccagcaccattccagagaaggaaacaggcccaggtttctgatggggatgggtagtagccacagagcacaagtcagccgcacccaccacacacttgctgtagtgccacactctcggccctagagggcactgacgctttcccttcgctctgccccagggccagggccaaagccatcaagtcctgggcagagggcgggagcgttcagtgagagcagcacagaggttaaagagctgctcttttttgagatcttcgctctcacttcctttccaggcagccagttcagcaaggtgggtctggggctgcctcctgggagaagaggcctttcaccctcgaaccctgcaggacctyagtttgtcccagggcaaacctcctacattgggcagttaggtcagacctgcttcaggccttggaagactgtcttctccttggcttctcttactgcact

SEQ ID NO: 34427 - DNA, 1142 bp, Homo sapiens
accctcatgatccaaccacttccccccaggtccctacctccaacactgaagattacatttcaacatgagatttgggcagggacacacatcccaagtatatcagagggggtccttcagagtgtccttgctgtattttggggctctcgggccttttcagcccacatttatcagtcatttccaaatagaaactagttcaagagcattcctaggaagctgagttaatgggctacaccatggccccattagccaacgtgtcctcgccattcacataccttctggtacagtttgctttatgctttttccctcttttgtcctctttatttgtggccccaattcccaagccaaactgtgtgggggaattgtgaatgatctaagttgtccattatagaccttaggagaaagttggaaggaaggagaagagcaaagccaagccacacctgctgtcaccagacaggagagtgaaaatgaccatggagccttgtacttggtaattcagagggagtacagtttagttccttcaaactaatatgtttaartaatgacagacctagatgtgttagagggaaatttatagatcatctcaactctttttctcatttacagatgagaaaacagtgaggtcaaggccagggaagtgaggtcaaggccagggaagtgaattgcccaagtacccaaggggtggtcaatactgctcatgatttcaaaccttggtaggcagctggccatccttacagcagcagacattgccagagcgcccaggcagcaggatgaggagcccctggctgtctaacactcggctgacaagtggccttcactcaccagggccgggggctggtggctcatgtccccttactcagctgacaggtggccttcactcaccagggctgggggctggtggctcacatccccacaggttcagctgcagagtcttctcctctccccatcactgaccatagcatcctggatcatctactccaaacattacagcttaataaaaattcagcttgccacagacagggcagattttacaaagatagagattgatttttctatcaatgttgatatccatgggttggacaagtgagaggacagcataaggttggcagagaaccagatggccacatcctgatgatgctctgcct

SEQ ID NO: 34428 - DNA, 928 bp, Homo sapiens
cagtaagctggaaatgagactgtcacttggctatttgagctcctcacgttcttgaaccaatagacagacaggaggttgctttactggctcrggtgaatgaggttagtttccaagggggaatcagattactgctacataattgtagcagggaagatcaagtctaaaatgtaagtgattctctatatcacagggaggctaactccccccgtgtctgtctcctctggtgtctccagcagtagctgtgttactctgtggctccagttctcagtaacaggcctgctgtggtcccaccttctgccaaagaccttgaactcgggtctctggtcataccccctcctctctttgtccttctggccaggggtggtggtgacttgctgctattgctaatctccggatggtatctctgtgtcatagtttagcttttcagctctttcattacttatgcacaaaattccttgtattaaattatctttgttttaaatacccaatgtggtttctttatttctggcttggtttgaccttcactgatatagactcccttctcttattaatctatctgtaatctctctagaaaatagcaccccctgtagtaagtatggctaccatctaaacaaggaagatttccaaatctgtgtcttcagtcctgatgtctcttctgagagttggtgccttttccacagacgtaacttagatgttgtgacagtaaatatcagctacattgagctgaggaaataaatgatcccaaattccagcagcttatggtaaaaaataggtttatgccttgcttacactacatactcatctcaaatcagttgagactctacgttgtttttcgtctgagaccgagattgtatggaaaacatctggctcttaagccttgtgcctggaaggtccacatggtcactcctgcattcatcaggcagagagg

SEQ ID NO: 34429 - DNA, 942 bp, Homo sapiens
gaagctctaaaaaaatcattaaaacttaaaagtttcaatagaaaagtcaaactataaatccaacacaaaagaattatcatatttcatcaattctaacttgtacatattcttcaatattttaacatccctgaaatcaggaagcatctcataaccaatgatgactataatcactatcacctaggcagctcttatggtgaaattgtcactgtctcacatctcacatgtgtgaacttgcttatatctatgccattatttatgtgatccgttagtcccacacatacttgatataattgcgtctaaaatatcttcaaaatattacacttattgttattttgttcttagagtcactgaaaaaacagcagggagtaaatttgatattaataaagcaaataacattgtaggaagaaaagccacaattcaatattttcttgcaaagcaaaacaaaatcctttcagaattctaagtgaggaaaatgcccatatataagaatcttcatttcattctgattgcaggaaaaaacaagataaaatgcaaatcccaggaagaggcatatttgctgcaaagttaataaaatttaagctttaagacatctcatttgtgcagacttctaagaccctgtccttactacaaaggatcactccatattatgaaactgtaagccctacaaaaccagaatccatccctgtcctcagaatgggtgaaaacaatttttcttagttggctggtgtgacagatttgtgtygagcagggctgttataaatgtggcaaaaatcaatatctcagaaatatacacttaatctctcatatcatgtagttcaattggaggaaaagtacaattatacattttattaatttctttttttttgtgatggagtttcactcttattgcctaggctagagtgcaatggtgcgatctcggctaactgcaacatccgcctgccg

SEQ ID NO: 34430 - DNA, 512 bp, Homo sapiens
tatgcatgcatgtggaaagcagtatttttaacagagcattcaaatgtaaatagcctttcatcaggaaaagaaagaatggaaagaactcctgggcctggtgtataaaaatatatagctttttagggaatttgggtaaactcagtgagcgtgggtgagtcaaatggactggggtggttatgagagaggaaggatggggagacactgtggaaaactttgaatgctggctagamagtttggaacgcagataatgaaaaaaaaattcaagattttgggataagggaggggcataatttaacccttttgctaaataaatggttagtgcatcagttaaaaaacagatagcacattgaaatcaggtaacctgaaaaaagtttaataaagagattctgcaaaagatgtgggcagattggatgaaaatcaaaagaaataaagcctctaagacttgaaactggggctgggggtggggcttcaccattcacacctctaaatgagaaaatctggagagaaagctg

SEQ ID NO: 34431 - DNA, 1058 bp, Homo sapiens
  misc_feature (1)...(1058): n = A,T,C or G
tgcatcacaacttatcccttcacctactgaaggacatctggttgtttccaagttttggtgatgatgactaaagctgctataaacatttctgtgcaggtttttatgtggacttaagtttttaactcctttgagggtgcaccttttatagtgggcaaaagtgagaaggtctatcagttctttctcccgaaggtaaccactactgccctttttgtttgtggtcacagcctttttctgtggtgtgagtgtatgtaaactttttttttagtgggatcactaagccaggcacagtgacatgcacccatagtctcagctactcgggagggtcgcttgatcccgggagtttgaggccagcctgagcaatgcagtgagaccccaaactctacaaaagaaaaaacacctgggatcactgtacatatggcacctgtcagggccttcctgtagccagttttcgttgctgatcgcagtcttctcctggccaggacttgttgcaggagcacagtgccggttgtgtagacccaccagggctggcagtgccctcggccacaggcactaacattcctccactgcccctcctgaaaataagattacgttcaacaccctggcacagacatttctgtgcacttgttagattgtttctttagtgtgattcttgctctggagctgctgggtaaaataatgtgtacttgtcttagtttgctcttttccaagttgaagtctggcagatttcaccagagcacagtgtctgcccccacctccacctgtccttygctcaccctgttctgagcagcccaaagatagtttgttgcagttttcattttgatttctgattctttacagcatctttctaccactcagtagtttatacaaattatataatctttctaatgctcagtttctcatatttaaaatagacatactactacctcaagttgtgagaattaaatgaatcgtttagaaagctctttgccacacacctgtaagcacttcatacatgttgatgctgctctttttatgcttagccattggnatttttctttttctaattgcttttcaagtca

SEQ ID NO: 34432 - DNA, 886 bp, Homo sapiens
agcagaagaaaccacgtgtgtgaaagtctgaggggatgagaatgtatgaaagacagtggaatgatcgactgaactgggcctggaggatgggaggggcacaggccaggtctgtgagatcagaggttagaatttcacgctttctttgtcccaagatctttagaagccatccagagacacagggaatggtgagctcgtgggagaggagggattggtttggatttgtgttcctgcscaaatctcatattgaattgtaatcaccactgctgggggagggcccgggtgggaagcgaccggatcatgggggcagatttcccccttgctgtgctcatggtagtgagtgagttctcatgagatctggttgtttaaaagtatgtagcacctcccccttctctctcttccctgctcccgtcatgtgaagacgtgcctgcttttttccccttaccttctgccatgattaaaagtttcctgaggcctccacagccaagctacttgtacagcctgcagaactgtgagccaattaaactttccttctttataaattacccagtgtcaggtatttctttatagcagtgaaagaatggacccatacaagacgtataggtggatgctgagtcccggagcattggcatttgtggagtggacgagagcagggggaggccacgccctgggctgtgcagagatggtctcctgaggcgaaactggtgagcccttgcgtgcgcagcacagacgtgtcggagatcccgggtgcagtggacaccagacaggatcaagctgaagagtggagggtatgacggaccaggaagggcatgcagaagtcagggaaagcaccgcgcatgggagagtcacacacagcctgcccctgagaggcatccggaaaacacgagca

SEQ ID NO: 34433 - DNA, 886 bp, Homo sapiens
agcagaagaaaccacgtgtgtgaaagtctgaggggatgagaatgtatgaaagacagtggaatgatcgactgaactgggcctggaggatgggaggggcacaggccaggtctgtgagatcagaggttagaatttcacgctttctttgtcccaagatctttagaagccatccagagacacagggaatggtgagctcgtgggagaggagggattggtttggatttgtgttcctgcccaaatctcatattgaattgtaatcaccactgctgggggagggcccgggtgggaagcgaccggatcatgggggcagatttcccccttgctgtgctcatggtagtgagtgagttctcatgagatctggttgtttaaaagtatgtagcacctcccccttctctctcttccctgctcccgtcatgtgaagacgtgcctgcttttttccccttaccttctgccatgattaaaagtttcctgaggcctccacagccaagctacttgtacagcctgcagaactgtgagccarttaaactttccttctttataaattacccagtgtcaggtatttctttatagcagtgaaagaatggacccatacaagacgtataggtggatgctgagtcccggagcattggcatttgtggagtggacgagagcagggggaggccacgccctgggctgtgcagagatggtctcctgaggcgaaactggtgagcccttgcgtgcgcagcacagacgtgtcggagatcccgggtgcagtggacaccagacaggatcaagctgaagagtggagggtatgacggaccaggaagggcatgcagaagtcagggaaagcaccgcgcatgggagagtcacacacagcctgcccctgagaggcatccggaaaacacgagca

SEQ ID NO: 34434 - DNA, 886 bp, Homo sapiens
agcagaagaaaccacgtgtgtgaaagtctgaggggatgagaatgtatgaaagacagtggaatgatcgactgaactgggcctggaggatgggaggggcacaggccaggtctgtgagatcagaggttagaatttcacgctttctttgtcccaagatctttagaagccatccagagacacagggaatggtgagctcgtgggagaggagggattggtttggatttgtgttcctgcccaaatctcatattgaattgtaatcaccactgctgggggagggcccgggtgggaagcgaccggatcatgggggcagatttcccccttgctgtgctcatggtagtgagtgagttctcatgagatctggttgtttaaaagtatgtagcacctcccccttctctctcttccctgctcccgtcatgtgaagacgtgcctgcttttttccccttaccttctgccatgattaaaagtttcctgaggcctccacagccaagctacttgtacagcctgcagaactgtgagccaattaaactttccttctttataaattacccagtgtcaggtatttctttatagcagtgaaagaatggacccatacaagacgtataggtggatgctgagtcccggagcattggcatttgtggagtggacgagagcagggggaggccacgccctgggctgtgcagagatggtctcctgaggcgaaactggtgagcccttgcgtgcgcagcacagaygtgtcggagatcccgggtgcagtggacaccagacaggatcaagctgaagagtggagggtatgacggaccaggaagggcatgcagaagtcagggaaagcaccgcgcatgggagagtcacacacagcctgcccctgagaggcatccggaaaacacgagca

SEQ ID NO: 34435 - DNA, 805 bp, Homo sapiens
ccatgatgcgtaattttggctgaagggctcacggatgatcttgctgagcttttcttagactgcagggaggccgggatgggtgcttccctccctccttcacttgggctctgatttgcagaaggtccggccctctccagctctcacggctccctcctcatttagttccacggccatttcccccaagaaaaccctccgcatctagtcctgagtgggcgctgcttctcgkaggacccaccctaacacatggcctgcatctaccttcccttccctctcctctccagggtgcagcctttttcaaggcgaggagagtgattccaggcagctttcattcctgggtctccttagctccctcgcccttcccagcatctgggcccactgggccactcaggcttttctaataaaaatcgcagctttggcccagtgcggtggctcacgcctgtaagcccagcactttgggaggccgaggcgggtggatcacctgaggtcgggagttcgagaccagcctgactaacatgatgaaacccccatctctactaaaaatacaaaattagccgggcgtggtggcgcgtgcctgtagtcccagctactcgggaggctgaggcaggagaatcgcttcaacccaggaggcggaggttgcggtgagccgagatcacgccattgcactccagcctgggcaacaagagcgaaactcagtctgaaaaaataataataaaaatcgcagcttctccacctggaaagtcccaattcgactgggtcttggagtgccgactcgattgccatctccgctgcgaagccatctcctctc

SEQ ID NO: 34436 - DNA, 632 bp, Homo sapiens
agttttctgaaaaaaaggggagaggctgtttcccagggagtgcacaattctgaaggctaaccaggggcgcctggttttgggcaactacaaatgtggttgtgttcaaactaagcgtgtaaaggttgtgttcaaactaagctgggcgcctgtagtcccagctacttgggaggctgaagcaggagaatggtgtgaacccgggaggtttcggacacgggttggagtgtcaagagagaaggcaggagcgtttagtctgcttcagatatgaagactccctgtattcccagtcctaagcaagggagcaaaggcaggggacagagccctgctgctcaggtgaggggccccacgtggaacgcgccggcgcgggaggggcggcctggcgcaggtcatttgggacatctgcgggttggcgcatgcgcgcgaggtgcgcaggctcgcgcctytttcccttttctaagctttctgtgttacccccggttccgctgtcttttctgtctacagtttgcgatccccgcgtccaggatggagcagctgaacgaactggagctgctgatggagaagagtttttgggaggaggcggagctgccggcggagctgtgagcggagaggggggagggtgtgggaacaaagcggga

SEQ ID NO: 34437 - DNA, 508 bp, Homo sapiens
gccrggcacgggggctcgtgcctataatcccagcacttcgggaggccaaggcaggtgggtcacatgaggtcaggagctcgagaccagcctgaccaacatggcaaaacctcatctctacaaaaaatacaaaaaattagccgggcatggtggtaagtgcctgtaatcccagctactaaagaggctgaggcacaagaatcgctagaaccggggaggcagaggttgcagtgagccgagattgcaccactgcactccagcctgggcaacagagcgaaaactctgtctcaaaaaaacagaaagtaaactaatccagtctatccctggatctaagggaaaaaaataaagacaaaagaaaacaaagtgtctctgaagcaaccccactggtaacaatggaagagtaacctgggacttgaatccccatgcagcagtaacaaggcatttcttttttctttttttttttttttttttgagacagagtcttgctgaaataaaaataaattagccaagcata

SEQ ID NO: 34438 - DNA, 605 bp, Homo sapiens
gagccaagattgcgccattgcactccagcctgggtggctgtataaaagcctgtataaaaatttcttttatacagagtgagactgtataaaagaaaaaaaaaggctgtacaaaaatttcttttatacagagactgtataaaagaaaaaaaaaagaaatacatgtgttcttaaaaccatttgtatattttcatttctagaccacactgtagctaattattgttattaaatgttaagataatttaagtatataaaataagtattgagccgggcatggtggctcacccctgtaatctcagcactttgggaggctgaggcggggggatcacgaggtcaggaaatcgagaccattgtggctaacacggtgaaaaccyatctctactaaaaatacaaaaaattagctgggcgtggtggcacgcacctgtagtcccagttactcaggaggctgagacaggagaatcacttgaacctgggaggcggagcttgcagtgagccgagatcgtgccactgcattctaacctgggcgacagagcaagactccatctcaaaaaaaaaaaaaaaaaaaaaaaagatacctcagttaggttatcagtaaaaggggattgcaa

SEQ ID NO: 34439 - DNA, 1286 bp, Homo sapiens
gaggtatgcaggaactgttaaacacaaattaacccaggatgcagagttaatcattcagtttgctatgcaacagccattgtcctttcaagttctggcagctactacccctgttgcttctaatattttcctaggactcttctcagaaagttctgagcattgctgtgggaaccaatttaccatggttagtcttatttactagtttaatttaataaattctctcctgaaggtgcatctgtactttcccttgagagcagaccttcagggctygagtgatcctcccacttcagcctcctgagtagctaggactacaggcacatgccattacacctggctaatttttaaatttttttgtagggtcttactatgttgctcaagctggtcttgaactcctggcctcaaatggtcctccagccttggcctcccaaagttctgggacaggtgtgagccaccacacccagccatgatgtttctctgatttgattcgattatgtgatttttggaggaagaccactgagttaaaaagtgccattttcatcaggtatcgggtatatactatcgacatgatttattaatgttgatgttaacctcgatcacctggctaggtagtgtttaccaggtttcttcatttaaagtctgtctttttttcccctttccatattattcagaagaaagtcaccatacacagccacacctaagaagtggggggttatgctccacctctttgagggtagagtgtctacaaaaatttattagaactcttctatataggaagtgtgtctattcttctcattcatttatttactcagtcatttatttatatcagtatgatttgtgaatatttacgttatactttgagttgtaatacagtactacattattattattagttttgataaaattatttgatctttggccattgggaactccttcagatggcttctatgtctcttttgacaccctatcattgtgggattttttttagaacactttcttaatttttggcagtattagatattctaggttcatcttgcatatttcctgccccagtcctagaatcagccatttcaacaaggagccctgggtctctttattggggaatataattaaaaactaagatccaggcagtaggtgtgtttgtttctactgggcattgttgcttctaggtcttgtcagctgtcaaagcaaggaaatatatgtgtgtacacaaacttgtataaataaatacatgtatctatacatatttctatatgtaaacatctgtatctatagtaagctaaatatgagtt

SEQ ID NO: 34440 - DNA, 587 bp, Homo sapiens
tcactaagcaaaataaaactgaggagcccaactatgtgaaagaaagtatagatgacatctttgataacatgtgcgaaaaacacagtttgagaaatctctctttgactctcattgaagcgtctaaaaaagctggcattagttacattgtttatcccaagaaaaagaagatgagatggaagaaaagattgaaacaacaaaaacttatattcgtgcatgaagagttatccaagcctccaaaatctcttgaaaggtcttgtttaagtgattttcttatagtttaagaaatatattgtggttttgaccttaattttataatctcaccccatgaagttattattttattctgcactgaacatatgaacctttcactctttgaaagacaaacctctggctgggcgccgtggctcatgcctgtaatcccagcactttgggaggcagaggcgggcggatcaactgaagtcaggagttcaagaccagcctggccaacatggtgaaacccctctctaccaaaaatacaaaaattagttgggcatggtggtgtgtgcctgtagtcccagctactcaggaggctgagaasaggttgaacc

SEQ ID NO: 34441 - DNA, 1060 bp, Homo sapiens
aagtaaaagaaaaaaatgttacattaataaatacttagtatttacaaagtggttacaattttgatttgcataacaagtcttccccagttcccaacctgttagccactccttcctcaagctagcctcctcaggaccatgtgcatccttctgtacagcagtttatttgttcatctcctctgtgaggccctgacccttgtaggagcattctatatccccagggcacagtacaattaaggaataaagtaggtacttataaatatgtgtagggaaaaaaaaagagaaggaaggagagaagggaggaagagggagaaggagagaagaaagaaaagagaagtagagagagaaagagaaataggagtgaaagagtactaatctgcatatcttgcagatgaggaaaccacccttcaaatcaggtaagtggcttccctaaggagcttccactccaccccactacacctggaatctttgactccaagctacaccttagttccttctagtctccacatttgaggtaccctgcctctttctaacttcctcttatgagatcattcttcaaaaaacaacagttaatcccaccttttcatgaagcttttctcacctatttcaactccccatgatttttccctctactgcagaccaatgtcaccaatttttatagaatcattttattttatttagaaacagggtcttgctctgtcacccaggctggagtgcaatgatcgtaactctgcagcctcaaacttctgggctcaagcaatcccccagcttcagcctgctgagtagctaggactacggatgagcacccccacgcccagctaattcttttggtttttggttttgttttgttttgtttttgttttgtagagatggaggtctcactatgttgcccaggctagtcttgaactcttggcctcaagtgatcctcctaccttggcctcccaaacatacaaacatgttaacacttaaataaaaacaaatagtagtcttcatgtgtacattttatgtatttacctatccttttctcagaaagattttaaggtgacttttkacatatgtgtgt

SEQ ID NO: 34442 - DNA, 2079 bp, Homo sapiens
gggagagacgatgagagggtttacctcctaaggggcaggactaataaagagaaagagaggtttgaagatacagggaagaagggtttgaccagtgggcaaggaacccaggaagcrggagagaggtggactaactgcaaacaggacagggacacctgtcccctaaggcagaaggaaatagtaggtaaaaatggtggttagcaagtctgggccagccaggaagctgagatgttctcactcgatgatcaaaagctgctcagtgaagtagggggcatggtcttcctccaggagaagtggggaggtgagataatggggaggggtttgaggcaaagtttggactggctgctgagagaacaggaaaaagattgaccaggaggatggcctggtggcccagaggcccttctgacagtcgacttcggtacaagtggcccaggagtggcacccatgggagattatggtacaggagagaatggggtccctggggggccagggctgcagggagaagctgttcagaggaggttatacagataggaaagaattgggatcagtaatcaagaggattaaatgaccacccaaagcacacattatatggtcggttccaaaggaaagcttgacaggtcctgggggtgtcaataagtcctggtgagacatcagacaccttggatggcaagttcctgccaatgctgtacaaaagggagagacccagcataaagacacagtgtggaaatgcattctaggctacagaagactcctaattggagaatctctctcccttttctcctgcgacttaatcattaaagtaactttattgtccagacatgactcacttgacacagttactgccatcctgtagctcagaaaatcactgcagagattagagagattccagaaaaccctggaagcaattagagaatatggcactgtgtcctgtcatctgtagcatctgttgaacagtgagggagtccaggtggggactcagtgcaagcctaccttgtttcaatatgctaacttgggcacacagcttagactccttgagtgtcagcttcctcttatgtaaagtaagggggttggtctaggttctagctaatttctaagccattccctgattctattattaactataatttcgtccttaactcttttcttataaattacatgcctgattccagaatcaaagcatctctggcaacctaaatctaccatttagaaaagggaccccactgtggctgtcacgatttgctgttcatgttgtcaattgtcatctaaaaaagtagtcttcctaactgggacttctggaatataaattgtgggaaatgattaaaaaatccttctcaagatttttctttggagtaaaaatcatatctcctttccttgaaatatctacacttcagtcggggcaggggacagcgccgagataggaaatgggtagtattggagtggagagggaggatatggtctaaataaataaaaggttgaaaaatacctccagtgtgaaagatcaaaaaaattataatttaccttagacaaagggataaattacttagatattcaccaaaataatcccactacccccctttcaacaaattgggtagggaactgagggggagcactgaggttacagctgccagtctacagtcagatagactactctgcccctgcccatcagcagcaaccacactctacaagccagtcaaattttccaagggtcctggttgtggtaaaatgtaatatgaggttacaatggaaacttctctgtatcaatagctagaaaaatcccagaaagtactataatgaactgttccaaatccatttcatttttgacatcaatttattttcccccaaaacctgccttctttctcctttcttccttcgttttcctgctcagcttttacaaaaagcaatccagattcattgtctctacatcctctccccagtgtaaagcagcttaccacgccacgcttgcttctcctgttctctctcctaccactcagatgagatatgatactgagtgagacacacagccccctgacttcatccttcttacagtctactgggggaaaccagctaattcctttacaatgc

SEQ ID NO: 34443 - DNA, 566 bp, Homo sapiens
ttggtcccaaaggcaagtagtggcagggcagagagaataaagtaacctactagaagctgagggaacactggggcataggatgaggcaaactatgcccacccccacaacaaatacccactagttatttgaatgataagatctggagttaccagcttgggctgaagcaaagtactcatccctaaaatagacctggtggcaacccacagaacattctgtaaactctaaagcactatataaatgtacttgttatctttactactgttaccaaagaggcaacatccagacccaaccatttggaaattrtgttttactcatttttgtttttaagctattaatggtctcggtggtttcttcattgaactttggagcatttattagtcatgtcaaatattctctacagaaattctagagcaatcaatcaatcaatgaagggggaaaacacttttaaaaatgtgtctttccctctaaaagacattgaatttccattactaaacagaacacttaccacacagcctgaaatatttatatgtggatgactttaccaatattcaaggctattccaagca

SEQ ID NO: 34444 - DNA, 868 bp, Homo sapiens
atcagtctctcccactaaactgaacttccttagatcagggaatattttcatatttataatctttggcacctaatgatgtctacatagcatgtagaaaatactaaataggctgcgcgcggtggctcatgcctgtaatcccagcactttgggaggctgaggtaggtgaatcacttgagcctaagagtttgagaccagcttggacaacacggcgaaaccctgtctctacaaaaaataaaaaaattagctgggcgtggtggcgtgcacctgtccagctacttgagaggatcactcgagcctgggaagttaaggatgcagtgagccgtgattgtgccactgtactccagcctgggtgacagagcaagaccctgtctcaaagaaaaaaaaaaagctaaataaatgtttaataaatctgtttcccaagtcactagaataygtaaagcatcaaataaaaagaaacataggggctaccacaagtaaatatgctgacagtatcaaaagaaagctgatagaccaaaagcaagggaaggacaagccaaaaaaattaagaagagcaaaaactccacaagcgtaaaaatcaagaagaaaattctgttaatttaacaacctgaaggcatcacttatgtaaaagcaaaacccaatatccatatgcataatggtgattctcaagaaccaagaaaacaactaaattatattctatttaaggcaagtgtcaaaataaagtaaaatctagtatgtatacaacctccctaacccagaaaaccaagaatgattaattccaagtaaatatagtcatgatttattttaccatattttaactgctgatgttggctatgctgtaagaaaatttttcttaacagcaaaactgcaa

SEQ ID NO: 34445 - DNA, 1497 bp, Homo sapiens
acagaatggaatttcaagaacactgataaattgctgtagcaccattaaaaaaaaagaaagaaaataaaaggtgaggcacctggcaaccaggaagtcaatggtgagagtgggattgatgggagggaggctccagaagccaaaggcttataggccaggtagaggagaagctgggcagtagatgaaagccctgcaggaggtttggtggtgggcggaggaagagcaggagggtagctccagaggcacctcagggcaggctgggggctcttggttcttttgaagatgaaggtctgggcgagaggatggccgaagaagggtaaaagtgcagacgcggcaggcagctctcgctgtctgatgtgtgcttggccatggaggttgacctgtttcctaataaacctctgcctggttgttgcttccacacttttgtcatggtgtagtctgattagccttgtcctgcagggtgaagcacagctgtcacagaaaacctgggccttggctggctctccatgcatcccayctaacacctgtgaatggtttttcgttgagaaatcttgaggcccagtggctgtgccacgccctctctgaagctgggcattacccttctccagttcacatcaccgtctgttcctcactgcccactgccacaattccagtctctaattcttgtccctttttttttttttctctctctctctcgcccaggctggagtgcagtagcgtgatcttggctcactgcaacctctgcctcccagattcaagcaattcttctgcttcagcctcccgagtagctggtactacaggcacgtgccaccatgcccagctaatttttgtatttttagtagagacacggtttcaccatgttggtcaggctggtttcgaactcctgacctcgtgatccgcctgtctcagcctcccaaagtgctgagattacaggcgtgagccaccatgaccagctgccttcagttttcttgaaggaggactgctttgctgttttggtgctaggctttgggacgagattctggggcgtagatcttgggatcctccttctatagcctgtttttcaatggggatgtttgtcttttccttaatgatctataaaaggtgttcatatattagtacaaacaatttcacccacactttattacgcttttggggagaaagggcaagaaagtgttgtcagccccatttattgactaatccattctttccccacttatttgagatgccagctttatcatatactaaagtattttatatgtatggatatgtttggggatttttgaatttagttctgtttcaggaatcttttggttccagttctagccactgttttaataatttcagcactataatgtagttcaatatctgataaagcaaacttctccccactattctttttcaaacactttaaaattatgatctatccttccagatgtacttttaaattcactttgctgaccaggtgcgtacaaaaattagccaggcgtggtagcatgcacc

SEQ ID NO: 34446 - DNA, 1497 bp, Homo sapiens
acagaatggaatttcaagaacactgataaattgctgtagcaccattaaaaaaaaagaaagaaaataaaaggtgaggcacctggcaaccaggaagtcaatggtgagagtgggattgatgggagggaggctccagaagccaaaggcttataggccaggtagaggagaagctgggcagtagatgaaagccctgcaggaggtttggtggtgggcggaggaagagcaggagggtagctccagaggcacctcagggcaggctgggggctcttggttcttttgaagatgaaggtctgggcgagaggatggccgaagaagggtaaaagtgcagacgcggcaggcagctctcgctgtctgatgtgtgcttggccatggaggttgacctgtttcctaataaacctctgcctggttgttgcttccacacttttgtcatggtgtagtctgattagccttgtcctgcagggtgaagcacagctgtcacagaaaacctgggccttggctggctctccatgcatcccacctaacacctgtgaatggtttttcgttgagaaatcttgaggcccagtggctgtgccacgccctctctgaagctgggcattacccttctccagttcacatcaccgtctgttcctcactgcccactgccacaattccagtytctaattcttgtccctttttttttttttctctctctctctcgcccaggctggagtgcagtagcgtgatcttggctcactgcaacctctgcctcccagattcaagcaattcttctgcttcagcctcccgagtagctggtactacaggcacgtgccaccatgcccagctaatttttgtatttttagtagagacacggtttcaccatgttggtcaggctggtttcgaactcctgacctcgtgatccgcctgtctcagcctcccaaagtgctgagattacaggcgtgagccaccatgaccagctgccttcagttttcttgaaggaggactgctttgctgttttggtgctaggctttgggacgagattctggggcgtagatcttgggatcctccttctatagcctgtttttcaatggggatgtttgtcttttccttaatgatctataaaaggtgttcatatattagtacaaacaatttcacccacactttattacgcttttggggagaaagggcaagaaagtgttgtcagccccatttattgactaatccattctttccccacttatttgagatgccagctttatcatatactaaagtattttatatgtatggatatgtttggggatttttgaatttagttctgtttcaggaatcttttggttccagttctagccactgttttaataatttcagcactataatgtagttcaatatctgataaagcaaacttctccccactattctttttcaaacactttaaaattatgatctatccttccagatgtacttttaaattcactttgctgaccaggtgcgtacaaaaattagccaggcgtggtagcatgcacc

SEQ ID NO: 34447 - DNA, 1497 bp, Homo sapiens
acagaatggaatttcaagaacactgataaattgctgtagcaccattaaaaaaaaagaaagaaaataaaaggtgaggcacctggcaaccaggaagtcaatggtgagagtgggattgatgggagggaggctccagaagccaaaggcttataggccaggtagaggagaagctgggcagtagatgaaagccctgcaggaggtttggtggtgggcggaggaagagcaggagggtagctccagaggcacctcagggcaggctgggggctcttggttcttttgaagatgaaggtctgggcgagaggatggccgaagaagggtaaaagtgcagacgcggcaggcagctctcgctgtctgatgtgtgcttggccatggaggttgacctgtttcctaataaacctctgcctggttgttgcttccacacttttgtcatggtgtagtctgattagccttgtcctgcagggtgaagcacagctgtcacagaaaacctgggccttggctggctctccatgcatcccacctaacacctgtgaatggtttttcgttgagaaatcttgaggcccagtggctgtgccacgccctctctgaagctgggcattacccttctccagttcacatcaccgtctgttcctcactgcccactgccacaattccagtctctaattcttgtccctttttttttttttctctctctctctcgcccaggctggagtgcagtagcgtgatcttggctcactgcaacctctgcctcccagattcaagcaattcttctgcttcagcctcccgagtagctggtactacaggcacgtgccaccatgcccagctaatttttgtatttttagtagagacacggtttcaccatgttggtcaggctggtttcgaactcctgacctcgtgatccgcctgtctcagcytcccaaagtgctgagattacaggcgtgagccaccatgaccagctgccttcagttttcttgaaggaggactgctttgctgttttggtgctaggctttgggacgagattctggggcgtagatcttgggatcctccttctatagcctgtttttcaatggggatgtttgtcttttccttaatgatctataaaaggtgttcatatattagtacaaacaatttcacccacactttattacgcttttggggagaaagggcaagaaagtgttgtcagccccatttattgactaatccattctttccccacttatttgagatgccagctttatcatatactaaagtattttatatgtatggatatgtttggggatttttgaatttagttctgtttcaggaatcttttggttccagttctagccactgttttaataatttcagcactataatgtagttcaatatctgataaagcaaacttctccccactattctttttcaaacactttaaaattatgatctatccttccagatgtacttttaaattcactttgctgaccaggtgcgtacaaaaattagccaggcgtggtagcatgcacc

SEQ ID NO: 34448 - DNA, 1497 bp, Homo sapiens
acagaatggaatttcaagaacactgataaattgctgtagcaccattaaaaaaaaagaaagaaaataaaaggtgaggcacctggcaaccaggaagtcaatggtgagagtgggattgatgggagggaggctccagaagccaaaggcttataggccaggtagaggagaagctgggcagtagatgaaagccctgcaggaggtttggtggtgggcggaggaagagcaggagggtagctccagaggcacctcagggcaggctgggggctcttggttcttttgaagatgaaggtctgggcgagaggatggccgaagaagggtaaaagtgcagacgcggcaggcagctctcgctgtctgatgtgtgcttggccatggaggttgacctgtttcctaataaacctctgcctggttgttgcttccacacttttgtcatggtgtagtctgattagccttgtcctgcagggtgaagcacagctgtcacagaaaacctgggccttggctggctctccatgcatcccacctaacacctgtgaatggtttttcgttgagaaatcttgaggcccagtggctgtgccacgccctctctgaagctgggcattacccttctccagttcacatcaccgtctgttcctcactgcccactgccacaattccagtctctaattcttgtccctttttttttttttctctctctctctcgcccaggctggagtgcagtagcgtgatcttggctcactgcaacctctgcctcccagattcaagcaattcttctgcttcagcctcccgagtagctggtactacaggcacgtgccaccatgcccagctaatttttgtatttttagtagagacacggtttcaccatgttggtcaggctggtttcgaactcctgacctcgtgatccgcctgtctcagcctcccaaagtgctgagattacaggcgtgagccaccatgaccagctgccttcagttttcttgaaggasgactgctttgctgttttggtgctaggctttgggacgagattctggggcgtagatcttgggatcctccttctatagcctgtttttcaatggggatgtttgtcttttccttaatgatctataaaaggtgttcatatattagtacaaacaatttcacccacactttattacgcttttggggagaaagggcaagaaagtgttgtcagccccatttattgactaatccattctttccccacttatttgagatgccagctttatcatatactaaagtattttatatgtatggatatgtttggggatttttgaatttagttctgtttcaggaatcttttggttccagttctagccactgttttaataatttcagcactataatgtagttcaatatctgataaagcaaacttctccccactattctttttcaaacactttaaaattatgatctatccttccagatgtacttttaaattcactttgctgaccaggtgcgtacaaaaattagccaggcgtggtagcatgcacc

SEQ ID NO: 34449 - DNA, 1371 bp, Homo sapiens
tggaattcggggaaagctggtgaggtccccacccatttgtaatttttagtctgttggactagatactgtcccatccacagaaagcaatagcctactagattgtgaagaagacaaattgccagtgagatttgctaggaccatgggtgtaaacgtttggttgggaaagggtgttggaagtaacggggtgcatggagccaggcataactctcacctccctataaggtttttctgctcttgattttcagttgcatttggccttcttcaatggttggcaggctctaaggggcaggggggttgccagtgtgactgaggtttgtctggatggctgtgggtggaggatctttattgctcatctatgacctgtcccctctctcctggccatctttcacagcttcctctctaaagcctttctgagccctcagtcaggagtgaactctcctttcttttctggatttgcagaacacttagtaggccacttatggtccttttgtgtttggccttggatgggaattaattgtggacaagacttttcttcccctttgagataataactaagtttcattttggtttgacaactccttttcacacggtaagtacgtgcttagtggataggtgctaagataatctcttggagggattcgcatctctcctcttccttcatgttctcctctgggacttacctcttttattttcctgagtagggtgcccctgccccctccgatttttttcttgttcataataatagtaataacattgaccagcactacggttttcatgtgccttaacactgtgctgagggaagagggtattatgattgtcatcatctaatagatgaggaaactgaggctcagagaggctagttaacttgcctgtgattacacagccagtaagagttgggcccaaaacacagggctgagtccaaacatgttcttttaacctctgtgctacacagcatttgactactgagctgggctgaaatgtgtgtgcttcacctgttctgcaggagccagggagcaagggtggtaggcctggttcctccatgcccactcacacccacacactaaggcagctggatctctcttaggctcattctttgaaagataygtctgaggcatcatgctgagtgctgtagggtgggtggaggggtacaaaaaagaataagcagcttatggtctaatagattggagatgtatgaagatgggtcagctttgttcaaggggttcatgtctggggtgtgtgcagacacctcaatgttgtgtcctgcctgcaccctgcccccggcctatttctctccaccccatgctctcagccactgataagggtcagtgtggccagctgggttagtatacagcaggagcgtgctcaggccaa

SEQ ID NO: 34450 - DNA, 551 bp, Homo sapiens
tttttwttttttttttttgagacagagtcttgctctgtcgcccgggctggagtgcagtggcgcgatctcggctcactgtgagcttcgcctcctgggttcatgccattttcctgcctcagcctcctgagtagctgggactacaggcgcccaccaccacgcccggctaattttttgtatttttttagtagagacagggtttcaccatgttagccaggatggtctcgatctcccgacctcgtgatccacctgcctgggcctcccagagtgctgggattacgggcgtgagccaccgcgcccagccttaagtactattttaaaatatttttgtgatgactaacaactacatttatgacttcttgtagaacaatggattcggcagcttatctcagaggtaattatgccctcttttgcaatattcaccatagctgagcaatggagattattcctagctaaatgatggaatggttgttgacactgcttccatttgatgttttgttttgtttttcttgtaactgagtctcgctctgtagtccaggctggagtacagtggt

SEQ ID NO: 34451 - DNA, 891 bp, Homo sapiens
aaacaaatcctcagttgtagaatgtctatatggggggaatattgaggactagacacagcttcctttctgaacaagaagaaacattcactttgggattctccaggttaggatttgggtgcctttagagggacttcagagcaagaactcagttcccccgagagctcctgccaccaacccacccaactgattcccatcaggcaagatcatgtcaaaaatgctttcctcatcttggctgtatatattcccccaccatcttcctagccctgcatcccaatcacacaaagccatgagagctaaaacagaccttagagatcccctcactcaaagtcctcagtatacaggtaaggaaacaaagtcccagataagcattgaggccatgtagttcacaggactgagatgagaaccatgatctcttccactccagatacagtaacttagctgggcatggtgtcatgtgcttgtaattccagctactcaggaggctgaggcatgagaatcgcttgaacccaggaggcagaagctgcagtgaatcgagatcgtgctactgcactccatcctgggtgacagggagagaatctgcctcaaaaaragaaagaaagaaagaaatacagtaactgacacttgttggttgctcaccatgtgccaggcactgtgcttagtgctttggatacattagctcattcagttccctctgagatatgcaaacccttcgttaaattcacaaacatatgcaagaatgtacaagaatagtccactaccaaaaaagaaaaaagatggcaagaagatgatgcaaaacatttcttttccgattgagaacctttcagcttgtcggctaagatgcatctgagtgatccttctctttctggtctcatcctctggccccctcactca

SEQ ID NO: 34452 - DNA, 891 bp, Homo sapiens
aaacaaatcctcagttgtagaatgtctatatggggggaatattgaggactagacacagcttcctttctgaacaagaagaaacattcactttgggattctccaggttaggatttgggtgcctttagagggacttcagagcaagaactcagttcccccgagagctcctgccaccaacccacccaactgattcccatcaggcaagatcatgtcaaaaatgctttcctcatcttggctgtatatattcccccaccatcttcctagccctgcatcccaatcacacaaagccatgagagctaaaacagaccttagagatcccctcactcaaagtcctcagtatacaggtaaggaaacaaagtcccagataagcattgaggccatgtagttcacaggactgagatgagaaccatgatctcttccactccagatacagtaacttagctgggcatggtgtcatgtgcttgtaattccagctactcaggaggctgaggcatgagaatcgcttgaacccaggaggcagaagctgcagtgaatcgagatcgtgctactgcactccatcctgggtgacagggagagaatctgcctcaaaaagagaaagaaagaaagaaatacagtaactgacacttgttggttgctcaccatgtgccaggcactgtgcttagtgctttggatacattagctcattcagttccctctgagatatgcaaacccttcgttaaattcacaaacatatgcaagaatgtacaagaatagtccactaccaaaaaagaaaaaagatggcaagaagatgatgcaaaacatttcttttcckattgagaacctttcagcttgtcggctaagatgcatctgagtgatccttctctttctggtctcatcctctggccccctcactca

SEQ ID NO: 34453 - DNA, 548 bp, Homo sapiens
tttgacagcactttctctctctttatttgcttggaatgactaattatttattctagcatttgaagatttttcacatatgaccaatatgcaaacatagggtgcaatcaacatggttagaatccattttcaaattagagcttccagaatactgataatgaataagacaatgttatttataaaactgacccaggcgttaaaatttacccgccacaggatgaagcccaggatgtacagatgatagttggtttggttttatcatggtttcyttttgaattttatgctgcttctttatctttatttttgttttgatactggaaaggtcagctataaactcaatgcaaacctacagtatctgtcttacattaggcatgtatcttggacgcctgtctttccccttccttcgtggttcctgacctttgtctcttgtttggttctacagcagctggtttcctaggcactgcttcatagaatcattaactattgataaataaacaaatcctgttgctgctcaccaagaggactgcttaacagatttacccatgtgagag

SEQ ID NO: 34454 - DNA, 793 bp, Homo sapiens
aatatggactgctgtctgacttaaatgcagcccaagctcacaaggactctctcaccacttgcagttgcagccaggcaggagaggcaccttccatcctactgccaaactagtagctcccacgggtcactctgagaccgcagaggcagagtggagtttgtctgctaggtgctgaaatgctcacattggcagctggtgggtaggtaaaggtcttccctctctttgcttgctttcatgacatcaacctcatgctcacctgtggttcatgaactgaggaaattgtgttgccatgctctaggtggtaaaggaaaggattgaggataattagtatgggaaaaggtaaaactagtctagaaaattcttcaaaagtaaaagccaacttgagccaggaaacaggacctgaatgaggactattttacaagaaggtttaaccaaaacaggaacttgattccaagacaattcttgtgaaagggatttattaggaagtgttcctagggaaagtccatagggggataaaggggaaagcatgattaggaaaggaagaaggcaaacaaaggtgcaggattaaggacagtctcttggagagaaattgtatcagttatatatttctgtrtaacaaactgcccaagcatagtggcttaagacaacaataaatatttattatgcctctgagtatacgtggattaatatttcatgagtggcttgactgggtatatctccctggaggtctctcaagttgttgcacttgagatgtcagctggggctgcagtcatttgaaggcttatctggggcagga

SEQ ID NO: 34455 - DNA, 2218 bp, Homo sapiens
atattgaagaggcccagaaggatgtagcatccgagaaactattcaatttacctgctgggaagtgtttgataatctttccaagggagatttcaggagagagaaggagaaagcataacaaaagctcaggaggagagagtttattatagggaagtagagacagtggatattgctacgatstgttccattggtctgcccttcgatcaattcattcagcaaatattctttgagcatcctctatgagccaaaaacagggaagcaaagggatgctactttcaggaaacctgtgatcttctaagagagaaagaacaagctgaaaaataatgagcagaaagctgattaagataaagtatataagggacgcacaaactgctgaagtttgagaaaggaggaggttccttctgactagcctggtgaggaaggtgacctctgagcagcactcagtgccctgtcttgtagcacaacccacaagggtttgcagcctgctggccttcaacatgcctcagcttccaagcccgggcagcagttgccagaattttatttcccaccaaattcaaatagtttctcttccaatcccaaggcagatgttaaagccaaactgaagctcagcgccaggaccacatgaacccaagtctttgtgctcttcaaagagaagaaaggactattcgaagtagagagtcctaatgtactggtgcccatgggcctcataccctaccctcaatgtcatagcagatcaagtttttggtcaccctcatggctaacttgcaattaatttcctagacacctgtgtctaccaagaatgctatgtgagctgtttttatttcctaggagaaagccataggaaaccaattttcattagttcagctggcttcttcttctacttgtttatttttgaagacaaagacaatctgctgtttgttttcttgactgtcttaaggtcactagattcctagtctggcatgcttcctcccagtttctttccaatgctgagtgctctgaggtggcctcatccctcatccctgctctcttccctcctttcctatttcccatttgttcaactgtccatcccccatgcatctacttcataaggatttgggcatccagatctgttgtaggagttgtagagagccacaggacaggtatatgacaaggtctgtctgcaaggaacttcaagtcttctaaggactgtgcataacctcattgagttttaactattccttggacccctgccattcacagctgcttgcctttttcataagtccttctgtataaaataatataatttctgtaaaaataattcagctaagaaagaagagacattttggtaaaacttaaaacttaggcaatatttaattttctaagagtgttttatagagcaaaagtcactttagttgtttggggacatgaaaatatgtagtgccttaacaatttgttttgctcataaaattctcatatttgatatattcaatataaaagtttattgagaaatatttgaaattagctaaactgtatttacttttaaatgtttttaattttgttttttttaaagaagttttgtgctgagagctctgaaaaatatagcagctctactttttgccattgtatgagctagcaaaaaacctggaggacagtagtccaaatattgctagaaggattcttgggagatgtaaaaacaacagcaacaaaaagcccaaataagcaatattttcttccaagttttcctcctgggttcttcctttttttccagtactcttctccagagtttgtggatgggtaatgactcccaaaactttttctatgtcagactttgagtgggcagactcttctctctgctgtcctagattatcttatttctggcttctcatttcttcactgaccctctgctctcaggatccctttccacacgggttactctgaagagtttgaagaaaaagtacagatgtgcatcttctattttgtgacctagcatgcaggcctctttgaggtctgaatccatggtctttcctggtcaaaattcccactaataaagaaagggttgtggcttagagggcttggtagttggctgttacaaatgtttttctatgaccaggtggcaaagtgcttgagggtagttgtattttatttatctctccagagtctaactttgtacctaatgcacagtggttacacaatatttgattaatgaatgaacaaaaattgtaaacataaaagacccttacta

SEQ ID NO: 34456 - DNA, 2218 bp, Homo sapiens
atattgaagaggcccagaaggatgtagcatccgagaaactattcaatttacctgctgggaagtgtttgataatctttccaagggagatttcaggagagagaaggagaaagcataacaaaagctcaggaggagagagtttattatagggaagtagagacagtggatattgctacgatgtgttccattggtctgyccttcgatcaattcattcagcaaatattctttgagcatcctctatgagccaaaaacagggaagcaaagggatgctactttcaggaaacctgtgatcttctaagagagaaagaacaagctgaaaaataatgagcagaaagctgattaagataaagtatataagggacgcacaaactgctgaagtttgagaaaggaggaggttccttctgactagcctggtgaggaaggtgacctctgagcagcactcagtgccctgtcttgtagcacaacccacaagggtttgcagcctgctggccttcaacatgcctcagcttccaagcccgggcagcagttgccagaattttatttcccaccaaattcaaatagtttctcttccaatcccaaggcagatgttaaagccaaactgaagctcagcgccaggaccacatgaacccaagtctttgtgctcttcaaagagaagaaaggactattcgaagtagagagtcctaatgtactggtgcccatgggcctcataccctaccctcaatgtcatagcagatcaagtttttggtcaccctcatggctaacttgcaattaatttcctagacacctgtgtctaccaagaatgctatgtgagctgtttttatttcctaggagaaagccataggaaaccaattttcattagttcagctggcttcttcttctacttgtttatttttgaagacaaagacaatctgctgtttgttttcttgactgtcttaaggtcactagattcctagtctggcatgcttcctcccagtttctttccaatgctgagtgctctgaggtggcctcatccctcatccctgctctcttccctcctttcctatttcccatttgttcaactgtccatcccccatgcatctacttcataaggatttgggcatccagatctgttgtaggagttgtagagagccacaggacaggtatatgacaaggtctgtctgcaaggaacttcaagtcttctaaggactgtgcataacctcattgagttttaactattccttggacccctgccattcacagctgcttgcctttttcataagtccttctgtataaaataatataatttctgtaaaaataattcagctaagaaagaagagacattttggtaaaacttaaaacttaggcaatatttaattttctaagagtgttttatagagcaaaagtcactttagttgtttggggacatgaaaatatgtagtgccttaacaatttgttttgctcataaaattctcatatttgatatattcaatataaaagtttattgagaaatatttgaaattagctaaactgtatttacttttaaatgtttttaattttgttttttttaaagaagttttgtgctgagagctctgaaaaatatagcagctctactttttgccattgtatgagctagcaaaaaacctggaggacagtagtccaaatattgctagaaggattcttgggagatgtaaaaacaacagcaacaaaaagcccaaataagcaatattttcttccaagttttcctcctgggttcttcctttttttccagtactcttctccagagtttgtggatgggtaatgactcccaaaactttttctatgtcagactttgagtgggcagactcttctctctgctgtcctagattatcttatttctggcttctcatttcttcactgaccctctgctctcaggatccctttccacacgggttactctgaagagtttgaagaaaaagtacagatgtgcatcttctattttgtgacctagcatgcaggcctctttgaggtctgaatccatggtctttcctggtcaaaattcccactaataaagaaagggttgtggcttagagggcttggtagttggctgttacaaatgtttttctatgaccaggtggcaaagtgcttgagggtagttgtattttatttatctctccagagtctaactttgtacctaatgcacagtggttacacaatatttgattaatgaatgaacaaaaattgtaaacataaaagacccttacta

SEQ ID NO: 34457 - DNA, 2218 bp, Homo sapiens
atattgaagaggcccagaaggatgtagcatccgagaaactattcaatttacctgctgggaagtgtttgataatctttccaagggagatttcaggagagagaaggagaaagcataacaaaagctcaggaggagagagtttattatagggaagtagagacagtggatattgctacgatgtgttccattggtctgcccttcgatcaattcattcagcaaatattctttgagcatcctctatgagccaaaaacagggaagcaaagggatgctactttcaggaaacctgtgatcttctaagagagaaagaacaagctgaaaaataatgagcagaaagctgattaagataaagtatataagggacgcacaaactgctgaagtttgagaaaggaggaggttccttctgactagcctggtgaggaaggtgacctctgagcagcactcagtgccctgtcttgtagcacaacccacaagggtttgcagcctgctggccttcaacatgcctcagcttccaagcccgggcagcagttgccagaattttatttcccaccaaattcaaatagtttctcttccaatcccaaggcagatgttaaagccaaactgaagctcagcgccaggaccacatgaacccaagtctttgtgctcttcaaagagaagaaaggactattcgaagtagagagtcctaatgtactggtgcccatgggcctcataccctaccctcaatgtcatagcagatcaagtttttggtcaccctcatggctaacttgcaattaatttcctagacacctgtgtctaccaagaatgctatgtgagctgtttttatttcctaggagaaagccataggaaaccaattttcattagttcagctggcttcttcttctacttgtttatttttgaagacaaagacaatctgctgtttgttttcttgactgtcttaaggtcactagattcctagtctggcatgcttcctcccagtttctttccaatgctgagtgctctgaggtggcctcatccctcatccctgctctcttccctcctttcctatttcccatttgttcaactgtccatcccccatgcatctacttcataaggatttgggcatccagatctgttgtaggagttgtagagagccacaggacaggtatatgacaaggtctgtctgcaaggaacttcaagtcttctaaggactgtgcataacctcattgagttttaactattccttggacccctgccattcacagctgcttgcctttttcataagtccttctgtataaaataatataatttctgtaaaaataattcagctaagaaagaagagacattttggtaaaacttaaaacttaggcaatatttaattttctaagagtgttttatagagcaaaagtcactttagttgtttggggacatgaaaatatgtagtgccttaacaatttgttttgctcataaaattctcatatttgatatattcaatataaaagtttattgagaaatatttgaaattagctaaactgtatttacttttaaatgtttttaattttgttttttttaaagaagttttgtgctgagagctctgaaaaatatagcagctctactttttgccattgtatgagctagcaaaaaacctggaggacagtagtccaaatattgctagaaggattcttgggagatgtaaaaacaacagcaacaaaaagcccaaataagcaatattttcttccaagttttcctcctgggttcttcctttttttccagtactcttctccagagtttgtggatgggtaatgactcccaaaactttttctatgtcagactttgagtgggcagactcttctctctgctgtcctagattatcttatttctggcttctcatttcttcactgaccctctgctctcaggatccctttccacacgggttactctgaagagtttgaagaaaaagtacagatgtgcatcttctattttgtgacctagcatgcaggcctctttgaggtctgaatccrtggtctttcctggtcaaaattcccactaataaagaaagggttgtggcttagagggcttggtagttggctgttacaaatgtttttctatgaccaggtggcaaagtgcttgagggtagttgtattttatttatctctccagagtctaactttgtacctaatgcacagtggttacacaatatttgattaatgaatgaacaaaaattgtaaacataaaagacccttacta

SEQ ID NO: 34458 - DNA, 2218 bp, Homo sapiens
atattgaagaggcccagaaggatgtagcatccgagaaactattcaatttacctgctgggaagtgtttgataatctttccaagggagatttcaggagagagaaggagaaagcataacaaaagctcaggaggagagagtttattatagggaagtagagacagtggatattgctacgatgtgttccattggtctgcccttcgatcaattcattcagcaaatattctttgagcatcctctatgagccaaaaacagggaagcaaagggatgctactttcaggaaacctgtgatcttctaagagagaaagaacaagctgaaaaataatgagcagaaagctgattaagataaagtatataagggacgcacaaactgctgaagtttgagaaaggaggaggttccttctgactagcctggtgaggaaggtgacctctgagcagcactcagtgccctgtcttgtagcacaacccacaagggtttgcagcctgctggccttcaacatgcctcagcttccaagcccgggcagcagttgccagaattttatttcccaccaaattcaaatagtttctcttccaatcccaaggcagatgttaaagccaaactgaagctcagcgccaggaccacatgaacccaagtctttgtgctcttcaaagagaagaaaggactattcgaagtagagagtcctaatgtactggtgcccatgggcctcataccctaccctcaatgtcatagcagatcaagtttttggtcaccctcatggctaacttgcaattaatttcctagacacctgtgtctaccaagaatgctatgtgagctgtttttatttcctaggagaaagccataggaaaccaattttcattagttcagctggcttcttcttctacttgtttatttttgaagacaaagacaatctgctgtttgttttcttgactgtcttaaggtcactagattcctagtctggcatgcttcctcccagtttctttccaatgctgagtgctctgaggtggcctcatccctcatccctgctctcttccctcctttcctatttcccatttgttcaactgtccatcccccatgcatctacttcataaggatttgggcatccagatctgttgtaggagttgtagagagccacaggacaggtatatgacaaggtctgtctgcaaggaacttcaagtcttctaaggactgtgcataacctcattgagttttaactattccttggacccctgccattcacagctgcttgcctttttcataagtccttctgtataaaataatataatttctgtaaaaataattcagctaagaaagaagagacattttggtaaaacttaaaacttaggcaatatttaattttctaagagtgttttatagagcaaaagtcactttagttgtttggggacatgaaaatatgtagtgccttaacaatttgttttgctcataaaattctcatatttgatatattcaatataaaagtttattgagaaatatttgaaattagctaaactgtatttacttttaaatgtttttaattttgttttttttaaagaagttttgtgctgagagctctgaaaaatatagcagctctactttttgccattgtatgagctagcaaaaaacctggaggacagtagtccaaatattgctagaaggattcttgggagatgtaaaaacaacagcaacaaaaagcccaaataagcaatattttcttccaagttttcctcctgggttcttcctttttttccagtactcttctccagagtttgtggatgggtaatgactcccaaaactttttctatgtcagactttgagtgggcagactcttctctctgctgtcctagattatcttatttctggcttctcatttcttcactgaccctctgctctcaggatccctttccacacgggttactctgaagagtttgaagaaaaagtacagatgtgcatcttctattttgtgacctagcatgcaggcctctttgaggtctgaatccatggtctttcctggtcaaaattcccactaataaagaaagggttgtggcttagagggcttggtagttggctgttacaaatgtttttctatgaccaggtgrcaaagtgcttgagggtagttgtattttatttatctctccagagtctaactttgtacctaatgcacagtggttacacaatatttgattaatgaatgaacaaaaattgtaaacataaaagacccttacta

SEQ ID NO: 34459 - DNA, 2170 bp, Homo sapiens
tctttctgtgaagtacatagtgtcagagactttttcctcaagattctgatgttgaaattatttttggagtcattgcagcatgggattagatttgactccaccatttatcagttatgtgaatttggttgagttaaattctgtcttcctctatttcctgggtatgaaatggaaataaccacctcatagggttagagtgagatgatgaatgttgaaagcctctcacatcatagacatgtgacaaatatcaggtcctttctcagtcttacaataggttacacagaacaggtcaggctgatggcctcaggcacatctctctaggctctacagtgaaactaatacctactaaattaacgatgaagacttttggcatcccacttaatgttgctgtaaatgactaagtctccaaatagctaaaataagttctactggacaatcaagatgacttttgctttttttccagctccttgtactayaattcaataaaaactttggcaagagtccagaagatttgtttagaccttggaagaacccatgaagatcaccatccctgcacaatagcattgagtcactatcatcccccagccctacatttattattcttcaaggtggagagaggtatgccacatgctaggctaagctatgactaggaccatttctcagaacaattctctaccaaggaaccaatgcataaaaaacaggcacgtatcccacaagcctcccattcacaaagctaagagacagacattttactacaatgctggttagatgccaaacagaaacaaaaaataaacataaggtttcttaggcaaacaagccctgtctggttaacatatgctcgacacagagacaactgtcctttccatcccttctatggagggggaaacatcagcaccatgagctctgcagaaacctcactggctcagaaaaggaaaagaatgtggctttcaagaaacacattttcatcaagctgagcaaacatggctttgacgtcagggagggagtatacacatgggtaacaaaggagatgcacacccatagggattttgtggtacctgggtgactgcccagagcactaaatcctggagttgagaatccctttgaagacccttcacaatgcctgggaatttcaaagaatatcctcataattcagaaaaccctccaaatgtcattttaccttgttcttttgcctccccattgtgctggctgtccctggtgacagactgcagcccagccatagcctgggggagggagtgggttgcagcagatgtgcacatctggatcacctgcccctaacccagcacactccaacttctccatggctttggcttccacaggacatttctcggggtggcctcctctctgaggtaactgaatcttttagaatgagggtttaactactgattaagacactctgtaatattcaggctgttcagtaaactacatttagtcctctttggggtatggaatcttgctcatttccttgtaagtaaataattggttcttggattgtagtcctcctaacaaatggacaatacatagcttgaggtattgggagaactaagggcatcttttgcgttctgctatgtaagtaatctaggcaaaaggcagttttgattctaattctactttccctctgtgggttttacacacagttcctctgaatacagaaggaaattcaatatctgcatgagtgacattcaaccctgtcctgccttattcagttcttttgtttttaatcattaaatggccagcatacaatgacattgcacatctgtttctggtctgggaagatcagtaaggatgggggtgactgagagctacattaggtgaaacaattacaaagaaatgttaaaaagtataagtgtaccatttccccacttaacctaatacatccagcatttgcgaaatgataatgtgaggctcggttgatgtggtgacttttggtgatgcattaatgtcaaacaaatggcacactttgcaataacctagctggaaagactgcctgctgggagaggtgtccatgagtgatggcaaaagccattggcatttgatggctgaatttgcccctgtgtgactttgaatgtgtgagtgcttctttatgttttgtctttaaaaacaacctggtattttaattagcatttggcatacttttctgtatgggattctaatt

SEQ ID NO: 34460 - DNA, 2170 bp, Homo sapiens
tctttctgtgaagtacatagtgtcagagactttttcctcaagattctgatgttgaaattatttttggagtcattgcagcatgggattagatttgactccaccatttatcagttatgtgaatttggttgagttaaattctgtcttcctctatttcctgggtatgaaatggaaataaccacctcatagggttagagtgagatgatgaatgttgaaagcctctcacatcatagacatgtgacaaatatcaggtcctttctcagtcttacaataggttacacagaacaggtcaggctgatggcctcaggcacatctctctaggctctacagtgaaactaatacctactaaattaacgatgaagacttttggcatcccacttaatgttgctgtaaatgactaagtctccaaatagctaaaataagttctactggacaatcaagatgacttttgctttttttccagctccttgtactataattcaataaaaactttggcaagagtccagaagatttgtttagaccttggaagaacccatgaagatcaccatccctgcacaatagcattgagtcactatcatcccccagccctacatttattattcttcaaggtggagagaggtatgccacatgctaggctaagctatgactaggaccatttctcagaacaattctctaccaaggaaccaatgcataaaaaacaggcacgtatcccacaagcctcccattcacaaagctaagagacagacattttactacaatgctggttagatgccaaacagaaacaaaaaataaacataaggtttcttaggcaaacaagccctgtctggttaacatatgctcgacacagagacaactgtcctttccrtcccttctatggagggggaaacatcagcaccatgagctctgcagaaacctcactggctcagaaaaggaaaagaatgtggctttcaagaaacacattttcatcaagctgagcaaacatggctttgacgtcagggagggagtatacacatgggtaacaaaggagatgcacacccatagggattttgtggtacctgggtgactgcccagagcactaaatcctggagttgagaatccctttgaagacccttcacaatgcctgggaatttcaaagaatatcctcataattcagaaaaccctccaaatgtcattttaccttgttcttttgcctccccattgtgctggctgtccctggtgacagactgcagcccagccatagcctgggggagggagtgggttgcagcagatgtgcacatctggatcacctgcccctaacccagcacactccaacttctccatggctttggcttccacaggacatttctcggggtggcctcctctctgaggtaactgaatcttttagaatgagggtttaactactgattaagacactctgtaatattcaggctgttcagtaaactacatttagtcctctttggggtatggaatcttgctcatttccttgtaagtaaataattggttcttggattgtagtcctcctaacaaatggacaatacatagcttgaggtattgggagaactaagggcatcttttgcgttctgctatgtaagtaatctaggcaaaaggcagttttgattctaattctactttccctctgtgggttttacacacagttcctctgaatacagaaggaaattcaatatctgcatgagtgacattcaaccctgtcctgccttattcagttcttttgtttttaatcattaaatggccagcatacaatgacattgcacatctgtttctggtctgggaagatcagtaaggatgggggtgactgagagctacattaggtgaaacaattacaaagaaatgttaaaaagtataagtgtaccatttccccacttaacctaatacatccagcatttgcgaaatgataatgtgaggctcggttgatgtggtgacttttggtgatgcattaatgtcaaacaaatggcacactttgcaataacctagctggaaagactgcctgctgggagaggtgtccatgagtgatggcaaaagccattggcatttgatggctgaatttgcccctgtgtgactttgaatgtgtgagtgcttctttatgttttgtctttaaaaacaacctggtattttaattagcatttggcatacttttctgtatgggattctaatt

SEQ ID NO: 34461 - DNA, 2170 bp, Homo sapiens
tctttctgtgaagtacatagtgtcagagactttttcctcaagattctgatgttgaaattatttttggagtcattgcagcatgggattagatttgactccaccatttatcagttatgtgaatttggttgagttaaattctgtcttcctctatttcctgggtatgaaatggaaataaccacctcatagggttagagtgagatgatgaatgttgaaagcctctcacatcatagacatgtgacaaatatcaggtcctttctcagtcttacaataggttacacagaacaggtcaggctgatggcctcaggcacatctctctaggctctacagtgaaactaatacctactaaattaacgatgaagacttttggcatcccacttaatgttgctgtaaatgactaagtctccaaatagctaaaataagttctactggacaatcaagatgacttttgctttttttccagctccttgtactataattcaataaaaactttggcaagagtccagaagatttgtttagaccttggaagaacccatgaagatcaccatccctgcacaatagcattgagtcactatcatcccccagccctacatttattattcttcaaggtggagagaggtatgccacatgctaggctaagctatgactaggaccatttctcagaacaattctctaccaaggaaccaatgcataaaaaacaggcacgtatcccacaagcctcccattcacaaagctaagagacagacattttactacaatgctggttagatgccaaacagaaacaaaaaataaacataaggtttcttaggcaaacaagccctgtctggttaacatatgctcgacacagagacaactgtcctttccatcccttctatggagggggaaacatcagcaccatgagctctgcagaaacctcactggctcagaaaaggaaaagaatgtggctttcaagaaacacattttcatcaagctgagcaaacatggctttgacgtcagggagggagtatacacatgggtaacaaaggagatgcacacccatagggattttgtggtacctgggtgactgcccagagcactaaatcctggagttgagaatccctttgaagacccttcacaatgcctgggaatttcaaagaatatcctcataattcagaaaaccctccaaatgtcattttaccttgttcttttgcctccccattgtgctggctgtccctggtgacagactgcagcccagccatagcctgggggagggagtgggttgcagcagatgtgcacatctggatcacctgcccctaacccagcacactccaacttctccatggctttggcttccacaggacatttctcggggtggcctcctctctgaggtaactgaatcttttagaatgagggtttaactactgattaagacactctgtaatattcaggctgttcagtaaactacatttagtcctctttggggtatggaatcttgctcatttccttgtaagtaaataattggttcttggattgtagtcctcctaacaaatggacaatacatagcttgaggtattgggagaactaagggcatcttttgcgttctgctatgtaagtaatctaggcaaaaggcagttttgattctaattctactttccctctgtgggttttacacacagttcctctgaatacagaaggaaattcaatatctgcatgagtgacattcaaccctgtcctgccttattcagttcttttgtttttaatcattaaatggccagcatacaatgacattgcacatctgtttctggtctgggaagatcagtaaggaygggggtgactgagagctacattaggtgaaacaattacaaagaaatgttaaaaagtataagtgtaccatttccccacttaacctaatacatccagcatttgcgaaatgataatgtgaggctcggttgatgtggtgacttttggtgatgcattaatgtcaaacaaatggcacactttgcaataacctagctggaaagactgcctgctgggagaggtgtccatgagtgatggcaaaagccattggcatttgatggctgaatttgcccctgtgtgactttgaatgtgtgagtgcttctttatgttttgtctttaaaaacaacctggtattttaattagcatttggcatacttttctgtatgggattctaatt

SEQ ID NO: 34462 - DNA, 2170 bp, Homo sapiens
tctttctgtgaagtacatagtgtcagagactttttcctcaagattctgatgttgaaattatttttggagtcattgcagcatgggattagatttgactccaccatttatcagttatgtgaatttggttgagttaaattctgtcttcctctatttcctgggtatgaaatggaaataaccacctcatagggttagagtgagatgatgaatgttgaaagcctctcacatcatagacatgtgacaaatatcaggtcctttctcagtcttacaataggttacacagaacaggtcaggctgatggcctcaggcacatctctctaggctctacagtgaaactaatacctactaaattaacgatgaagacttttggcatcccacttaatgttgctgtaaatgactaagtctccaaatagctaaaataagttctactggacaatcaagatgacttttgctttttttccagctccttgtactataattcaataaaaactttggcaagagtccagaagatttgtttagaccttggaagaacccatgaagatcaccatccctgcacaatagcattgagtcactatcatcccccagccctacatttattattcttcaaggtggagagaggtatgccacatgctaggctaagctatgactaggaccatttctcagaacaattctctaccaaggaaccaatgcataaaaaacaggcacgtatcccacaagcctcccattcacaaagctaagagacagacattttactacaatgctggttagatgccaaacagaaacaaaaaataaacataaggtttcttaggcaaacaagccctgtctggttaacatatgctcgacacagagacaactgtcctttccatcccttctatggagggggaaacatcagcaccatgagctctgcagaaacctcactggctcagaaaaggaaaagaatgtggctttcaagaaacacattttcatcaagctgagcaaacatggctttgacgtcagggagggagtatacacatgggtaacaaaggagatgcacacccatagggattttgtggtacctgggtgactgcccagagcactaaatcctggagttgagaatccctttgaagacccttcacaatgcctgggaatttcaaagaatatcctcataattcagaaaaccctccaaatgtcattttaccttgttcttttgcctccccattgtgctggctgtccctggtgacagactgcagcccagccatagcctgggggagggagtgggttgcagcagatgtgcacatctggatcacctgcccctaacccagcacactccaacttctccatggctttggcttccacaggacatttctcggggtggcctcctctctgaggtaactgaatcttttagaatgagggtttaactactgattaagacactctgtaatattcaggctgttcagtaaactacatttagtcctctttggggtatggaatcttgctcatttccttgtaagtaaataattggttcttggattgtagtcctcctaacaaatggacaatacatagcttgaggtattgggagaactaagggcatcttttgcgttctgctatgtaagtaatctaggcaaaaggcagttttgattctaattctactttccctctgtgggttttacacacagttcctctgaatacagaaggaaattcaatatctgcatgagtgacattcaaccctgtcctgccttattcagttcttttgtttttaatcattaaatggccagcatacaatgacattgcacatctgtttctggtctgggaagatcagtaaggatgggggtgactgagrgctacattaggtgaaacaattacaaagaaatgttaaaaagtataagtgtaccatttccccacttaacctaatacatccagcatttgcgaaatgataatgtgaggctcggttgatgtggtgacttttggtgatgcattaatgtcaaacaaatggcacactttgcaataacctagctggaaagactgcctgctgggagaggtgtccatgagtgatggcaaaagccattggcatttgatggctgaatttgcccctgtgtgactttgaatgtgtgagtgcttctttatgttttgtctttaaaaacaacctggtattttaattagcatttggcatacttttctgtatgggattctaatt

SEQ ID NO: 34463 - DNA, 2170 bp, Homo sapiens
tctttctgtgaagtacatagtgtcagagactttttcctcaagattctgatgttgaaattatttttggagtcattgcagcatgggattagatttgactccaccatttatcagttatgtgaatttggttgagttaaattctgtcttcctctatttcctgggtatgaaatggaaataaccacctcatagggttagagtgagatgatgaatgttgaaagcctctcacatcatagacatgtgacaaatatcaggtcctttctcagtcttacaataggttacacagaacaggtcaggctgatggcctcaggcacatctctctaggctctacagtgaaactaatacctactaaattaacgatgaagacttttggcatcccacttaatgttgctgtaaatgactaagtctccaaatagctaaaataagttctactggacaatcaagatgacttttgctttttttccagctccttgtactataattcaataaaaactttggcaagagtccagaagatttgtttagaccttggaagaacccatgaagatcaccatccctgcacaatagcattgagtcactatcatcccccagccctacatttattattcttcaaggtggagagaggtatgccacatgctaggctaagctatgactaggaccatttctcagaacaattctctaccaaggaaccaatgcataaaaaacaggcacgtatcccacaagcctcccattcacaaagctaagagacagacattttactacaatgctggttagatgccaaacagaaacaaaaaataaacataaggtttcttaggcaaacaagccctgtctggttaacatatgctcgacacagagacaactgtcctttccatcccttctatggagggggaaacatcagcaccatgagctctgcagaaacctcactggctcagaaaaggaaaagaatgtggctttcaagaaacacattttcatcaagctgagcaaacatggctttgacgtcagggagggagtatacacatgggtaacaaaggagatgcacacccatagggattttgtggtacctgggtgactgcccagagcactaaatcctggagttgagaatccctttgaagacccttcacaatgcctgggaatttcaaagaatatcctcataattcagaaaaccctccaaatgtcattttaccttgttcttttgcctccccattgtgctggctgtccctggtgacagactgcagcccagccatagcctgggggagggagtgggttgcagcagatgtgcacatctggatcacctgcccctaacccagcacactccaacttctccatggctttggcttccacaggacatttctcggggtggcctcctctctgaggtaactgaatcttttagaatgagggtttaactactgattaagacactctgtaatattcaggctgttcagtaaactacatttagtcctctttggggtatggaatcttgctcatttccttgtaagtaaataattggttcttggattgtagtcctcctaacaaatggacaatacatagcttgaggtattgggagaactaagggcatcttttgcgttctgctatgtaagtaatctaggcaaaaggcagttttgattctaattctactttccctctgtgggttttacacacagttcctctgaatacagaaggaaattcaatatctgcatgagtgacattcaaccctgtcctgccttattcagttcttttgtttttaatcattaaatggccagcatacaatgacattgcacatctgtttctggtctgggaagatcagtaaggatgggggtgactgagagctacattaggtgaaacaattacaaagaaatgttaaaaagtataagtgtaccatttccccacttaacctaatacatccagcatttgcgaaatgayaatgtgaggctcggttgatgtggtgacttttggtgatgcattaatgtcaaacaaatggcacactttgcaataacctagctggaaagactgcctgctgggagaggtgtccatgagtgatggcaaaagccattggcatttgatggctgaatttgcccctgtgtgactttgaatgtgtgagtgcttctttatgttttgtctttaaaaacaacctggtattttaattagcatttggcatacttttctgtatgggattctaatt

SEQ ID NO: 34464 - DNA, 493 bp, Homo sapiens
gatccctcactagatcaatcacttccctcatttagggaaagaagagaaaatattcatgtctgtacaaaatgggcaagtggcgaccactacttctgagactgaggtgatttttgtatgtgttttatgcccagtacaagagcatgttcttccttttccaggaaagtatgagaagtaatctcagagtgcagagaacaacttcaggagcaagagtgtaggtcagatgctgctgctctagcagttaactcttgttcaagaatgctctttttgcttcactgrgaaagttccatgaagaaacatcctggctctatacaactaaacagtaataacaattacagcagtaacgtaatcatactgaaaacgtggatccacctgtatgtcatcactgttcaactaatgtgttttttaatggagggagcttactgacgtcatatacacatgaagatttatttgaaatgatgaattttccccagaaggcacttcaactatgctgggc

SEQ ID NO: 34465 - DNA, 623 bp, Homo sapiens
cttggctttaaaaagacataggtgcagtggcatgatgttagttacatagcctttgaagccatgttgtatgaaagagcagttggatattgacgttggctacgaaaaccaatgggtaggcatttagattttggttcagtagaaaatctgaaccatctatcgattaagctctcaaaaactaaatagactgctgcctcctaaataaaatatgtctcccaccatggaaatgtcaagctagggtcacaattcaagtaatgtaaatatgaatctaatgacttccaagatgcttttccaacttaaagtgttagacaagtaccttttaaaacagtataccatttgaattacctgcaaccattttaatatttctgagagggttttttttgtgtgtgctccttctktcatcacatggagagttattttgccttttagggtaaaatataaaaacaaatgcacgtcacaatatgatgtggcaaacgttacccagaagccttagtgatgttgttgcgatggtattagcatgcacagagtatgcaactcgcagctctgctgtgtgcacttgttcttttgctttctctcatgtgttctgctccatatattttaagagagtttaatgtgggtgttccaat

SEQ ID NO: 34466 - DNA, 623 bp, Homo sapiens
cttggctttaaaaagacataggtgcagtggcatgatgttagttacatagcctttgaagccatgttgtatgaaagagcagttggatattgacgttggctacgaaaaccaatgggtaggcatttagattttggttcagtagaaaatctgaaccatctatcgattaagctctcaaaaactaaatagactgctgcctcctaaataaaatatgtctcccaccatggaaatgtcaagctagggtcacaattcaagtaatgtaaatatgaatctaatgacttccaagatgcttttccaacttaaagtgttagacaagtaccttttaaaacagtataccatttgaattacctgcaaccattttaatatttctgagagggttttttttgtgtgtgctccttctttcatcacatggagagttattttgccttttagggtaaaatrtaaaaacaaatgcacgtcacaatatgatgtggcaaacgttacccagaagccttagtgatgttgttgcgatggtattagcatgcacagagtatgcaactcgcagctctgctgtgtgcacttgttcttttgctttctctcatgtgttctgctccatatattttaagagagtttaatgtgggtgttccaat

SEQ ID NO: 34467 - DNA, 707 bp, Homo sapiens
agttttgaggggacacagacttgcagtccatagcacctttcagtttactgtttggaattaggagagaaatcaatgaatgaataaattagtaagaacttactgcctgtaacaagaacgcacagtatgggttgcagtgaacacaggtggagacataggcgcctggcatcattttaagcatctctgtaaatgaagcaagtgtgtagttgatatgggggacattagttgacctccctgctgtctgagctgcaatgatttcatcccattttctacgaatactctagatgtcgtcagaaaataatgcccagagctgccacatggctgagatgcgggccttcctgaaagtgtcacacaaaggggttctctgaggactcccagccatgcacagatctctttttccctctctgcctgtttctccactccccctcrtgcccaccctccttccacccttccctcaaatgttctgtagctgtcaggtttcttttatagaaataagtgaaattataatgacacaagagttagacgtgctggagatgaaaagaaagactttaaggaaataaaaaggaattgccatgctatttgaaagccgtaagaaggaggaaggagggtagatgaaggatgttaccctgctcggggacctctcttcttgcacatttgactttcaaaaatgcctctgatcatttcccagggagctggtgatgaattgagtt

SEQ ID NO: 34468 - DNA, 1279 bp, Homo sapiens
atggaaataattcacttttttaaaaaaggtaaaacacatgtgggagaacttgatgtcagctacttagattgtttcagagttgccctttggaaaagagtaaagcacatactaagggccagtatgaatattcaacatactgttggaagttctggccagggcaattaggcaggagaaggaaataaagggtattcaattaggaaaagaggaaatcaaattgtccctgtttgcagatgacatgattgtatatctagaaaaccccattgtctcagcccaaaatctccttaagctgataagcaacttcagcaaagtctcaggatasaaaatcaatgtacaaaaatcacaagccttcttatacaccaataacaggcaaacagagagccaaatcgtgagtgaactcccattcacaatagcttcaaagagaataaaatacctacgaatccaacttacaagggacgtgaaggacctcttcaaggagaactataaaccactgctcaatgaaatcagaggatacaaacaaatggaagaacattccatgctcatgggtaagaagaatcaatatcatgaaaatggccatactgcccaaggtaatttatagattcaatgccatccccatcaagctaccaatgactttcttcacagaattggaaaaaactacttgaaagttcatatggaaccaaaaaagagcccgcatcaccaagtcaatcctaagccaatcctaagccaaaagaacaaagctggaggcatcacgctatctgacttcaaactgtactacaaggctacagtaaccaaaacagcatggtactggtaccaaaacagagatataggtcaatggaacagaacagagccctcagaaataacgccgcatatctacaactatctgatctttgacaaacctgagaaaaacaagcaatggtatagagaaatgaaaatatttccctggtccaatattttccaccatcttagaatcccatcagattcagagttccagatctgcctcatctggactgcaagattattatggtaaaaccactccacacaaagtacaattgtctgaaattacactgaagtcaaatgtacatcaaaaggtgccacacagggaagaagagctcaccgctgtgtaatttaatgaaacctactgagcaccaagggcacagacagccaaattgaattttaaatgtttcctaccaggaggctataatcaggatagccaccagtgggtggatgagataaacgaactgactttcttccaccaggcgatcaaaatagaataccatcttta

SEQ ID NO: 34469 - DNA, 507 bp, Homo sapiens
gcccagctaattttagaaacgagattctccctatgttgcccagattggtcttgatctccaggactcaaggaatgctcctgccacagccttccaaagagctggaattataggtgtgaagccaccatacctgcctataaacatcatctttgacacattggttaacctgtaaaaaaaagtcctctgtaatactagctaaacttctattaacttcccaccttccaaatctgaacatttmtcattgtttcttaatttatatttgtattagtctgttctcacgctgctaataaagacatattcaagactgggtaatttataaaggaaagaagtttaatggactcacagttccacatggctggggaggcctcacaatcacggtcaaaggcaaaggagaagcaaaggcacgtcttacatggcagcaggcaagagagcatgtccaggggaccccctgtttataaaaccatcagatctcatgagactttttcactattacaagaacagcatgggaaa

SEQ ID NO: 34470 - DNA, 448 bp, Homo sapiens
cagcttatactcctcttgagtacagttcctgtccttgtgaagacctgtgaaccaaagacacaagttatccgcccccacacactcaacataacaatggtagtaccaggatgttataactgcaaccgacaatgccattcaaaagctggggatgggagtggaggagataagaggacaagagtcacatgacagtcactggtccaaagcatttctgaaatctaattgggcttatgttgccagttccttgattagggtttggttctgagagtagttttccatggcttttatttctatcctcaggaatactgttgtctccctcttgtttattaatcccaatcttcctttgccacagaaatggttcatgtttgcagctaagtaamtgtctcagcctgatccttgctgatataagattaggaacccagaggcatcttttcatttcaaactgactctg

SEQ ID NO: 34471 - DNA, 578 bp, Homo sapiens
tgtgttagcctcttacgaaactgcgtctaccttaaaagggcacaggaaagggtgaaaagtatttttaaaaggctaaataaccacatagaagtcatgtaagttgacgcatgagccggcgaatggaatgatgatgtggccttggaggcctgatgggtcctcccgttggcatggtcccttctgctactggcgctcctgtgcctgcaatccaaacatctggggcctggccaaggggataccgggggctcgaggaacatgaggagctaagaggtgacctggggtcccggacaggcaggcaatgaggatgtgtggagttgagtacacgtcagggtgggggactgactgcccataatacatttaaaatggtgcatttcaattggtgtttgccaattcctagttgtggctgtttgggggaggctcaagaaaatgttttcacagcccttggggatcctgtaatgagaatcatgtgtaaacggaaygttgacgaagccacacctggggcacattggacccacgacagacactgatgtgggaaaagagccggtaccttttgaacctgacccattttatgagaagatgca

SEQ ID NO: 34472 - DNA, 578 bp, Homo sapiens
tgtgttagcctcttacgaaactgcgtctaccttaaaagggcacaggaaagggtgaaaagtatttttaaaaggctaaataaccacatagaagtcatgtaagttgacgcatgagccggcgaatggaatgatgatgtggccttggaggcctgatgggtcctcccgttggcatggtcccttctgctactggcgctcctgtgcctgcaatccaaacatctggggcctggccaaggggataccgggggctcgaggaacatgaggagctaagaggtgacctggggtcccggacaggcaggcaatgaggatgtgtggagttgagtacacgtcagggtgggggactgactgcccataatacatttaaaatggtgcatttcaattggtgtttgccaattcctagttgtggctgtttgggggaggctcaagaaaatgttttcacagcccttggggatcctgtaatgagaatcatgtgtaaacggaacgttgacgaagccacacctggggcacattggacccacgamagacactgatgtgggaaaagagccggtaccttttgaacctgacccattttatgagaagatgca

SEQ ID NO: 34473 - DNA, 628 bp, Homo sapiens
aaaagtttagggagatgaattaggactttgagatgttggcttttcttgaaagcaaactttgtcttgaggcagtaaagcatcagcagttcagctcaacaatcatatgcgattatttgctaaatgcctttcattctcttttggattactaatagttcttaagtgtttatacctagttatgggacgtttggcaaatcatttaaacattctcagccttagtttccttatctgtcttcaatgttataataattaactgccaaacttgtgcataaataaatgatagagtgtctagcacagtgcctaatagtaggcattctataaatattagtttatctctcttctcaagatgctttgtcttttcttaatatctccaattagctcataaaagtctaagggttttatatttggtgttgctgttagcatagattttatgatctaaacgtgaaataacatgctkcttttggtaaaaacaaacaaatttggtttgtttttggtaagaaacaaacatgctttgttaaaattcagtgccttggtttactttccttgataatgtgaaaagtaatcttatttagttgtttattagattgaagtagatgaaattcccaatatgtgactgtaatttacctacaaa

SEQ ID NO: 34474 - DNA, 1285 bp, Homo sapiens
tcattttgcatctccatatgacaagaggtgaggtccctccctcacttgaacattttatatctcttttctgtgtcctgacctctctccctgaaactgcaggcagctcctccttcattctcacctttactctgtgtttttcccagcccaaccctctatctcaacaataacagataatcagccacgccactcagagcactcataccatgctaggccagctagatcacatctctggacctgagattcccatctgtcaaatgagatacgtgatgctttttaacatttgtatggctcttattgcatgatttagctgggcgtggtggttcatgcctgtaatccctgcactttgagaggccaaggcaggaggattgcttgagcccgggmgttcaagaccagccctggcaacatagcgagaccttgtcttttataaaacctaaaaaaattagcctggtgtggtggtgagcccctgtagtcccaactactttggaggctgaagtgggagaatcacttgtgcctgggaggttgaggctttcagtgagctgtgattgtaccattgcattccagcctgagtgacagagcaagaccccgtttcttaaaaaaaaaaaaaattgcatgattctttgtaaattacatagaaaaaatcaaggaaaaaaagtcgattaaatttaataaaactcattatcaaaagtttacatagactgagggtttttagtcttggtctttaaaaaaatcagctttattttttgagatataactcacattccataaaattcactctgcttgctacatttttatgtaagggatgaattctgcatagtcttcaggaagatgctcctgttgccttttgtgcttatgaatttctttttaaaaatcatttattatttatttattttggttatcatgtgtccattctgggtttaggaaagggctttggtcgggaatggggggctggggttggtcctgtcctggcatagccaccgtctaatgacctctgggaaggatggagccctggctgcctactattctcagctgtgaagcccgactcccagcttatgccaccctcctcacagatttactttgagcatcagctgatgtctgtgcttgaggtgttgaagggggcacagagcatggaaagcatggaaaggaacttggagttaaaatacctggtgtcaggtcctgattcttttcactatctgtgtgaccttgaagtgttccttaacccaatacaactccaagagtcaccaactgcatggaacacagggtggctggtgaccctggagctgtgcag

SEQ ID NO: 34475 - DNA, 599 bp, Homo sapiens
gggaggctgaggcaggagaatcacttgaacccaggaggcagaggttgcattgagctgagattgcaccactgcactccagcctgggcaagacagcgaggctccatctcaaaaaaagaaaaaagaaaaataggcatatgcacagaaccayatccacacattcccccatacccataccatagtctggacatctggatggtcaaatgacttgacccctccaccccccacacccacccatgtatgtttaggtttacgatagcgttggtgcccatagtgtattgattgctctgattatcccaggctcttgaggagagtattgatggagacttagtacacaaagaacatatttgtgcatgcagaaggcagtgtggtttgcagtggtttaagaaagaaatgtctttagagactggggacagatcagattgcctgaagggaaggaggttttatggcagagcccttaaagacttccatcatctgagggatatgcaaagagcctgagaagcagcggccagagaattaggaggaaatctgggaaaagtatggcatcgaggacatctgagaatgagaatatttcaggagtgaagagttttgtttactagagt

SEQ ID NO: 34476 - DNA, 495 bp, Homo sapiens
ggggaccatgtccatcttcttccatgggactgttttttaggggaggaatcycttttccatgcctgatcccttagggaggggacattgggtttctggtattctcagcctttgtaatgggaggcctgttctgtcagcaaggagaaaggtaggagtcggggtaaggggagaatggattgtaagtacttaaagaatggcatccatgccaggtaggtgcttttcttcttcttctccatctgggtaaatccagtggccatttagctgtgatcttaattagtccctcagctgcattcaacctagggacaacttcctcctccatgaagtgctctcttcattgtagagacatcaagccctccaggtttccctcctctcttgctggccattcttcatcagtcttctgttactccttgccagcttgactggcctctgcaggttgaggtgccccagggcgccctgggcattgctccattcccctgtggggaggagtggagagagatt

SEQ ID NO: 34477 - DNA, 547 bp, Homo sapiens
agcaatgcattagtcttttctcacgctgctaataaagacatacccacaactgagtaatttataaagacatgaggtttaatggactcacagttccacatggctagggaggcctcacaaccatggcagaaggtgaatgaggatcaaagtcatgtcttacatggtggcyggcaagagaacttgtgcaggggaactgccctttataaaaccatcacatctcatgagtcttattcactatcatgagaacagcatgggaaagacctgcccccatgattccattacctcccaccaggcccctcccacagtgtgtgggaattcaaaatgagatctgggtggggacacagccagaacatatcaggcagtatcattactaatgacatccttgatcaaggaaatatatgaggtcctatgggggatacaaggtacgatgatccctgcccttaagaaccaaaagattctactaaaaaaatccaactcatagaagcagagtagcatgggggctggacaaggtatgcggtggggagtggggagatgttggtcaaaaggtaca

SEQ ID NO: 34478 - DNA, 517 bp, Homo sapiens
gaaactgtgttctcagatgttcccccaaacaactctttttaaaataaacttctttcaaaacatggtattgggttgagcacagtgtctcacacctgtaatcccaacactttgagaggctgaagcaggaggatcacttgaggccaggaggtcaagactagcctgggcaatwtagggagaccccatctccacaaaaataattttaaaaattagcttggcatggtggcacgtgctagtagttttagctactccagaggctgaagtacacttgagcccaggaattcgaggttacagtgaactatgatcacgccacagcatttgagcctgggtgacagagcaagaccatgtttcttaacataaaacaacaacaacaaaaaacacctggtactgattatatcactataggtgtatgataacaattcaaaaaaaaataagtagtcttccttctgtctgtcattctgtaacaaatagataaaaaataagaaaataggtagtaattaggatcgtgttttagtgaatc

SEQ ID NO: 34479 - DNA, 517 bp, Homo sapiens
gaaactgtgttctcagatgttcccccaaacaactctttttaaaataaacttctttcaaaacatggtattgggttgagcacagtgtctcacacctgtaatcccaacactttgagaggctgaagcaggaggatcacttgaggccaggaggtcaagactagcctgggcaatatagggagaccccatctccacaaaaataattttaaaaattagcttggcatggtggcacgtgctagtagttttagctactccagaggctgaagtacacttgagcccaggaattcgaggttacagtgaactatgatcacgccacagcatttgagcctgggtgacagagcaagaccatgtttcttaacataaaacaacaacaamaaaaaacacctggtactgattatatcactataggtgtatgataacaattcaaaaaaaaataagtagtcttccttctgtctgtcattctgtaacaaatagataaaaaataagaaaataggtagtaattaggatcgtgttttagtgaatc

SEQ ID NO: 34480 - DNA, 947 bp, Homo sapiens
ttacttcagtgcatcttgatgttctgagtgaaggaacagcacagaccctctgggagaccatccctgtgtgttagtgaggtcttgcattgtaaagatcttgaagaaaggagactgtgtctgtgagtcctcaacaaagcagacacctgattggagttaggagtccaaagggtttatccgaagtggcacctgtgaaaggaaaaggaaggaagcaggattgagaagaaagtgttagaccatgagatgcaggtctgacaaatgcctgagagctccaaagcaaagaggacctttagagaagccacatgttgggcagaaatagtgaggtccttgaccacactgtcctgctcagtaaatggccagagccgccctgagaagaaygtaacctccttccagaagctgaagtagaccagaaggagttaacagctggacactcacagctaatcaggctctcagcagctgggccatgagtcctgtctagaaggaaaacctgagctttgacctgcgtctccacatctgccacagggactatctctggaggacagaggaaacctcagttttgaaagcagggctaggaatttgctggtgccaataaaagacccaatgggaacttatattaggcatgctatgcctggtggatttgtccctctgtattgtgattcattctgcccccaaatcttcagtgaatttcttagtgccacggcattgtgaggaataaagaataggcagctggggaagtgtgtgagtccatgttacattgctataaaggaatacctgagactgggtaattcatattgaaacagggtttatttggctcacagttctgcaggctgtacaagcacagtaccagcatggaggaggtcccaggctccttttaacaaccaactcccacatgcactaaaagagagagaactcactcatcaccaaggggagggcaccaagccattcatgag

SEQ ID NO: 34481 - DNA, 1142 bp, Homo sapiens
aaggagggaaagagtgaggaataaaaatctctgaaatgtggagcccattgcctgtggctttttgtaagagggcacagcataaatggagacataggtgctcatcttaggaaggcagctttctccagttagggttatttctgcagcacacatgaggatagactggatgccaatayatggttcttcttccttggcaggaggaggagagggactagcttggccaatgtggtaaaacccagtctctactaaaaatacaaaaaatacaaaaaaattagatgtgcgtggtggtgcacgcctgtaatcccagccacttgggaggctgaggcaggagaattacttgaacccaggaggtagaggttgcagtgagtcaagatcgtgccactgcattccaaatgggcaacagagcaagactccatctccagacaacaacaacaaaaacccaaaaattagaaaagtgtggtggcacacccttgtatttccaactacttgggaggctgaggtgggagaatcacttgaacctgggaggcagaggttgcagtgagccaagatcgtgccactgcactccaacctgggtgacagacaaaataaataaataaaataaaaataaataaaacagagagagagagagagacagagagatctgagggatgtctctctctgacctcttggtgggctattcagccttactggtacactttgagttacattttgcttgaaaatggctggttctcaatctcaatcctgcttactcttccattctcttctccctgcccttcatctgctcagatacactcctttgcctctgggattgaaatcctcttcctaccactaagagccctccaggtccatccttctaacgccacccttgacgtgtctccagcctctactttgagtttaattcctgcactttccatgcccactcggcaataatctttgatcaaacccagacgagctgggttcaccacacacatgtggtggaacataggtcccttctgtgcagttctcaagcgagccaattgaaggtattactatcacaaacagttccttattctcaaatggactatgattcaagagtctatttgtaaggtagttattgggcacttagaatccattttcccagaggaacgatgttacaaattatggtt

SEQ ID NO: 34482 - DNA, 1142 bp, Homo sapiens
aaggagggaaagagtgaggaataaaaatctctgaaatgtggagcccattgcctgtggctttttgtaagagggcacagcataaatggagacataggtgctcatcttaggaaggcagctttctccagttagggttatttctgcagcacacatgaggatagactggatgccaatacatggttcttcttccttggcaggaggaggagagggactagcttggccaatgtggtaaaacccagtctctactaaaaatacaaaaaatacaaaaaaattagatgtgcgtggtggtgcacgcctgtaatcccagccacttgggaggctgaggcaggagaattacttgaacccaggaggtagaggttgcagtgagtcaagatcgtgccactgcattccaaatgggcaacagagcaagactccatctccagacaacaacaacaaaaacccaaaaattagaaaagtgtggtggcacacccttgtatttccaactacttgggaggctgaggtgggagaatcacttgaacctgggaggcagaggttgcagtgagccaagatcgtgccactgcactccaacctgggtgacagacaaaataaataaataaaataaaaataaataaaacagagagagagagagagacagagagatctgagggatgtctctctctgacctcttggtgggctattcagccttactggtacactttgagttacattttgcttgaaaatggctggttctcaatctcaatcctgcttactcttccattctcttctccctgcccttcatctgctcagatacactcctttgcctctgggattgaaatcctcttcctaccactaagagccctccaggtccatccttctaacgccacccttgacgtgtctccagcctctactttgagtttaattcctgcactttccatgcccactcrgcaataatctttgatcaaacccagacgagctgggttcaccacacacatgtggtggaacataggtcccttctgtgcagttctcaagcgagccaattgaaggtattactatcacaaacagttccttattctcaaatggactatgattcaagagtctatttgtaaggtagttattgggcacttagaatccattttcccagaggaacgatgttacaaattatggtt

SEQ ID NO: 34483 - DNA, 506 bp, Homo sapiens
ttttaaacatagctactggtacgtttgaaatgacacatgtggctcaagtgatctttctgttggatgatgctggcatagggtgtttgggttatgagaagggaaactgccctagtctctgcaaagtggggtatcactgaagacttcctgaagaagttgtccttaaacagatatctggctgagtaggtgttacacaggtaaaccctcagaggaggcagtcagaggtggatggcactttgagggagggggaggaggtggatgagagagagctgggaccatggcaggggctgaggccagggaggtaggccatggcctgatcatatgggtcttgttagccccaatgagggttttgttcttcatcactcatgatttaktccaaaacttcatcattacaaacccttttatccaactccacctcttctatatagtctgcagataatctggttatttcatggaggaaatgagatgatctgctgtgatttctctaggacttttctgtctctcccttt

SEQ ID NO: 34484 - DNA, 536 bp, Homo sapiens
cccagaaactgtttttgtttacctgactagaccctctgtctctttattatagtcaagcccataaagactgtacccctatcagtccatagcacttcaggctggtctgctacattgatataataaaatcttgctggcaggtgatggaaattcctggtaagcaagaaattgcaggtgccttggatgtcttggcaaggtrtatgcaagccaaagattgaaaatctgcccttaaaaatttttgaagactgccacccctgtaaattttctagggatcctcgggactggggtgccaggattttttttcaaatacaacttttactctttattagaaaaatttttatgtgaataacaatacccatcagccaatagctggatgattatttacttcactttagttttcttctttctctgataacatttttaaaacaactatattgaggcataattggtataaaacaaagtaatatatttaaagcataaagctttatacatgttgacctatgcacacacctgtgaaaccatcaccataatcaagataa

SEQ ID NO: 34485 - DNA, 536 bp, Homo sapiens
cccagaaactgtttttgtttacctgactagaccctctgtctctttattatagtcaagcccataaagactgtacccctatcagtccatagcacttcaggctggtctgctacattgatataataaaatcttgctggcaggtgatggaaattcctggtaagcaagaaattgcaggtgccttggatgtcttggcaaggtatatgcaagccaaagattgaaaatctgcccttaaaaatttttgaagactgccacccctgtaaattttctagggatcctcgggactggggtgccaggattttttttcaaatacaacttttactctttattagaaaaatttttatgtgaataacaatacccatcagccaatagctggatgattatttacttcactttagttttmttctttctctgataacatttttaaaacaactatattgaggcataattggtataaaacaaagtaatatatttaaagcataaagctttatacatgttgacctatgcacacacctgtgaaaccatcaccataatcaagataa

SEQ ID NO: 34486 - DNA, 536 bp, Homo sapiens
cccagaaactgtttttgtttacctgactagaccctctgtctctttattatagtcaagcccataaagactgtacccctatcagtccatagcacttcaggctggtctgctacattgatataataaaatcttgctggcaggtgatggaaattcctggtaagcaagaaattgcaggtgccttggatgtcttggcaaggtatatgcaagccaaagattgaaaatctgcccttaaaaatttttgaagactgccacccctgtaaattttctagggatcctcgggactggggtgccaggattttttttcaaatacaacttttactctttattagaaaaatttttatgtgaataacaatacccatcagccaatagctggatgattatttacttcactttagttttcttctttctctgataacatttttaaaacaactatattgaggcataattggtataaaacaaagtaatrtatttaaagcataaagctttatacatgttgacctatgcacacacctgtgaaaccatcaccataatcaagataa

SEQ ID NO: 34487 - DNA, 655 bp, Homo sapiens
ttaaactgcaaatatctcatgaagctgctgcctgcatcaccgctctccaggcagccactgaggctctggttgttgaagtaaccaaacaacctgctatcatcagccagttggaccccgtaaatgaaagtatactgaacatgatccgtcaaatctctagaccctcagctgctgatatcaaccttatgattggcagtacatggtatggagatggtccaggtcctcctaagatggcccaatatgacaatggaagcggatatagaaggggaggttctagttatggcagtgaaggctatggcagtggctatagcagtggaggctatcgtagcggaggctatggtggcagctccagctcctgtcgggcaggatatggtgcaggtgttggtggaggstatagagaagtttcctgaggtggctatagaggcaactctggaggagattacagagggcctagtagaggctacagatgatctgggggattccagcgaggaggtggtaggggggcctatggaactggctactttggacaaggaagagaaggtggcatctgttaaggcttggttatgtcagttcctgtgtgtagacagtaagaaaaaaaaagccatgctatgtgtgacatttttttccaatgtttatttcccaccaaaaagtaaatgca

SEQ ID NO: 34488 - DNA, 819 bp, Homo sapiens
tgaccaatacagcttcctaaaacattaagattgggagggtcaatgttaatgttcataaaatacacatggctggttgctgaaaattttgggcaggtaagagggagaaattccttttttattcccagctctgggagctttcctaatagtccagtggaccaggctatatagaaacaaatttaaaagtacacatatttaagccaatttaaaaaaatatgtattttttcctttgttgcctaaaagtttctgtagaagctctcattcctaaaaatcacgtgatgcatctagacattctataagattcttttctttttttgtttttagagatggagtgttgctctgtcacccaggctaaagttcagtggcacaatcacagctcactgtagcctccaactcctgggctcaagtgatcctcctgcctcggccttccaaagagctgggattacaggtgygagccaccacggctgggttaagcattctgtatgtcttttaaagaaatctttgccaaactcaagatcactaaattctcctatctattgtattccttcagaaattttatagttttggctcttacatttaaggattcattttgagtcaaatttagtgtatactgtgagataaagattgagggttctttttttttttttttaggtaaatgacactacaattctttcagaatcatttgctggaaagattgtctttaccccattgaattgccttggcatctttgtcagaaatctactggttaaatgtgtatgtattttatttctagagtctctattctgttccgttgatttctatgcctatcttgataccaataca

SEQ ID NO: 34489 - DNA, 667 bp, Homo sapiens
tgcagattattcatctgaataatgaggccacagatcacctaaagaatcttttcataatattgaatctatgaattgaactggaattctgctctaagaaatgacaactttgtatctcgtctcaggaaaagactattataacatcttataaaaatatttcatagcggctgggcgcggtggctcacgcctgcaatcccagcactttgggaggtcgaggagggctgatcacaagktcaggagatcaagaccatcctggctaacatggtgaaatcccatctctactaaaaatacaaaaaattagccaggcgtggtggcaggcacctgtagtcccagctacttgggaggctgaggcaggagaatggcgtgaacccaggaggtggagcttgcagtgagctgagactgtgccattgcactccagcctggttaacagtgcgagactctgtctcaaaagaaaaaaaaaaaaattcatagcacatacttttgattaagttgtactgatgtacttcctctcactttaaaatgaaatgaaaatgtcttagaatattgcaaatatatttatttttttcatattatacatatatttacctttaaaaatgtattaataaaacagcaataatatttaacaataaagataaaagcaaaaggaacttaaaaactcaattatttggaa

SEQ ID NO: 34490 - DNA, 2467 bp, Homo sapiens
aacattaagtttgtgcaccacatatacatcgtgagctttctgccaaacaaccatgaatgcccacttcctcaacctatgattgggcaggggacttccctcctctggttcactggccttgtggctttgtctgtctgtggctcaggcactcatactacaccccaagttcttggatggctttcattgccaccatttgygcagtttccactcctccacaatgcagtgtagatgtatcaggtatacgggtttactcagttctcttagagatttggtatagaaggtattcttattcttggaataagaagcactaaagctaaaagggtagccagctcagatctgcccagtttaactctgccattgttgctcttcctcctgactttgaggaatagaaaataactacaaaggatggaaacagtatatatttcctaagagggcccttacctagtatttcttataatcaatactttaaacctgtttcctttttaattttcatcctaacacagcaacaagaagagacatgtgtaatacagtatgagcgctgaccaattatcattcttcttttcccaaaatatgaaagaaggaatactcatagctagctgatagattagcaacaattcagaaatgaacagttaggccatttcttgcagctcgtcatttctttgtataacaagaactgaaggcagcagttaaaagggagatgcagtaaggagtgttttattattcattgttagcactttaactcaaagtaggtgagagagtgaggcatagagggatggaaacacaggatagatgggctttgacaagtgcaagagaggaggctggtgcttgaggtcattcctggtctggatggagccctgcattggaggcagagctgaccacagaaggtcactgaatgccagagaggaggtggtgggactctgaagatgctgcccattcctcatgctagctctccaatatctcaagttgcgaaagttatgataagggttaaggatgttatgggctattagactgctaccttccaacacttaacattttatgattctaaaacagttcattagttgctttctaaaacctcacctaaagtataagctagtcacatttttgaaaagaagtaagaaacaaacttgttgaatgcctatgtgtcaagcacggtattaggcaatgtacacatattatctcatataaccccacaatcctgtgatgaaggagttatctttccattttgtgggtaagaaaacagactcacagtgattaaccatcttacctaatatcacacagctttatgtaacagagagtggagatctgattcagtgctcatcctgtttctatcatattatggtacctctatgaaaaccccaccatatgtaagaccatgcatgaaaccagggatatttaaagggagacagattcaggtagctctagaagctaaagcaaaatttgaatagttgtgtaattttctgggaagggacaatttatagttctcatcatattctcaaagggttaaccataaaatttgaagaaccactgcactcagtgtatttagaaaacaacagccatttcccccttcagttccaccatatggcatcataagctcattcccaacatactcaattttctctggtgattgaagcaagggtagaaaccttagaaaggagattaaataataatgaaatatacaagagtccatttggctatgtgtgctgtttggcggctgcccatacaatttctggttatcagcacaccccaggggctattgtaggttcattaatataattttagactagaagatccttggagatcatatagtccaatcccctcagtttatagatgacaaaaccaagaccctcagggctagagtgactcacattttcacacagcctttcactggcttgataatggatttaatatttatccagtaatcagtcacttttggccatcatctatgcctccatgatcagtcaatgggaggagaaaacattgggcttatgctcaaattgacccttccagtgctagtattgatctagcattaccagatactatttagcttttgagctttaatcagattagctgcggtggcaccacgtcgtctggcaccagagtggtctgtggacgatgtcaggaaaagttgatatgatgctgagaattcttgtattctgaattagtaaatgagaaaaaagaagatgcccttctcaaatgcagcttaatgaggcagactgccaattttgctaatataaaggcaagttataatgacaaaataagtaatttaattagtctattgcaaatgaaaacattccatccacaccattatttcaaagtattatgatttcattgatttccatttcagtgaaaatataagaaggaacttttaaaaaaaatccattaaaaaatctttaaaccgggtataagaggaaactgctaaaataaattgcatttttagactgcattataaaatttcattttggtacaaatt

SEQ ID NO: 34491 - DNA, 1352 bp, Homo sapiens
gctttcaagtgartggtgcaaattctcatgtgtgagtgtgttctggtgttggggttagttgctgctaaatcatttgtgcatctgaataacccattctcaaaactaaacttaatgatgtataattgagcattatgtcatgaagtagaaaggagcaattgttccctgagatattgaataccaaatgcaaagatgttctgggctgtgtccttgaaaccagccgactctgtgatttcacagtgattccatgaggcattctacaccttcaggatgagaggacatcttaatcctctggacatccccagaactgcctatcccagctactgggcctccccaactcttattagattcctacccatagtagtagaattctgcttgttgttggagaaggttggtggaagaaaatgcagctaatggtctttctgccttgcttctggaagtccaggagggccctgccagtggtctgtgctgcaggacagagtgaggcatctgtgggcattccttgcctggcagctgatattgtgtgtctctgttggtcctcattcatctagcttgcgttttagagttgtggttatgtaatgggggcgtgtaataaagatttgttgattgttggacatgctgtgggagtgcaggaggagctcatgcgaatgagtggctctagtatttttggatttgtttctgaggtttgtacaggataggcaaagtctcgaccatctataagactgtcctcctggcatgtgtcatttattgctcaaggtttctggattttagaacatccttctttgcttgggtgatattcccctgtgtggtatataatcaagtaaccatatgtcctggtttccctgggatagtctcaatttatgcctatttttctagtatgattattaatattggccaccccccatgccttttactctcaaaatatccagatttggatggccactttctatataatactgaaaaggaatgtttatatttgttgtcctagtaccatagaaacagtggcatattgaaataatcaaggctttggaaaaatgaccaatttatttatttatttatttatttatgttttaattatactttaagttttagggtacacgtgcacaatgtgcaggttagttacatatgtatacatgtgccatgttggtgtgctgcacccattaactcgtcacttaacattaagtatatctcctaatgctatccctccccactccccccaccccacaacaggccccagtgtgtgatgttccctttcctgtgtcctgtgttctcattgttcaattcccacctatgagcgagaacatgcagtgtttgatttttcgttcttgtgatagtttgctgagaatgatggtttc

SEQ ID NO: 34492 - DNA, 984 bp, Homo sapiens
cacattggagctggtcttcttggaatgcttgctcttagaatccacctgccaggtaaagaagctctacctagccaatgtggagagaaagagctcacagcctccagctatccccmccaagattcttgagatataagtgaagccatcttggacgttccaattcatgccactatctgacaacaaatacatgaggggcctcaaatgagaccagtagaagaactgagcccctatcaacctacagaattatgggcaggtaaaatagtggttgtttaaatccactacatttgttatatagcaatagataatcaaaaccttgggttcacacacacacacacacacacacacacacacacgcacttaagtcagtttaatgtttgagcatgaaatgatttttcatatctgagaagttggtgtttttggacttgggttcaggctactttatcaggaaatacttttatttacttcctaaatttagttcagactcaagatggagcattgcatttggggtatgtccatttcattaagaaaaaggtagtgaaagaactacctgttttcccattagggcacagtcccttcccattaggtcccctcaatccagaagaggccatgaggggaggtgactgagaaaggatgtttatttctgcagcttgcatgcatggagaacctggaagaatttataaatccatcatttcaagtcattaggcgatatgttggtcagtccaggagactctgttctcattaattcaggggagatttacttgtgtcaccctcattagtatttatgggatttatccacatcaatcggtagtgcattaacagggaaataactaaacctcctagggtttgttggcgctaataaaatgagctggaagttccagaaatcaccatgatcagaagtattctaaatcagggctgtaattgatcctttcaaagtaccctcaggatgtttttctgttcgcttcacttccagtggcatttgcatattag

SEQ ID NO: 34493 - DNA, 984 bp, Homo sapiens
cacattggagctggtcttcttggaatgcttgctcttagaatccacctgccaggtaaagaagctctacctagccaatgtggagagaaagagctcacagcctccagctatcccccccaagattcttgagatataagtgaagccatcttggacgttccaattcatgccactatctgacaacaaatacatgaggggcctcaartgagaccagtagaagaactgagcccctatcaacctacagaattatgggcaggtaaaatagtggttgtttaaatccactacatttgttatatagcaatagataatcaaaaccttgggttcacacacacacacacacacacacacacacacacgcacttaagtcagtttaatgtttgagcatgaaatgatttttcatatctgagaagttggtgtttttggacttgggttcaggctactttatcaggaaatacttttatttacttcctaaatttagttcagactcaagatggagcattgcatttggggtatgtccatttcattaagaaaaaggtagtgaaagaactacctgttttcccattagggcacagtcccttcccattaggtcccctcaatccagaagaggccatgaggggaggtgactgagaaaggatgtttatttctgcagcttgcatgcatggagaacctggaagaatttataaatccatcatttcaagtcattaggcgatatgttggtcagtccaggagactctgttctcattaattcaggggagatttacttgtgtcaccctcattagtatttatgggatttatccacatcaatcggtagtgcattaacagggaaataactaaacctcctagggtttgttggcgctaataaaatgagctggaagttccagaaatcaccatgatcagaagtattctaaatcagggctgtaattgatcctttcaaagtaccctcaggatgtttttctgttcgcttcacttccagtggcatttgcatattag

SEQ ID NO: 34494 - DNA, 603 bp, Homo sapiens
tcagtcacaaactttcatgccttaaaaaatagccatgttttggcttttgttctgttttgtcttttttaaaattgttttgttttgaatctcarattctactacagttaatgctgctttcaaatcaatcattttccttacatatagatctacatttgaaataacaacaatatacaattgaacttgagggataaatgttatacagagattttttaaatcatatattggcaagaataaaaaaaattcacttgcttttttgttaagtttatttccacaactgtttagtgcttaatacaaaagtacataattttgaatgctccgcattaactcaaaaagatgtaaattttatcaaatgtttataacctgatgcttcaaatagccaaattagagtatgagacggttttatttggtagttacatgtcatatttaaaaataggctttcttttattttctgtgttcactcaggctatagctacagaattcaatgaattattacaaatctagtaagataaacaagcattattattgttccctctacacacattgagtaggcactgggtataacaaagtgaacacaagagacgtggttcctttctttgtggacat

SEQ ID NO: 34495 - DNA, 1346 bp, Homo sapiens
tgtagcaaaatattttttcctctgtagaagagccaatgagaacaatactacttctttgatcattatagcataatatttgtgtacagacctttgtaattgattggaatagtactaaatttcaaagagcagccatctagttcttacagagttgagtggcctagatattaataaggatatacatactaatgatgaygaaccagctgtccatggaaaagctgatttagagagtattcagttttatcattttgacagctcgcatgggaaaacataccatattccgttccctttccttgtgctagagtcaaattagaatttcatttaaagataaggagccaatatcatagcattttacattcttatctttatgacctacttatttttaatacttgctgttaagagatgggcattcttcgatgtcagatggaagtggttttatttctctctatattttctgttttagtgattttttgaaataaagatttcttccctctctctaacatgctttctctaatgcattttagatcatcttgattctttttattttccatttaaaaattttttgagggggatttcttttgatattttctgatttctcatttagtatgacttcattctatttaaactctcatttaatactgtgtgcttcatttccaattagtggtagataattaatttctaattagaaatagataacagtaatatatgcctccatgggtaatattttaaatgaccataataacgttttgatgagaagaactattattaatccaactttttaatgttctctttgactgacaactgaactaaaaaggatggaaattagcagactacattaggacactgagatcagaagaaaacagaaataagtcgagttgacatttcatacatcaattttccttggaaattgctattatatcaacactaatgttacttgtaacaacagctaggtaaaacggtgaattttatgctattaataacttccaatttctgagttctttcaatcatccactctttctacagggaacaaggcgtttgagttgcccaagagcttatactccttgcttaaggaaatatattcccaccccaatctgttctgcaaagcattcatggatctacactacatgtggtacagatacaaggcttaccagagcaaagcttacaagcagagaaagagtgaaatatgtgtgatcccctaaactctcattactctacagcaagcctgggcacagatggtctgtaaacaccatggccaacaatcccaaagagaaagatcccaaaccagtaatgctcgatgtatttagaggaacaggtgtgcatggtagggagagaggtagtcgaactttcat

SEQ ID NO: 34496 - DNA, 605 bp, Homo sapiens
tcttgtatatttgtgttctttcctcttatccccttcccatatacaatcttacctttttgattagattagctagtgattgtctattttgtttattttttaaaccaatatttatttatggtatagctatttttctttttctacttcattagtttctgtttgtattctgatttctctcctttgttctctttattttgttttccaaatttattgtcattgtccatttttattgacatatatatttaatactgagataggatagttcccttgaccccctttggagtaacttatttcactcagtccgccactggccactcctcacaggtttagctgggagcccagcccttctatatcactaccatragttttttctgatcactgctttaattgcatgattaaagatatgtgattctgaatcacagttttttatcattgttttttacaatatctgtgatattggtttgcatttcctcatttgagtccagttttttcataataatcacagaattttatattttattagcacttttaagaatacatttttataatttatttataattcaccactaacatgtggtgaattggtaaatttttataaatgtccaata

SEQ ID NO: 34497 - DNA, 521 bp, Homo sapiens
aagtattgatgaaaactcaggtgtgtccaattccaaagcccatattctctccagtgtatctcactgcttttccatctcagctaatcagttttactgagctccttctgtaggcaaaaaggttacaatcttgctgggaagataatatatatttccccaaatgcttaaatacattaaggtgagcaattcaatagcacagaaaataaggataattattgttcagaaagtggagagattaatttcagcctggatggtaaaaaaaaaaaaaatgcttcatagaggacaatggattcaaacagatcaaaaagcaaagcaaggtttggataggaggagagcctagggcagcttccaacacaggaaagtgtggattttgcccttttaattgtggggagcaaacaaggtgtttaaggtgttttgtagagrgatggtggcttgaaagcagaatttcgggaaggcaaaattggcaagagagggtaggatactcactacagagagaacctagggggaagataactatttggaag

SEQ ID NO: 34498 - DNA, 650 bp, Homo sapiens
tatgtaataagatggagaaatatttattcaccagcactccagaaaatttgaagaagatagaaactgcctcatcagggcagcctatccctattccaccctcatttctaagaggagcagttgaaaggctgaacaatacttctcaaagaaatgcctactgtggcagggtcaagagggatgaatgcaggtttggtgggggtgggaggaggtgttagaaacattttttgaggaaaacatatgagattatctttgtgaattggaggtaacaaaaaatttattggagaggtcacagtgaacaataaccataaacaaaaaattgataattagatttcaccaaaattaagaacttctgctcattattgtayaccactagcaaaattaataagactactaatctaacaaagcactgttatcaaggatttaacaaagaatacagtaaacaaccctcaaaaatgggcaaaaatttgaataaacactttataaaataagacatacaaatgaccagttatcatacaaatatattcagtgtcattaagtaattagagaaatacatttttttacttttatcttaagttcaggggtacatgtgcaggtttattatacaggtaaaacttatgtcatgggggtttattgtgcagattagagaaatgcaa

SEQ ID NO: 34499 - DNA, 1010 bp, Homo sapiens
tcccttgaactcattatgggccagattccagtgatcctcaaaccagacatctttggcctctgtgtgagacaggctcctcttaaatgttcacaatcacgcttgatctgatgtttctggaattgtacacgttcttgtctcattaagaaaaaaaaagacctccaaccacctctgagcacatacagccacatctttattaaaacatcaccaccaccaggtcaacaggggtggtaggagtgggatggggagaggccatatggaaccagtcaggtaagtggtgacaaccctgcctcgggcctctgcagccttgcagctggcagctttggagaccggcattatgtttcacgtcactcaaggcaggtgagccgaagccacgtctcgctggctgcctctgcagctgcttctccaatcaggtggtcctgcccgcctcggcttggcggctcagggtcttgaaaagcgggtgacaggggcaataatctgcacttggcaaagcaaacccgaacacattctgaaaggcacagctggaccaggctcagcagcttgattcattaggcagtaatctcaaggctgtcagcctaggccacaagggcatgtccaggcagggragctgtgttttcaacaattcaatccatttccacaaatattattgagccaatgttacgcaagaggcctggcgagtggcagcagaggaaacaaagatgagaaagggacagtttctgcttcaaggaccttaaattctagcttctctgagaaccacaggagagagaagaccaagggtggctagggttcagagttggacgagagaacagacagttgaaaactcaggacaaatgtcacagaggaggagtcctgcatagaatttcttcttccctcgtttcctccatccttccctgtggtagacggaataatgcacccccatgccccgccttgccaagatgttcacgtcataatccccagaagttaaatatattaccctatatggcaaagaatctttgcagatgttattaagtgaa

SEQ ID NO: 34500 - DNA, 1010 bp, Homo sapiens
tcccttgaactcattatgggccagattccagtgatcctcaaaccagacatctttggcctctgtgtgagacaggctcctcttaaatgttcacaatcacgcttgatctgatgtttctggaattgtacacgttcttgtctcattaagaaaaaaaaagacctccaaccacctctgagcacatacagccacatctttattaaaacatcaccaccaccaggtcaacaggggtggtaggagtgggatggggagaggccatatggaaccagtcaggtaagtggtgacaaccctgcctcgggcctctgcagccttgcagctggcagctttggagaccggcattatgtttcacgtcactcaaggcaggtgagccgaagccacgtctcgctggctgcctctgcagctgcttctccaatcaggtggtcctgcccgcctcggcttggcggctcagggtcttgaaaagcgggtgacaggggcaataatctgcacttggcaaagcaaacccgaacacattctgaaaggcacagctggaccaggctcagcagcttgattcattaggcagtaatctcaaggctgtcagcctaggccacaagggcatgtccaggcaggggagctgtgttttcaacaattcaatccatttccacaaatattattgagccaatgttacgcaagaggcctggcgagtggcagcagaggaaacaaagatgagaaagggacagtttctgcttcaaggaccttaaattctagcttctctgagaaccacaggagagagaagaccaagggtggctagggttcagagttggaygagagaacagacagttgaaaactcaggacaaatgtcacagaggaggagtcctgcatagaatttcttcttccctcgtttcctccatccttccctgtggtagacggaataatgcacccccatgccccgccttgccaagatgttcacgtcataatccccagaagttaaatatattaccctatatggcaaagaatctttgcagatgttattaagtgaa

SEQ ID NO: 34501 - DNA, 1135 bp, Homo sapiens
cagcctcaatcacaaaagccttatcagaaacccaaggcgactgctttctggcattcactcctagcagaagagagcagcagcacagggaagaggtatgtggtagataccagcccaccctcctccccactccgcagctgacacagtcaccgtgtagaaaggcccttccagctgcctccccatgtccctcggtgcccatcatcctttacagactggcttgacccagggctgtctgttgcccatctgaaccaacttcctacctaacaaatcaattggatttaggggtttccttcctttcacaagaagctaatcacaatgtgggcctctggccagaactttggcagtggggagccgaggcgggagacagactcagtttacattgaatgccttctgtgccattgaattttgtaccatgtgcatgaatcacttacttagatttaaaacatgcagagatctactttccccagccctgtgcaccctccaaggactgcagacattggcagtgagatgggcccaaagtggggcagtagtgaagccagggtggtcagtctccatgtagccaagttgatggagaaagtgattttccacaaacgggactcgtgttcgtcttaaactctcatgcagcctgcttctagggcttcggttttacggcaagcaagttctgttctgagtgcaaaagccgtgggctttctctagtggtgcctsgggcaggagtagcgcgagggcatgcaggctgcttggtgaggtggttgtagcttgccctacccacactctctgtaccaccttgtacccacctctggcctcaggagaagggccacctacacaggcgggagagggatgcagacgcaaggtgagaactgggatagagagtcagaaggcccacattcagctctgaggcatcttcagaaaagacactttacctccgtgagcctcagtttcccctctacagaggagcataactgtacagtcctcacagcattgtaatgagagtgaaataaagaaaattttctcttatttaacaaatgctctacctactatgtgccaagcactgttttaatctccttaccaatgaaaacgaggcacagagagtttcagtggcacatccaagatcacacgcatctggaaaggggcagagcca

SEQ ID NO: 34502 - DNA, 2052 bp, Homo sapiens
tttctcttcttactcatgttgtatttatgtctagttttacccatgtcctctcttcagacaccacctctctgccaatggctcagaatccaatatttacagtctagacttttcctctcagtcttataacaaagtaccatacagtatcccaagggatatccctacttggttgacctccaggctcttcaacactccacaatcagaacaaattcatggtcttcctgccatcacttctgaatctggacctgttccatcattctttatctcactagagataaaacgtcacaaccattcagtgtctctagccagaaatccaagcatcatcacggacctgacctcccttgttcttgcccttcatattcaatctatccaaagtcctatcagttttgcattcaaataaataaatttttgaatttcactgttcactgtccaatcagatcccacattgcaaccagaggaaattctaaatgcaaatagtgccacccctatgcttaaattactctagtacttttctattgctgtaacaataaataccaaaatccttatgggctcaattatgttctcaaaatcatatgttaaaatcctaccccgcccagtacttggaatgtgatcttatttggagatagggactttaatgagacaattaagttaaagtgagaacattagaatgggccctaatcccctatggctggtgtttttataagaagatattagggcaccatcaggcagagaaggccatgtgtagacacagtgagaagaagacatctacaatcaaaggagagggaacttaaagaaaccaaccctgctgacaccttgatctcagacttctagcctccagtaccatgagaaagtcaatatctatggtttaagccactcagtctgtagaactttattatggcagccttagcaaacaaacacatctcaacaaagctataacgtcctcttggcttttgtggtggttttaaaatatgtccatgaattttttgacactcccccttcaaaaggtggagctgattcttctccccttgggtgtgggctacacttactggctcccctctaasaagtagaacatggtagaagggataaggtgtaacttccagattaggacataaaaggaattagggcttcctgttgctctcctttttggatcccttgctcttggggaagccagctgccacatcatgaggactctcaaggggcccagtggagagtccacatggtgaggactgaagcctcctgcccacagccgtgtaagtgagagatcctgtacacagattctgtggtcccaaacaagcctgcggattatggcagctcttgccagtgtctttactgtaacttcagagagaccctgaatcagaactgcacagctaagctgctccacaatccctgacccacagaaactatgagacaataaatgtttgttgttttaaggtgctaaattctagggcaacttgttaggcagaaatagataattagtacggtttgagtctattcttctaggctaatcattcaccactcttgtcttgctctctgagctccagcctcatttcctctcttgctcaaattccctatgctccttaaacccctctttctagaatgtacccctacattcttccttatttgagtcctactcattgtcttgatctctttgaagcattaatttttcagagaaatcttttttgaccccattccagtaatatgttttattaaaccatgttcctttccttcagaacactttcctaagttcattattatttgttcattagggtgattattggattgatatctatcttcctcactagacttcaagctcctcaaggccagacatggtgctgtttttacttatctctgtgttcccagtgcctatacaatatagtcattgaatacataattgttggatggatggaaggatggatgcatggatgcatggacagatggatatatggatggatggatggatggatggatggacagatagattaatattagccaatatgtgcataggagcaagtcttgcatttcaggattgtgcttctatttagtctcctggctgca

SEQ ID NO: 34503 - DNA, 2052 bp, Homo sapiens
tttctcttcttactcatgttgtatttatgtctagttttacccatgtcctctcttcagacaccacctctctgccaatggctcagaatccaatatttacagtctagacttttcctctcagtcttataacaaagtaccatacagtatcccaagggatatccctacttggttgacctccaggctcttcaacactccacaatcagaacaaattcatggtcttcctgccatcacttctgaatctggacctgttccatcattctttatctcactagagataaaacgtcacaaccattcagtgtctctagccagaaatccaagcatcatcacggacctgacctcccttgttcttgcccttcatattcaatctatccaaagtcctatcagttttgcattcaaataaataaatttttgaatttcactgttcactgtccaatcagatcccacattgcaaccagaggaaattctaaatgcaaatagtgccacccctatgcttaaattactctagtacttttctattgctgtaacaataaataccaaaatccttatgggctcaattatgttctcaaaatcatatgttaaaatcctaccccgcccagtacttggaatgtgatcttatttggagatagggactttaatgagacaattaagttaaagtgagaacattagaatgggccctaatcccctatggctggtgtttttataagaagatattagggcaccatcaggcagagaaggccatgtgtagacacagtgagaagaagacatctacaatcaaaggagagggaacttaaagaaaccaaccctgctgacaccttgatctcagacttctagcctccagtaccatgagaaagtcaatatctatggtttaagccactcagtctgtagaactttattatggcagccttagcaaacaaacacatctcaacaaagctataacgtcctcttggcttttgtggtggttttaaaatatgtccatgaattttttgacactcccccttcaaaaggtggagctgattcttctccccttgggtgtgggctacacttactggctcccctctaagaagtagaacatggtagaagggataaggtgtaacttccagattaggacataaaaggaattagggcttcctgttgctctcctttttggatcccttgctcttggggaagccagctgccacatcatgaggactctcaaggggcccagtggagagtccacatggtgaggactgaagcctcctgcccacagccgtgtaagtgagagatcctgtacacagattctgtggtcccaaacaagcctgcggattatggcagctcttgccagtgtctttactgtaacttcagagagaccctgaatcagaactgcacagctaagctgctccacaatccctgacccacagaaactatgagacaataaatgtttgttgttttaaggtgctaaattctagggcaacttgttaggcagaaatagataattagtacggtttgagtctattcttctaggctaatcattcaccactcttgtcttgctctctgagctccagcctcatttcctctcttgctcaaattccctatgctccttaaacccctctttctagaatgtacccctacattcttccttatttgagtcctactcattgtcttgatctctttgaagcattaatttttcagagaaatcttttttgaccccattccagtaatatgttttattaaaccatgttcctttccttcagaacactttcctaagttcattattatttgttcattagggtgattattggattgatatctatcttcctcactagacttcaagctcctcaaggccagacatggtgctgtttttacttatctctgtgttcccagtgcctatacaatatagtcattgaatacataattgttggatggatggaaggatggatgcatggatgcatggacagatggatatatggatggatggatggatggatggatggayagatagattaatattagccaatatgtgcataggagcaagtcttgcatttcaggattgtgcttctatttagtctcctggctgca

SEQ ID NO: 34504 - DNA, 509 bp, Homo sapiens
tgtaggatgtttcgtaacatccctggcytccactagctagatgccagtggtacccctaacaagcttagatacccaaaacgtctctagacattgccaaatgtccatggaaggaggggttggtgtagaggagggctgcaaaattgcccctagttaagaaccactggcctagataaacatttttcaaaattccctttattttgattctattcttatctagtgacattttggaaaataataggctccattgttatttaataaatcagaacttaggttaaaaatgctttagtctctggtgagtgtagctgagatgatacattttcccaaagacttaccatctctgagcatgatactcaccttacagaattgagtttctgaatgtgtactctgaggaccagactttggatcatgggaactgaaccaagtaccggaaacttatagccctgtgccactgttccatcttgactttgttatcttaagttctaactgcagagtacaatacaacaagtaca

SEQ ID NO: 34505 - DNA, 1186 bp, Homo sapiens
ccactctgtgcatttacgtgtgagtcacatctgaaaatgactgcaatgccattttaaaatttaaaaagaaaaacatttaaaatgagcaaatatttctcataggygttacttacttggattttgaggaaaaagagtacagcttttgcagtggattatttctttgacaacagccacttctgttggtggtgggggaggtaccagtccaaggcctggtatcattgggttaatgggggtgattccagtcatcatgttgaggcttggatcaaagcctgggacacagattgagtctgtaaagtatacaagataacattttgactggagattaaatccatttttgttgttgtttttgccattttcctgtggattatttgactttatactttctatttttcaggaatttctcctggcataagatataatattatagaaagctatgccagaagggtaaagagaaaaaaagtaaaagatgaacattaaactacatgaaaaggaaattatattacttaaaatattaacatggcagaaagaacacagcatattaaaatgtaaaagcatgcaccatgaagcttcactattactgtgaatgcaattttctatttcttaacgttggtgtattgtttataccaccttatgacccagaatatgggaagaatatcatttaacattgaagtgctctgtgaatctaattgtcaacgtggtttcatcaaaagagccttcttacccaagtgacctagatttaggaaagttcaatttatatgtgcatactttataatgatgtattcaggtcccacctaacctatttcccctggaataaaaaaaaaaaaaaaagcaaaacaaagagtgattacaattactatggctgggttagatacatgcaggcataaaattagctatatacatttctggcttctattggataattgcactttcttcctataatttagtcaacaaagaattgacccacccttttgaaatctttatgccctgtattacacacacacacacacacacacacacacacacacttgaaaatagaaagtgtgcaaaacaaatgggttttccagctttttttttttttagtgtgataatgaagcaagtgatttcaaaggtggcatacagacactaataagtaagacctttctaacagcaggggctatgaaaatactatactgagtagccacaaggg

SEQ ID NO: 34506 - DNA, 1186 bp, Homo sapiens
ccactctgtgcatttacgtgtgagtcacatctgaaaatgactgcaatgccattttaaaatttaaaaagaaaaacatttaaaatgagcaaatatttctcataggcgttacttacttggattttgaggaaaaagagtacagcttttgcagtggattatttctttgacaacagccacttctgttggtggtgggggaggtaccagtccaaggcctggtatcattgggttaatgggggtgattccagtcatcatgttgaggcttggatcaaagcctgggacacagattgagtctgtaaagtatacaagataacattttgactggagattaaatccatttttgttgttgtttttgccattttcctgtggattatttgactttatactttctatttttcaggaatttctcctggcataagatataatattatagaaagctatgccagaagggtaaagagaaaaaaagtaaaagatgaacattaaactacatgaaaaggaaattatattacttaaaatattaacatggcagaaagaacacagcatattaaaatgtaaaagcatgcaccatgaagcttcactattactgtgaatgcaattttctatttcttaacgttggtgtattgtttataccaccttatgacccagaatatgggaagaatatcatttaacattgaagtgctctgtgaatctaattgtcaacgtggtttcatcaaaagagccttcttacccaagtgacctagatttaggaaagttcaatttatatgtgcatactttataatgatgtattcaggtcccacctaacctatttcccctggaataaaaaaaaaaaaaaaagcaaaacaaagagtgattacaattactatggctgggttagatacatgcaggcataaaattagctatatacatttctggcttctattggataattgcactttcttcctataatttagtcaacaaagaattgacccacccttttgaaatctttatgccctgtattacacacacacacacacacacacacacacacacacttgaaaatagaaagtgtgcaaaacaaatgggttttccagctttttttttttttagtgtgataatgaagcaagtgatttcaaaggtggcatacagacactaataagtaagacctttctaacagcaggggctatgaaaatactrtactgagtagccacaaggg

SEQ ID NO: 34507 - DNA, 1135 bp, Homo sapiens
aggccagagrgctaagccctggtttcgatgagctggagaagagcctggaaaagtttctggccgggggattgggtaggggcctgcttgggaactgccccctgaaaaaccccactgggccttgattttgagacaagcaggtgttctgagaacttcttcctcccgcggccgcccctcctccaggccctctatttatagcgcttcctctcttgagctccgcgagaaaagtgctcttgaaacacacagaagagaaaaattctgaaaaatgtcaaaccacaggtcctttcccctctcttccgttaagatctaggtttgtactattcctggttgaccccagagtagacaaggtcaaatggggcatccttgggttatcacagtggcgttcagaaggtgctggctgagtcctggctcctctctgcagcctgtctgggactaactcaaggggcagggaacaggagacccttttccaccaagaaaatatggggccatgaaggtctagcctgatctagcacgtgagtttggagagatcaacagcaaagatggtgagatgggagttggaaaatatcagactctgaattggaagcctgatgccatgttctagttcaagctctgtttgggatatcacttctgtctctgagtatatttccctctctgtaaattaaaagagttggactagacccgtgttttacaaacttttaaaacacagagcacacacaacggaaacagaagtcttatgaaacagtatttgtccttattacgatgtattttcttttctgttctgtttccttttctcttctatctcatttttaaaaagttctgatcatggcccactaaaatgatctcgaaacccacaataaattattaaagtagtaaattttatgtatattttatcacaattaaaacaatttttttttcttgagacagggtcctgctctgtctgtcacccaggctggagtgcagtggcagtcatggctcactgcagcctccatctcccaggctcaagcaatcttccagcctcagcctcctgagtagctaggactacaggcatgcaccaccacactcagccaatttttaaattatttgtagagatggggtctcactgtgttgcccaggctggtctcaaactcctgagctcaag

SEQ ID NO: 34508 - DNA, 516 bp, Homo sapiens
aagggcatgtktcaaatgctggtatcatggttgataaatttgcattccactttccagcccaaaccagttcttcttgactttttttttttttttttttttttgagacagactcttgctctatctcccagactcttgctctgtctcccagactggagtgcagtggcataatctcggctcactgcagtcttcgcctcccgggttcaagcgattcttgtgcctcagcctctcaagcagctgggattacaagtgtgcaccaccatgcccggctaatttttatatttttagtagggacagggttttgccatgttggccaggctggtctcaaactcctgacctcaagtgattcacccatctcggcctcccagagtgctgggattacaggcgtgagccactgcccccggcctctccttgatgttttaggtgggaatgttttggctggttgggatgggctagttctgctaaggtgcttcagtcccttttctggccatttgttttgggaattcactgggtgacaca

SEQ ID NO: 34509 - DNA, 628 bp, Homo sapiens
tgcctcaatgcaaagagtcttctccttgtgaagacaaatgcaaaacaccagttgaaaacttccgttctccctattagctattcgtaaaaccccatcggtctgaggcttttcaactcgttctgacactttcttctctttaacttttttttgaaaactttagttaaggtagggatctgacctgcgggcacttggtttcctcctttgtgtccttgttacgcactcttctcaccaaggtttataaatgtcctttgaacatcagagaattcygggaatcttgctatgccagtcttcctcctgcccctcttccacacacaatggccagagagagtttcaatgatgtgcctgtcatcatggtgtccttgataactctcctttgtctccttagcaaaataagctaggccctttacaacccctccctacccactttccacccacctggctgcctgccccaggctccctgtgcgccagccaccaggaatctcgggcctctattttggctcctgcggggctccctgcctggaatgcccgtcctctccctgctggatgcgtctctcagatccagaagcctccccaaactcccagcagctgtggggtaagggaaaggggtccattaaaatggacagtgagt

SEQ ID NO: 34510 - DNA, 628 bp, Homo sapiens
tgcctcaatgcaaagagtcttctccttgtgaagacaaatgcaaaacaccagttgaaaacttccgttctccctattagctattcgtaaaaccccatcggtctgaggcttttcaactcgttctgacactttcttctctttaacttttttttgaaaactttagttaaggtagggatctgacctgcgggcacttggtttcctcctttgtgtccttgttacgcactcttctcaccaaggtttataaatgtcctttgaacatcagagaattctgggaatcttgctatgccagtcttcctcctgcccctcttccacacacaatggccagagagagtttcaatgatgtgcctgtcatcatggtgtccttgataactctcctttgtctccttagcaaaataagctaggccctttacaaccyctccctacccactttccacccacctggctgcctgccccaggctccctgtgcgccagccaccaggaatctcgggcctctattttggctcctgcggggctccctgcctggaatgcccgtcctctccctgctggatgcgtctctcagatccagaagcctccccaaactcccagcagctgtggggtaagggaaaggggtccattaaaatggacagtgagt

SEQ ID NO: 34511 - DNA, 811 bp, Homo sapiens
ggaggattggcatccccaggacggagccctaccaggcaggcagagttggagttatcccatcagtggcgcagaactttatggcctcagcgaatcccagccccagtttcagctcctctgggaactccctcccctactgagtctgtcttttcatttgaataatggggaggcctgaacaccttttaggggagggagggaggaatgagcagttttccaaaaagcgttctttttcacaagcttggaaaataggatggaggcgcgtctgagagatgaggatttggcgggccgtctggagtgggtaatgggaagctcaaggcgtgtgtgtgtgtgtgtgtgtgtgtgtgtgtgtgtgtgtgtgtgcagagacayagtcgagttagggaaactcttcgtctaggagagcctcttgtaaggtgatccgtctcctccttcctgccaggctcagaggccaccagcacagatggctagtctaccagctccccaggggagcctcctcactgcagtcctctgcgactccacactgcaccagtgtcagggactgtctaggagcaaagaggaggcctgagaggccgccaggcgaggaggtctcacagagcccagggcacggccacttcagagccttttggccttgctcctctcaaacgccctgggacttggggtggaggtggtgggtaggtcatggtaaaccaaggacttggtggttgcatgaaagcaagggacttgaaccagttcctgagctggttccattcctccttcacccacccagcaggctttcagggtgcctggcattatgctaggggtagaaggacaaact

SEQ ID NO: 34512 - DNA, 1319 bp, Homo sapiens
ctgagcctgcatttcctcaaccctaaaacggaggttataatctctggccctagtatgaatggctcagcaaggagtagggaaatcgtgtgtgtaaaacttgatgcatctcattttaggctcacaaaaactccacaaaaggtagccagcatatgtctacttgggaattgagaacatgaggcccgaggaccaggcctgagtcctcagtgggttttcaagatagaatttaaggccccttctccatgagactaaaggccacagccttccttctgtgccatatgtctgccaagcatggaaaacagatgggaacgcgatgaatacgagcagtgcattgccctccacrgccttccctccccaagtgaagtgtgtctttgtctattctggatctaagccttaggaaggacatagcacgctctcacatgcaaaacaacagagagaatgttgagttcaacatgagaaatcaaggtgggctcttggaactggttacacaaggttgcatctgaaaaggaaatcagtgtgttacgctttccagagcaacacttcccggcccgtggttcctgcagcaccctcagctgttagaagctcacatgcaggacacaggtgcatccacggctgtttgcagagtacaacttgcccctgctctccctatcaaaaaaggacgtcacaatgcacacgtatgagcttgacattagtataaaggaactttgacatctatttttaaacagctgctaatgtatcaagagtgaatcatttgatgccatctatactttattattaagaaattactaggatgcccaagcagtcctatagagaaaggaaggcattttcaacaaatggtggtggagcaacgggttattcatataaggaaagaaagaaaaatctcgacaccctacttcacacaaaattaattcgagttggcacacagacctaaatacaaaagccaaaaacttactacctaatagcttaacgaaaaagacatatgggaccatctttttgaccttggataggcaaagatattttagaaaggacacagaaaacattagtaaagaaaaagatgatacactgaactttttcaatatttaaaacttctgctttttgaaatatgttattgagaaaatgaacagggaaaccacagattgggaaaaaatatttgtaacacatatatttgacttatatccggaatatacaaagaattcccacaacttgataataatgttttttaaaaccattttgaaaaaatgggcagacttgaaaaaatacttcacaaaaagattatagatgaccagtaagatgaaaagatactcaacattatttgtgagcag

SEQ ID NO: 34513 - DNA, 1319 bp, Homo sapiens
ctgagcctgcatttcctcaaccctaaaacggaggttataatctctggccctagtatgaatggctcagcaaggagtagggaaatcgtgtgtgtaaaacttgatgcatctcattttaggctcacaaaaactccacaaaaggtagccagcatatgtctacttgggaattgagaacatgaggcccgaggaccaggcctgagtcctcagtgggttttcaagatagaatttaaggccccttctccatgagactaaaggccacagccttccttctgtgccatatgtctgccaagcatggaaaacagatgggaacgcgatgaatacgagcagtgcattgccctccacggccttccctccccaagtgaagtgtgtctttgtctattctggatctaagccttaggaaggacatagcacgctctcacatgcaaaacaacagagagaatgttgagttcaacatgagaaatcaaggtgggctcttggaactggttacacaaggttgcatctgaaaaggaaatcagtgtgttacgctttccagagcaacacttcccggcccgtggttcctgcagcaccctcagctgttagaagctcacatgcaggacacaggtgcatccacggctgtttgcagagtacaacttgcccctgctctccctatcaaaaaaggaygtcacaatgcacacgtatgagcttgacattagtataaaggaactttgacatctatttttaaacagctgctaatgtatcaagagtgaatcatttgatgccatctatactttattattaagaaattactaggatgcccaagcagtcctatagagaaaggaaggcattttcaacaaatggtggtggagcaacgggttattcatataaggaaagaaagaaaaatctcgacaccctacttcacacaaaattaattcgagttggcacacagacctaaatacaaaagccaaaaacttactacctaatagcttaacgaaaaagacatatgggaccatctttttgaccttggataggcaaagatattttagaaaggacacagaaaacattagtaaagaaaaagatgatacactgaactttttcaatatttaaaacttctgctttttgaaatatgttattgagaaaatgaacagggaaaccacagattgggaaaaaatatttgtaacacatatatttgacttatatccggaatatacaaagaattcccacaacttgataataatgttttttaaaaccattttgaaaaaatgggcagacttgaaaaaatacttcacaaaaagattatagatgaccagtaagatgaaaagatactcaacattatttgtgagcag

SEQ ID NO: 34514 - DNA, 1319 bp, Homo sapiens
ctgagcctgcatttcctcaaccctaaaacggaggttataatctctggccctagtatgaatggctcagcaaggagtagggaaatcgtgtgtgtaaaacttgatgcatctcattttaggctcacaaaaactccacaaaaggtagccagcatatgtctacttgggaattgagaacatgaggcccgaggaccaggcctgagtcctcagtgggttttcaagatagaatttaaggccccttctccatgagactaaaggccacagccttccttctgtgccatatgtctgccaagcatggaaaacagatgggaacgcgatgaatacgagcagtgcattgccctccacggccttccctccccaagtgaagtgtgtctttgtctattctggatctaagccttaggaaggacatagcacgctctcacatgcaaaacaacagagagaatgttgagttcaacatgagaaatcaaggtgggctcttggaactggttacacaaggttgcatctgaaaaggaaatcagtgtgttacgctttccagagcaacacttcccggcccgtggttcctgcagcaccctcagctgttagaagctcacatgcaggacacaggtgcatccacggctgtttgcagagtacaacttgcccctgctctccctatcaaaaaaggacgtcacaatgcacacrtatgagcttgacattagtataaaggaactttgacatctatttttaaacagctgctaatgtatcaagagtgaatcatttgatgccatctatactttattattaagaaattactaggatgcccaagcagtcctatagagaaaggaaggcattttcaacaaatggtggtggagcaacgggttattcatataaggaaagaaagaaaaatctcgacaccctacttcacacaaaattaattcgagttggcacacagacctaaatacaaaagccaaaaacttactacctaatagcttaacgaaaaagacatatgggaccatctttttgaccttggataggcaaagatattttagaaaggacacagaaaacattagtaaagaaaaagatgatacactgaactttttcaatatttaaaacttctgctttttgaaatatgttattgagaaaatgaacagggaaaccacagattgggaaaaaatatttgtaacacatatatttgacttatatccggaatatacaaagaattcccacaacttgataataatgttttttaaaaccattttgaaaaaatgggcagacttgaaaaaatacttcacaaaaagattatagatgaccagtaagatgaaaagatactcaacattatttgtgagcag

SEQ ID NO: 34515 - DNA, 1319 bp, Homo sapiens
ctgagcctgcatttcctcaaccctaaaacggaggttataatctctggccctagtatgaatggctcagcaaggagtagggaaatcgtgtgtgtaaaacttgatgcatctcattttaggctcacaaaaactccacaaaaggtagccagcatatgtctacttgggaattgagaacatgaggcccgaggaccaggcctgagtcctcagtgggttttcaagatagaatttaaggccccttctccatgagactaaaggccacagccttccttctgtgccatatgtctgccaagcatggaaaacagatgggaacgcgatgaatacgagcagtgcattgccctccacggccttccctccccaagtgaagtgtgtctttgtctattctggatctaagccttaggaaggacatagcacgctctcacatgcaaaacaacagagagaatgttgagttcaacatgagaaatcaaggtgggctcttggaactggttacacaaggttgcatctgaaaaggaaatcagtgtgttacgctttccagagcaacacttcccggcccgtggttcctgcagcaccctcagctgttagaagctcacatgcaggacacaggtgcatccacggctgtttgcagagtacaacttgcccctgctctccctatcaaaaaaggacgtcacaatgcacacgtatgagcttgacattagtataaaggaacttygacatctatttttaaacagctgctaatgtatcaagagtgaatcatttgatgccatctatactttattattaagaaattactaggatgcccaagcagtcctatagagaaaggaaggcattttcaacaaatggtggtggagcaacgggttattcatataaggaaagaaagaaaaatctcgacaccctacttcacacaaaattaattcgagttggcacacagacctaaatacaaaagccaaaaacttactacctaatagcttaacgaaaaagacatatgggaccatctttttgaccttggataggcaaagatattttagaaaggacacagaaaacattagtaaagaaaaagatgatacactgaactttttcaatatttaaaacttctgctttttgaaatatgttattgagaaaatgaacagggaaaccacagattgggaaaaaatatttgtaacacatatatttgacttatatccggaatatacaaagaattcccacaacttgataataatgttttttaaaaccattttgaaaaaatgggcagacttgaaaaaatacttcacaaaaagattatagatgaccagtaagatgaaaagatactcaacattatttgtgagcag

SEQ ID NO: 34516 - DNA, 655 bp, Homo sapiens
ggatccaactctagtttttaggaaaccaacacaaatatttatttttcacaacaaccaacaattatttcttttataaattcacattcacaaccattttcccactctaaaattggcacaaatttgaaaagcataatatataaagctggtgaggatatcgtgagataaacactctcattcactgatgctgtgagtttaaatgagaacaagcttttttaaaagcaatggcaagctctccctctccctctccctctccctctccctctccctctccccacggtctccctctccctctctttccacggtctccctctgatgccgagccgaagctggactgtactgctgccatctcggctcactgcaacctccctgcctkattctcctgcctcagcctgccaagtgcctgcgattgcgggcgagcgccgccacgcctgactggttttcgtatttttttggtggagacggggtttcgctgtgttggcggggctggtctgcagctcctaactgcgagtgatctgccagcctcggcctcccggggtgccgggatggcagatggagtcgcgttcactcagtgctcaatgctgcccaggctggagtgcagtggcgtgatctcggctcgctacaacctccacctcccagccgcctgccttggcccccc

SEQ ID NO: 34517 - DNA, 1323 bp, Homo sapiens
ttgtgagattttaatgtgtatctttmgcccataatacactgtaactgtgagtacaatagctttcagtgagttttttgagtcttagcaaattatcaagcctgaagttggtttcgggaagctcttcaacttgcagttgatgtcagaaatgagggcagtcttgaagagtacgtatacctgtaaactctgtagtttaactctgggtacagctaaactaccttttataaagggaacaaataatttactctccttttagaacaagaactctagttgatcatttactagtatacatttttacaattaaattcccaaaatatgatttatttaaaaagacaagatataagaagataacagtaatacagagtttaagactaagaatgaggcaggagaatagggtctggaggcggggaatctaaggccgttttgcactgacttcctggaacaaaattgaaaggaaaaccctaactttctacgcctaagtaacaaaatgaccagaggctactccctttgcaaacccctaccttttctgctggcagatgagaaattgaaagtacctctgactggttggtttttgcaaccaatcagacgtttgcataggagtgtaactttgtaacttcacatcagcctctgattggttgctgtccccaaccaatcacactgactgtgggccaagtcttcatttgcacagaagggcagctttgtaactccactttagcctcagattggttgctttccacaaccaatcagatgtttgctaggagtgtgacctttgtaacttcacttcagcctctgattggttgctttctgcaaccaatcagactgattgcaggccaccacttcatttaaatggggtgaacactaattggccaatgggaaacctctagcgggtatttggaccttagaagattctgtatccaggtccttgagcggctgctcaggcctgctcccaccctgtggagtatgctttcattttcattaaatctcttcttttcttgctttattctttccttgcgttgtgtgttttgtccaattctttgttcaccagtaacaagagtatataataactgtcagagaattggtttgctaaatgccttcaaaagcctttaccaaagaaagcaattaatacatactgcaactagttacatgtgtatctcctcttctagattcagagcatcctgctggcaaaatctagtttcttacaccgatattacctaggctttgcttaggctttgatagatagcagatattcaatactttttaaaaatttgtttattgatacataaatttgtatatttttatagggtacacgtgatacttggttacatg

SEQ ID NO: 34518 - DNA, 1323 bp, Homo sapiens
ttgtgagattttaatgtgtatctttagcccataatacactgtaactgtgagtacaatagctttcagtgagttttttgagtcttagcaaattatcaagcctgaagttggtttcgggaagctcttcaacttgcagttgatgtcagaaatgagggcagtcttgaagagtacgtatacctgtaaactctgtagtttaactctgggtacagctaaactaccttttataaagggaacaaataatttactctccttttagaacaagaactctagttgatcatttactagtatacatttttacaattaaattcccaaaatatgatttatttaaaaagacaagatataagaagataacagtaatacagagtttaagactaagaatgaggcaggagaatagggtctggaggcggggaatctaaggccgttttgcactgacttcctrgaacaaaattgaaaggaaaaccctaactttctacgcctaagtaacaaaatgaccagaggctactccctttgcaaacccctaccttttctgctggcagatgagaaattgaaagtacctctgactggttggtttttgcaaccaatcagacgtttgcataggagtgtaactttgtaacttcacatcagcctctgattggttgctgtccccaaccaatcacactgactgtgggccaagtcttcatttgcacagaagggcagctttgtaactccactttagcctcagattggttgctttccacaaccaatcagatgtttgctaggagtgtgacctttgtaacttcacttcagcctctgattggttgctttctgcaaccaatcagactgattgcaggccaccacttcatttaaatggggtgaacactaattggccaatgggaaacctctagcgggtatttggaccttagaagattctgtatccaggtccttgagcggctgctcaggcctgctcccaccctgtggagtatgctttcattttcattaaatctcttcttttcttgctttattctttccttgcgttgtgtgttttgtccaattctttgttcaccagtaacaagagtatataataactgtcagagaattggtttgctaaatgccttcaaaagcctttaccaaagaaagcaattaatacatactgcaactagttacatgtgtatctcctcttctagattcagagcatcctgctggcaaaatctagtttcttacaccgatattacctaggctttgcttaggctttgatagatagcagatattcaatactttttaaaaatttgtttattgatacataaatttgtatatttttatagggtacacgtgatacttggttacatg

SEQ ID NO: 34519 - DNA, 1323 bp, Homo sapiens
ttgtgagattttaatgtgtatctttagcccataatacactgtaactgtgagtacaatagctttcagtgagttttttgagtcttagcaaattatcaagcctgaagttggtttcgggaagctcttcaacttgcagttgatgtcagaaatgagggcagtcttgaagagtacgtatacctgtaaactctgtagtttaactctgggtacagctaaactaccttttataaagggaacaaataatttactctccttttagaacaagaactctagttgatcatttactagtatacatttttacaattaaattcccaaaatatgatttatttaaaaagacaagatataagaagataacagtaatacagagtttaagactaagaatgaggcaggagaatagggtctggaggcggggaatctaaggccgttttgcactgacttcctggaacaaaattgaaaggaaaaccctaactttctacgcctaagtaacaaaatgaccagaggctactccctttgcaaacccctaccttttctgctggcagatgagaaattgaaagtacctctgactggttggtttttgcaaccaatcagacgtttgcataggagtgtaactttgtaacttcacatcagcctctgattggttgctgtccccaaccaatcacactgactgtgggccaagtcttcatttgcacagaagggcagctttgtaactccactttagcctcagattggttgctttccacaaccaatcagatgtttgctaggagtgtgacctttgtaacttcacttcagcctctgattggttgctytctgcaaccaatcagactgattgcaggccaccacttcatttaaatggggtgaacactaattggccaatgggaaacctctagcgggtatttggaccttagaagattctgtatccaggtccttgagcggctgctcaggcctgctcccaccctgtggagtatgctttcattttcattaaatctcttcttttcttgctttattctttccttgcgttgtgtgttttgtccaattctttgttcaccagtaacaagagtatataataactgtcagagaattggtttgctaaatgccttcaaaagcctttaccaaagaaagcaattaatacatactgcaactagttacatgtgtatctcctcttctagattcagagcatcctgctggcaaaatctagtttcttacaccgatattacctaggctttgcttaggctttgatagatagcagatattcaatactttttaaaaatttgtttattgatacataaatttgtatatttttatagggtacacgtgatacttggttacatg

SEQ ID NO: 34520 - DNA, 592 bp, Homo sapiens
tgtctttcatctaagagttttagaacactcagggaggtctgaactgtcatataagaagtctatctacaacactgttgacacttcttttaggtactctgatcaacattcccatttgagcccagccttctaactctccctgccaagacaaaaaaaaaaacatgtaagggaggctatcttggatggttcagaccagcctctctgccaaataaaaaatactctgtgacatctattgacatgtggaatggaacagtcagcatgcctgaattcatggttaacaaactgatcagatacattaaaatgatgattgttttatgccactaagatttggggtagtttgttatgcagcaaaagataatggaacagatacatataaaggtcagagatatgcagaatttctgtgagttttttgaggcaacatataaaatatagggcactatttttttccagtttaaactatctttttaaaacattattaaatgtttaaaattattaaactttttaaaacattattcttgaaagactagcagactctaagatgaaagaaaaggatasaaaaaaagtaacatacaataaataaaccaaaagaaaaaag

SEQ ID NO: 34521 - DNA, 1011 bp, Homo sapiens
tccaagagcaacttttgagacaaaagttctagtgcaaataagttgttaggaaagattccagataaatctggtaggcaaatggtgaaggatagcagacactatctgtatcctactaagcatcctcaaatcttctcatttcaatttgtgtgttcgatttacagagagcagtatctgcatctccatgcataaggattttccccaatatgtagcccactctgtgcagttggcaggctagaagtaccagggaattaaatgtaccaccccaaaagccctcaattaataatttatggttgttggtatataatctcagattatctcttctcttggttgacacaactctgaggcatgcttttgccctttgccctttcccctagagtgaagcaatcctgtggtttctagattagtaacgcacacttcgagcttggtttcttctctgtagcacctacccatttcccttctaatgtttcctgcatctcccaaatactatgcctctgcttctggagggtcataaaataagacaggaagagggaaagtaaagagaaaactgtcattcaaaggaaagctgtaaagcaagttaccagtataagcaagttcctgcatctcccaaatactatgcctctgcttctggagggtcrtaaaataagacaggaagagagaaagtaaagagaaaactgtcattcaaaggaatgctgtaaagcaagttaccaatataaagcaagttgccactagggaattatgggagacaatggggaataggagcctcagaattattctacacaaaagaaaagggagcctctatactgatatactgacacccaccagtcactggttaagtgatgatgaccttagaatgtttgtattctctggcgtttctggcctgctgtggacaaagtagagaatgagattgctactagagaaaactctcagaaaagtaaatgtaggtgctgacttttgtaagccaggccagtctgcctacggaatggggaagaaaggttagtttcttccacactg

SEQ ID NO: 34522 - DNA, 1011 bp, Homo sapiens
tccaagagcaacttttgagacaaaagttctagtgcaaataagttgttaggaaagattccagataaatctggtaggcaaatggtgaaggatagcagacactatctgtatcctactaagcatcctcaaatcttctcatttcaatttgtgtgttcgatttacagagagcagtatctgcatctccatgcataaggattttccccaatatgtagcccactctgtgcagttggcaggctagaagtaccagggaattaaatgtaccaccccaaaagccctcaattaataatttatggttgttggtatataatctcagattatctcttctcttggttgacacaactctgaggcatgcttttgccctttgccctttcccctagagtgaagcaatcctgtggtttctagattagtaacgcacacttcgagcttggtttcttctctgtagcacctacccatttcccttctaatgtttcctgcatctcccaaatactatgcctctgcttctggagggtcataaaataagacaggaagagggaaagtaaagagaaaactgtcattcaaaggaaagctgtaaagcaagttaccagtataagcaagttcctgcatctcccaaatactatgcctctgcttctggagggtcataaaataagacaggaagagagaaagtaaagagaaaactgtcattcaaaggaatgctgtaaagcaagttaccaatataaagcaagttgccactagggaattatgggagrcaatggggaataggagcctcagaattattctacacaaaagaaaagggagcctctatactgatatactgacacccaccagtcactggttaagtgatgatgaccttagaatgtttgtattctctggcgtttctggcctgctgtggacaaagtagagaatgagattgctactagagaaaactctcagaaaagtaaatgtaggtgctgacttttgtaagccaggccagtctgcctacggaatggggaagaaaggttagtttcttccacactg

SEQ ID NO: 34523 - DNA, 1958 bp, Homo sapiens
  misc_feature (1)...(1958): n = A,T,C or G
ctttctacattgaaacagatgggatctcagggctattgtgatttctgtaatagggttaatgtgacctcatttgtattcactggttggcaagtcccaggacttttgggttcccccatgtttttaaannnnnnnnnnnnnnnnnnnnnnnnnnnnnnnnnnnnnnnnnnnnnnnnnnnnnnnnnnnnnnnnnnnnnnnnnnnnnnnnnnnnnnnnnnnnnnnnnnnncccaccaaaatggggggactaaaaactgctttttcgaatcgagctcagtcccatctgtagtcttcatgctgtttgagcagaaaatctggggttcatttacctaaattttgttctagaagctgaggatctgaactcaaaatgtgcatgtccctgaggccccatggcccactttggggggagagttgcaaccataggagagtcagagcagggcccttcaaagtgtgggcctcagggcagcgcctcttgcctgggttaacctgacaccagtatgcacaatttaaaaatgtggcgttccactggccatctttggtcagaaactccaacagtcagtgatgaagtgctatgaaaataacttcagtgagctgataaaggggtggataccaaggaccagctgaagtgatgaccgtccactcctgctgcttagcatgcagccattcctgtgcagctgagcactatgaggacgagactctagaactcatagatagttagctgggtgtaggcagcttaaatgcagtgaggcgtgaataggccttgatagccataggtttcaggtgtcgatgcatgagaaagtactggatacacagtataaagttgtgtccaactatggagtttgcttcatggagctctcctgggcaccattcctagtaacagagcaattattggcattactggtgagaggaggtatcccaggagttgacattttgcccttgtcattttgaagtagcagcctccaaagagctgtatgtctgcacagcctaggggccctttctggctgtgctggtcattggtgaactggagagctcaggagccacattatccgtgcccccatccactcctgtgtcctgcttgtgcattgtgcctgtcttcaggcagccagacagcttgtctgccctaggtgttctcctgagaaaaacccatggatatttcattagataataccactgataagagtggctgccattcagtggttttgatttgccagactgtgctaagtgattgacatgcgacttactgaattctcacatcagcactgtgaaagatttgttctcatccccatttcctaaatgagcaagttgaggttgaaagaggttaagtaatttgctctaagtgacaggtagtaagtgacagagacaatatatagactcagatctgcttgacttgaaggcctaagtccctaaccggaaccctaacctcccagctattctctcccttatccaggcctggtgtctctgcatagaattaatagtgaacttctcccaacttgttacttagggttcacgctaaacgtacccgtgtagtcaattcttactgcatgcacagtccactatgctgcggtggaagctcagagagtaaggcagggatgtgaaggcacgcacagcggacagtggccacagctgagtgagttacattaggtaaaggacaacctcaacctcatmgcatttctatctccttgacagggcaaataattaagctaaactttaccctctgtgcttggcaaaatcctttttctgtctcctataccatccctgcctcacagaggaccacggcctacctgaatggaagggaagaatgctgttgacagtgtaggtggaagctggatttcagtcccagctctgtgacttgcaagctctgtgaccttgaaaaatttacttaatctctttatgcttcagtttccacatatgtcaaatggagatcataatggtatccatctcatgggattgttgtgagtatta

SEQ ID NO: 34524 - DNA, 1958 bp, Homo sapiens
  misc_feature (1)...(1958): n = A,T,C or G
ctttctacattgaaacagatgggatctcagggctattgtgatttctgtaatagggttaatgtgacctcatttgtattcactggttggcaagtcccaggacttttgggttcccccatgtttttaaannnnnnnnnnnnnnnnnnnnnnnnnnnnnnnnnnnnnnnnnnnnnnnnnnnnnnnnnnnnnnnnnnnnnnnnnnnnnnnnnnnnnnnnnnnnnnnnnnnncccaccaaaatggggggactaaaaactgctttttcgaatcgagctcagtcccatctgtagtcttcatgctgtttgagcagaaaatctggggttcatttacctaaattttgttctagaagctgaggatctgaactcaaaatgtgcatgtccctgaggccccatggcccactttggggggagagttgcaaccataggagagtcagagcagggcccttcaaagtgtgggcctcagggcagcgcctcttgcctgggttaacctgacaccagtatgcacaatttaaaaatgtggcgttccactggccatctttggtcagaaactccaacagtcagtgatgaagtgctatgaaaataacttcagtgagctgataaaggggtggataccaaggaccagctgaagtgatgaccgtccactcctgctgcttagcatgcagccattcctgtgcagctgagcactatgaggacgagactctagaactcatagatagttagctgggtgtaggcagcttaaatgcagtgaggcgtgaataggccttgatagccataggtttcaggtgtcgatgcatgagaaagtactggatacacagtataaagttgtgtccaactatggagtttgcttcatggagctctcctgggcaccattcctagtaacagagcaattattggcattactggtgagaggaggtatcccaggagttgacattttgcccttgtcattttgaagtagcagcctccaaagagctgtatgtctgcacagcctaggggccctttctggctgtgctggtcattggtgaactggagagctcaggagccacattatccgtgcccccatccactcctgtgtcctgcttgtgcattgtgcctgtcttcaggcagccagacagcttgtctgccctaggtgttctcctgagaaaaacccatggatatttcattagataataccactgataagagtggctgccattcagtggttttgatttgccagactgtgctaagtgattgacatgcgacttactgaattctcacatcagcactgtgaaagatttgttctcatccccatttcctaaatgagcaagttgaggttgaaagaggttaagtaatttgctctaagtgacaggtagtaagtgacagagacaatatatagactcagatctgcttgacttgaaggcctaagtccctaaccggaaccctaacctcccagctattctctcccttatccaggcctggtgtctctgcatagaattaatagtgaacttctcccaacttgttacttagggttcacgctaaacgtacccgtgtagtcaattcttactgcatgcacagtccactatgctgcggtggaagctcagagagtaaggcagggatgtgaaggcacgcacagcggacagtggccacagctgagtgagttacattaggtaaaggacaacctcaacctcatagcatttctatctccttgacagggcaaataattaagctaaactttaccctctgtgcttggcaaaatcctttttctgtctcctataccatccctgcctcacagaggaccasggcctacctgaatggaagggaagaatgctgttgacagtgtaggtggaagctggatttcagtcccagctctgtgacttgcaagctctgtgaccttgaaaaatttacttaatctctttatgcttcagtttccacatatgtcaaatggagatcataatggtatccatctcatgggattgttgtgagtatta

SEQ ID NO: 34525 - DNA, 588 bp, Homo sapiens
tgaggccgtagtttcattatacagtacatatctaatgcgcttagctaagtgaattatatttattaaatttaggtgtttrtgatatctatataatgcacctagtacaatgcctggcatacaatagatgcatactacatactaactgaccatctctctcctcttgctgttcctgttcctcagtagcgaccctcggtggatggatggcagctgccaatctggagcttctagtgattttgtcctgagctcccttggggacctatcacattgagccaaactcctttgcttgcagagagctaattggaaattatatctcaggtagcttccttggaaattctatgttttataatcaagggacgttcactcctgtcattgtttagtaattatttcaagctggacattacaaacaggcaaactagaaggatggtattttggatggaaaatatctaggataagagattacctagaaattccagatccattcagaccttttaatccccaaaaggcaggtaatgtggagaaactagctgtttgcatatgtttttgtaagtcctcctcactgaaacagccattagacattctaatgagaat

SEQ ID NO: 34526 - DNA, 548 bp, Homo sapiens
attcccatttttgcaaacaaattctagtcataaaaaacaaacttggaaatgtcctgtaaattttgttggccagttaggatwgtgtatttatttctagtttcttactgactactttaaaaaaattgaggcaacagataagtcatcctcatccacataactgcttaagagaggcattaattctgtgctatgaacccctaacttccctcattaaactagtctgtcctgagcaacagaggcacctagtggttgttacaggaaactctctaatgctgtttctttagtgcttctcaatctgcagcctgcaggatcttcaagagcgctagttaaaacacaaattgctggacaccactcccagagtttctgattcagtagatctaggatggggctcagtaatatgcatttctaacatgttcccaggaaatttaggaaagcaatgccgctagtctgggagccacactttgagaatctctgctttaccataatggtcgttcttctaaggaacgtatgtaaaggttgtatgccatgattttcaacacttttgctgacca

SEQ ID NO: 34527 - DNA, 548 bp, Homo sapiens
attcccatttttgcaaacaaattctagtcataaaaaacaaacttggaaatgtcctgtaaattttgttggccagttaggattgtgtatttatttctagtttcttactgactactttaaaaaaattgaggcaacagataagtcatcctcatccacataactgcttaagagaggcattaattctgtgctatgarcccctaacttccctcattaaactagtctgtcctgagcaacagaggcacctagtggttgttacaggaaactctctaatgctgtttctttagtgcttctcaatctgcagcctgcaggatcttcaagagcgctagttaaaacacaaattgctggacaccactcccagagtttctgattcagtagatctaggatggggctcagtaatatgcatttctaacatgttcccaggaaatttaggaaagcaatgccgctagtctgggagccacactttgagaatctctgctttaccataatggtcgttcttctaaggaacgtatgtaaaggttgtatgccatgattttcaacacttttgctgacca

SEQ ID NO: 34528 - DNA, 1219 bp, Homo sapiens
ggcaagctgatcaccccaaggctcaaggctcaggaaagctgcccaggataaatgaagtcttgtctgcatgtcccctacttgcaccacagctgagggaccctagaaagcatgckccattctgagttttatacccaggggcaacatgaaacactgagctaaagcactgtaagacatcctgttctaggagaaactggaacagagcacaggctattctggtcacttcctcttcatcccaggatattgcattctcagcacattctacagttgttctgagaactacaagggaggaaatgaggaggagctaggttagttcaaggtcacctggagaactctcctgcaactcatcacatttcaaaatgagtatatatctgtcccctcaatctgagctcctcattctgtgctccctggctcagggtactatggtgttgttctgaatgataccatgttctatcagggaaaatgaatcaagagctgtgaagttcattctagaccccttctgcttttccttaagtttgaggggaaaagacttttgaaatccgacttcaagtagcaccaagtccatcacactgtctttatcctcaccactggtgactttcttctctcccttcctatttgtggatgaatgctacaggccctttgctttccagttcactgtcttctgatatgctttatcttctaggaggtggatcatttcaaaattcaagttttcttatgttacttcttctagctttgaaactcaacaatttcttctcttaacctttaggataaatccccaaatccaaagcctagcaaataaagccttttgttacctgaccactgcctccttctcctgtttcacctctcctcatcctcttgtgtcctctctgggttccacccatgccaaaatatatgcccttccttggagactccacacttttccttgctacttcacctttaaaaatgtcattctctttggctggaataccctctcctctctttatcattaggttaattccatcttattttttatgaccaagctcaagtgttacctcctctgaaaaagccctctgtgaacgcttgtggcatatgttaattagttaggcagatattaggactctgagcagaagtgacagtgtgacttatggaccaacactgttagtagtcaatgtgctgcttccattcctctctttctctgccatgaaaccttggagtccacacattacaaatggcatagctacag

SEQ ID NO: 34529 - DNA, 1082 bp, Homo sapiens
accaagctgcccttgttttcctgcagatatggtatttttgtttattttagtgcatactgtttggcatcttaaagtagttttttattccagtcatttcacaagcaaactgatttcactggtaaattccccccataatggcaatttcaccacttattttcattttactaggagacggcctgtggattattaagcaggtgtcagctctcacccacccacataccttcaatgcaatcagaaaaagatgtcaacagttctaaggtgcgcccagatgatatgtagtttccacagtttcacatttggaggcatatatcatgctatttatgcatataggttagctcaagtatttgggatttgttttaaagcctactaaattaatttgaggatctctgaatgcaacgatacagattttaattggctatgttctagtaatatatgattttatactgaattaaaatatactgttattggtattagtttaggttttaaataatattttgtatttcacaaagcccatttaaaaaggtatttgactagaatgaataatactctatgagactggcaaattcaggaaaaggcagtctgtggcatcttacacctataagttcaactgatgtcgggggttggcgtgatccattccgctcgatgagctaactattcctgttataatcacaccttcctccaatgcagtaacactcacatattaccaattaggcagatactttttcatccagtccctaatatagtatttttcaaaatgccagttacaatcctttagtgagccataaaaacaatttagtgagtttcatacggtatctaaaacaatagaattgaatagatcagagtgcctcacaggcaaatttcagtgacatgtatgtgtgtgtataattacatggtaatatagattatattgcttattatgggttgtaaaaaaaaaagtttgaaatacacaaatgaacctaatattggttccctcttgaaatgattccatgatttggaaatcaaggatttttatctcttaagaagccagagtccttagatcgctacaaagctaatggctatcrccatgtccaaggaatggctct

SEQ ID NO: 34530 - DNA, 511 bp, Homo sapiens
aaaaaaaaaaaaagtgaagagatcatttatcatggaaaaacattaaacacagttagaaaactactctaaaaagacttcaactccaaatcacgttattaagagagatttcaagccctcaaaatatagatatgtcttgsctgggtgcggtagctcacacctgtaatcccagtactttgggaggccaagatgggaggatcgcttgagcccaggagttcaagaccagcttggggaacatggtgagacttcatctctacaaaaaaatttaaaaattagctggatgtggtggtgcacacctgtagtagcagctatttggaaggctgaggtggaaggatcaattgagccaaggagatcaaggctgcagtgagccctgattgtgacactgtactccaacgtgggtggcagagcaagaccctgcctcaaaaaaagaaaaaaagtagatatgtctctctatataaattatcccagaacacaggagaagagaaaaattcccagttcactttataaaattaac

SEQ ID NO: 34531 - DNA, 2208 bp, Homo sapiens
gagtgccacccagtggtgaccactgggattttggaccaggaaatccccagacctggtaggtagtagcttgcgattgggcattaattgaaactgcccctaagactgaaggacatactctcatcttaaagcctgaaatacacatgttgtcttgggggatggcagagatacagttcaataaggaaggcactgctcagaagagttccataataaaacggaaatggtttctacaggagcatgatacagaggaatgcaaggagggcttttcccctctggccggtttcggaaccagctgaggatctgccaggtctatggcatcatggatggtgccccatgaacagctctcaatggacaacaaagagctatttggtttgtggttggcagtttcaaggtggatggacaacatccagatctgaaggccaccacatcatgagcaataatgggaaaactcatattgaaaaaggcaagaacaaatcagcccagctagatgaactgcatgctgcgtttcttgctgcgatgaaagaatggaacaatcataagagctcgtgtttgggtttttactgactcatgggcagtggccaatggcctggccatgtgaccaggcagaggggcaatggcaaactgggctgtgaagggatgccaacatggagcacagcactgcaggaatttaaggggcacattaaagtaggtcatatcaatgcccacctgaagaatccctcccaggatctgtgatcagatccggtaggtggatatcctggtgaacaaacttgaggtggccacctaggttcaacaaaggagtgggtgacagtgcagggatgggctgctcagaaacatgtccctcctgcaccctcagagacacaaatgccaacaagaaatgccttgacaacaagaagatggagaccacaggtggctaaggggcagattccccagagggagaasaccgcacatgcagctggcaggtggactgtacgggacccctgctggtagccctggagggagtttataaatgggttctggcaggaatagacacttactctggactgagctttacctacccagtggcagatgcaaatgctcaagatactataaaagtactgagcagaagtcactgtatcaatgtgtgtcactaagttacataccttcggaccaaggaacacactttacaacctacacagggcaaggagacatcccatcaaatgggtatatcatgctgcacattatcctcagagtagtttgtgagagaattgaaatgggcaatggaaatgtttgttatcttacatggggagagataaaagcgtgaaggcttacacacctccatgcatgtgtgctcacacttaacatgtggtggtcaaggaggatccccactagatagatccctccactcttggggtgatctggggaagatggccgggaaggatgctgctacgactatgcagttcttcacaacagcacctcaactttcttgtctcctacctgctgaaaagagcctgagatcaggcccacagctgcaagtgttggaagcatctgccactgggtaggtaaagctcacactaccacacctagctaatttttgtatttttagtagagacagggtttcaccatgttggtcagactggtctcgaactcctgatcttgtgatccgccggccttggcctcccaaagtgctgggattacaggcatgagccaccgcacccggccagaggcaggaatgattcttaagtgagaaacagttgttatatcttttaacatttgtgtcagaaatcctaaaggtctgatgggatagctgtgcctccactgcatctggcaaatcagaggtggacagtgagtgcagctgtatctcctggtggtcagggcagcctcacagttcgtctctttgcagccctaccttacatgactggaaatggccctgcgggaggcacctgctgaagtggtattgctgctggccatctgggcctacactgctggccatctgggcctacacagtggatgaacctaacatcccttcatcctttctaaaggtgtgaaagttgggtgaaaatcaatgacaaatggagagaaggagaaatagtagctgagggcaaaggaatgaataaatgggttatgcaatgagagaaacccaacaatatattggtgcctcgaggtaagctcagagcaagggaattatattgtctcttagcacagttataccagatgcctgaaagggtaaacttg

SEQ ID NO: 34532 - DNA, 1320 bp, Homo sapiens
tctaggctgcgaggaaactaagacggccaaatcccacccactccaccccaccttgaattccttctaaagcttccacaggttcctagactcatcttgcatgctctcagcaataagtagtcctcacagttgagccagatccctccagccagtttaaaagttctgcccaaatctacttttcagatggccccggtccggctatatggactcacccagaacaaagctaactttgcacgtgacaacccctactattctgacctcactagattaggtttcatgagaccagcccttaggtctgttttgctgtatcctcagcactcaatatggtgccacgtacagagtaagcacttaggacatgttgtaggatgaatgaacaagtgaaagagtgagagaataaattcactcctgagtcttctcctctcctggccaaatatccccagttccttcaacagttctgatgtggctcctggacctgtcagcacttgttttagatattccccagcatgtccgtgttaaatgtggatttcaggaacttacacaatagtcctggtgtggtgtggggtgcacgattcacaggaaccataacttcccttatttagaacaacctattttaatgaggcaactcaagatcttaagagccattatcaaagccactaatggttaaaaaatctggactatatttttaggggttggggccactgctatcaatcccagcagcatggtgttcctttttgaccattcaagactctgcccaatgttgtggcaaaggcaagggtaaggagtcaaaagacctggatatgggcattgggctggtagcagtagctactatggagtcccaggttcactctgggctaaacactgtgctaaatrtctcacaaatatgttctcagttaacgcttgttgcaagtagagtactgtttttatccattttttacaaatagagaaattacctaagcttatttctggcatttcattgtgcaggaatctccagctcgtcactcaaactctctgggcttcatttattttatctgtcaaatggagataataataatatctgtcttggatagtcactgggaagatttattaaaaggttgcagtgaaagtaactgataaagcctataaacttgcaatacattattataaaggctccgattttccagagcaaagtctggagacatagatttcaatttcctctctgtgtctgtgtctgccattccagattgctgtcagttaatgtaacaaatgttttcttcctttctctaatcttggacatttttttaatagattaagagtaattactcccaaatggatacatgaaagccc

SEQ ID NO: 34533 - DNA, 1118 bp, Homo sapiens
ttttatacattgtttatgatggcctcttagagaactaaggtttctaattatgataatgtttgtatatttttatggccttaaataagaatccttctttaaaatgaaaacacaaaacaaagcctgtgttagtctttctgtttagaattttgttttgtgaattttactttttggaaagtttttcgtttggccatgggtgtgagaaaatgggtaggtatattttagagtattttgatttactaaagtagcctactttttttaawaaaaaaaaaaggtggcaaattaattctgtaaagcaagttaccttattacttatggatttcacttctcttcaaatggttcagtgttacagaactttacagcctaataaaggtactgtgggtcatgtggtaaaatcatgtaatttggggctgggtgctgtggctcatgcctgtaatcccagcgctttgggaggcaggcagattgcttgagcccagaactttgagaccagcctgggcaacagagcaagaccccatctctataaaaaataaaaaataaaaaaaatgtaatttaatgttgaacccaagaaagatgattctgctgccttcctgcatttttagcagataagagtaagaaccccaaagacaacttaataaattcaggaccaggccagagatgtcaaaccactcccaaattggaccttaagcttggatgatcctatggaatatagttgcacaaatataaactctagtgtgtggcctactctagtttctgataggatatgcagcaaccatttcagagctattaaatagattgtattaaactaattgttaaaaggggaagtttgatttgtcgtaatcatattcaggttaagaggagggctggtcaaccagatatctgggctatttatttatgtgaccttataatatctatatactaaatctatataatctatataataaatctatataataaatttatatactataatgaatatatcatataaatatataatatctatataatcaatgaagtgccaggtcactcagttctccaactatacctttttcaaacttggcaaaatgaatcttggtcttactctagccaaaggaagcaatgcccaaggctgaaaatacatacat

SEQ ID NO: 34534 - DNA, 1356 bp, Homo sapiens
tttctcattgtacttatgatcttattacatattaaattcttttcttaggtgttatgttaattgtgtactatctatatttctgtctcttgaatataataaacttcacaaactcaagaatatctgtttattcactgttgcaaactaggtacttgacacatagtagttcttaacaaatatttgttgaatgaatgaataaayattgtagattgatagcagaattcaagatataatctctaaaattaatcatacagaatatggaataacatgctatatatagttttattatagaatgtgacacattttattcacagagaatggttttgttgagtccatatgctatgcgtttcactttaattcaaaaagtaacatgtcaagatcttctaaaacaccactaaaacatgagaagattttaatttatataaagatagtcaactttaggccaatactgaagcatgaaatattttgtgagaaggggcatcagtgcctttgcaatataaagaaaaaactctagtgtttgggattcctcattaaaaaacacaaaatatttacccctccattccacatccccattaaaaaacaaccaactttaagtacacaaagaacttattggttagtaaaactgaaacctactgatataatgtctgagtctggacagcactgaaggcagaagtgaagagccaaatctgattcagttttactgtttcatttcctttaagtgaggctctgagtacgtggctttcctcatctcttcacgattatgctgcagatttagactttttatacatcagcacatcttgtcctgtcttcagcccttgtacagaagtttgtctataatgagatataaggttattaggagggatcagtcctttctctctgggcattccttttgttttttccttgaattatgttatgagttttattcttttagcttttactatcaggtaataatcttgtttctcattttactgagaagatagaagcaattagaggagaattcctgaaaactcccactacctcatccattcaacctctggcctccatgcccacatattctactttctctcttattctcaaggatgaattatccatgctggagtcttgggcagctccccaacctctggaagatatcactccagccattctcctccctctggaattttccccttgctaacatgatctttcccatcagcatgtaaatatgctatgacttctcccattaaaaaaagtgtgatctctttatctcattatctgcctcagctactgcaccattttttctttctttatagtatgagacaattatgcttaccatcgccaatagtgaacaaaatagattcattaaagctttcgttttctgca

SEQ ID NO: 34535 - DNA, 996 bp, Homo sapiens
agacccctttcctgtaacaattagacttgtcctttttctcctttgctgattttggggaagcaagcttctgtgctgtgcaacatggcctgtggagagggacacagggcaaggaactcctctgggcactgagggtggcctcctgccaacagtcttgtttyatggctgcaaggaaatgaattctgccaaaaacttgagtgaatttggaagtcaatgacttttataggaaccccctaaggccagatagaacaagaatgatgatccccatttagaaaaaatgattccaagatggtaaggtttgtctgatccctacttttccaacgtgaagaaagcatcaggaaacagtaaggaatctggattgtcttcctgctggagaaacagtaagaagttaagatactattttgctcttcacaggcaaatcccaaagctccccccagcccctcttgcagttgggcagcaggtcctctggtacctggcccctggacagtgcccaatgcaaggcccttagtcagattcctgtgaggcctggctgtggggagtaccaagaggccccctccccccagcagttcccccagtgccagggaacatcagacacacgtctcctggcagtgcgggcaccagcaggcatctgctcatgcccagtgctccaagctgcatgtggagaaggttggtgcacctaccccaaggactgcatctctacccctgtctagtgcatgactcccctgtctggtgcatgactgcccctggttctcaaaaaccatgtacctctggggaggccagctgtgctccagcaaatgacaaacactccctgaaggtggaagagatgaatgaatttgaagagacactctcccagctgcccccgtctcagctctgctgccatgggctgtcccgcctgaatctccacacgtggaggcagctgccatgcaaggacacagctccaggtggaggactggcttcatcccacagcgggtgccattcagcgctgtccctgcactccct

SEQ ID NO: 34536 - DNA, 929 bp, Homo sapiens
aaggccagaacatctcctacatattccttgctatttgaatgaaggaatgatggcctgtggttagtagaagtgaatgagtacagaggaaacagaagatgaggaactaacaagagtccttccagcacagaccctgggtgcagccagccatcccagaggmaagagccaacctgttacctgtttacatggatcaataaatcctccttcagcctcactgaacttgaattggttttggcatttgcaactggaagaatctttactggtatatggtcctcctaggttatatctggctgacccagccaagtctcagctctctcacctctatagcttctgtttttcccctgctatgccttgaatatgtcaggatggcccattggtgggaggagggaaaaggacagaaagaacattaattttctttttattttttgagacagagtctcactctgtcacccaggctggagtacagtggcatgatcttggctcactgcaacctccgccccctgagttcaagcggttctcctacctcagcctcctgagtagctgggattataggctcctgccaccatgcccagctaatttttgtatttttagtagagacagggtttcaccatttggccaggctggtcttgaactcctgacctcatgatccacccaccttggcctcccaaagtgccaggattacaggtgtaagccaccgagcccagcctggagaaccttaattctaactgcaggccattatctccagtacctgtttatcattattaagagtgatccccatctaggctctttaatctatttctagtatggtttaggcttttgctcttcaaactgatccctggaccagcagcattcagcatctctcaggacttgttggaaatagagaatctcaggcttcatgttggactttctgaatcataatctgcattttaaaa

SEQ ID NO: 34537 - DNA, 929 bp, Homo sapiens
aaggccagaacatctcctacatattccttgctatttgaatgaaggaatgatggcctgtggttagtagaagtgaatgagtacagaggaaacagaagatgaggaactaacaagagtccttccagcacagaccctgggtgcagccagccatcccagaggcaagagccaacctgttacctgtttacatggatcaataaatcctccttcagcctcactgaacttgaattggttttggcatttgcaactggaagaatctttactggtatatggtcctcctaggttatatctggctgacccagccaagtctcagctctctcacctctatagcttctgtttttcccctgctatgccttgaatatgtcaggatggcccattggtgggaggagggaaaaggacagaaagaacattaattttctttttattttttgagacasagtctcactctgtcacccaggctggagtacagtggcatgatcttggctcactgcaacctccgccccctgagttcaagcggttctcctacctcagcctcctgagtagctgggattataggctcctgccaccatgcccagctaatttttgtatttttagtagagacagggtttcaccatttggccaggctggtcttgaactcctgacctcatgatccacccaccttggcctcccaaagtgccaggattacaggtgtaagccaccgagcccagcctggagaaccttaattctaactgcaggccattatctccagtacctgtttatcattattaagagtgatccccatctaggctctttaatctatttctagtatggtttaggcttttgctcttcaaactgatccctggaccagcagcattcagcatctctcaggacttgttggaaatagagaatctcaggcttcatgttggactttctgaatcataatctgcattttaaaa

SEQ ID NO: 34538 - DNA, 929 bp, Homo sapiens
aaggccagaacatctcctacatattccttgctatttgaatgaaggaatgatggcctgtggttagtagaagtgaatgagtacagaggaaacagaagatgaggaactaacaagagtccttccagcacagaccctgggtgcagccagccatcccagaggcaagagccaacctgttacctgtttacatggatcaataaatcctccttcagcctcactgaacttgaattggttttggcatttgcaactggaagaatctttactggtatatggtcctcctaggttatatctggctgacccagccaagtctcagctctctcacctctatagcttctgtttttcccctgctatgccttgaatatgtcaggatggcccattggtgggaggagggaaaaggacagaaagaacattaattttctttttattttttgagacagagtctcactctgtcacccaggctggagtacagtggcatgatcttggctcactgcaacctcygccccctgagttcaagcggttctcctacctcagcctcctgagtagctgggattataggctcctgccaccatgcccagctaatttttgtatttttagtagagacagggtttcaccatttggccaggctggtcttgaactcctgacctcatgatccacccaccttggcctcccaaagtgccaggattacaggtgtaagccaccgagcccagcctggagaaccttaattctaactgcaggccattatctccagtacctgtttatcattattaagagtgatccccatctaggctctttaatctatttctagtatggtttaggcttttgctcttcaaactgatccctggaccagcagcattcagcatctctcaggacttgttggaaatagagaatctcaggcttcatgttggactttctgaatcataatctgcattttaaaa

SEQ ID NO: 34539 - DNA, 929 bp, Homo sapiens
aaggccagaacatctcctacatattccttgctatttgaatgaaggaatgatggcctgtggttagtagaagtgaatgagtacagaggaaacagaagatgaggaactaacaagagtccttccagcacagaccctgggtgcagccagccatcccagaggcaagagccaacctgttacctgtttacatggatcaataaatcctccttcagcctcactgaacttgaattggttttggcatttgcaactggaagaatctttactggtatatggtcctcctaggttatatctggctgacccagccaagtctcagctctctcacctctatagcttctgtttttcccctgctatgccttgaatatgtcaggatggcccattggtgggaggagggaaaaggacagaaagaacattaattttctttttattttttgagacagagtctcactctgtcacccaggctggagtacagtggcatgatcttggctcactgcaacctccgccccctgagttcaagcggttctcctacctcagcctcctgagtagctgggattataggctcctgccaccatgcccagctaayttttgtatttttagtagagacagggtttcaccatttggccaggctggtcttgaactcctgacctcatgatccacccaccttggcctcccaaagtgccaggattacaggtgtaagccaccgagcccagcctggagaaccttaattctaactgcaggccattatctccagtacctgtttatcattattaagagtgatccccatctaggctctttaatctatttctagtatggtttaggcttttgctcttcaaactgatccctggaccagcagcattcagcatctctcaggacttgttggaaatagagaatctcaggcttcatgttggactttctgaatcataatctgcattttaaaa

SEQ ID NO: 34540 - DNA, 929 bp, Homo sapiens
aaggccagaacatctcctacatattccttgctatttgaatgaaggaatgatggcctgtggttagtagaagtgaatgagtacagaggaaacagaagatgaggaactaacaagagtccttccagcacagaccctgggtgcagccagccatcccagaggcaagagccaacctgttacctgtttacatggatcaataaatcctccttcagcctcactgaacttgaattggttttggcatttgcaactggaagaatctttactggtatatggtcctcctaggttatatctggctgacccagccaagtctcagctctctcacctctatagcttctgtttttcccctgctatgccttgaatatgtcaggatggcccattggtgggaggagggaaaaggacagaaagaacattaattttctttttattttttgagacagagtctcactctgtcacccaggctggagtacagtggcatgatcttggctcactgcaacctccgccccctgagttcaagcggttctcctacctcagcctcctgagtagctgggattataggctcctgccaccatgcccagctaatttttgtatttttagtagagacagggtttcaccatttggccaggckggtcttgaactcctgacctcatgatccacccaccttggcctcccaaagtgccaggattacaggtgtaagccaccgagcccagcctggagaaccttaattctaactgcaggccattatctccagtacctgtttatcattattaagagtgatccccatctaggctctttaatctatttctagtatggtttaggcttttgctcttcaaactgatccctggaccagcagcattcagcatctctcaggacttgttggaaatagagaatctcaggcttcatgttggactttctgaatcataatctgcattttaaaa

SEQ ID NO: 34541 - DNA, 559 bp, Homo sapiens
agcagaggagaaaattgataaaaaatatgtgtggcaagaatagtagaaaaaatgttggacattttttgtttttaaaccaagaaaatatctaggctgggcacggtggctcacacctgtaatcccagcactttgggaggccaaggtgggtggatcacctgaggtcaggagttcaagacaagcctggccaagatggtgaaaccccgtctctgctaaaaatagaaaaattagccgagcgtgatggcgggagcctgtaatcccagctactcgggaggctgaggcagagaattgcttgaacccaggaggaggttgcagtgagtcgagatcacgccactgcactccagcctaggcaacagagtgagactctgtctcaaaaaaaaagaaagaaagaaaaagaaaatatctaccrttagcataggaaaattcattatagcagcatattcccactattttaatggcctgaagagaaatagcactatattagcagttcataattaacccataagcagggcttgttgatcagtattttttgggaaaagaaggcttcacagtcgggattttt

SEQ ID NO: 34542 - DNA, 776 bp, Homo sapiens
attaatgttctttgcagagaatgacaaaatacatattaattacttagggttctatttgtattttactttcatagttagaaatctgtttctttttctttcttttttttagaggcaagattttactctggtgcccaggctggagtgcagtggctcaatcttagctcacttcagccttgaaccccccagcctcaagcgatcctcttttctcagcctcctgagtagctgggactacaaamacatgccactgtgcctggctaattatttttatttttatttgtagagttggggttgctttgttgcccaggctggtctcgaactcctggtttcaagtgatcctcctgccttggtctcccaaagtgttgggattataggcatgagccactgcacctggccagaaatttgtttaagtaaaatgactgtatcagtcagggttctccagagaaacataacatatgtgtgtgtgtgtgtgtatatgggactggctcacatgatcacatgattatggaggctgactagttacaagatctgcagttggcaagctgaggagggttgttagcctttttgttttattcaaaacatcagttgattggatgaggcccatcccattaccctgaataatgtttgcccaaatgtctgggcaccttttggcccagtcaagttgatacataaaattaaccatcacaatgacctaccttaaagttcttagctggacattttgcatttctcatcaggaacctaggctaatttacaacctttgatattgatttcaaccacag

SEQ ID NO: 34543 - DNA, 1977 bp, Homo sapiens
  misc_feature (1)...(1977): n = A,T,C or G
gcatccctcatgagcaccttgaagccctgcaaccatgcacggcctccatgcttgggcgtgtgaccactggcctatcatggtcactgctagatgtgctggcctctccctgccactggctctcaaatagcatccccaccggtgcttcctgcacccacaagtgcccacctgagcccagtagatctggagctgcaaggggacataaaatgggcactgctgatggcgatggcactggctagaacccagatggaatccagacgaggaggagacttctggtgccatgggggcaggtcagtacagatgmggaaggccaggcatccggccaagtgcctggccaggcagccaggatggtgacatatgccccaacaccagggactcccgggcatggtggtgtcatgtagcacccacaggaatgcaattcatagctgccagaatcaaagggtctcccagaccagcccccactttgcagccagagtatctgggagggcaagggacctgccaggtcacatgtcatctcagtgggacacagggtctgatctaaaagcactgagaacagagtacagtgagccttgagcctcccctgctcatggcacacatgggacacagccagggccagggaaacagcacgcacaatggtgggcgccccagcactcccagttcaagccccagagcactgtgaaggggatggcgcttacccacgtatttctcgacattgcttacatggaacgtgggggccgggacagccaagcccagcccgtcttttttagggatgaggatgggctcggtgaagctgtgctcctccatgtggcccagcgtgagctgactgtccggcacatgggccactatgtctttaacactgcaagaaaacacaggtcagagaccacgtcaggactgaggcctcctgcaccagaacaagtgtggacagggcctcagtgctggagaggcgagcctgtgtctggccacccacctccacagtcacaggaggaggcctggctgcggtgccgcatctgggaccatagggcagccagggcagatgcagtgctgaatccagaaccccacgtgtcagatggagacgctgagcctgtccaccccacgtacttcctcacactgcccaggtcacaccttctcctggggcaccaggtacggacatcttagactttttacatgtgcatgtgagcacatgtgcacacatctctagtggactatgtgcccatgcaacaatgcatgcacacacatgcatgcacacacatatgtacatacacgtgcacacacccctactggacttcaagtacctgggggagggacgcaatctcctctccacactgttatgtccctagctcccagccttgtattcgaccaggcagagaagagcagctgggataagggaggccactggggcacgcagatgcctccttgggggctgcttcgctgagtctgacacaggctgacccttgagcataaagggactgaattcaagagcagagccaggcagggcccgtatggtgcccatccttcacagacnaaggcggggtcggggagtgcacaggacaggggcctcaaaaaaccatgtcaccctcctgagtctcagtggttgtggggacaaagtaagctgacaaccccctagtgacaatgcctgtctgtgagcaggatctgcttccaacaccaaggagcagggctgggtggagctgggaccttttatttgcaaagaactttcgcattatgttcaatcttcttgcccgcaatcaagtggacgttatggaaatttggcaaaatctgagagtcaaggccagaaaccaggacttttgagggaagcatggggccccacagatgagcaataaaaggggttcaaatctgtctttcccaatccttttctagctgtgtgaccttgagcaaaccagtctaaataaatgtncctcatctttaataaaaaagctcgcacggccttgttgggtggctgtgggatgtaagttggcacatgca

SEQ ID NO: 34544 - DNA, 1977 bp, Homo sapiens
  misc_feature (1)...(1977): n = A,T,C or G
gcatccctcatgagcaccttgaagccctgcaaccatgcacggcctccatgcttgggcgtgtgaccactggcctatcatggtcactgctagatgtgctggcctctccctgccactggctctcaaatagcatccccaccggtgcttcctgcacccacaagtgcccacctgagcccagtagatctggagctgcaaggggacataaaatgggcactgctgatggcgatggcactggctagaacccagatggaatccagacgaggaggagacttctggtgccatgggggcaggtcagtacagatgcggaaggccaggcatccggccaagtgcctggccaggcagccaggatggtgacatatgccccaacaccagggactcccgggcatggtggtgtcatgtagcacccacaggaatgcaattcatagctgccagaatcaaagggtctcccagaccagcccccactttgcagccagagtatctgggagggcaagggacctgccaggtcacatgtcatctcagtgggacacagggtctgatctaaaagcactgagaacagagtacagtgagccttgagcctcccctgctcatggcacacatgggacacagccagggccagggaaacagcacgcacaatggtgggcgccccagcactcccagttcaagccccagagcactgtgaaggggatggcgcttacccacgtatttctcgacattgcttacatggaacgtgggggccgggacagccaagcccagcccgtcttttttagggatgaggatgggctcggtgaagctgtgctcctccatgtggcccagcgtgagctgactgtccggcacatgggccactatgtctttaacactgcaagaaaacacaggtcagagaccacgtcaggactgaggcctcctgcaccagaacaagtgtrgacagggcctcagtgctggagaggcgagcctgtgtctggccacccacctccacagtcacaggaggaggcctggctgcggtgccgcatctgggaccatagggcagccagggcagatgcagtgctgaatccagaaccccacgtgtcagatggagacgctgagcctgtccaccccacgtacttcctcacactgcccaggtcacaccttctcctggggcaccaggtacggacatcttagactttttacatgtgcatgtgagcacatgtgcacacatctctagtggactatgtgcccatgcaacaatgcatgcacacacatgcatgcacacacatatgtacatacacgtgcacacacccctactggacttcaagtacctgggggagggacgcaatctcctctccacactgttatgtccctagctcccagccttgtattcgaccaggcagagaagagcagctgggataagggaggccactggggcacgcagatgcctccttgggggctgcttcgctgagtctgacacaggctgacccttgagcataaagggactgaattcaagagcagagccaggcagggcccgtatggtgcccatccttcacagacnaaggcggggtcggggagtgcacaggacaggggcctcaaaaaaccatgtcaccctcctgagtctcagtggttgtggggacaaagtaagctgacaaccccctagtgacaatgcctgtctgtgagcaggatctgcttccaacaccaaggagcagggctgggtggagctgggaccttttatttgcaaagaactttcgcattatgttcaatcttcttgcccgcaatcaagtggacgttatggaaatttggcaaaatctgagagtcaaggccagaaaccaggacttttgagggaagcatggggccccacagatgagcaataaaaggggttcaaatctgtctttcccaatccttttctagctgtgtgaccttgagcaaaccagtctaaataaatgtncctcatctttaataaaaaagctcgcacggccttgttgggtggctgtgggatgtaagttggcacatgca

SEQ ID NO: 34545 - DNA, 1977 bp, Homo sapiens
  misc_feature (1)...(1977): n = A,T,C or G
gcatccctcatgagcaccttgaagccctgcaaccatgcacggcctccatgcttgggcgtgtgaccactggcctatcatggtcactgctagatgtgctggcctctccctgccactggctctcaaatagcatccccaccggtgcttcctgcacccacaagtgcccacctgagcccagtagatctggagctgcaaggggacataaaatgggcactgctgatggcgatggcactggctagaacccagatggaatccagacgaggaggagacttctggtgccatgggggcaggtcagtacagatgcggaaggccaggcatccggccaagtgcctggccaggcagccaggatggtgacatatgccccaacaccagggactcccgggcatggtggtgtcatgtagcacccacaggaatgcaattcatagctgccagaatcaaagggtctcccagaccagcccccactttgcagccagagtatctgggagggcaagggacctgccaggtcacatgtcatctcagtgggacacagggtctgatctaaaagcactgagaacagagtacagtgagccttgagcctcccctgctcatggcacacatgggacacagccagggccagggaaacagcacgcacaatggtgggcgccccagcactcccagttcaagccccagagcactgtgaaggggatggcgcttacccacgtatttctcgacattgcttacatggaacgtgggggccgggacagccaagcccagcccgtcttttttagggatgaggatgggctcggtgaagctgtgctcctccatgtggcccagcgtgagctgactgtccggcacatgggccactatgtctttaacactgcaagaaaacacaggtcagagaccacgtcaggactgaggcctcctgcaccagaacaagtgtggacagggcctcagtgctggagaggcgagcctgtgtctggccacccacctccacagtcacaggaggaggcctggctgcggtgccgcatctgggaccatagggcagccagggcagatgcagtgctgaatccagaaccccacgtgtcagatggagacgctgagcctgtccaccccacgtacttcctcacactgcccaggtcacaccttctcctggggcaccaggtacggacatcttagactttttacatgtgcatgtgagcacatgtgcacacatctctagtggactatgtgcccatgcaacaatgcatgcacacacatgcatgcacacacatatgtacatacacgtgcacacacccctactggacttcaagtacctgggggagggacgcaatctcctctccacactgytatgtccctagctcccagccttgtattcgaccaggcagagaagagcagctgggataagggaggccactggggcacgcagatgcctccttgggggctgcttcgctgagtctgacacaggctgacccttgagcataaagggactgaattcaagagcagagccaggcagggcccgtatggtgcccatccttcacagacnaaggcggggtcggggagtgcacaggacaggggcctcaaaaaaccatgtcaccctcctgagtctcagtggttgtggggacaaagtaagctgacaaccccctagtgacaatgcctgtctgtgagcaggatctgcttccaacaccaaggagcagggctgggtggagctgggaccttttatttgcaaagaactttcgcattatgttcaatcttcttgcccgcaatcaagtggacgttatggaaatttggcaaaatctgagagtcaaggccagaaaccaggacttttgagggaagcatggggccccacagatgagcaataaaaggggttcaaatctgtctttcccaatccttttctagctgtgtgaccttgagcaaaccagtctaaataaatgtncctcatctttaataaaaaagctcgcacggccttgttgggtggctgtgggatgtaagttggcacatgca

SEQ ID NO: 34546 - DNA, 567 bp, Homo sapiens
actggtatcacacaagctgctggcagaagcccggggtcctcgccaccttcctgctgagcgacgggagacactcaggcagttgggcaccacgaccctgcctgccccacctgcccctccygccaccgtctccaacagccctcagggtacactctcttcccagtgtcctctgctgagcacgtcccagcagcttcccttctccaagccctgggagctctcctaccaaatgtttgctgctttcccctgagaagagaaggtgatgcacagctttcagagttcatcgcagtcctcagctcatggcctgaggaatgttaggaagatggttcagctgccagtggctgtccacaaaacccatcttgtgggctctgtgctttgcttcaacactcctactgtccccagtggccaagtacgccattaaggaggggccaaaaatacagatgctgggctccagccagaaatccggaattggcacatcagggcaggagtggtgctggtggtggcagtaatagtaatagtggtggtggtggcagcagtaatatagtggtggacaggtggtggtggcagtagtaa

SEQ ID NO: 34547 - DNA, 567 bp, Homo sapiens
actggtatcacacaagctgctggcagaagcccggggtcctcgccaccttcctgctgagcgacgggagacactcaggcagttgggcaccacgaccctgcctgccccacctgcccctcccgccaccgtctccaacagccctcagggtacactctcttcccagtgtcctctgctgagcacgtcccagcagcttcccttctccaagcccygggagctctcctaccaaatgtttgctgctttcccctgagaagagaaggtgatgcacagctttcagagttcatcgcagtcctcagctcatggcctgaggaatgttaggaagatggttcagctgccagtggctgtccacaaaacccatcttgtgggctctgtgctttgcttcaacactcctactgtccccagtggccaagtacgccattaaggaggggccaaaaatacagatgctgggctccagccagaaatccggaattggcacatcagggcaggagtggtgctggtggtggcagtaatagtaatagtggtggtggtggcagcagtaatatagtggtggacaggtggtggtggcagtagtaa

SEQ ID NO: 34548 - DNA, 2816 bp, Homo sapiens
taaaaattactcaaaatgcattgtcttttcgcttcctgatactatattttgcagtgcatggtggcaaaggcaataaggtttttggtaataccttgttacacagattatttatagtcatcccaaaacatayataacacagagtcttaaattttaaaaccatatcagatactaaaatatacaacttatccttccaggtctttcctaaaaggtatacatacacttccgaagtagtataaaaaaaagaggtcatttcaaatctgataacgcactgtgaattagtgaattatcttaacaacactgtcctaattaagaccaataagaaagccatccatccaatattccacgagacagccaggcttcccgttgtgtaattattcacctcatagtggtccaccttgaaggcatgcaacacattatgccgaaaagagatatttatatagaagggaattacttaggacatgcggatgtccctaaaataaagattcttgaccactcgagctactcagtatttctctctaggctagaaacagaaaagattaaataacatattcatatgggaagtcaatttttccatcaatgaaaagcaagaaaccgtaagagcatttcaaggcaagatcttttaaagtcctacaaatatttaagtataacctctctacactttttaaaaatacagtttatttaaagatataaggaaagtccatcaaataaacaagaaatatttactgagaacctcctttgtggccaggattatgtttctatctaagtcccatgaacttggagcatatttacaaaattatttaactttataaagtatttcaatgaataatgcagtcttccaaaatgtgcatggggctgtaattccatctagtgtttacaatgacactataagccttggatggaattacaatcttaatgggaacaatcagagtgcactactccatatgctcagagaattcaggatgaactcaacttctaaaataaaaagcaccaagccattggcatgtaattacaaccaggaggccaagctgtctgcttgctagtatatgagaaatgctcaattgaaagtaccatctcaccttattgtagcaaaacctatttaatgtatctgaaaaacctcttcctctccaaaattaaactttcgactttcgtgatgagaaaatttccacaagggtctaccacatagaggtgatatatatcgggtgatgacaagattgtctggatgctaccaataaaatctaagaatcttctaataccacctacatgcacctaaacttaaactctgaaaagtacaatgtattaagaaacaggaaaaaaaatcatgctcaagagccctttgaaattactggcatttcttctaatttttgggggctagtctgacatttattagcataaacaaagcaaagtgccttgtgtccgcaagagggaaaaaaaaaaactttagagagattaaactcagagttgtagaaaaagtttagaaacggatttagaatttcgcaggaaaaagaaaagacagtgacactatgaatcagcattttcgtataagcagcctggaatcaaagaagaaatacacacacacacacacacacacacacacacacacacacggaggatacagcaccgtgaagaatgaagacacaaatgcatacaaatttagtctgtatatttatatttagaatacaaatggcttctacggtctttttgtgcctttatcatacctaactttatctggtactcatagaggtcaccaaagctgtataaaatcatagcaaccagaaaactaaaggaaacaaacacctctggcagaaatcctcaccaaacaaagtataaggcataaagaaactatactttcattggccacttttaacatagccatgcttctacctgtgaaggtatgggacaattccatgaaaactgagttcacggagggccctcctgtgggttatgtatcctgggttccagcataacccctggttgagaacttactattaacattagctcttcaatttattttcatgatccagggacttgtgtatattgtatcacagtggttacctaaaataaaaagtaaccagataggagacagtaaaacaatattgatgaatttccatgagaatgagacatatcatttaggagctttacttaaaaaccttcctgctaaacaaacaaaaaaggactaatgcgatatctgtctcttggggtctcccatgcttatgaattgagaaaacacacttgatataagtaaatgaagaaacaatagttgaaacagccctgaagtgacagaaaaaatggaagtagggttctaagctcaactccagaggcaaggtggtacagaataccagctggatgaacagttcaaagcttccctagttgagggtctctacctcaatgacagacaaaactcctaactttggctttctccatagagcatcaaccaaattcagtaatgatgaagtacctgcttaacactataggttgaataacttttgacaagctgtaacatcctgttggtggaaaatagccagccttgctcaacataatattgcaaacccaaaacagggtaattgtgcaaagagagaattttgtgtatgtcccctttccagaaaatattctgggtgacatccaatctgcttttacccggctcacttatttacaattggggctgcctaaaatgcaatgccattctaaaactaccaataaactattttgtgaaatcaagtttagtaacttgagattctcatttatgatatccctgacaaccaccaaaacctgattagacatctctctcctttgtctaggtgctttactgaaaaaaagca

SEQ ID NO: 34549 - DNA, 2816 bp, Homo sapiens
taaaaattactcaaaatgcattgtcttttcgcttcctgatactatattttgcagtgcatggtggcaaaggcaataaggtttttggtaataccttgttacacagattatttatagtcatcccaaaacatacataacacagagtcttaaattttaaaaccatatcagatactaaaatatacaayttatccttccaggtctttcctaaaaggtatacatacacttccgaagtagtataaaaaaaagaggtcatttcaaatctgataacgcactgtgaattagtgaattatcttaacaacactgtcctaattaagaccaataagaaagccatccatccaatattccacgagacagccaggcttcccgttgtgtaattattcacctcatagtggtccaccttgaaggcatgcaacacattatgccgaaaagagatatttatatagaagggaattacttaggacatgcggatgtccctaaaataaagattcttgaccactcgagctactcagtatttctctctaggctagaaacagaaaagattaaataacatattcatatgggaagtcaatttttccatcaatgaaaagcaagaaaccgtaagagcatttcaaggcaagatcttttaaagtcctacaaatatttaagtataacctctctacactttttaaaaatacagtttatttaaagatataaggaaagtccatcaaataaacaagaaatatttactgagaacctcctttgtggccaggattatgtttctatctaagtcccatgaacttggagcatatttacaaaattatttaactttataaagtatttcaatgaataatgcagtcttccaaaatgtgcatggggctgtaattccatctagtgtttacaatgacactataagccttggatggaattacaatcttaatgggaacaatcagagtgcactactccatatgctcagagaattcaggatgaactcaacttctaaaataaaaagcaccaagccattggcatgtaattacaaccaggaggccaagctgtctgcttgctagtatatgagaaatgctcaattgaaagtaccatctcaccttattgtagcaaaacctatttaatgtatctgaaaaacctcttcctctccaaaattaaactttcgactttcgtgatgagaaaatttccacaagggtctaccacatagaggtgatatatatcgggtgatgacaagattgtctggatgctaccaataaaatctaagaatcttctaataccacctacatgcacctaaacttaaactctgaaaagtacaatgtattaagaaacaggaaaaaaaatcatgctcaagagccctttgaaattactggcatttcttctaatttttgggggctagtctgacatttattagcataaacaaagcaaagtgccttgtgtccgcaagagggaaaaaaaaaaactttagagagattaaactcagagttgtagaaaaagtttagaaacggatttagaatttcgcaggaaaaagaaaagacagtgacactatgaatcagcattttcgtataagcagcctggaatcaaagaagaaatacacacacacacacacacacacacacacacacacacacggaggatacagcaccgtgaagaatgaagacacaaatgcatacaaatttagtctgtatatttatatttagaatacaaatggcttctacggtctttttgtgcctttatcatacctaactttatctggtactcatagaggtcaccaaagctgtataaaatcatagcaaccagaaaactaaaggaaacaaacacctctggcagaaatcctcaccaaacaaagtataaggcataaagaaactatactttcattggccacttttaacatagccatgcttctacctgtgaaggtatgggacaattccatgaaaactgagttcacggagggccctcctgtgggttatgtatcctgggttccagcataacccctggttgagaacttactattaacattagctcttcaatttattttcatgatccagggacttgtgtatattgtatcacagtggttacctaaaataaaaagtaaccagataggagacagtaaaacaatattgatgaatttccatgagaatgagacatatcatttaggagctttacttaaaaaccttcctgctaaacaaacaaaaaaggactaatgcgatatctgtctcttggggtctcccatgcttatgaattgagaaaacacacttgatataagtaaatgaagaaacaatagttgaaacagccctgaagtgacagaaaaaatggaagtagggttctaagctcaactccagaggcaaggtggtacagaataccagctggatgaacagttcaaagcttccctagttgagggtctctacctcaatgacagacaaaactcctaactttggctttctccatagagcatcaaccaaattcagtaatgatgaagtacctgcttaacactataggttgaataacttttgacaagctgtaacatcctgttggtggaaaatagccagccttgctcaacataatattgcaaacccaaaacagggtaattgtgcaaagagagaattttgtgtatgtcccctttccagaaaatattctgggtgacatccaatctgcttttacccggctcacttatttacaattggggctgcctaaaatgcaatgccattctaaaactaccaataaactattttgtgaaatcaagtttagtaacttgagattctcatttatgatatccctgacaaccaccaaaacctgattagacatctctctcctttgtctaggtgctttactgaaaaaaagca

SEQ ID NO: 34550 - DNA, 2816 bp, Homo sapiens
taaaaattactcaaaatgcattgtcttttcgcttcctgatactatattttgcagtgcatggtggcaaaggcaataaggtttttggtaataccttgttacacagattatttatagtcatcccaaaacatacataacacagagtcttaaattttaaaaccatatcagatactaaaatatacaacttatccttccaggtctttcctaaaaggtatacatacacttccgaagtagtataaaaaaaagaggtcatttcaaatctgataacgcactgtgaattagtgaattatcttaacaacactgtcctaattaagaccaataagaaagccatccatccaatattccacgagacagccaggcttcccgttgtgtaattattcacctcatagtggtccaccttgaaggcatgcaacacattatgccgaaaagagatatttatatagaagggaattacttaggacatgcggatgtccctaaaataaagattcttgaccactcgagctactcagtatttctctctaggctagaaacagaaaagattaaataacatattcatatgggaagtcaatttttccatcaatgaaaagcaagaaaccgtaagagcatttcaaggcaagatcttttaaagtcctacaaatatttaagtataacctctctacactttttaaaaatacagtttatttaaagatataaggaaagtccatcaaataaacaagaaatatttactgagaacctcctttgtggccaggattatgtttctatctaagtcccatgaacttggagcatatttacaaaattatttaactttataaagtatttcaatgaataatgcagtcttccaaaatgtgcatggggctgtaattccatctagtgtttacaatgacactataagccttggatggaattacaatcttaatgggaacaatcagagtgcactactccatatgctcagagaattcaggatgaactcaacttctaaaataaaaagcaccaagccattggcatgtaattacaaccaggaggccaagctgtctgcttgctagtatatgagaaatgctcaattgaaagtaccatctcaccttattgtagcaaaacctatttaatgtatctgaaaaacctcttcctctccaaaattaaactttcgactttcgtgatgagaaaatttccacaagggtctaccacatagaggtgatatatatcgggtgatgacaagattgtctggatgctaccaataaaatctaagaatcttctaataccacctacatgcacctaaacttaaactctgaaaagtacaatgtattaagaaacaggaaaaaaaatcatgctcaagagccctttgaaattactggcatttcttctaatttttgggggctagtctgacatttattagcataaacaaagcaaagtgccttgtgtccgcaagagggaaaaaaaaaaactttagagagattaaactcagagttgtagaaaaagtttagaaacggatttagaatttcgcaggaaaaagaaaagacagtgacactatgaatcagcattttcgtataagcagcctggaatcaaagaagaaatacacacacacacacacacacacacacacacacacacacggaggatacagcaccgtgaagaatgaagacacaaatgcatacaaatttagtctgtatatttatatttagaatacaaatggcttctacggtctttttgtgcctttatcatacctaactttatctggtactcatagaggtcaccaaagctgtataaaatcatagcaaccagaaaactaaaggaaacaaacacctctggcagaaatcctcaccaaacaaagtataaggcataaagaaactatactttcattggccacttttaacatagccatgcttctacctgtgaaggtatgggacaattccatgaaaactgagttcacggagggycctcctgtgggttatgtatcctgggttccagcataacccctggttgagaacttactattaacattagctcttcaatttattttcatgatccagggacttgtgtatattgtatcacagtggttacctaaaataaaaagtaaccagataggagacagtaaaacaatattgatgaatttccatgagaatgagacatatcatttaggagctttacttaaaaaccttcctgctaaacaaacaaaaaaggactaatgcgatatctgtctcttggggtctcccatgcttatgaattgagaaaacacacttgatataagtaaatgaagaaacaatagttgaaacagccctgaagtgacagaaaaaatggaagtagggttctaagctcaactccagaggcaaggtggtacagaataccagctggatgaacagttcaaagcttccctagttgagggtctctacctcaatgacagacaaaactcctaactttggctttctccatagagcatcaaccaaattcagtaatgatgaagtacctgcttaacactataggttgaataacttttgacaagctgtaacatcctgttggtggaaaatagccagccttgctcaacataatattgcaaacccaaaacagggtaattgtgcaaagagagaattttgtgtatgtcccctttccagaaaatattctgggtgacatccaatctgcttttacccggctcacttatttacaattggggctgcctaaaatgcaatgccattctaaaactaccaataaactattttgtgaaatcaagtttagtaacttgagattctcatttatgatatccctgacaaccaccaaaacctgattagacatctctctcctttgtctaggtgctttactgaaaaaaagca

SEQ ID NO: 34551 - DNA, 945 bp, Homo sapiens
ttgttctgggcctgacaactgttaaggcctctccaactagtcagagatggctcagggctaatcccacctccctactccccttctgccttctccaggtagttgcccttggatgcaaggaaaactgtgaacacccatggcccagttggtttgggacctctactaaattgcagtcattcattttccaagtatcagttgtgaagttgtaggaattcagcctcctccctagaattctaaggcaaaattcctcacccagtccttcttgacagaatggaattcctattctggcaaccactcttggcttattccaggagcaagtttgaaccttggatgcctgtctgtttggactgcatttccagacctagctcacctgagtctcacctacaccacgccttgcctttccgctgaccttggcagtgtcccctccaytcacaacattgttgtcctctttgcctgtattaacctgcctgatctcccaattcctgtgactggcggcctgacgtgggatacatccattcccctgcagtctggcctggctcttggtttcaaccctttatagttgtcctttcttactgccacctgcctcttggcactctttgatgtctttacctgaacaaaattaatgtcaccttgtatttgagcatgtcctaatgtggagtgttctttacagcatggagcatttcttccctaatgctattttctcagataaataaacaacctgaaaaaagcagagaataaaatagtcctcgccaagggcacttaacaaatgttgacatttagctgtatttgcttcgtattgtaaaagaactgaatgtaaaaaatacagttgaatctcctttctgggtctcttcttgataccatttccctccttttctccctccttggaaggaagctatatgctaaagtgggcctttttcttcccattcacgtttttgtgctctcactatg

SEQ ID NO: 34552 - DNA, 945 bp, Homo sapiens
ttgttctgggcctgacaactgttaaggcctctccaactagtcagagatggctcagggctaatcccacctccctactccccttctgccttctccaggtagttgcccttggatgcaaggaaaactgtgaacacccatggcccagttggtttgggacctctactaaattgcagtcattcattttccaagtatcagttgtgaagttgtaggaattcagcctcctccctagaattctaaggcaaaattcctcacccagtccttcttgacagaatggaattcctattctggcaaccactcttggcttattccaggagcaagtttgaaccttggatgcctgtctgtttggactgcatttccagacctagctcacctgagtctcacctacaccacgccttgcctttccgctgaccttggcagtgtcccctccactcacaacattgttgtcctctttgcctgtattaacctgcctgatctcccaattcctgtgactggcggcctgacgtgggatacatccattcccctgcagtctggcctggctcttggtttcaaccctttatagttgtcctttcttactgccacctgcctcttggcactctttgatgtctttacctgaacaaaattaatgtcaccttgtatttgagcatgtcctaatgtggagtgttctttacagcatggagcatttcttccctaatgctattttctcagataaataaacaacctgaaaaaagcagagaataaaatagtcctcgccaagggcacttaacaaatgttgacatttagctgtatttgcttcgtattgtaaaagaactgaatgtaaaaaatacagttgaatctcctttcygggtctcttcttgataccatttccctccttttctccctccttggaaggaagctatatgctaaagtgggcctttttcttcccattcacgtttttgtgctctcactatg

SEQ ID NO: 34553 - DNA, 715 bp, Homo sapiens
tgttgcctaggctggtcttgaactcctgagctcaagccatcctcccgcctcagcttcccaaagtgctgggattataggcgtkagccactgtgcctggccatcccacctaagacttgataagtggtaagatttcttatgctttggtgctgcctctctaggcctatgtctagggtttttgttggcccctgatatggaatgaattgtatcctcccgaaaatttgtttgtgggagtcctaaccctgactacctcagaatatgtggctgtatttggaaatagggtataaaggtaggccctaatccgatgtgactgatgtccttacatgaagaaaaagagccaccagggatgtgcaggtgcacaggaaaggctgtgttttgtgaggacacctcgagaaggtggccatcggcaagccaaggactgaggccgcaggagaaaccaaacctgcccacaccttgatctcagactttcagcctcccgaactgtgagaaaataaatttctgtcatctgagccacccagtctgtggtatttttttatggcagccctagcaaaccaatacagctcctttttggaacttcacccttccatcaccttccataggcaaaggcttggcctccatgagctccggaaactcgttgctctgcgtctaagaactctggaaacccagtggaaacccaaagggcggcttctccactcacttctgctcactcttctggctt

SEQ ID NO: 34554 - DNA, 715 bp, Homo sapiens
tgttgcctaggctggtcttgaactcctgagctcaagccatcctcccgcctcagcttcccaaagtgctgggattataggcgtgagccactgtscctggccatcccacctaagacttgataagtggtaagatttcttatgctttggtgctgcctctctaggcctatgtctagggtttttgttggcccctgatatggaatgaattgtatcctcccgaaaatttgtttgtgggagtcctaaccctgactacctcagaatatgtggctgtatttggaaatagggtataaaggtaggccctaatccgatgtgactgatgtccttacatgaagaaaaagagccaccagggatgtgcaggtgcacaggaaaggctgtgttttgtgaggacacctcgagaaggtggccatcggcaagccaaggactgaggccgcaggagaaaccaaacctgcccacaccttgatctcagactttcagcctcccgaactgtgagaaaataaatttctgtcatctgagccacccagtctgtggtatttttttatggcagccctagcaaaccaatacagctcctttttggaacttcacccttccatcaccttccataggcaaaggcttggcctccatgagctccggaaactcgttgctctgcgtctaagaactctggaaacccagtggaaacccaaagggcggcttctccactcacttctgctcactcttctggctt

SEQ ID NO: 34555 - DNA, 715 bp, Homo sapiens
tgttgcctaggctggtcttgaactcctgagctcaagccatcctcccgcctcagcttcccaaagtgctgggattataggcgtgagccactgtgcctggccatcccacctaagacttgataagtggtaagatttcttatgctttggtgctgcctctctaggcctatgtctagggtttttgttggcccctgatatggaatgaattgtatcctcccgaaaatttgtttgtgggagtcctaaccctgactacctcagaatatgtggctgtatttggaaatagggtataaaggtaggccctaatccgatgtgactgatgtccttacatgaagaaaaagagccaccagggatgtgcaggtgcacaggaaaggctgtgttttgtgaggacacctcgagaaggtggccatcggcaagccaaggactgaggccgcaggrgaaaccaaacctgcccacaccttgatctcagactttcagcctcccgaactgtgagaaaataaatttctgtcatctgagccacccagtctgtggtatttttttatggcagccctagcaaaccaatacagctcctttttggaacttcacccttccatcaccttccataggcaaaggcttggcctccatgagctccggaaactcgttgctctgcgtctaagaactctggaaacccagtggaaacccaaagggcggcttctccactcacttctgctcactcttctggctt

SEQ ID NO: 34556 - DNA, 613 bp, Homo sapiens
ccagcctgggcaacatggtgaaatccctgtctctaccaaaaaaaattaaaattagccargcatggtggtgcgtgcctgtagtcccagatactcaggaggctgaggtgggaggatcgcttgaaggcaggaggcagaggttgcagtgagccaagatcatgccactgtactccagcctaggcaaaggagtgagaccctgcctaaaacaaaagaaaaattttttttttttaaaaaaaaaaaggtctaagaaagagtaatattatagctctataggatataactttataaaaatgccatagaatatgcttgaaaactctccaaatttcaggaaacactgctaaaattcttccaagtaaagctgtgagatgctgtcaggaacatccacatttgactgtttctcttccctggatctaaaagcaccttatgagaacccatgaaaagtttctcttccacaccatccatgccatcaatcctaaaagacagattttcatctctgtttatgcctgaatttagcagacattctctctattttcttctagtagattctagtgccagcatccaaagggttttcctccttagaatataatcttggagactttaaagtgccatgtgtatt

SEQ ID NO: 34557 - DNA, 613 bp, Homo sapiens
ccagcctgggcaacatggtgaaatccctgtctctaccaaaaaaaattaaaattagccaagcatggtggtgcgtgcctgtagtcccagatactcaggaggctgaggtgggaggatcgcttgaaggcaggaggcagaggttgcagtgagccaagatcatgccactgtactccagcctaggcaaaggagtgagaccctgcctaaaacaaaagaaaaattttttttttttwaaaaaaaaaaggtctaagaaagagtaatattatagctctataggatataactttataaaaatgccatagaatatgcttgaaaactctccaaatttcaggaaacactgctaaaattcttccaagtaaagctgtgagatgctgtcaggaacatccacatttgactgtttctcttccctggatctaaaagcaccttatgagaacccatgaaaagtttctcttccacaccatccatgccatcaatcctaaaagacagattttcatctctgtttatgcctgaatttagcagacattctctctattttcttctagtagattctagtgccagcatccaaagggttttcctccttagaatataatcttggagactttaaagtgccatgtgtatt

SEQ ID NO: 34558 - DNA, 570 bp, Homo sapiens
gctcctgctaactccaagaggcatcacattggaataaaagccccttcttcctttttttttttttttttttttttgagacagagtttccctctgtcacccaggctgaagtgcagtggcgttatcccagctcactgcaacctctgcctcccaggctcaagtgattctcgtgcctcagcctcccaagtagctgggactacaggtgcatgccaccacgcccggctaatttttgtatttttttttgttttgtagagatrgggtttcgccgtgttggccaggctggtctcgaactcctggcctcaagaaatctgcctgctttggcctcccaaagtgctgggattacaggcttgagccaccgcgcccagcctaaaagcgtcttctgacaaacaaaggtgtgtttttgtttgcttcccaccattatctatttgtaactgctgatggctgctaggaagatcagtggcacctaagttgattttgcttgattgaggaaacctagctcattgtaaactccaggtaatggatgggatagtcttctctgcattttttgtttaaattgaattttatttctgggtg

SEQ ID NO: 34559 - DNA, 1617 bp, Homo sapiens
ttttttttttttttttttttttgagacggagtctcgctctgtcrcccaggctggagtgcagtggcgggatctcggctcactgcgagctctgcctcccgggttcacgccattctcctgcctcagcctcccaagcagctgggaccacaggcgtccgccactacgcccggctaattttttgtatttttagtagagacggggtttcaccgttttagccgggatggtctcgatctcctgacctcgtgatccgcccgcctcggcctcccaaagtgctgggattacaggcgtgagccactgcgcctggcccttgaaaaaatcttaaattcctcagccacagcatgttacataccttttccagtgttgtatgcatggttttatttacaagatttttgaaaagacaaaaaaataaagtcctgacaaacggatcaatgaatgctaggggtttgaaggcgggggcagggcgtgtctataaagagacagcacgaggaagatttttgggatggttgaactgttctggatcttgattgtggtgatgattacgtgaatctatacatgtgttaaaatgtatagaagtgtataccaaaaaatgtcaagtttactgcctgataatctaaaacaaaattttaaaaatatttaaacagtttaaaaggcttatttttatgaagaaacatgaagggtccatggtttccaaaggtgggaattttcctggaacagatgccatgtatttaaggaataagaaagaaagtttagaaaagttttgtctttttcctaagaagagcaaagaaacaacaatgaataccaacatactgctcttccccttgagtaccactcaaccttcatcaattaattttagatgttcagatatatgagtgacgttttttgttgcaaggatcaatttttctacctttttccctagacaaaacaaattggaggaagccctgttattttctggacaattcacagatgccctacaggctctcattgattggttatatagagttgaaccccagctggcagaagaccagcctgttcatggagacattgatttggtgatgaatctgatcgataatcacaaggtattgttatctgggacattttattttatcttgtttgattattctgagtgtacaggaaatgtaaaccatttaaattagccttttaaaatcagaagactatagatcatactacataacagtctttattgttgaaatatgtgtccgtttgagcagaacctggaagcaaactttaaaagtgatggggaagtattatttagtgtcagtgaaatacttttgcttttaattaccagatctaaaacctttttagaacttggaaagtgatttcattctctggtgctttaaaacagatttcaagaatgttttactatctttagttatgcacttaaacaattatgtaataaaatttaaaatcattcattcagtgacctgacactaagtcattgcataagtatgtagatttgtgacatgacccatggtggtcatgaccaactgcttttaaaaataccgaaccaaaactgttttaaccttgccccttgaattatagcagtttatgagtcagcagcttatgctataagggatttgattattatttacttcgagaaaa

SEQ ID NO: 34560 - DNA, 1617 bp, Homo sapiens
ttttttttttttttttttttttgagacggagtctcgctctgtcacccaggctggagtgcagtggcgggatctcggctcactgcgagctctgcctcccgggttcacgccattctcctgcctcagcctcccaagcagctgggaccacaggcgtccgccactacgcccggctaattttttgtatttttagtagagacggggtttcaccgttttagccgggatggtctcgatctcctgacctcgtgatccgcccgcctcggcctcccaaagtgctgggattacaggcgtgagccactgcgcctggcccttgaaaaaatcttaaattcctcagccacagcatgttacataccttttccagtgttgtatgcatggttttatttacaagatttttgaaaagacaaaaaaataaagtcctgacaaacggatcaatgaatgctaggggtttgaaggcgggggcagggcgtgtctataaagagacagcacgaggaagatttttgggatggttgaactgttctggatcttgrttgtggtgatgattacgtgaatctatacatgtgttaaaatgtatagaagtgtataccaaaaaatgtcaagtttactgcctgataatctaaaacaaaattttaaaaatatttaaacagtttaaaaggcttatttttatgaagaaacatgaagggtccatggtttccaaaggtgggaattttcctggaacagatgccatgtatttaaggaataagaaagaaagtttagaaaagttttgtctttttcctaagaagagcaaagaaacaacaatgaataccaacatactgctcttccccttgagtaccactcaaccttcatcaattaattttagatgttcagatatatgagtgacgttttttgttgcaaggatcaatttttctacctttttccctagacaaaacaaattggaggaagccctgttattttctggacaattcacagatgccctacaggctctcattgattggttatatagagttgaaccccagctggcagaagaccagcctgttcatggagacattgatttggtgatgaatctgatcgataatcacaaggtattgttatctgggacattttattttatcttgtttgattattctgagtgtacaggaaatgtaaaccatttaaattagccttttaaaatcagaagactatagatcatactacataacagtctttattgttgaaatatgtgtccgtttgagcagaacctggaagcaaactttaaaagtgatggggaagtattatttagtgtcagtgaaatacttttgcttttaattaccagatctaaaacctttttagaacttggaaagtgatttcattctctggtgctttaaaacagatttcaagaatgttttactatctttagttatgcacttaaacaattatgtaataaaatttaaaatcattcattcagtgacctgacactaagtcattgcataagtatgtagatttgtgacatgacccatggtggtcatgaccaactgcttttaaaaataccgaaccaaaactgttttaaccttgccccttgaattatagcagtttatgagtcagcagcttatgctataagggatttgattattatttacttcgagaaaa

SEQ ID NO: 34561 - DNA, 1617 bp, Homo sapiens
ttttttttttttttttttttttgagacggagtctcgctctgtcacccaggctggagtgcagtggcgggatctcggctcactgcgagctctgcctcccgggttcacgccattctcctgcctcagcctcccaagcagctgggaccacaggcgtccgccactacgcccggctaattttttgtatttttagtagagacggggtttcaccgttttagccgggatggtctcgatctcctgacctcgtgatccgcccgcctcggcctcccaaagtgctgggattacaggcgtgagccactgcgcctggcccttgaaaaaatcttaaattcctcagccacagcatgttacataccttttccagtgttgtatgcatggttttatttacaagatttttgaaaagacaaaaaaataaagtcctgacaaacggatcaatgaatgctaggggtttgaaggcgggggcagggcgtgtctataaagagacagcacgaggaagatttttgggatggttgaactgttctggatcttgattgtggtgatgrttacgtgaatctatacatgtgttaaaatgtatagaagtgtataccaaaaaatgtcaagtttactgcctgataatctaaaacaaaattttaaaaatatttaaacagtttaaaaggcttatttttatgaagaaacatgaagggtccatggtttccaaaggtgggaattttcctggaacagatgccatgtatttaaggaataagaaagaaagtttagaaaagttttgtctttttcctaagaagagcaaagaaacaacaatgaataccaacatactgctcttccccttgagtaccactcaaccttcatcaattaattttagatgttcagatatatgagtgacgttttttgttgcaaggatcaatttttctacctttttccctagacaaaacaaattggaggaagccctgttattttctggacaattcacagatgccctacaggctctcattgattggttatatagagttgaaccccagctggcagaagaccagcctgttcatggagacattgatttggtgatgaatctgatcgataatcacaaggtattgttatctgggacattttattttatcttgtttgattattctgagtgtacaggaaatgtaaaccatttaaattagccttttaaaatcagaagactatagatcatactacataacagtctttattgttgaaatatgtgtccgtttgagcagaacctggaagcaaactttaaaagtgatggggaagtattatttagtgtcagtgaaatacttttgcttttaattaccagatctaaaacctttttagaacttggaaagtgatttcattctctggtgctttaaaacagatttcaagaatgttttactatctttagttatgcacttaaacaattatgtaataaaatttaaaatcattcattcagtgacctgacactaagtcattgcataagtatgtagatttgtgacatgacccatggtggtcatgaccaactgcttttaaaaataccgaaccaaaactgttttaaccttgccccttgaattatagcagtttatgagtcagcagcttatgctataagggatttgattattatttacttcgagaaaa

SEQ ID NO: 34562 - DNA, 1617 bp, Homo sapiens
ttttttttttttttttttttttgagacggagtctcgctctgtcacccaggctggagtgcagtggcgggatctcggctcactgcgagctctgcctcccgggttcacgccattctcctgcctcagcctcccaagcagctgggaccacaggcgtccgccactacgcccggctaattttttgtatttttagtagagacggggtttcaccgttttagccgggatggtctcgatctcctgacctcgtgatccgcccgcctcggcctcccaaagtgctgggattacaggcgtgagccactgcgcctggcccttgaaaaaatcttaaattcctcagccacagcatgttacataccttttccagtgttgtatgcatggttttatttacaagatttttgaaaagacaaaaaaataaagtcctgacaaacggatcaatgaatgctaggggtttgaaggcgggggcagggcgtgtctataaagagacagcacgaggaagatttttgggatggttgaactgttctggatcttgattgtggtgatgattacgtgaatctatacatgtgttaaaatgtatagaagtgtataccaaaaaatgtcaagtttactgcctgataatctaaaacaaaattttaaaaatatttaaacagtttaaaaggcttatttttatgaagaaacatgaagggtccatggtttccaaaggtgggaattttcctggaacagatgccatgtatttaaggaataagaaagaaagtttagaaaagttttgtctttttcctaagaagagcaaagaaacaacaatgaataccaacatactgctcttccccttgagtaccactcaaccttcatcaattaattttagatgttcagatatatgagtgacgttttttgttgcaaggatcaatttttctacctttttccctagacaaaacaaattggaggaagccctgttattttctggacaattcacagatgccctacaggctctcattgattggttatatagagttgaaccccagctggcagaagaccagcctgttcatggagacattgatttggtgatgaatctgatcgataatcacaaggtattgttatctgggacattttattttatcttgtttgattattctgagtgtacaggaaatgtaaaccatttaaattagccttttaaaatcagaagactatagatcatactacataacagtctttattgttgaaatatgtgtccrtttgagcagaacctggaagcaaactttaaaagtgatggggaagtattatttagtgtcagtgaaatacttttgcttttaattaccagatctaaaacctttttagaacttggaaagtgatttcattctctggtgctttaaaacagatttcaagaatgttttactatctttagttatgcacttaaacaattatgtaataaaatttaaaatcattcattcagtgacctgacactaagtcattgcataagtatgtagatttgtgacatgacccatggtggtcatgaccaactgcttttaaaaataccgaaccaaaactgttttaaccttgccccttgaattatagcagtttatgagtcagcagcttatgctataagggatttgattattatttacttcgagaaaa

SEQ ID NO: 34563 - DNA, 1617 bp, Homo sapiens
ttttttttttttttttttttttgagacggagtctcgctctgtcacccaggctggagtgcagtggcgggatctcggctcactgcgagctctgcctcccgggttcacgccattctcctgcctcagcctcccaagcagctgggaccacaggcgtccgccactacgcccggctaattttttgtatttttagtagagacggggtttcaccgttttagccgggatggtctcgatctcctgacctcgtgatccgcccgcctcggcctcccaaagtgctgggattacaggcgtgagccactgcgcctggcccttgaaaaaatcttaaattcctcagccacagcatgttacataccttttccagtgttgtatgcatggttttatttacaagatttttgaaaagacaaaaaaataaagtcctgacaaacggatcaatgaatgctaggggtttgaaggcgggggcagggcgtgtctataaagagacagcacgaggaagatttttgggatggttgaactgttctggatcttgattgtggtgatgattacgtgaatctatacatgtgttaaaatgtatagaagtgtataccaaaaaatgtcaagtttactgcctgataatctaaaacaaaattttaaaaatatttaaacagtttaaaaggcttatttttatgaagaaacatgaagggtccatggtttccaaaggtgggaattttcctggaacagatgccatgtatttaaggaataagaaagaaagtttagaaaagttttgtctttttcctaagaagagcaaagaaacaacaatgaataccaacatactgctcttccccttgagtaccactcaaccttcatcaattaattttagatgttcagatatatgagtgacgttttttgttgcaaggatcaatttttctacctttttccctagacaaaacaaattggaggaagccctgttattttctggacaattcacagatgccctacaggctctcattgattggttatatagagttgaaccccagctggcagaagaccagcctgttcatggagacattgatttggtgatgaatctgatcgataatcacaaggtattgttatctgggacattttattttatcttgtttgattattctgagtgtacaggaaatgtaaaccatttaaattagccttttaaaatcagaagactatagatcatactacataacagtctttattgttgaaatatgtgtccgtttgagcagaacctggaagcaaactttaaaagtgatggggaagtattatttagtgtcagtgaaatacttttgcttttaattaccagatctaaaacctttttagaacttggaaagtgatttcattctctggtgctttaaaacagatttcaagaatgttttactatctttagttatgcacttaaacaattatgtaataaaatttaaaatcattcattcagtgacctgacactaagtcattgcataagtatgtagatttgtgacatgayccatggtggtcatgaccaactgcttttaaaaataccgaaccaaaactgttttaaccttgccccttgaattatagcagtttatgagtcagcagcttatgctataagggatttgattattatttacttcgagaaaa

SEQ ID NO: 34564 - DNA, 514 bp, Homo sapiens
tctcctttgtaacaagccagtgtttccttgaatcctgtgagcgactctagcaaattaatggaacccagaaccaggatttgggatctccagtttatagctagtcagtcagaagcactggtgaaagaacctgggcttgagatgggcatcaaaaggtgagaagtcttggggactgagccctcaacctgtgggatctgatactatctccaggtaggtggtgtcagaattatattggaggacacccagctggtattcactgcagaagtgattgcttgctggctggtggggagaaattcccacacgtctggtgtgagagtatggtgggagaaactgagtttattttttttctacacagaggtgatcccaggaactatggtgagggagaaatgaaatggtacaggaaatggaaggagacagggmaaagatcaatgcattatctttgcattgtacaatgcaatgtacaggttactgccatgagtaattggggctcactatcactatggacactctgagacac

SEQ ID NO: 34565 - DNA, 600 bp, Homo sapiens
ttgtaaaatttccctgaatatgatctgttgtagtttcagtgtagagggtctattcattttctattactgcataactaattaccataaatttaatggcttaaaacaacagcttattagctcacagttctacaggttagaagtccagacatgacacagctaggttccttgttcagggtctcacaggaataaaattaaggtgtcagcgagggctgtgattctaatctgaggcttggggtcatccaaagttattcaggttgttggcaggatcttgttccctgtggttgtaggactgtgattgccaccttcttgctcacagagttgctytcagcttctgtgggctgcccactgttccctaccatgtggcaccttcatcataaaaagtcagcaatggagaatctcctttgcatgaaatctccctcatgcttcgaatttctctttccaggaagagcccagtcactttaaggactcatctgattaggtcaggcccaccaaagatgttctccctgaaacaggaaattttccctgacccctttgcagcaggtgggaactggactgtgggcactggagctagctagctgctttggctggcttcacttgctt

SEQ ID NO: 34566 - DNA, 766 bp, Homo sapiens
gcgccccctgccttggcgccgcctctggcsccctgagccgtggcccatcccatgcagaatcaatcggggctcctcactcccgcgcctgctccccgggggctgaatccgcccgcccgggggccaggtgccgttgagatcccaggcgctccacctggaggccctatctggatcgaaactcgcactcgccccgccctcttgttaccagttctctccgggcttgtggaaagagttccccaacccgggatatatacccgagaggaggttaggacacaggtgtcctattcccttgcatcctccatcttctcctactctgttactctcctcttttgttagtttgatggtgcccagtgaaataaagcaaaagaatacaactgattttcagtgtaactgatactaccagaggaaaagtcagcaagggaacattctagagaaactggtcctgtgcagaatagcaaaatttttaaaaaatgacaataagacaaggataaattcctacttgattttaacggtacatcctttattattaggtaaaatgagaattaaaacatttcatcttgtccgtctttaaagaaaaaaagaactagcacttattctagtgcaggttttgttttgttttgttttgagacaggatttcgctcttgttgcccaggctgaagttcagtggcgcgatatcggctcactgcatcctccgccttctgggttcaagctattctcctgcctcagcctccctagtagcttgaattacaggcatgcgccaccatgcccg

SEQ ID NO: 34567 - DNA, 766 bp, Homo sapiens
gcgccccctgccttggcgccgcctctggccccctgagccgtggcccatcccatgcagaatcaatcggggctcctcactcccgcgcctgctccccgggggctgaatccgcccgcccgggggccaggtgccgttgagatcccaggcgctccacctggaggccctatctggatcgaaactcgcactcgccccgccctcttgttaccagttctctccgggcttgtggaaagagttccccaaccygggatatatacccgagaggaggttaggacacaggtgtcctattcccttgcatcctccatcttctcctactctgttactctcctcttttgttagtttgatggtgcccagtgaaataaagcaaaagaatacaactgattttcagtgtaactgatactaccagaggaaaagtcagcaagggaacattctagagaaactggtcctgtgcagaatagcaaaatttttaaaaaatgacaataagacaaggataaattcctacttgattttaacggtacatcctttattattaggtaaaatgagaattaaaacatttcatcttgtccgtctttaaagaaaaaaagaactagcacttattctagtgcaggttttgttttgttttgttttgagacaggatttcgctcttgttgcccaggctgaagttcagtggcgcgatatcggctcactgcatcctccgccttctgggttcaagctattctcctgcctcagcctccctagtagcttgaattacaggcatgcgccaccatgcccg

SEQ ID NO: 34568 - DNA, 673 bp, Homo sapiens
tggttttagaaagtgatttgcatactactaatgtcaaaatacctatagtttaaaaagacacatgcacatgtatgttcatcacagcattattcataatagcaaagacatggaatcaatctagatgcccatcaatggtggactagctaaagaaaaagtggcacatatataccatggaatactacgcagccataacaaagaattaaatgacctttgcagcaacatagacacagctggaggccattatcctaagtgaactaatgatgcaggaacaaataacyaaataccacatgttctcacttataaatggggggtaaacattgagtgcaaagagggaaacaacaaacattggggcctacttgaaggtggagtgggggaggagggagaagttcaaaaaactaccttttgggtactgtgctcactatctcggtgacaaaatcatttatacaacaaatcctagcaacatgaaatttgcccatgtaataaacctgcacatgtatcccctgaacctaaaataaaagttgaaaaagaaaaaaaaaggaaacataacccaattaatttggcttaaaagagttacaataccaaagtaactttgacctccctagaaaattcagatggaatagtttctatcatattaaatatccaccaactaatttatagtgtttgtaagatgcta

SEQ ID NO: 34569 - DNA, 738 bp, Homo sapiens
gagattacgccactgcactccagcctgggcgacagagtgagactcatctcaaaaaaaatacaaaaaacaaacaaacaaaacaaatgatatatgttgagatttttgcaaaagtgttgctgatcctaccaaagtaagttttctgaattatctgcaattattaatgtgtattaactatgtagtaataaccactagctctataattaactctgcgcaatgtaaaccttaattyagttggaattacattcgttatttcaaagatagtgaactgctgtgtgctacagatcatgttccatgtaatttttgagttccaaaaggtctcagatagtctaagaggtgctaggtgaatctgtgtaataaataacacttttataatatcctaaagcagagattttaatagctatagttggaaatcaataaatatctgttggatgaatgtataacccctttttacagagaacatgtataagtgttaacagccattcatacaatccaatatcataccatgttatgtccctggagttctactttggaaacattaattgttttaaaatacatggtgagccagattcgtcaccattgcaagacagaataccagaagtattctgctaaacctcctaaaaacacacacacacaaacaaaaacaaataagcctgctgccatagaaattagatattccttgataggatcaaaccaaaaaaaaggttaaagaagctatgcttaccaaatggaatagaacac

SEQ ID NO: 34570 - DNA, 1137 bp, Homo sapiens
aaaatccatgtccttcttatatatgacactcagccttatgagttataaaaatctgtatatagaaaatatgaaatggcgaatcttcatacctctcctcaatctattgaacattctaattatactaatattcatttggggctgctgttattataattgttattgtttgaggaaamgaaacgggatattggatttaattatttcagtattgtaatgagagagccaaacttgaggacacaaagcaaagaaggataacatatacaaatgatccgaacagagcaggcatattgttattctctattaccacatgagcaattacataatacttacacctggaaaaccaagagcccccatacttcccatacctcatgatgttcccttgggtgttaggaaatgatgtgttatgctgtaaactctttcttgaatgtagacctttgatttcctaatcttctttaggaaatcaaaaagagattctacgacaaacatttatccattttgtggatactgagctttatttcttattttgttagtagcccaaaatattttgaacacagaattagtaactcatcacctctcaaagagtcaggcatatgaaagaagtatagcagtctgtccgatagggctctttttaagttggtaatttggttacagttgcaaagaactttctatataaaccagcagctagtcagtggctttggtcatactgattcaataattttgactaggttactgaattattatttgctcaaattcagcaggttatattgaaactcctttgtgagtaaatacacagcttttgaaaacaggttaatagtgaatttggtaaatataataattgctatatttatataggtgcaatgttaaaagaaaataatggttcttaaagatcaagattgagtactgagtagaaaagttttatttccaacctggaaaccaatccagcacagtataaataagctctagagctaggagatagtacttaggaaggaggaatggaacaggtttttaaaagccaaaacccatctgcctttcttcctgaataaagcaatctaaaagccattaggtggggccaaacaaggctgtcatctgtgcaattttgagagtgagagaagagccatgcagagatctgacagactattg

SEQ ID NO: 34571 - DNA, 648 bp, Homo sapiens
taaaaagagtctcagtgactgcacaaagccacacaaccaggaaggggccaagcagggattcgaactaaaggtggtagaagctaggtgctgtcactaattcacctcatctgttcttccagcactcagatctcctccatactgagtggaggcccctgttccctaaccttaaattttcctccttcattgttcatctgatttcctgttccgggaggcaaatgttgcagtgagccgagatcgcgccactgcactccagcctgggcaacagagcgagactccgtctcaaaaaaaaaaaaaaaaaaaaaaagataattataataatgcctatttgtataccttctgtatttggtgtgaatctgtacaccatcatggatgcaaaaagcattttcttgtgtttctttctttttcttttttctttttgagacagagtctccctctgtcgcccaggctggagtgcagtggtgcartcttggcttattgcaacctccacctcctgggctcaagcaatcctcccacctcagcctcctgaagagctgagaccataggcatatgccaccatgcccagctaattttttaatttttgtagagacggggttttaccatgttgcctaggttggtcttgaactcctgggctcaagtgatctggttgtc

SEQ ID NO: 34572 - DNA, 1130 bp, Homo sapiens
ctggttcagagttatttctatgttgtaaaagcaataaagtttaaagtactgaaatgaaaktatacaaatacattacacatcccattcttacttcataatccatataatggaaagtggagaacgtattcagaagatgtatagattggattaaggttttgttttgttgttatcattgggttcttttgtaggtagaatatctagattcgttaatctagccacattgcaagcattttggcaaaaaatagttcttctactgtatttgtaatcctgatgttggctgatgtcttccagacccataagatctagatgaacagcttgaaccaccccaccccccattctatgccctgaggaaatctaaggttctcctcaagatttctacatattttcaaagatttgatgtgcttccaaagccaagaaaggctccctattctctggctgctgtctctgttctgcattgttgacttatatggtcaacttggccccttcctggatttaggcatgcacacacacctacatattcacacaaagcattagtgactttagtgacgatttgaggattattggccagacttcctactaggaagcacacagcaagctatttaaaatcactcattaacgacttcacttcttaagtcttttcctccatcttgcttcagggagagctacacttgcttttgcctcagatgctgctagcccctcaccttctctctctctcctctccttatcttttctgctgtcatctccttccttcaaacatacagaacaggttagacttctttacttccttctgcaatagctgcatctccaaacatattaaagtactgagtagaacaccatttaacagagtctaccctaaagagatcttgtataaaaatgggaaaaatttattacatttatatagaaatcacttgggtattgttatattttacaaaatgggacaatataatacatattattacgcaatttgctttttcaatctctcatcagcatatcatgaataacatttcagggaacttaaatcaaccttactctttttaatggctgagtattactccatagtgtattatatttaggaatcccctctatcagtatatatttagcatttctctacaatttttcactcttataat

SEQ ID NO: 34573 - DNA, 1130 bp, Homo sapiens
ctggttcagagttatttctatgttgtaaaagcaataaagtttaaagtactgaaatgaaagtatacaaatacattacacatcccattcttacttcataatccatataatggaaagtggagaacgtattcagaagatgtatagattggattaaggttttgttttgttgttatcattgggttcttttgtaggtagaatatctagattcgttaatctagccayattgcaagcattttggcaaaaaatagttcttctactgtatttgtaatcctgatgttggctgatgtcttccagacccataagatctagatgaacagcttgaaccaccccaccccccattctatgccctgaggaaatctaaggttctcctcaagatttctacatattttcaaagatttgatgtgcttccaaagccaagaaaggctccctattctctggctgctgtctctgttctgcattgttgacttatatggtcaacttggccccttcctggatttaggcatgcacacacacctacatattcacacaaagcattagtgactttagtgacgatttgaggattattggccagacttcctactaggaagcacacagcaagctatttaaaatcactcattaacgacttcacttcttaagtcttttcctccatcttgcttcagggagagctacacttgcttttgcctcagatgctgctagcccctcaccttctctctctctcctctccttatcttttctgctgtcatctccttccttcaaacatacagaacaggttagacttctttacttccttctgcaatagctgcatctccaaacatattaaagtactgagtagaacaccatttaacagagtctaccctaaagagatcttgtataaaaatgggaaaaatttattacatttatatagaaatcacttgggtattgttatattttacaaaatgggacaatataatacatattattacgcaatttgctttttcaatctctcatcagcatatcatgaataacatttcagggaacttaaatcaaccttactctttttaatggctgagtattactccatagtgtattatatttaggaatcccctctatcagtatatatttagcatttctctacaatttttcactcttataat

SEQ ID NO: 34574 - DNA, 536 bp, Homo sapiens
tacaggaagagctgctgctgcccagatgaagcaccaaggctggggtgactcgcaggagtaggaagcagacaggaaggagcacatccctccccacaagcgccccctatggatagaatctcttatgaagcctgctggcaaagcagaaatgaggtttgcaggctcccagccctagctccacgaagtggaatgtagaagggtgggtttggagatgagagatagtcttctgagatataaaggaatttagaaggatgcttgacctgcctgagagttaaaaggcttagaagagtgattgctgcaactggattcaatatctagccataatatcaatacttaccaaatgcttcttatgtgccacatatggctctaagtgtcctatatgtgttatttctttacaataacctttaagtctttgtaataatccagtgaggtgtgcactactattagcacacttctacatgtgaggaaactgaagaacggaayggttgagtaacttggccaaggttgctcagcaaataagagacaaatcagaatttaca

SEQ ID NO: 34575 - DNA, 596 bp, Homo sapiens
gcatcttcagtttttaggccaaggatgtcaggattgtgacccattgggtgaggatgcctgagcaacaagtgagagaagcctataaaaagaattctaatttctagtatcaaacaagcccttgttctgccccacaaacacctcctaaaaactatcaactaaagggcttttcaggagcactgctttgtcagaccatcaacctgaacacctaaattattgttaaaaaaacaaacaaacaaaaaattcttccgtcctggttcagcaacacataaataagrtctgtcacaatgcctcaggaaccaaaaccaaaggattacaagctcttgttactcagaattttggagcatatttgggtcaaaacagaagagaacagcctccattttggggcacctagcctccaatttaatatctcttttcttgatattatatttaaaaaaaacgtttcaaaatatgaggctgctttcactttgagaagctggtattcacagccagaactgctagcagaaaatccaagtcttcccaagaggtggctgcaataaaaagtagagacgatattggctgcaaacttaacagtcatgttgggtggagcccaccttcat

SEQ ID NO: 34576 - DNA, 547 bp, Homo sapiens
gttaagaatttgtatgtcaaaaatgaaattttcaaatactttgtagcaaatataaatgaatataatttagactttggaataggaaatgatttcttaagcaagacacgactttggctattcaacctagtatgccatattaatagactgaaaaagaacctacacaatcrtctcaatagacgtgaggggaaaaaatatttgaaaatattccaaaatccatttctgcaaaactctcaactaactagaacagaaagatcttcttcaacctgataaagggcacaggtaacaccatactttgtggtgaaagtgaatacttttcccctaagatcaggagcaaggcaaagatatctcttccctgtcatgcttctattcaacattgatttgtatcttcctcctctataccacaaaataccttcaaaattgctggtgagctcagagctggagccaagccctaaccttgctgctggactcaagaatacccagctacttcctccatcaccctggaatgtgtgatacactacaaaggcccctcagttcctgccacctaggc

SEQ ID NO: 34577 - DNA, 547 bp, Homo sapiens
gttaagaatttgtatgtcaaaaatgaaattttcaaatactttgtagcaaatataaatgaatataatttagactttggaataggaaatgatttcttaagcaagacacgactttggctattcaacctagtatgccatattaatagactgaaaaagaacctacacaatcgtctcaatagacgtgaggggaaaaaatatttgaaaatattccaaaatccatttctgcaaaactctcaactaactagaacagaaagatcttcttcaacctgataaagggcacaggtaacaccatactttgtggtgaaagtgaatacttttcccctaagatcaggagcaaggcaaagatatctcttccctgtcatgcttctattcaacattgatttgtatcttcctcctctataccacaaaataccttcaaaattgctggtgagctcagagctggagccaagccctmaccttgctgctggactcaagaatacccagctacttcctccatcaccctggaatgtgtgatacactacaaaggcccctcagttcctgccacctaggc

SEQ ID NO: 34578 - DNA, 547 bp, Homo sapiens
gttaagaatttgtatgtcaaaaatgaaattttcaaatactttgtagcaaatataaatgaatataatttagactttggaataggaaatgatttcttaagcaagacacgactttggctattcaacctagtatgccatattaatagactgaaaaagaacctacacaatcgtctcaatagacgtgaggggaaaaaatatttgaaaatattccaaaatccatttctgcaaaactctcaactaactagaacagaaagatcttcttcaacctgataaagggcacaggtaacaccatactttgtggtgaaagtgaatacttttcccctaagatcaggagcaaggcaaagatatctcttccctgtcatgcttctattcaacattgatttgtatcttcctcctctataccacaaaataccttcaaaattgctggtgagctcagagctggagccaagccctaaccttgcygctggactcaagaatacccagctacttcctccatcaccctggaatgtgtgatacactacaaaggcccctcagttcctgccacctaggc

SEQ ID NO: 34579 - DNA, 547 bp, Homo sapiens
gttaagaatttgtatgtcaaaaatgaaattttcaaatactttgtagcaaatataaatgaatataatttagactttggaataggaaatgatttcttaagcaagacacgactttggctattcaacctagtatgccatattaatagactgaaaaagaacctacacaatcgtctcaatagacgtgaggggaaaaaatatttgaaaatattccaaaatccatttctgcaaaactctcaactaactagaacagaaagatcttcttcaacctgataaagggcacaggtaacaccatactttgtggtgaaagtgaatacttttcccctaagatcaggagcaaggcaaagatatctcttccctgtcatgcttctattcaacattgatttgtatcttcctcctctataccacaaaataccttcaaaattgctggtgagctcagagctggagccaagccctaaccttgctgctggactcaagaatacccagctacttcctccatcaccctggaatgtgtgatacactacaaagscccctcagttcctgccacctaggc

SEQ ID NO: 34580 - DNA, 801 bp, Homo sapiens
tattagtatttaatgcattattttaaaagcatatttgtttttcctttccggtcagggaaccaaaaaggaaaaagaaaaaaaaaaagaaagaaaaacaagtttatttttctaatataattatttgtttgtaatcttctgtgtttattttatgcatttgaaaacatagttctgagtagggcttcacaaagtagccagagaggtccctggcacatactccaacagccttcctggggcatgtgtacttcctggcagcctccctcctggttcagatgtttacctgcattttcttttctggagggcctcttccttccctgatctgagctctcttaataccttgcattatgatcagccatgtctgtctctcttactagtatgtgagctatttgagagaagggactctctcattattttatttttattcttagcacctaggaatgtgccttatttttagtgagccattagtaattaaatgccactttttttaaaccccatcccattctagtattgctcttcctcgtggcattgattgacagsttgttcttggcattttggctcagagttcactgctgtagaatgctcatcaggcaaggaatgatgatttttttttttcattggattttctcaatgctaactttaaatttttttaagtcagccttttggatgttgttgtgcctttgatgaagcagtccaggtattaggaacatactttcctccttcttcaggttgtaatcattggtagttagctgtcttttgtttgaaatttggctatttatttcaacattggtagtcttaggaaagcta

SEQ ID NO: 34581 - DNA, 804 bp, Homo sapiens
gatcctctagcatgcacctgtttacagtagagtgatgactgcttcctttcctctgaactttgagctcactttgagggaggagaatggtacrgtggacacttgagttctcacttaacattcaccactgggcatgagaagagaaacaggaccatttagaaatttgatagcaggagtccatcactgaaatttccatgaggactggctacatttttcagctttggttgaaatgtgaaagaagcatgaaaacaatactcttcaagattctgggggtgagtagttatggcctttagttttgagggctgtgcaatgcaaactgaggttcttgcagccaatgtttttttctcacataaaggcagtttgcttaaattttccagccccagtttttttcccctactaatttgaaaggagcaaataaactaaatgcctgacatatagtaggaaaagtccaattttttagaatattaactttagtatgtagaactttttttttctttttccttcccatctagtttatactaaccttttctggtcttgaaatttggagttagaagatgtgtcctcagaacttcatgcctacttgtcagattagatgagaacctgtacttgtgagattttgctgggtccatttatcattcccacttgctataaggtagtcccagcatcttttagactttataatagcctagttccctacatttatgcttgtgttttctgagtgtattttttcagtgttatttcagtggctttctgtaacaaaccctgctccagagtaagttcacactcatttcacagacgtgttacttg

SEQ ID NO: 34582 - DNA, 1193 bp, Homo sapiens
ttctgccacacccacatagatagactgtgagatgaagaagatactgtgccctgttgaaaaaaggactgatgaccaaaaatcagtagataatcccttccagcaaaccattaaaaatatttttgcattattcaaagattaaaacagtagaaattatattatccttttacaaataagtaggcatttatttatagttgttatatatccatttatcgatttcactgtaatctatttcagttccactgaggtccactaaaaataacctctcctggctggcctcctctgtcaaccatctcactgagtgctttggcttgcctagttcagcctcatcaaagaagggagacatcttcaagtgcagcttgcctatcaaggagttgatagaaatggctttaggcgttcctactatagtcaaagtatccttggaaaaatttaaggacaaacactcaacttctccttaatacttagttatctggaaaatcacaataaggtcttgtgtgtggtctagggacttcactgagcagagaatgcagtgccacacaccactcacatgctgattgagcaagatacaggacactcatgctttaaaaaacagcctcttgatggcataattcttcatctggctacagagccccagctcaagccccagctgcaggcctacccattacrttgcttctagcctcaaaatgcttggctgttagtctctgaatcttatccccagggtgagtttacttgggccgtggaagcttcccaggtgtggggtgctgataggaaagccagaaagagtaggctgtgccagtaggagcatcctaagcttcaggctacaaggaaaagctagaaaaggcttgtagttttaatagctgagaaagaggatgctaggtatctcaaggtaggaaagcatatctgtggacagaaaggactgtagaatagccaaatcagagggaagggccactctacctagttcagtgaatggcctgagacaactggaagcaagaccctgctagtcctgccacagtacacacaggttccttttcaaaaggaaaaagggaagcaaagataaggaggtgttttcaatggctttgtcctcagaacaaaggcaagaggcaggaaggtccattacaaatagacgtatcagtaccagcccctgtgctaagtccaggcccagatgaaattggggctgatattgtagactcaggatc

SEQ ID NO: 34583 - DNA, 1193 bp, Homo sapiens
ttctgccacacccacatagatagactgtgagatgaagaagatactgtgccctgttgaaaaaaggactgatgaccaaaaatcagtagataatcccttccagcaaaccattaaaaatatttttgcattattcaaagattaaaacagtagaaattatattatccttttacaaataagtaggcatttatttatagttgttatatatccatttatcgatttcactgtaatctatttcagttccactgaggtccactaaaaataacctctcctggctggcctcctctgtcaaccatctcactgagtgctttggcttgcctagttcagcctcatcaaagaagggagacatcttcaagtgcagcttgcctatcaaggagttgatagaaatggctttaggcgttcctactatagtcaaagtatccttggaaaaatttaaggacaaacactcaacttctccttaatacttagttatctggaaaatcacaataaggtcttgtgtgtggtctagggacttcactgagcagagaatgcagtgccacacaccactcacatgctgattgagcaagatacaggacactcatgctttaaaaaacagcctcttgatggcataattcttcatctggctacagagccccagctcaagccccagctgcaggcctacccattacgttgcttctagcctcaaaatgcttggctgttagtctctgaatcttatccccagggtgagtttacttgggccgtggaagcttcccaggtgtggggtgctgataggaaagccagaaagartaggctgtgccagtaggagcatcctaagcttcaggctacaaggaaaagctagaaaaggcttgtagttttaatagctgagaaagaggatgctaggtatctcaaggtaggaaagcatatctgtggacagaaaggactgtagaatagccaaatcagagggaagggccactctacctagttcagtgaatggcctgagacaactggaagcaagaccctgctagtcctgccacagtacacacaggttccttttcaaaaggaaaaagggaagcaaagataaggaggtgttttcaatggctttgtcctcagaacaaaggcaagaggcaggaaggtccattacaaatagacgtatcagtaccagcccctgtgctaagtccaggcccagatgaaattggggctgatattgtagactcaggatc

SEQ ID NO: 34584 - DNA, 1193 bp, Homo sapiens
ttctgccacacccacatagatagactgtgagatgaagaagatactgtgccctgttgaaaaaaggactgatgaccaaaaatcagtagataatcccttccagcaaaccattaaaaatatttttgcattattcaaagattaaaacagtagaaattatattatccttttacaaataagtaggcatttatttatagttgttatatatccatttatcgatttcactgtaatctatttcagttccactgaggtccactaaaaataacctctcctggctggcctcctctgtcaaccatctcactgagtgctttggcttgcctagttcagcctcatcaaagaagggagacatcttcaagtgcagcttgcctatcaaggagttgatagaaatggctttaggcgttcctactatagtcaaagtatccttggaaaaatttaaggacaaacactcaacttctccttaatacttagttatctggaaaatcacaataaggtcttgtgtgtggtctagggacttcactgagcagagaatgcagtgccacacaccactcacatgctgattgagcaagatacaggacactcatgctttaaaaaacagcctcttgatggcataattcttcatctggctacagagccccagctcaagccccagctgcaggcctacccattacgttgcttctagcctcaaaatgcttggctgttagtctctgaatcttatccccagggtgagtttacttgggccgtggaagcttcccaggtgtggggtgctgataggaaagccagaaagagtaggctgtgccagtaggagcatcctaagcttcaggctacaaggaaaagctagaaaaggcttgtagttttaatagctgagaaagaggatgctaggtatctcaaggtaggaaagcatatctgtggacagaaagractgtagaatagccaaatcagagggaagggccactctacctagttcagtgaatggcctgagacaactggaagcaagaccctgctagtcctgccacagtacacacaggttccttttcaaaaggaaaaagggaagcaaagataaggaggtgttttcaatggctttgtcctcagaacaaaggcaagaggcaggaaggtccattacaaatagacgtatcagtaccagcccctgtgctaagtccaggcccagatgaaattggggctgatattgtagactcaggatc

SEQ ID NO: 34585 - DNA, 1193 bp, Homo sapiens
ttctgccacacccacatagatagactgtgagatgaagaagatactgtgccctgttgaaaaaaggactgatgaccaaaaatcagtagataatcccttccagcaaaccattaaaaatatttttgcattattcaaagattaaaacagtagaaattatattatccttttacaaataagtaggcatttatttatagttgttatatatccatttatcgatttcactgtaatctatttcagttccactgaggtccactaaaaataacctctcctggctggcctcctctgtcaaccatctcactgagtgctttggcttgcctagttcagcctcatcaaagaagggagacatcttcaagtgcagcttgcctatcaaggagttgatagaaatggctttaggcgttcctactatagtcaaagtatccttggaaaaatttaaggacaaacactcaacttctccttaatacttagttatctggaaaatcacaataaggtcttgtgtgtggtctagggacttcactgagcagagaatgcagtgccacacaccactcacatgctgattgagcaagatacaggacactcatgctttaaaaaacagcctcttgatggcataattcttcatctggctacagagccccagctcaagccccagctgcaggcctacccattacgttgcttctagcctcaaaatgcttggctgttagtctctgaatcttatccccagggtgagtttacttgggccgtggaagcttcccaggtgtggggtgctgataggaaagccagaaagagtaggctgtgccagtaggagcatcctaagcttcaggctacaaggaaaagctagaaaaggcttgtagttttaatagctgagaaagaggatgctaggtatctcaaggtaggaaagcatatctgtggacagaaaggactgtagaatagccaaatcagagggaagggccactctacctagttcagtgaatggcctgagacaactggaagcaagaccctgctagtcctgccacagtacacacaggttccttttcaaaaggaaaaagggaagcaaagataaggaggtgttttcaatggctttgtcctcagaacaaaggcaagaggcaggaaggtccattacaaatagaygtatcagtaccagcccctgtgctaagtccaggcccagatgaaattggggctgatattgtagactcaggatc

SEQ ID NO: 34586 - DNA, 1193 bp, Homo sapiens
ttctgccacacccacatagatagactgtgagatgaagaagatactgtgccctgttgaaaaaaggactgatgaccaaaaatcagtagataatcccttccagcaaaccattaaaaatatttttgcattattcaaagattaaaacagtagaaattatattatccttttacaaataagtaggcatttatttatagttgttatatatccatttatcgatttcactgtaatctatttcagttccactgaggtccactaaaaataacctctcctggctggcctcctctgtcaaccatctcactgagtgctttggcttgcctagttcagcctcatcaaagaagggagacatcttcaagtgcagcttgcctatcaaggagttgatagaaatggctttaggcgttcctactatagtcaaagtatccttggaaaaatttaaggacaaacactcaacttctccttaatacttagttatctggaaaatcacaataaggtcttgtgtgtggtctagggacttcactgagcagagaatgcagtgccacacaccactcacatgctgattgagcaagatacaggacactcatgctttaaaaaacagcctcttgatggcataattcttcatctggctacagagccccagctcaagccccagctgcaggcctacccattacgttgcttctagcctcaaaatgcttggctgttagtctctgaatcttatccccagggtgagtttacttgggccgtggaagcttcccaggtgtggggtgctgataggaaagccagaaagagtaggctgtgccagtaggagcatcctaagcttcaggctacaaggaaaagctagaaaaggcttgtagttttaatagctgagaaagaggatgctaggtatctcaaggtaggaaagcatatctgtggacagaaaggactgtagaatagccaaatcagagggaagggccactctacctagttcagtgaatggcctgagacaactggaagcaagaccctgctagtcctgccacagtacacacaggttccttttcaaaaggaaaaagggaagcaaagataaggaggtgttttcaatggctttgtcctcagaacaaaggcaagaggcaggaaggtccattacaaatagacrtatcagtaccagcccctgtgctaagtccaggcccagatgaaattggggctgatattgtagactcaggatc

SEQ ID NO: 34587 - DNA, 1193 bp, Homo sapiens
ttctgccacacccacatagatagactgtgagatgaagaagatactgtgccctgttgaaaaaaggactgatgaccaaaaatcagtagataatcccttccagcaaaccattaaaaatatttttgcattattcaaagattaaaacagtagaaattatattatccttttacaaataagtaggcatttatttatagttgttatatatccatttatcgatttcactgtaatctatttcagttccactgaggtccactaaaaataacctctcctggctggcctcctctgtcaaccatctcactgagtgctttggcttgcctagttcagcctcatcaaagaagggagacatcttcaagtgcagcttgcctatcaaggagttgatagaaatggctttaggcgttcctactatagtcaaagtatccttggaaaaatttaaggacaaacactcaacttctccttaatacttagttatctggaaaatcacaataaggtcttgtgtgtggtctagggacttcactgagcagagaatgcagtgccacacaccactcacatgctgattgagcaagatacaggacactcatgctttaaaaaacagcctcttgatggcataattcttcatctggctacagagccccagctcaagccccagctgcaggcctacccattacgttgcttctagcctcaaaatgcttggctgttagtctctgaatcttatccccagggtgagtttacttgggccgtggaagcttcccaggtgtggggtgctgataggaaagccagaaagagtaggctgtgccagtaggagcatcctaagcttcaggctacaaggaaaagctagaaaaggcttgtagttttaatagctgagaaagaggatgctaggtatctcaaggtaggaaagcatatctgtggacagaaaggactgtagaatagccaaatcagagggaagggccactctacctagttcagtgaatggcctgagacaactggaagcaagaccctgctagtcctgccacagtacacacaggttccttttcaaaaggaaaaagggaagcaaagataaggaggtgttttcaatggctttgtcctcagaacaaaggcaagaggcaggaaggtccattacaaatagacgtatcagtaccagcccctgtgctaagtccaggcccagatgaaattggggctratattgtagactcaggatc

SEQ ID NO: 34588 - DNA, 570 bp, Homo sapiens
tggctagaccaatattcaaatgggggtggatctgatgccaaagcctgggcttttattctaacacaaggccacaagccacattaatctttattattgccattaatatgccacaagcttatatgttacctcttactgtctaatcttcccagactcaaaaaagacataggctaagaccaagccatattagtctagtttttctgtctagtccatatcagaacatatactgtaagtgccctagttcacagggttaggaatcactatattatttagttggtaattttcctttytgtggcttctggcataagctctctctagaaccagggccaattgtttctctctaatgacttggagggaggctagcctgaggctatccttaaaagtgcaagttgatttatcatcttttcctttgttccatggatgagatccaacatgcagcttcaactagcctcacggggacagttatgttaactgatttcattccacaagaagaaacattggtaacaagatttggctattttctaatgttatgaatgcagtgtttaagcaattattaaagtatatgcatacttt

SEQ ID NO: 34589 - DNA, 570 bp, Homo sapiens
tggctagaccaatattcaaatgggggtggatctgatgccaaagcctgggcttttattctaacacaaggccacaagccacattaatctttattattgccattaatatgccacaagcttatatgttacctcttactgtctaatcttcccagactcaaaaaagacataggctaagaccaagccatattagtctagtttttctgtctagtccatatcagaacatatactgtaagtgccctagttcacagggttaggaatcactatattatttagttggtaattttcctttctgtggcttctggcataagctctctctagaaccagggccaattgtttctctctaatgacttggagggaggctagcctgaggctatccttaaaagtgcaagttgatttatcatcttttcctttgttccatggatgagatccaacatgcagcttcaactagcctcacggggacagwtatgttaactgatttcattccacaagaagaaacattggtaacaagatttggctattttctaatgttatgaatgcagtgtttaagcaattattaaagtatatgcatacttt

SEQ ID NO: 34590 - DNA, 1216 bp, Homo sapiens
atcttttccttgtattatttgaccatctgatagatagcacacctatcagggaatggtcttataaggtattttcacccaaagcacaccttaaaaactgatgaattacttatcttgggaattaataaaaataaattggaagatccatattttaaatagcaaagaatctttttcatcactaaaaagtgatacaatggaaagaattaaattttattataagcaycaaagtcaactgctagggaactcactgagtgtagaacaaggagtatcagactaactgagatggcagaattagctaaggcctataaagtaaggggagctgctcagctgactaccttgcatagaagggagagtgccagcagtccaaggacattcaagaagattttgtctatccagggtacccttgatatcctagacatctgaccctaagggaagaaggaagaggaagtgtagagtgcaggtaaacagccaaagcaggtaatacttaggtaaggacagccattccatgttctctctggattgaaccagggcccctctaagtgagctggggtacagaaaattagtccagcccaataggactagagagaggggactgtcaaggaccagggcaattagaacagagctcaggggagtactgcagtcctgatgggaaacagagtgcagatctgaagctgcagtgcattccaacatgtaggatacattaagtagagattggagaaaggttcaattcagcaggcacactcaggacataccatgtctaaagcaacttaagctaagctgagcctttcatattataaaacattcacaggcttttccaaatgccccttgtcacaccaagtctcaatgtattgaactatttactataagttactattaaacatttaaaattaatttcatagaccatcaacaagtaggacatttgtagctatctttactaaatgatagaatgccccagagggctggtggcagctttaaagatttttcatagatggtttcagttggatgtaagttctgttttgcaaccaaaagaatgtaagaaatttgacccatatattgcaaaccttctgataagtgacatgaacctcatgagaggattcagccaacaatgcctcattgactaggcaagaaattttgtaacttctcaatgaatactcagggctttatgttaggagctggaattcagtgaacacaaataaaatcattagcataaataaatgca

SEQ ID NO: 34591 - DNA, 1216 bp, Homo sapiens
atcttttccttgtattatttgaccatctgatagatagcacacctatcagggaatggtcttataaggtattttcacccaaagcacaccttaaaaactgatgaattacttatcttgggaattaataaaaataaattggaagatccatattttaaatagcaaagaatctttttcatcactaaaaagtgatacaatggaaagaattaaattttattataagcaccaaagtcaactgctagggaactcactgagtgtagaacaaggagtatcagactaactgagatggcagaattagctaaggcctataaagtaaggggagctgctcagctgactaccttgcatagaagggagagtgccagcagtccaaggacattcaagaagattttgtctatccagggtacccttgatatcctagacatctgaccctaagggaagaaggaagaggaagtgtagagtgcaggtaaacagccaaagcaggtaatrcttaggtaaggacagccattccatgttctctctggattgaaccagggcccctctaagtgagctggggtacagaaaattagtccagcccaataggactagagagaggggactgtcaaggaccagggcaattagaacagagctcaggggagtactgcagtcctgatgggaaacagagtgcagatctgaagctgcagtgcattccaacatgtaggatacattaagtagagattggagaaaggttcaattcagcaggcacactcaggacataccatgtctaaagcaacttaagctaagctgagcctttcatattataaaacattcacaggcttttccaaatgccccttgtcacaccaagtctcaatgtattgaactatttactataagttactattaaacatttaaaattaatttcatagaccatcaacaagtaggacatttgtagctatctttactaaatgatagaatgccccagagggctggtggcagctttaaagatttttcatagatggtttcagttggatgtaagttctgttttgcaaccaaaagaatgtaagaaatttgacccatatattgcaaaccttctgataagtgacatgaacctcatgagaggattcagccaacaatgcctcattgactaggcaagaaattttgtaacttctcaatgaatactcagggctttatgttaggagctggaattcagtgaacacaaataaaatcattagcataaataaatgca

SEQ ID NO: 34592 - DNA, 573 bp, Homo sapiens
gaaaatgactattttgcttcactaatatgacaaataattatgacacacatcatttgtaaagtccttcattgcctcccaaacactttcacttcatcacctcaattgattccctacatctttgtgaagcagaaaatgcatctgctgttggaggagactgaggctcagaggagttaagtgatttttccaaggatcaagctgctacttaaacccaagttttaatttcagatccatcataatttttgggacaatgtgctgcctcatattaaactatrttcaaaaacatattaagcatacaatgataagaatgcttacagctctcaaagctttgctcagcattttgagagtgtagtttgagaagaacaattatcagaaaaagaaattcataatatgctcacttaattactgttcaatgcacatctagtacttgtgaattaccataagtttttagatggtttaactttcaaggagctgaatatcttgcaggtcaaatatgaaatcaagtagtcagtctactgagagccaaactgaagtccaaaattgcagaatatattttgctttaggtcatgtaccaaa

SEQ ID NO: 34593 - DNA, 1273 bp, Homo sapiens
aatgattctcaaatttctgctcaatctcttccggggacaggtcactctctacttgtgagtaagaactagattattatttttgttagccataataatcaatatttgttgatcactttctggaagacaggaactgtcacaaacacaggcatccttggtgtctagcatgaacctggcacataagaggtgctcaataaataaaagcctatgtgatgaatgaataagtttataaattaataaaacaatatatcataacaatcatatgaagtcaggaatatcactcctacttctcaggtggaaaaaggtatttgggggatgaaccctgaggcagacaagtggtccttgtgcttcggggctggtcaatcagcttttcctccctccctgtccctttagaagttctcttggcaaaatgcacacgggacaaatggaaaagggatttcagactcttgtggagacccttccttggtaatgaggctgaactcaagctatacatgtggttttggactcctaaactgaggaaccaactccagccaggacctttcagagtcctgccaatggcggctgatagttaaatttaaacttacggataatttgggctgggtttctgactgctgttgaaagctaaaatcaccctgattactctttgggtcagtttgccaagagtattttgttggcccttgaagagcatcccattcagggaggttgatcttttttaaaatactgctcctatcatgttatgcctctgcccagaaactactgcttgctatgggatgagaactgcccactcaccccctgtgacttccctggagtagtttcctttaggactggtgcactcactgtatagagaaaaaccctctgtctggatctttatagtggcagagtgtcaaacctggtcttatctgagtcccactgtccagaaatctttcccaggctcaccaacccctgcaccagaggctttccactgctcccaggggacctctaatgccaatcccttcatatctttaatgaccactgtcttctgcagccctctaacaaaggtttctgctgcttaaccctgcattgcacagaactttgtatgcagcaggtgcttaatatagacaataaycagtgtgagcctggtcacatgcattttaggctgattgcaggaccaccatggctgctgcctggaggagagagaaaagcaaccgtgtgcatgagggcagagtgacaggcactggacctgggctattttatctttctgtccagtaagataaaatgaaaaaaactcagtccttta

SEQ ID NO: 34594 - DNA, 1912 bp, Homo sapiens
tctagaccacttggctccgtggcttcagccccctttccagggaagtgaattgttctgtctcgattgcgatccaggtgccactggggtatggaaaaaaactcctacagctagcttattgtctgcccaaacggctgcccagttttgtgcttaaaacctagggccctggtggtgtaggaatctcctgggctgcaggtttcaaagacagtgggaaaagcatagtttctgggccagaaggcacctttcctcttggcacggaagtccctcagggcttcccttggctaggggagggagttccctgacccccttgtgcttcctgcgtgaggcgacgccccaccctgcttcggcttgccctccatgggctgcacccattgtctaaccagtcccagtgagatgagctgggtacctcaattggaaatgcagaaatcacctgccttctgcattgatctcactgggagctgcagactggagttgttcctattcagtcatcttgctagccacccccagaaaaaaattttaaaaagtgtatcattttagatagcaaattgtagagcagtacatacaatatagaggtagatagatagatagatagatagakagagagatagatagatagatattatgactgaatatgtaattatgtctgtaaaggtacaatccacttacaactgtacctaactttaggaaataattttttaaaactccatatgactttatactgtgtttattaataactcatatttaattgaaaattctttacaaagcaatcatttggagctcaagatgcacttatccttgaagccatcatttatctatatattcattcatccaatcagtcaacaaatattgcacaccaggaactattctagataccaggatgtggaagaaacaagacagataaaaatcttgccctagaaaaatttacttttaaaaagaaggataaagggacagataataaaccatcaaacaaataaaaataataacttctgagaacaataaatgctcttaagacaatgaaatattttaatgtagtagagtatctggaggtggggtgtggaggatggattttttggagaatgttaggaaagaacttttgaagacaggaatgtggaagatggagacctggaaggacagcctcccaggaaggcgaaatggcactgctaatgtcagagttgggaaggctggcatggaccagagcaagcaggggagaagatggtgaataatgagtggatccctgatggacatgaggctcgtctgagggatttttgagggaggcaagaactggcaatcacagagcactgggcagcactgggcagttctgcgccggtgtggaacatgccagctgtcctgcaagccacaatgattccaccgagtgaagtgaagtggtctcctaagagtcacatggaggtggggaaggggagggagttgatgggtgtagtgattcatgttttgggcctgagtttgaatcctggctctggctagggaattgcctattcaccatggggttctgttttctcatttataaaactttgggggtggtcacaaggtctatttcacagagtgatggtagattttaaaagagccagggcacccacagtggctcacattcagaactgaagagccatttcattactctaagacttacttctctgaaaaccacctagccagggattcagactggcgggggttgtagcacttgctggatgaatgtggggggaatcagctgcttcgtgtggttatgctcacatttgttagggttcaatagctcttaagaaactaaagccacatgacagataggagccactaggaacctggcactggagaagctcagcctgtagctgtggacatcacagagttactaagtcaatgggcttgattgcatatgtgtgtgttagttatgttctttaaccatgca

SEQ ID NO: 34595 - DNA, 630 bp, Homo sapiens
tgagcttccaggcagtgtgggcagtcaagcaggagctgtgggactattgccagggaaattggagggtgggctagaagccccccaaatccccttgctatgtggtatctgtggggcaatgaaaagggcaatacctggaatattctggactggctggtgaggaacccccaaccagaatgagaggtccgagcaggagcagctggatgctggcttctggagagagtggtggctcctgcctggcatatgtcctaggcctgctggagcgtgagaaggacgctcagcaaagcacagcctgacctgggcctttttccaggtctacatgttcaagtgcgtgtggcggtgctacagattgatcaagtgcatgaactcggtggaggagaagagaaactccaagatgctccagaaggtgagtgtggctgcaggtgggtgccagccctgtcactaactccctgtgccatttgggtcaagtttccttccctctctggaccttggtttctctatttgtaagatgagggttggaacaraagaaatgtgttctctttcagttctggtagtctaagattcattcactcactcattcatttattcagtatttactgcctctcactctttgctagtctcatatcgattcca

SEQ ID NO: 34596 - DNA, 1145 bp, Homo sapiens
taaatgttacattttttttaatttaaagatagtttttataaaaacaagcaatgggcaaagaggatttttttttaaaaaaccttagtgtttatagaggaaaatggaatctttcaaagtcttcaacagacaacaggccaagtgggggtgcctcaygtctgtaaaatcccaacattttgggaggccaggcaagaggatcacttgagtccagaagttcgagaccagcctgggcaacatagcaagacactggactctataaaaaatataaaatataaaatataaaaagaaacaatggaaccatctgtgtgtctttcagctgaactgtgtgccacgaatcagactgctgatttatctagagggcctggtgtgattcatgtgaaaatgccattcagccactcaacaaaccttccctaagaaaggtgcatgctgggcccatcggtcctctggaggaagccaagatgggtggatatagctctgcctgctggagcttcttaggtcatagaggacattgttatactaagaaaatattcaagggagacaaaaatgatctttttgggatgcaatcatgtcttataccccttgcttactagcattgaaggacttcctcttagccccggaatgaaactcagctgcgacgcatgcaaggacttcctttatctggccctgacacccctacagccctcagtgccttgagtctctcacccttggttctccatgtgacactcatactgaagtctttgggcccctggaatgtcctgagctttcttccctctgtgcttttgcacactcagttccctcagtctggaatgtctatcaccatctgccctacacatggccgagccccactgacctattctgttttttttttttttcaaagaagcattccatgaaccctggaccaaaataagtcccctggctgcacacatctacagcgccccaacccctgtcccctccagggttactgtgtcagactcattcactatggtaaccccagcagcgccccagagcatagcagaggtggaatcagtatttgctggatttaattttatgtatgtcttaagagttctatgcaaactatagaagaggaagagataacttgtatttggagggaagaggtgggcttgaggaggaagtggcatggcacgagg

SEQ ID NO: 34597 - DNA, 1145 bp, Homo sapiens
taaatgttacattttttttaatttaaagatagtttttataaaaacaagcaatgggcaaagaggatttttttttaaaaaaccttagtgtttatagaggaaaatggaatctttcaaagtcttcaacagacaacaggccaagtgggggtgcctcatgtctgtaaaatcccaacattttgggaggccaggcaagaggatcacttgagtccagaagttcgagaccagcctgggcaacatagcaagacactggactctataaaaaatataaaatataaaatataaaaagaaacaatggaaccatctgtgtgtctttcagctgaactgtgtgccacgaatcagactgctgatttatctagagggcctggtgtgattcatgtgaaaatgccattcagccactcaacaaaccttccctaagaaaggtgcatgctgggcccatcggtcctctggaggaagccaagatgggtggatatagctctgcctgctggagcttcttaggtcatagaggacattgttatactaagaaaatattcaagggagacaaaaatgatctttttgggatgcaatcatgtcttataccccttgcttactagcattgaaggacttcctcttagccccggaatgaaactcagctgcgacgcatgcaaggacttcctttatctggccctgacacccctacagccctcagtgccttgagtctctcacccttggttctccatgtgacactcatactgaagtctttgggcccctggaatgtcctgagctttcttccctctgtgcttttgcacactcagttccctcagtctggaatgtctatcaccatctgccctacacatggccragccccactgacctattctgttttttttttttttcaaagaagcattccatgaaccctggaccaaaataagtcccctggctgcacacatctacagcgccccaacccctgtcccctccagggttactgtgtcagactcattcactatggtaaccccagcagcgccccagagcatagcagaggtggaatcagtatttgctggatttaattttatgtatgtcttaagagttctatgcaaactatagaagaggaagagataacttgtatttggagggaagaggtgggcttgaggaggaagtggcatggcacgagg

SEQ ID NO: 34598 - DNA, 591 bp, Homo sapiens
tatgacaacaacaaaaaagtaaacaatgggggaaatctctggcagagagagatagtgggaaaacataccattgatagagaagaaacatggagacgttctgatgtaataataatggctatgtgggtttactgtgcacccagccttgctcaatgcctttacatgcatgcatyatctcaccaaagaatatgagataggtggaagctccaagcaaatggaactggattgctgggcacatgatacggtttggctctgtgtccccgcccaaatctcatctagaattgtaatccggacgtgtagagggagggacctgtaatccccatgtgtggaggtagggaggtgattagatcatagggcggtttccccatgctgtgctccagatagtgagttctcacaggtctgatggttttataaggggttcttcccctttcactttctcttctttcttctgctgccttgtgaagagtgtgcttgcttccccttccgccatgattataagtttcccaaggccttgccagcttgcagaactgtgagtcaattaaacctctttcctttataaattgcccagtctcagggaagttctttatagcagtg

SEQ ID NO: 34599 - DNA, 591 bp, Homo sapiens
tatgacaacaacaaaaaagtaaacaatgggggaaatctctggcagagagagatagtgggaaaacataccattgatagagaagaaacatggagacgttctgatgtaataataatggctatgtgggtttactgtgcacccagccttgctcaatgcctttacatgcatgcattatctcaccaaagaatatgagataggtggaagctccaagcaaatggaactggattgctgggcacatgatacggtttggctctgtgtccccgcccaaatctcatctagaattgtaatccggacgtgtagagggagggacctgtaatccccatgtgtggaggtagggaggtgattagatcatagggcggtttccccatgctgtgctccrgatagtgagttctcacaggtctgatggttttataaggggttcttcccctttcactttctcttctttcttctgctgccttgtgaagagtgtgcttgcttccccttccgccatgattataagtttcccaaggccttgccagcttgcagaactgtgagtcaattaaacctctttcctttataaattgcccagtctcagggaagttctttatagcagtg

SEQ ID NO: 34600 - DNA, 591 bp, Homo sapiens
tatgacaacaacaaaaaagtaaacaatgggggaaatctctggcagagagagatagtgggaaaacataccattgatagagaagaaacatggagacgttctgatgtaataataatggctatgtgggtttactgtgcacccagccttgctcaatgcctttacatgcatgcattatctcaccaaagaatatgagataggtggaagctccaagcaaatggaactggattgctgggcacatgatacggtttggctctgtgtccccgcccaaatctcatctagaattgtaatccggacgtgtagagggagggacctgtaatccccatgtgtggaggtagggaggtgattagatcatagggcggtttccccatgctgtgctccagatagtgagttctcacaggtctgatggttttataaggggttcttcccctttcactttctcttctytcttctgctgccttgtgaagagtgtgcttgcttccccttccgccatgattataagtttcccaaggccttgccagcttgcagaactgtgagtcaattaaacctctttcctttataaattgcccagtctcagggaagttctttatagcagtg

SEQ ID NO: 34601 - DNA, 559 bp, Homo sapiens
ccagcactttgggaggacgagtcgggcagatcatgaggtcaggaaatggagaccatcctggctaacacggctaacaaaacaaaacaaaacaaaaattagccaatttgttaaaawtaagagtatttaggggtagcacttcattaatgttgaagtctaacattttttctatatacttatttttgtcaattataattccatttatttgaaactgtagaacatatatggaattgggggagattgtttttatttttgctatttatataacttgtgtaagttgctttgtaagtcttttactcatttttctaagagacttaatatttttcttgtggattttcgtaaacttttcacatattaaagacattaattccttatcctatttccttcaaatattttcccagtttttcatttgcctttcagtagtgccctttgacatattcagaatgattcaatttggtcttaaaatttatttgtgcttagataagttcttatgcatctaaaaatcagatatgcatatttactggtttttgtttgtttatattttactctatattccatgtga

SEQ ID NO: 34602 - DNA, 559 bp, Homo sapiens
ccagcactttgggaggacgagtcgggcagatcatgaggtcaggaaatggagaccatcctggctaacacggctaacaaaacaaaacaaaacaaaaattagccaatttgttaaaattaagagtatttaggggtagcacttcattaatgttgaagtctaacattttttctatatacttatttttgtcaattatrattccatttatttgaaactgtagaacatatatggaattgggggagattgtttttatttttgctatttatataacttgtgtaagttgctttgtaagtcttttactcatttttctaagagacttaatatttttcttgtggattttcgtaaacttttcacatattaaagacattaattccttatcctatttccttcaaatattttcccagtttttcatttgcctttcagtagtgccctttgacatattcagaatgattcaatttggtcttaaaatttatttgtgcttagataagttcttatgcatctaaaaatcagatatgcatatttactggtttttgtttgtttatattttactctatattccatgtga

SEQ ID NO: 34603 - DNA, 576 bp, Homo sapiens
tggatcttaagtatacatcttggtgaattctgatagatgtatacatccatgtaaccaacatcatatatatatctgggcatggtggtaagcrcctgggttccagctactcgggaggctgaggtgggaggatcacttgagcccaggagttagagctgctgtgagctatgatatcaccctactgcactccagcctaagcaacagagcaagaccatgattctattttttttttaagtaaatgaaggggaagtgtgtgatatggaggacatagctcttttatatttcacagataacagaattatatgcaataattcaaaactatggtaaaagcaatttaggttagacttttagaaagaacttagtgattgggcatgctcccccctgccaaaagtcagtcgccatagtccaatgctgatggtgctaccggaagcaaaggaaaggacaactggccactgagagcctctctcagccctgagttggggaccacaggacatctgagagtattacttaatggaatccatgaaagaaaaactctaagtcagtacacatcctcattcatttaggctctcatcaactatg

SEQ ID NO: 34604 - DNA, 576 bp, Homo sapiens
tggatcttaagtatacatcttggtgaattctgatagatgtatacatccatgtaaccaacatcatatatatatctgggcatggtggtaagcgcctgggttccagctactcgggaggctgaggtgggaggatcacttgagcccaggagttagagctgctgtgagctatgatatcaccctactgcactccagcctaagcaacagagcaagaccatgattctattttttttttaagtaaatgaaggggaagtrtgtgatatggaggacatagctcttttatatttcacagataacagaattatatgcaataattcaaaactatggtaaaagcaatttaggttagacttttagaaagaacttagtgattgggcatgctcccccctgccaaaagtcagtcgccatagtccaatgctgatggtgctaccggaagcaaaggaaaggacaactggccactgagagcctctctcagccctgagttggggaccacaggacatctgagagtattacttaatggaatccatgaaagaaaaactctaagtcagtacacatcctcattcatttaggctctcatcaactatg

SEQ ID NO: 34605 - DNA, 576 bp, Homo sapiens
tggatcttaagtatacatcttggtgaattctgatagatgtatacatccatgtaaccaacatcatatatatatctgggcatggtggtaagcgcctgggttccagctactcgggaggctgaggtgggaggatcacttgagcccaggagttagagctgctgtgagctatgatatcaccctactgcactccagcctaagcaacagagcaagaccatgattctattttttttttaagtaaatgaaggggaagtgtrtgatatggaggacatagctcttttatatttcacagataacagaattatatgcaataattcaaaactatggtaaaagcaatttaggttagacttttagaaagaacttagtgattgggcatgctcccccctgccaaaagtcagtcgccatagtccaatgctgatggtgctaccggaagcaaaggaaaggacaactggccactgagagcctctctcagccctgagttggggaccacaggacatctgagagtattacttaatggaatccatgaaagaaaaactctaagtcagtacacatcctcattcatttaggctctcatcaactatg

SEQ ID NO: 34606 - DNA, 905 bp, Homo sapiens
tgcatgaaaaataaacttttaawgtgtcaagtcactgagatgtggggtaatttgtcatcgtagcttacaataattatcccaactaatacaggttcctcttgtattgtgttttcaatgatctccttcctttacctccttatatgcccaacaagatatggacaagaaagacaagacatgagcccagaggacttacgacttaatcgagtatttgaatgctaagatttaggcttctttgaatagatcttgcatttagattcgagttgactgaaaagtgcctagtgagtgtgtagtaaggtcagaagagaagagacagcttggaatgattaaagttagaagtgtttccaattgtctgtaagtccagaagttaccagaaaatacactaacacagacagaataaattattacaaatagttattgagagtcagagtctgaactaggcactgaggaaaggggaaggtgctatactgatatacaaaggcaaataagacacctctgcttttcacacaattgtgctgataatgacacatatacagaatcactaaatccagttaagctaataggtgcttaatagaacaaaaacaacaacaaaatataatttaaaaaatagaaggacaagaaaaaccctaaatggcatcaaaagttgatggggtagccaggcaaaatagtttgaagctgtagtcccagctattcaggaggctgaggcaggaggatcaccttctggccaggaatgtgagtccagcctgggcaatgtagcaagatcccatctctaaaaaaataagttatggagaatgtgagacttgggcagaactttgaaagatgtatatcactttgggaatgggcgtgggggacacaggtaggagaattacaacccaagttccagaaagggactcatttagtgtgatgtg

SEQ ID NO: 34607 - DNA, 905 bp, Homo sapiens
tgcatgaaaaataaacttttaatgtgtcaagtcactgagatgtggggtaatttgtcatcgtagcttacaataattatcccaactaatacaggttcctcttgtattgtgttttcaatgatctccttcctttacctccttatatgcccaacaagatatggacaagaaagayaagacatgagcccagaggacttacgacttaatcgagtatttgaatgctaagatttaggcttctttgaatagatcttgcatttagattcgagttgactgaaaagtgcctagtgagtgtgtagtaaggtcagaagagaagagacagcttggaatgattaaagttagaagtgtttccaattgtctgtaagtccagaagttaccagaaaatacactaacacagacagaataaattattacaaatagttattgagagtcagagtctgaactaggcactgaggaaaggggaaggtgctatactgatatacaaaggcaaataagacacctctgcttttcacacaattgtgctgataatgacacatatacagaatcactaaatccagttaagctaataggtgcttaatagaacaaaaacaacaacaaaatataatttaaaaaatagaaggacaagaaaaaccctaaatggcatcaaaagttgatggggtagccaggcaaaatagtttgaagctgtagtcccagctattcaggaggctgaggcaggaggatcaccttctggccaggaatgtgagtccagcctgggcaatgtagcaagatcccatctctaaaaaaataagttatggagaatgtgagacttgggcagaactttgaaagatgtatatcactttgggaatgggcgtgggggacacaggtaggagaattacaacccaagttccagaaagggactcatttagtgtgatgtg

SEQ ID NO: 34608 - DNA, 873 bp, Homo sapiens
tgcttggttatgcctttcttagtttagacagttgaccaaacaagtcatccagtctttatctctagaacaagaactccacctggtttagtccaygaactccgaacactgaaggagtaactccttccttagttcctccatcagcttagcatagatttttgccaaatataattgctcagcacttgcctggttatggtattacgctatttgcttcagcttggttttatcctgctgtgctatctgcatctcaccttaggaaacgtggcctcagtacctgcaccattaggcacaaactccagagtctgtgtcacagagccagttttccgtagtttcttccactacttctggagcgtgtgactgcttggttcagcctcagtgcctagtgtcttgaaaacaagccaagacccccaatcattgcacgtggtccaaacattttaaatgaggacatttgttttacccaacagcatagtgttcccttcctctagaggcagggtaaaataacccatgagcaagcaaatgccataattccttctaatttttgtaactggaatgtaataagaggacacaagacgggaatcctgaagtattcaagaacagtgattagtctgatagccatctgcacctaatcatcccagctgcctgaaaagttaactcatgacctcagtggacttatcaccccctggtatttgtagagccacattgtaatttagtgctttgtttgtgcactaaagtgtttctatacactaacttcctagttgacgtgtccttttgttcattatcagccgccaatttcacattccagtcggttgtcaggagtggctagactctctgatcataggcaagcctgcagcgctgcttttcaatacacttttaaaa

SEQ ID NO: 34609 - DNA, 808 bp, Homo sapiens
ttggagaacaaagccagaataaagccaatcctagtcatagcattgcaacttgtatcagatgaaagaaacctacaaaaagataattataaaatttagataaaatgtataaaacaactgagaaggcaaaatttgaggggctccaattaatcaaggtttaccgcttatattctgtgtgactgccagaaaaaaagaaacaaaactttttggtaggaagatcatttaaaatttctgtttttaatacataaggcctgttatttaataaaaaattatgagacaacctaaaaaaaaagaattaaatatcaaaacaccaattgacaagccaaatgataaaaactggcctacatatggttcagaaaatgatttcaataaatctactcttcaccattctaatccctttgcagtgccctaggatgktgactgactctcatgtataatatccctggacactattgtcctgaagctctaggtatgtttgtgctaataggaagaataggcaaaagatttaaaggtgggagaatccttccctacagcactaggaaatggatatggagttgttctcgctgagtgtacctccagggaggcagccttcatcagctatagtttctgctgcttcagttaattgctaccagcaatgttctctcaggcctaatgtagtaatggcttccggcagtagctagccctggggtatttcactatccctcatggtttcctttggtcttatctctatcttgtaaattgtcctgttattttatcttcttaaattttccttttaatgtataaccggttttttcttttttttttttttttt

SEQ ID NO: 34610 - DNA, 808 bp, Homo sapiens
ttggagaacaaagccagaataaagccaatcctagtcatagcattgcaacttgtatcagatgaaagaaacctacaaaaagataattataaaatttagataaaatgtataaaacaactgagaaggcaaaatttgaggggctccaattaatcaaggtttaccgcttatattctgtgtgactgccagaaaaaaagaaacaaaactttttggtaggaagatcatttaaaatttctgtttttaatacataaggcctgttatttaataaaaaattatgagacaacctaaaaaaaaagaattaaatatcaaaacaccaattgacaagccaaatgataaaaactggcctacatatggttcagaaaatgatttcaataaatctactcttcaccattctaatccctttgcagtgccctaggatggwgactgactctcatgtataatatccctggacactattgtcctgaagctctaggtatgtttgtgctaataggaagaataggcaaaagatttaaaggtgggagaatccttccctacagcactaggaaatggatatggagttgttctcgctgagtgtacctccagggaggcagccttcatcagctatagtttctgctgcttcagttaattgctaccagcaatgttctctcaggcctaatgtagtaatggcttccggcagtagctagccctggggtatttcactatccctcatggtttcctttggtcttatctctatcttgtaaattgtcctgttattttatcttcttaaattttccttttaatgtataaccggttttttcttttttttttttttttt

SEQ ID NO: 34611 - DNA, 808 bp, Homo sapiens
ttggagaacaaagccagaataaagccaatcctagtcatagcattgcaacttgtatcagatgaaagaaacctacaaaaagataattataaaatttagataaaatgtataaaacaactgagaaggcaaaatttgaggggctccaattaatcaaggtttaccgcttatattctgtgtgactgccagaaaaaaagaaacaaaactttttggtaggaagatcatttaaaatttctgtttttaatacataaggcctgttatttaataaaaaattatgagacaacctaaaaaaaaagaattaaatatcaaaacaccaattgacaagccaaatgataaaaactggcctacatatggttcagaaaatgatttcaataaatctactcttcaccattctaatccctttgcagtgccctaggatggtgactgactctcatgtataatatccctggacactattgtcctgaagctctaggtatgtttgtgctaataggaagaataggcaaaagatttaaaggtgggagaatccttccctacagcactaggaaatggatatggagttgttctsgctgagtgtacctccagggaggcagccttcatcagctatagtttctgctgcttcagttaattgctaccagcaatgttctctcaggcctaatgtagtaatggcttccggcagtagctagccctggggtatttcactatccctcatggtttcctttggtcttatctctatcttgtaaattgtcctgttattttatcttcttaaattttccttttaatgtataaccggttttttcttttttttttttttttt

SEQ ID NO: 34612 - DNA, 652 bp, Homo sapiens
gagaccctgtctcaaaataaattaatgaatgaataaatacataaataaataaaatagaagttgaagttttaaaaaatgtattttttaattgcacaaacacaaatatggaatgaattgagaaagctatcaatatttctccaaagacattaaactcataycacatttttctttcaagaatcagttaattcaattttatatcgaattaactgggatagagaaaaagattatatattgcccacctcattttatgaaataaatataatcctaatatcaaatagacacagacaagatgccatagaacagtctcacttatatgtatgtatgaaaaattataaacaaaggattgaatataaattagtagtttgtaaaataatgacctgccctgtgcaatgggatttattctggcaatataatggtgttaagtctaatattataaaattcaccacaaaaataacattactaaataaattaggaatgggctacgtttatttcaaagtaggtcgcatgagtatttgagagaatctcattttttgtttaaaataaaataaacaaatttctttctaaagtaaaaatggaatagcccttaatgtgacaaagtatatctatttgaaatcaacaacatagagcttatttaatgctgaaactcaaaaat

SEQ ID NO: 34613 - DNA, 652 bp, Homo sapiens
gagaccctgtctcaaaataaattaatgaatgaataaatacataaataaataaaatagaagttgaagttttaaaaaatgtattttttaattgcacaaacacaaatatggaatgaattgagaaagctatcaatatttctccaaagacattaaactcataccacatttttctttcaagaatcagttaattcaattttatatcgaattaactgggatagagaaaaagattatatattgcccacctcattttatgaaataaatataatcctaatatcaaatagacacagacaagatgccatagaacagtctcacttatatgtatgtatgaaaaattataaacaaaggattgaatataaattagtagtttgtaaaataatgacctgccctgtgcaatgggatttattctggcaatataatggtgttaagtctaatattataaaattcaccacaaaaataacattactaaataaattaggaatgggctacgtttatttcaaagtaggtcgcatgagtatttgagagaatctcattttttgtttaaaataaaataaacaaatttctttctaaagtaaaaatggaatagcccttaatgtgacaaagtatatctatttgaaatcarcaacatagagcttatttaatgctgaaactcaaaaat

SEQ ID NO: 34614 - DNA, 716 bp, Homo sapiens
ctacaattatttgtcacccccttggtaactccatgggaatactttgctgaaagcctggcatggtccccgtgcttccaatgcacaacttcctaatattctgtgcttgccaattcgtaagtaagggtgaaaaagttgaaactccttgtcttttgtatgaaccagtagttggaaaagtgtgtcacacctcatgcaggaagttatagacctaagtagggtttattgaagcgtcctataaatctccctagaatatagaaattcacgtcaagggaggagaggaataaccaagtgatctgccattttcattgttggaaaaaaaaatcagtattcatttaaaagaggtctactttatgagtcaagtcttggtccaaaaggaaacctccatatacatgcaatgtaagtagggattggtcaatactttctcggtgaattctcaagtacaagagaatattttaactgcaacactgcctcattggtgtcaatacccagctatctttcagyggggctactggttgttggagcaggtacaggacttccaaaatccaagtgaaaaaaaagtatagtgagtcatattcttttttgtttaaaaaaataaaaattaacacactacttttcttataatactagtaacacctgcccaataaggaaagattggaagtctacaaaattaatagagacaaattaatctgtcatttcttcattgtgagataatcactatg

SEQ ID NO: 34615 - DNA, 556 bp, Homo sapiens
cacattgcatcactttgcccctctcttctgcctcttcttccacttttaaggactcatatgattagattgggcccactgggttaatctcgcttattttgaggtcagttgattaaccaccttaattgcatctgaaattttaattcccttttgccatgtaaagtaacatattamtcatcattctgcctactcccagctcttcctctgtgccagatgtagtgctaggagatgctggggaattggagagatgggtacaaagatgaagttcatggttagatattgagatcagctctggaagagaatgcgtacaacaccatggagacagtgcttaggctcacaataaattaatagatgatttgcagagacttgggagagaagcatggttccttctgggcaactcgagggaggtatcattgtggattagcatttgaattgggcatgaaaagacaggtaggaattggatacaaaaagcaggcagaggaaaccaatagtatttcaagtcagagatagcagatctaaactggtgaaatagccatttttgtaaggggaaatgatcaaa

SEQ ID NO: 34616 - DNA, 1263 bp, Homo sapiens
tcatactagtatttctttagcataaaccactagaagtggaattaccgtgtaatttgcatttaaaattttgataagtgttaatgtacacttcaaaaagcttctaaccaatttatatttcagaagggaagaaaatacccaatttccaactaggtactattattttgaatttgtacatatggtagaaaaaaatggaatcttgttttaattttgaatttttatagttgttggacagttgagtattgcatatatatttattggctatttygtatttcctctttaaattgccagttcatattggttttgcctattatctgttagtcccaaggactattagatgcctaaaataattctgggtcttattctaagagcttatatttgaaaaacatttttattatcttttgcagaatatctaatgataatatcatctgtgattatgtgaagttttccattttaaaaaagtagttgcttgtgcattaggccaattaatgtataaaagaaaagtagcactgaagtaagtcttctggtggccatttaaaccgtagtagtcctgtcctgccaccaacaaatattaaccaaatttactctttgtccttttgcaaattatttaattcctgtgcttcagtttagttatatttaaaatgaggattatttacctgtcctgctagcctcacagaattgtgaggatttaatgagctaataatgaaaataatttgaaatgaatcaagctaagtaatggaaggtagtaaatctataactcagaatgacaataaaatacatccatgtaagaataatgccaatactaaaagccatgtcttcctatggtaagttgtcagtaaagagcaacttgtattattacagtttaactctccaagtgacggtatctgtttgcttcttcttttagcccttgtcttggtttcttgcaggcccttttctgctgattctttattcttccttaaaggtagttcttccaggcctgaactgtgtttttcagggtttgcatgataacttgcattaatatgcttgcttacattttaagttttgaaactggcttgtcttcttgggaaatgtggttgtgtgcgtatgtattatttttttttaatggatgtttatataggagagcaaatttgaatgtgggggaaagaattatttttctgattggtaaatatgttaccttcagtcaactcttgattatccaaagctaatactgtgactagcctactttccagttcatttgacatctattttgcttttattcatgcattt

SEQ ID NO: 34617 - DNA, 838 bp, Homo sapiens
tgtaatattctagtagtatactgagggtatgcagaccattggtttaaataacaaagaaatcaagtaggctggttcctcttcacaacagcagataccrtagggccatttatgtaacataaccatcacataaataaaagttttgatggagagcagtggtttgctaatttattttagccttagaactcttgatacaaacagttttactcaaagctagtaagtagggtggtggctagaccagagcccagcagcagtctctcagcagcccttcttggggtttcagggaccagatgggccatctctcatccatgacacagatgaggcctctaaaggctgggcttagatttgattactccttgagccatagagtacccgccaaatctgggcctctatcttgtcagatattgaatatagcagatttttgaccctcatacttctaatgattttcttaaaggtaattcagtgttgtcctgtgagactagtgctgtaattcaaagcacttcaaacaagttctagacttcagtttctattatgtaaattaagagttatgccaggtgcagtggctcacacctgtaatcccagcactttgggaggccaaggcgggcagatcacctgaagtcgggagttcaagaccagcctgaccaacatggagaaaccccatctctactaaaaatacaaaattagccaggcgtggtggcacatgcctgtaatcccagctactcgggaggctgaggcaggagaatcgcttgaacccgagaggcggaggttgccgtgagctgagattgcaccattgtactccagcctgggcaacaagagtgaagctctgtctcaaaaaaaaaaa

SEQ ID NO: 34618 - DNA, 889 bp, Homo sapiens
agtccgaacatttctactgactttgatgaactttaaaatttcaaagctgacacagagagtgaagtacacagaaaagcctagtaccaaaatcatataaaccatattacttacatgtactataacttctgccaatgattctggtaattgttattaatttaatattcactataattataattttaaatctataaataaatattattcaaatattaattggtggtactagtactaaaaaaaaagtgctaaaatactagatatgtcaaaatgttatggcaaaacaactgtcacgacaagctacgctgtcaatttagaaaagcaccctgtaacaatgagagttaatgacaaaaataaaaagggacttttacgtttgtaaaatgtcaaagaataacagaaaaaaaytgctgtcatgactgcaacaccaaagtcactataaagtatcactttagcgcctgactaaagcctcgggtactcttttccagtaacagtttttattacaatataatgaacatatcataaagcttattcttttaaagtacgtaatttagttgttttaaggatagttacaaacctgtgcactgatcaccactatctaattctagaacattttcatcaccccagagagaaactctgaactcacttagaagtcactcactcccatcctctggcaatccactttctttctctataaatttaccagaatataaattctcgatatttcataaatgaaatcatacagtatgtgtctcttagtgtctggtttcttccacttagcataatgttttcaagtttcatctatgttgtggcctgtatcagtatttccttcttccttatagctgagtaacatttcattgtatggatatatcacagtgtttatccattcatcagttga

SEQ ID NO: 34619 - DNA, 889 bp, Homo sapiens
agtccgaacatttctactgactttgatgaactttaaaatttcaaagctgacacagagagtgaagtacacagaaaagcctagtaccaaaatcatataaaccatattacttacatgtactataacttctgccaatgattctggtaattgttattaatttaatattcactataattataattttaaatctataaataaatattattcaaatattaattggtggtactagtactaaaaaaaaagtgctaaaatactagatatgtcaaaatgttatggcaaaacaactgtcacgacaagctacgctgtcaatttagaaaagcaccctgtaacaatgagagttaatgacaaaaataaaaagggacttttacgtttgtaaaatgtcaaagaataacagaaaaaaattgctgtcatgactgcaacaccaaagtcactataaagtatcactttagcgcctgactaaagcctcgggtactcttttccagtaacagtttttattacaatataatgaacatatcataaagcttattcttttaaagtacgtaatttagttgttttaaggatagttacaaacctgtgcactgatcaccactatctaattctagaacattttcatcaccccaragagaaactctgaactcacttagaagtcactcactcccatcctctggcaatccactttctttctctataaatttaccagaatataaattctcgatatttcataaatgaaatcatacagtatgtgtctcttagtgtctggtttcttccacttagcataatgttttcaagtttcatctatgttgtggcctgtatcagtatttccttcttccttatagctgagtaacatttcattgtatggatatatcacagtgtttatccattcatcagttga

SEQ ID NO: 34620 - DNA, 566 bp, Homo sapiens
tactaatatgcagttcaactcagttatatagccaacgatagtagcataaaccctcggtagcaactggttatgtcactataytatattggttgcatggaagacagcaagtatgtgtggatgagagactgtaaggtatttaaatatatatcattcatattgtcttcagtggacaatatctaacattcaaaattttacaataagagcataagcctataatttagaaaaatggagatatataataatagaaaaaagctgaaagtgttgaaaaatatgatcactgagaagcacaaatttggttggatagggaaactaatgcttttcattataactttaaattttaaatttacctattttattctgagaaaaatattaaaatcattttgaaaagaggcatattttctgccaattccatcaaacagaaatacttcaggcaaagatcacatgtttaactcctctgaacactcactcagaccaggggtgaggattattgatcacagagaaactcattatatgtctgcatctgtgatctcaggagagaagagatcttttatcaaagacagcattag

SEQ ID NO: 34621 - DNA, 566 bp, Homo sapiens
tactaatatgcagttcaactcagttatatagccaacgatagtagcataaaccctcggtagcaactggttatgtcactatactatattggttgcatggaagacagcaagtatgtgtggatgagagactgtaagrtatttaaatatatatcattcatattgtcttcagtggacaatatctaacattcaaaattttacaataagagcataagcctataatttagaaaaatggagatatataataatagaaaaaagctgaaagtgttgaaaaatatgatcactgagaagcacaaatttggttggatagggaaactaatgcttttcattataactttaaattttaaatttacctattttattctgagaaaaatattaaaatcattttgaaaagaggcatattttctgccaattccatcaaacagaaatacttcaggcaaagatcacatgtttaactcctctgaacactcactcagaccaggggtgaggattattgatcacagagaaactcattatatgtctgcatctgtgatctcaggagagaagagatcttttatcaaagacagcattag

SEQ ID NO: 34622 - DNA, 566 bp, Homo sapiens
tactaatatgcagttcaactcagttatatagccaacgatagtagcataaaccctcggtagcaactggttatgtcactatactatattggttgcatggaagacagcaagtatgtgtggatgagagactgtaaggtatttaaatatatatcattcatattgtcttcagtggacaatatctaacattcaaaattttacaataagagcataagcctataatttagaaaaatggagatatataataatagaaaaaagctgaaagtgttgaaaaatatgatcactgagaagcacraatttggttggatagggaaactaatgcttttcattataactttaaattttaaatttacctattttattctgagaaaaatattaaaatcattttgaaaagaggcatattttctgccaattccatcaaacagaaatacttcaggcaaagatcacatgtttaactcctctgaacactcactcagaccaggggtgaggattattgatcacagagaaactcattatatgtctgcatctgtgatctcaggagagaagagatcttttatcaaagacagcattag

SEQ ID NO: 34623 - DNA, 561 bp, Homo sapiens
cagaagccgtcagtctggtgaaatattcagtgtatagaaaaagagaatggggcgactaggcagcagtcagcaattattacttagaagaaccaaattaaatgggctgatagttagaagaggaattttttccttttagggtatttctttaaaaatcatctggtttcatttccactagcctcattcttatacatactagaaaacacttggctttcaaagttgtgtttaggtacttgctattacaattgtggctgttcgtatggatacactcagctgtctcacctactttctttgttctctcactactgtctccactctgtccccgccattaccaccacaccaccaggacaagaacactagawgcctggctatgagaattgaagcacacctgccatttcatgtttgatcttttgggaaaatagatgcaatgtgctaattgaatagaaaataaaggataatggcatcttgaactgttaaaactgctaagaattttagaaagtatttgccaaggtctaaactccttattttatcattaaataaatggaccctaagaggaaaaataat

SEQ ID NO: 34624 - DNA, 1220 bp, Homo sapiens
cctaattattgttttgagaggttgtgcagaagcctttattatctttttatatacagtgtaatacagtatagactgttttggcagatggcccatttgaccactaaccaagatcctgatcttagaaaattacttatcttttggcacctctgtttcatcatctgtaaaatagaaataatgacaatatgttttgtatattgtaatgaggattaaatgacaaaatatatgtaaaaagcttagcagagagactcaaagtaaatgcttaattttttttgattttataaaataattgtatactattaataataagtaaaatgaaatctggaaagattaagtgagccaccctaaagtatattatatcaaataaatatcatgtaaaataaaggtaatatttagataacagaattgtttagaatgactatttacaagataaattgacttggtctttaaagtttcttcttatagttcccttgactatattttgacaacaaaaagagagtctttgctaattaatgcctgaaacatttaaaaactgataaggcctctatgctgcatctttcttaagatataatccagggtgctgagaagaaaaaaaaacatgtatactctgcacaccaatgaaatgggtctatattaattagtgaagtattgtctaatcaatagtgtcacatagacttttctagtctgtgaacttatattgtcctccaagstaatttgaccaatccagctgccttgataggcattgctgtttctctttcaattatttaaaacaaaaaggatcccggctgggcacagtggctcatgcctgtaatcccagcactttgggggacgaggtgggccgaccacctgaggtcaggagttcgagacctacctggccaatatggtgaaaccctgtctctattaaaaatacaaaaaattagctggggatggtggcatgcacctgtaagatattcatgggtacttagaattatcatgtggacttctttgtgatgcaattattcagcctaccaaaggtgatttttaaaatttgtttttatttttaatgattatttttaaattaagcctaaattcaacagatattatgaaatgaaaatgacctttttatactttttttcatgtattcacacagtcaaaattaattttaacttaaagacctattcaaatgacactctaaaaaatactgagggacatggaaacaaatccacaggacatcaaatagagag

SEQ ID NO: 34625 - DNA, 524 bp, Homo sapiens
gagaggctcatgacayagtggttaaaaagacagactctttcaccggactgcaagagttcagaatgcagctctgttgtttattaattgtgtgaccttgaaaaacttactttattttttcaggtctcggttttctcattcataaagtgaggttagtattagtacctactgagttttattttacatataggatttagaacatggggtgtaggtagtacacgttatatgctgcatgtagtatgtcatactatgtgaattccctcaatattattttctaaaaagagtgtacacttcaatttagagacatatgggttcgaaagtcaaagatgtttttttctctgctcactaatctgaacctcagttgtatgatcagggaagtgaagataattcctactgctgaaagctgttttgaggattagaagaaagttcatttatatatgggcaggagatccttgctgaatgtcaagcctctttgctctcctcttcgaaaccctgttgaaattcttcatagtcttcttatattatct

SEQ ID NO: 34626 - DNA, 1199 bp, Homo sapiens
tgcataacaagtactttaaaatacatgttgaataaatgtttagtgccaaattatatggcaagatttcctatttagccctttgtttacaatgtcctagagtgctgtgttgaataaagaaccttccgatattagaagtcattttctttttctttttctcttctttttcctaattaaagaccagttggaatattagcacaaatggcggggcggtaggggaagcaacctaccaggttattttcactcatctttcagatttcaagacaaatttctcgtcatagtgattgtaggtgtttgggggacctcctttgcctcagtattgtctttgatgttaggcagtcacatcaacctaagcagggttttcctctgtgctcccctgcacatctccaacacctcagctggagcttgctctgtagtttacactcagtagatgttcactgaaaaacacataagaaacaaaagtgtaaaagttgctgccttgctttcttaaattgggggaaatgacacatagatcctgttaataaatacataaaataatacatagtatatgaataagtccataaataagaaggttgtgaataaatctacccaaactttgtataacctacctcatttctagagcctttcaactttatagcatagactcttatactcatcccatcctggaaggcttttcattaaatttgaaactggcctttggttttccagagaatataaaagagaaacaaaaagaaataaaaaaaaaaaaaactctccatcttaatttggagtaagttagggagctttgtcttggttattctacatcttatactcccaactgagtgccttattgatgccgattatatagtcagtttttttaagtacagatgatagcaaggttagactcctctctaatttatgctatattttcatataatccaattttagcatctctgaaataaacccttcaaaaagsagaaaaaaagtttttaattttccaattctaatctgggctcttgccatgtctatattttagaatttgtaaagtaaatgaggcagagataaagctttcatgccagagatgcttttaaataccaaaagcatgtcattactgcggtgcttcatttttcttctaattctttaattagataggataagaactgcatgtcttaagcaaattctcctgctgttctttcctggcctctagaggatcctgcatttgc

SEQ ID NO: 34627 - DNA, 1199 bp, Homo sapiens
tgcataacaagtactttaaaatacatgttgaataaatgtttagtgccaaattatatggcaagatttcctatttagccctttgtttacaatgtcctagagtgctgtgttgaataaagaaccttccgatattagaagtcattttctttttctttttctcttctttttcctaattaaagaccagttggaatattagcacaaatggcggggcggtaggggaagcaacctaccaggttattttcactcatctttcagatttcaagacaaatttctcgtcatagtgattgtaggtgtttgggggacctcctttgcctcagtattgtctttgatgttaggcagtcacatcaacctaagcagggttttcctctgtgctcccctgcacatctccaacacctcagctggagcttgctctgtagtttacactcagtagatgttcactgaaaaacacataagaaacaaaagtgtaaaagttgctgccttgctttcttaaattgggggaaatgacacatagatcctgttaataaatacataaaataatacatagtatatgaataagtccataaataagaaggttgtgaataaatctacccaaactttgtataacctacctcatttctagagcctttcaactttatagcatagactcttatactcatcccatcctggaaggcttttcattaaatttgaaactggcctttggttttccagagaatataaaagagaaacaaaaagaaataaaaaaaaaaaaaactctccatcttaatttggagtaagttagggagctttgtcttggttattctacatcttatactcccaactgagtgccttattgatgccgattatatagtcagtttttttaagtacagatgatagcaaggttagactcctctctaatttatgctatattttcatataatccaattttagcatctctgaaataaacccttcaaaaagcagaaaaaaagtttttaattttccaattctaatctgggctcttgccatgtctatattttagaatttgtaaagtaaatgaggcagagataaagctttcatgccagagatgcttttaaataccaaaagcatgtcattactgyggtgcttcatttttcttctaattctttaattagataggataagaactgcatgtcttaagcaaattctcctgctgttctttcctggcctctagaggatcctgcatttgc

SEQ ID NO: 34628 - DNA, 1125 bp, Homo sapiens
ttaatatattaatattatttcttaaataaccatatttgttctataatttttcctttgctctagttttcttatgctgtacataactgtttctttattgaacaggatagtccacagtagctgcactgttcagatccaaagtttccaaggtaatgcagcaggaaacagaaaaaaaaacaggtagcatatcagcaattaataatacctgataagaaatgacttcattcattttggctcatcacacatcagtagtaactagtcttataacctttacctaattacaaagtattctgaaaaatgcagggaagcacattaaatatgagatgaacaacactttatcagccatagtcccttacacagaataggcaagtcagtaaaatatctttgataaaaatatcgtgtgaataagagtgtatgacattataacaaaaggcaaagatactatgttaatgaagaaatcctagagacttaaaagaaagctagttaatatgcaacagatttgaaacaaatgaaaggataaatgcaaattcaaaatagggcacgataagctaatctcaatatttagaaaaatttgacaaataattgctccacattgtgaacactatctcttattctgaagagaatacccaagattttcagagtcacttggtaaaaaatctcaaaggttttccagatattctatcaccacatatcataacttcaagtactcttctcctcaaagggaaagtaacaaagcagaattattcattggggattatggtgataaaatattcacaattcctattaaagcaataatgtgccagtttttaaattactgaactattctttttgttatttccaagggaatctgattagcaaagatagaacatactaacatggttttgctttgggattcatcgcatgtctgattaaagaatatttaaaaatacatttcagatatcttctcctcacttgctataaagaggctgaaatgacaattaggtagtctcayggttattaaattcagaggacatgaaggtaccttgtaacttgggaaattgaaccagaaatgcacataataacgtagacagtaaaaagaaataaaaggatcagacttatagttttaaaatagatccagttctgcatgca

SEQ ID NO: 34629 - DNA, 1125 bp, Homo sapiens
ttaatatattaatattatttcttaaataaccatatttgttctataatttttcctttgctctagttttcttatgctgtacataactgtttctttattgaacaggatagtccacagtagctgcactgttcagatccaaagtttccaaggtaatgcagcaggaaacagaaaaaaaaacaggtagcatatcagcaattaataatacctgataagaaatgacttcattcattttggctcatcacacatcagtagtaactagtcttataacctttacctaattacaaagtattctgaaaaatgcagggaagcacattaaatatgagatgaacaacactttatcagccatagtcccttacacagaataggcaagtcagtaaaatatctttgataaaaatatcgtgtgaataagagtgtatgacattataacaaaaggcaaagatactatgttaatgaagaaatcctagagacttaaaagaaagctagttaatatgcaacagatttgaaacaaatgaaaggataaatgcaaattcaaaatagggcacgataagctaatctcaatatttagaaaaatttgacaaataattgctccacattgtgaacactatctcttattctgaagagaatacccaagattttcagagtcacttggtaaaaaatctcaaaggttttccagatattctatcaccacatatcataacttcaagtactcttctcctcaaagggaaagtaacaaagcagaattattcattggggattatggtgataaaatattcacaattcctattaaagcaataatgtgccagtttttaaattactgaactattctttttgttatttccaagggaatctgattagcaaagatagaacatactaacatggttttgctttgggattcatcgcatgtctgattaaagaatatttaaaaatacatttcagatatcttctcctcacttgctataaagaggctgaaatgacaattaggtagtctcatrgttattaaattcagaggacatgaaggtaccttgtaacttgggaaattgaaccagaaatgcacataataacgtagacagtaaaaagaaataaaaggatcagacttatagttttaaaatagatccagttctgcatgca

SEQ ID NO: 34630 - DNA, 279 bp, Homo sapiens
ttagagtcataatactaatttccttcctaaggcaagtaagaacataacttgggagaattcagtctgttatttaaatggtagaatggcttaggacagtggttgtcaacctttatcacacatagcacccaaaatgatgtaatcagtagggttgamtgctcacaccagacaggatctgcccagtcaccccaagggctggggaaagcagtcctcaccctctcacttccccagcacatcaggtgggaagttctggcttaggaaattactgaatcatatgaattc

SEQ ID NO: 34631 - DNA, 279 bp, Homo sapiens
ttagagtcataatactaatttccttcctaaggcaagtaagaacataacttgggagaattcagtctgttatttaaatggtagaatggcttaggacagtggttgtcaacctttatcacacatagcacccaaaatgatgtaatcagtagggttgactgctcacaccagacaggatctgcccagtcacccyaagggctggggaaagcagtcctcaccctctcacttccccagcacatcaggtgggaagttctggcttaggaaattactgaatcatatgaattc

SEQ ID NO: 34632 - DNA, 979 bp, Homo sapiens
gtcttgctaaaactcagacctaaaattgttaagtagatatctggggaactttttttatcactttaaatgaaaaatttcagctttactgggcattctggaagcaaaatatgttatgctgatgataaagtgagaaccttaagagtacactcatttgatggtggaaaatgtgatggaccaaaatgcagaagctatacacgtcctgtgagtagtaattttagttacaatgcagtaggaaaatgtggtgcatttaaacttttcttctaccccataatggctttgcaagatacttgtaaagaagcaaatgtctagagccttactttaagaaagttaaacaactttggtgaatgatttggattaagattgttacatccagctatagaaatgtggttttaattgggttgatgtgagtgagtaccttccttttttgaataccacttaaaacagttaactttttaagtcttgaagatgagaaaaatattacttatctaatataactattttaatagttatctaatttatagttatctactataactatacattctgaatacttagcatgtactgtgctggggcacatatcttgttttcccagctgctaaacgattatcttccttttctccctggtattttaatgctcaagtrgaaaatggaaaatcatgaaggaaaaatatcacttgtgaaaatcgtggcagttagctttatgaagacatagtggcctctgtggggacatgggatatgcagaaagagatggctagtacagttgttctgtcttctgcagttcagtcagggacacattgagagaggaaagtttaagcaggtacattagaaattgataaccagcccagcattcttagaacagatgggtttagagaacacgagttgtagttccttggcagaatgccatggtggatatgagaaactgtgaactgtgttgaaattgagcttgagcagaaaatgagaatactaaaaatttgaagtt

SEQ ID NO: 34633 - DNA, 607 bp, Homo sapiens
agggataaagactatgctgaatctttccagctaaatctcccttgtgtttcagaatctttccagctgaatctcccttcttcctatctccatgccatattctgtaacatctactatataccatgttgttctagatgctgggaatactgagtatgccattatctctgccctcaaagtttgtttgctagggcacaaacaagaaaagacaaaacatttagtaagaaaaagaaagtggtacatagggtactgtataaacacaaaagacagaggcagcagattctataaatttaaaaatgtcaacattatttttccttctaaacttgacatacccaaatcatgacttataaacactacccttcttccacagtcaggacaaatacggaattgcaatatgtgttccctttgagtcgggggtggagagagtcatatttgagttatatgttacttgttttaagatataagataacagaatcagctctatttctttcttaaaacagaaatccttaccaaattaaactacttcccttgtggatgaaacttaattgactttatgtatggaatactgycttgaaatagaaaaagccttcccttcccctttctagcaaagaaa

SEQ ID NO: 34634 - DNA, 668 bp, Homo sapiens
aatcttccaggaggttatttatttggcttcaagaagcttaagactacccactttgacaaattatatcacagtaaacacaaaaattaaagaaccttctggttgtggctgcattgtcctttttttaaattcataaataattctcagttcatctatgaaaattgaatgtttattttcagttttcaaggtacgctgtttccatgttactgatttacaaaaaggagaaagaatacctctgaaacttttcaggaacacttataccaggtaacactattaggttttyttattttgcagatgcacacacaaacacaacaaacaatccacgccccagtccccttcagctctgtattccccctcagtacatatatagctctaccataactcatcaccacagtttattggagattttgtttatctaggtctcacgcccagtaaagctatttgaaggcagtgaccatgtcttatttgatttcatagttacagtcctagcatagcttctgccacttaataaagacagtaatttatttaaggaatacatgaatgaatgaatgaatgaatgaatgaatgaatgaatcagtaaatgtgaatatcaaatagatttaatatgaagggcatggccttcaagactgttgaaatttaaatgaataattatatttattccttttcactat

SEQ ID NO: 34635 - DNA, 1603 bp, Homo sapiens
ttctgcctggtggtgtatttgattggcacaagcacccagacaccaactctaccctttccctaccctcatcttctgggtccttgaacacattcttgtttcagggatggagtgacagcctccccacatatacatgacccctccccattctcctgaaggtggaccccaggctgcttccagttcccactaccagggttacctgataggcttgttgctgttgttgtttgaggcagtggatttattgtgccttgcttaaaccacagttatctggagcacggagtcagaacaaccacagagaacaaacatgtgctttgtctttttattattctttattggtcctaccaatgtgactctttacccaggcccactgttcctatgcrcactggctttgtaggcattcacatcatatgtctgtgtcctgaaaatctcaattaatttctccttcctattccttttccatgctctgcctcattttctcagaaattgaaggcatttgattattatttttttgtttgggtctgtgtaaaggttccttggcaggagaacatgcatatgactttaaaataaagaccaacattctgacactaaggtaatgcacagaaaaaatacagtactcagacatcattgcaaataaataccccatacagatgaagttatctcaaatgtaacaatatttcttatgaatcaacactgtaacggaaggtaaaaataggagtccctacaactaggaataagaaatgcttattccaggaaacagaattcttttatttttgtcatttatattattataatttttccttttttggagaaggaaggacagtttttcttcctccaagagtaccaatttgaccactcccactaacctcactcagcaaacaaaacaggatgtagacctggtttgctaaggagttttaatgagttctgtttcctgaaattaacagtgattagttacaccaagcaagagaagatataatgtctcgctttcacatttgcaaagaatactatggctaaccctcatcccctactgcgcatgccaacacagcgtcggccctcctgataccctcagctcttcacaaacgtggcgttcatacagcttgctcagcttgtcccagaaggtccatttggttcccaaagcacactcaaggttttgtgtttgctttcattttctaagcccctgaatttgcaagtaaagaatcactgactaacagaattttgcacaatgactgttttctttccctcaatgaagatgcccaggtctgggtgtgaggagcacctgcctcacctgctgtccacgctggccttcagcatgcccactagctcttccctgctcgcttttgagaatgatctgtgctgggacacctcccttaactgatgaaggcactactggcaatgattactaacaaaaaggtgttgaaagagaacaccctaaaaatcgacgactgtagaattttctaagtgtaccacaatttggcacaacaaccagagtaacaaaacaattccaatttggaattttattggtacagttgtataaaattctgttaatcagtcatgcttcacaacgtcctaaaacccagaaaattctggaatttgtaggtaatactactca

SEQ ID NO: 34636 - DNA, 565 bp, Homo sapiens
ctcccttgcggagctggcagagatcagctgcagctggtggcagagaccaacgtatacccaagtgtgtgcttgagatggggtaaggcttcttgataggcaggtgcaggctgcagggaggtggggggagcaggatgggggcgctgctccctctaggaaggtgagaaggcctcccaaggaaggagccggtgtgatggggcttctctctgctcccagcagacgcagaccctccccacactggcctgtccrctcctcctcctcctccatctggggcctttgctcagcccatggtcttgtctggaaagccacctcccctctacctggctgatttctgcccgtactcccacctcttccaggaagcactccctgattagtatccacgtgacctgtgtttctcagaaatgctaagaacattcactgtttggatgaagaacacaatatttttttttctttcacatgcactggatgacttcaccgtgtttactgtctttggttttgttccaaagtggttgtaaaagttgggcctgagatgtgcaaacatcattcttggttgctgtttgtgcgcctg

SEQ ID NO: 34637 - DNA, 565 bp, Homo sapiens
ctcccttgcggagctggcagagatcagctgcagctggtggcagagaccaacgtatacccaagtgtgtgcttgagatggggtaaggcttcttgataggcaggtgcaggctgcagggaggtggggggagcaggatgggggcgctgctccctctaggaaggtgagaaggcctcccaaggaaggagccggtgtgatggggcttctctctgctcccagcagacgcagaccctccccacactggcctgtccgctcctcctcctcctccatctggggcctttgctcagcccatggtcttgtctggaaagccacctcccctctacctggctgatttctgcccgtactcccacctcttccaggaagcactccctgattagtatccacgtgacctgtgtttctcagaaatgctamgaacattcactgtttggatgaagaacacaatatttttttttctttcacatgcactggatgacttcaccgtgtttactgtctttggttttgttccaaagtggttgtaaaagttgggcctgagatgtgcaaacatcattcttggttgctgtttgtgcgcctg

SEQ ID NO: 34638 - DNA, 557 bp, Homo sapiens
caggccaccgggtctccttaggctgaggaaatggacaaggagggcaacatggaaactgcagagagcagcaaagcccttcactactgctgcccgaaccctgcagcggctcctacagccaccacaggtcactgggccagaagcaagttagggaacagccacatcaccatycagggaagccgctcccaggcgctgatccccggaatggtggatttgctaacagcagccacacagacacctcacctcacgccaggctgctgagctcagcggggggcacgattgcccaagcaggggtggggcagggcaaggcagacccagtcacatggtgggaaaagccaaaaaaaacctgcctgatttggtaaaatgccagaactgggcattttaaagttagtttttaaggcgtagccatttgttgggggtttttttgccttgtactctcctgtctccctcctcgccacacaataaactgtctccaaggcagccgccctcccgttgccaggacgtgcgaggcagggaggtcaggagctctgctgtgagggcgccacccggcttccggtttg

SEQ ID NO: 34639 - DNA, 557 bp, Homo sapiens
caggccaccgggtctccttaggctgaggaaatggacaaggagggcaacatggaaactgcagagagcagcaaagcccttcactactgctgcccgaaccctgcagcggctcctacagccaccacaggtcactgggccagaagcaagttagggaacagccacatcaccattcagggaagccgctcccaggcgctgatccccggaatggtggatttgctaacagcagccacacagacacctcacctcacrccaggctgctgagctcagcggggggcacgattgcccaagcaggggtggggcagggcaaggcagacccagtcacatggtgggaaaagccaaaaaaaacctgcctgatttggtaaaatgccagaactgggcattttaaagttagtttttaaggcgtagccatttgttgggggtttttttgccttgtactctcctgtctccctcctcgccacacaataaactgtctccaaggcagccgccctcccgttgccaggacgtgcgaggcagggaggtcaggagctctgctgtgagggcgccacccggcttccggtttg

SEQ ID NO: 34640 - DNA, 673 bp, Homo sapiens
tggtaatcaggctgcagtgtggctactagcaggaacacaggcagggagatggtggccatgtgagagctgtgttggtgagggtgaagtccagttcctgagaacactattgcataagaktggcagtgggctaggggctaggcagagaaattgcgattcaaaggctccacctacccagcactgtttagattattattgttaaaatataccccagctgacagaccaaatgaacaccctgtggctaaaatgagacacaccagaaatggattcaaatgcccacagcaaggagaagagttaatcaggtacccctatattaccagctgccataaggtcttctttcctgtacttgaacaaatactagttcttaaaaacaccttcaaaacagctacaactgggagtttcccaactgacctgggtggaccacccagctccagccaactgaactgcccccacccctccttgtggccccactagcaactccaactggataggagactgaccttacaaacattcttgcctgataaacagccacgaacttcaacccagtttcagccagctcatggagaatgtgcaaacttctttatgctctttagttcacattttgacataaaatttcaccttactttaatgttaaaactccacccaaaaataagcacaatatttctgttatgtatgt

SEQ ID NO: 34641 - DNA, 673 bp, Homo sapiens
tggtaatcaggctgcagtgtggctactagcaggaacacaggcagggagatggtggccatgtgagagctgtgttggtgagggtgaagtccagttcctgagaacactattgcataagagtggcagtgggcwaggggctaggcagagaaattgcgattcaaaggctccacctacccagcactgtttagattattattgttaaaatataccccagctgacagaccaaatgaacaccctgtggctaaaatgagacacaccagaaatggattcaaatgcccacagcaaggagaagagttaatcaggtacccctatattaccagctgccataaggtcttctttcctgtacttgaacaaatactagttcttaaaaacaccttcaaaacagctacaactgggagtttcccaactgacctgggtggaccacccagctccagccaactgaactgcccccacccctccttgtggccccactagcaactccaactggataggagactgaccttacaaacattcttgcctgataaacagccacgaacttcaacccagtttcagccagctcatggagaatgtgcaaacttctttatgctctttagttcacattttgacataaaatttcaccttactttaatgttaaaactccacccaaaaataagcacaatatttctgttatgtatgt

SEQ ID NO: 34642 - DNA, 673 bp, Homo sapiens
tggtaatcaggctgcagtgtggctactagcaggaacacaggcagggagatggtggccatgtgagagctgtgttggtgagggtgaagtccagttcctgagaacactattgcataagagtggcagtgggctaggggctaggcagagaaattgcgattcaaaggctccacctacccagcactgtttagattattattgttaaaatataccccagctgacagaccaaatgaacaccctgtggctaaaatgagacacaccagaaatggawtcaaatgcccacagcaaggagaagagttaatcaggtacccctatattaccagctgccataaggtcttctttcctgtacttgaacaaatactagttcttaaaaacaccttcaaaacagctacaactgggagtttcccaactgacctgggtggaccacccagctccagccaactgaactgcccccacccctccttgtggccccactagcaactccaactggataggagactgaccttacaaacattcttgcctgataaacagccacgaacttcaacccagtttcagccagctcatggagaatgtgcaaacttctttatgctctttagttcacattttgacataaaatttcaccttactttaatgttaaaactccacccaaaaataagcacaatatttctgttatgtatgt

SEQ ID NO: 34643 - DNA, 576 bp, Homo sapiens
gttgtactttaattttctgttagtgttttctaatatttcccttataattttctatttgacctattcattgtctaaaagtgtgtatttttaattttcacagaattttgacatkcaccgtttttcttttattattgacttttaactttatcctattgtggttttagaagatacaaagtatccatatgtttaatgccccaaattgtttactattgtattaaatattcaatatcaatggaatatagatgaaattatttgtacaacaaagtggttaaatattgtgcaattattaaaataataaaaatcatatgcaaagatggtcacatattcaatgaatcaaaataataatagatataaatagaggaattagagctgcaaaaattataagtgcttttggtaaatattgttgagaaattcacacacaaaaaaattatagcatggtaataggattatatttaatttgtttttattttgctgaacatttaaacaattattttacagttttattttactgttaaaaattgtatatagttacagcatataattgatacataagtatattgtgaaataaccatgaca

SEQ ID NO: 34644 - DNA, 576 bp, Homo sapiens
gttgtactttaattttctgttagtgttttctaatatttcccttataattttctatttgacctattcattgtctaaaagtgtgtatttttaattttcacagaattttgacatgcaccgtttttcttttattattgacttttaactttatcctattgtggttttagaagatacaaagtatccatatgtttaatgccccaaattgtttactattgtattaaatattcaatatcaatggaatatagatgaaattatttgtacaacaaagtggttaaatattgtgcaattattaaaataataaaaatcatatgcaaagatggtcacatattcaatgaatcaaaataataatagatataaatagaggaattagagctgcaaaaattataagtgcttttggtaaatattgttgagaaattcacacacaaaaaaattatagcatggtaataggattatatttaatttgtttttattttgctgaacatttaaacaattattttacagttttattttactgttaaaaattgtatatagttacagcatataattgatacataartatattgtgaaataaccatgaca

SEQ ID NO: 34645 - DNA, 576 bp, Homo sapiens
gttgtactttaattttctgttagtgttttctaatatttcccttataattttctatttgacctattcattgtctaaaagtgtgtatttttaattttcacagaattttgacatgcaccgtttttcttttattattgacttttaactttatcctattgtggttttagaagatacaaagtatccatatgtttaatgccccaaattgtttactattgtattaaatattcaatatcaatggaatatagatgaaattatttgtacaacaaagtggttaaatattgtgcaattattaaaataataaaaatcatatgcaaagatggtcacatattcaatgaatcaaaataataatagatataaatagaggaattagagctgcaaaaattataagtgcttttggtaaatattgttgagaaattcacacacaaaaaaattatagcatggtaataggattatatttaatttgtttttattttgctgaacatttaaacaattattttacagttttattttactgttaaaaattgtatatagttacagcatataattgatacataagtatattgygaaataaccatgaca

SEQ ID NO: 34646 - DNA, 1798 bp, Homo sapiens
aaaaatatctatatgattctttggcatctcatatttctttctcgggggggcatatatttcatccagctaggggaattttggatgaaattataaaacaaaatactatgcctgttaactgctcccacagcttagagaaaccctaagaagttctgccagggaagcataatagagaacaaatgctgttccctaatcttatttcacatacattcaagtaacagaatatgagaaagagaaacatgagttttccctacagcgggtccaaaaatctgagagtctgaaggattgatttttctgtttaaaaaattaggaaatactttgaaacacacattttagacagttgctaagacactaactgccctgacctactgaatttccacatctttgtatgtattgagtgtcagaaaaagaagaaatcccatcacccctcacatggtacatgtaacaaacgtagacaaaaatgccagtcccattaaccatggagtaaaactcatagctgcataccaaaatcctgacaaattctagttattgtggctttggttaagtttggataaaaacactaaaggaacccttggactcagaattcaagggcaaaatttatgcatcatttatttttgtactgcagagtctagcaaagtacctggcacattgtaagagcttagtaaatatctgttttatgagatgagctgaatataaagctggaaaattatatagacttttaaagaaggagcattcatgatcttgaaaattgtttcttaggtagctaaaatttttatttttatttatttttaaattttttgtagctaaaatttttagaattggtcttcttgttctcaaggccatttgggagaaatgagcagctttgtttcaaagttcatctgtttattctccagcgaaaattataatccttggtctgtggcatcacaattggttgctgtgggaatgattatagatcaaaaacaaaacgattatatcccttttcaagagcaaatgagtaccaagagcagatgaagacttaaggaaacaaagatgttcttttcatgcaaatatttttacaatacaactgtggagagataaatactgaagctggtagtctttatgaaatttataggcagatttttagctttggggaaagacagctccctttgccctcagagttagctttgagacatgaatactacagatcatttttctttttttttttttttaaaaaaagaaaatataaagacactgagagcgtaggaaaagtgagttctgtgatcagtattcccctgttgttttatttcaggcagaagaatgtcttcctcatctgtgtacaggatcactgtcagggagcttgatgtcctgcactgtcctggcaatatgttgcccaagggaggtccaccaaggaaagccaaaggtgaattctccacctagaaagaggaccatgcccataaagttgctgttcctccgtctccaaaagacttctgctgcagcacagtagtagttaagagttataacctaatgaagcatgcttattcatgacttgataaatgatatctctctatatatcatgtgactatgcttggaaagtgggagatgcaaagagcaaactagrctcctccttctttctctcttttgcaggagatgcagagaaaaccaacctcctccctctttctctcattccttccttctctccctctctcttctttctggcttttctcttccttctttctttccttttctttttcttttctttcttcttctctcttctcttctcttctctctctctctctctttctttctttctctcaacttatgc

SEQ ID NO: 34647 - DNA, 1190 bp, Homo sapiens
aatactctgattgctgcatctgtgacgatggaaagactaatgtttcccaaggcctagccaaaactgcaaattcatgtaatstcttaatgcttacatccttcactttcatctacactcccaaagcatggtggtgtgcccaacatttgttttttcaaaaagaatgacaaactgtttagccacagtagaaaaaccatgacaaataatactgccactaccattttataattttacaattaaatacataaataagtaaagtcatccctatgatgctgggttacatcaggctctaggcagccttgttccaatctcttcttgcagcattgttaaaattttccccgaaagctgttcccagcagtgacataaacatagacgtactcatttggtccctcaggtacttggagtttcaggaggaattgtaggaagtgatttccatgacttttctgaacatttttgaaatcacttggttgcagactccttcctatattgttatgacctttcaagggtgtaatcacctttcacacctcacctctcagcagcatgaccctgagctgcaatgacagtcacagaatatgttgggaacccctgagcaagccacgcttcttctcatctccatgcttttgcatgcacagatccctcagcctgggggcttgcatttctggcaaacttcagtgactctccaagtcatgggtactctgggaagactctcgtcaatattgtcccactcccaagattaacttaacaattattttttgttttgtttttttgttttttttctgtttctcctagaagactatggactcattcaggacagcttatttcttgattatttttggttctccagtaaatgttaaacagatgaaggcattcaagctactcctcttataaacaaagaaactgagatcaggagagttaaataatgtgtctaggggcattaaaactagcagagacatcaggacagtttccattcgtcagtgaaaatacctttttttgatattttaatgtggatataatttccagaaatgatattatgtacaaaatatgaaaagaactctgtagttcttcataattaccctccatccttgtcaccctttaccttcccctaattgctttcatagagctcctttttggaagaatgagaagagaatgttatagaagataaaaatcacttgagaaaaaaaagtcatgttaag

SEQ ID NO: 34648 - DNA, 1190 bp, Homo sapiens
aatactctgattgctgcatctgtgacgatggaaagactaatgtttcccaaggcctagccaaaactgcaaattcatgtaatctcttaatgcttacatccttcactttcatctayactcccaaagcatggtggtgtgcccaacatttgttttttcaaaaagaatgacaaactgtttagccacagtagaaaaaccatgacaaataatactgccactaccattttataattttacaattaaatacataaataagtaaagtcatccctatgatgctgggttacatcaggctctaggcagccttgttccaatctcttcttgcagcattgttaaaattttccccgaaagctgttcccagcagtgacataaacatagacgtactcatttggtccctcaggtacttggagtttcaggaggaattgtaggaagtgatttccatgacttttctgaacatttttgaaatcacttggttgcagactccttcctatattgttatgacctttcaagggtgtaatcacctttcacacctcacctctcagcagcatgaccctgagctgcaatgacagtcacagaatatgttgggaacccctgagcaagccacgcttcttctcatctccatgcttttgcatgcacagatccctcagcctgggggcttgcatttctggcaaacttcagtgactctccaagtcatgggtactctgggaagactctcgtcaatattgtcccactcccaagattaacttaacaattattttttgttttgtttttttgttttttttctgtttctcctagaagactatggactcattcaggacagcttatttcttgattatttttggttctccagtaaatgttaaacagatgaaggcattcaagctactcctcttataaacaaagaaactgagatcaggagagttaaataatgtgtctaggggcattaaaactagcagagacatcaggacagtttccattcgtcagtgaaaatacctttttttgatattttaatgtggatataatttccagaaatgatattatgtacaaaatatgaaaagaactctgtagttcttcataattaccctccatccttgtcaccctttaccttcccctaattgctttcatagagctcctttttggaagaatgagaagagaatgttatagaagataaaaatcacttgagaaaaaaaagtcatgttaag

SEQ ID NO: 34649 - DNA, 1190 bp, Homo sapiens
aatactctgattgctgcatctgtgacgatggaaagactaatgtttcccaaggcctagccaaaactgcaaattcatgtaatctcttaatgcttacatccttcactttcatctacactcccaaagcatggtggtgtgcccaacatttgttttttcaaaaagaatgacaaactgtttagccacagtagaaaaaccatgacaaataatactgccactaccattttataattttacaattaaatacataaataagtaaagtcatccctatgatgctgggttacatcaggctctaggcagccttgttccaatctcttcttgcagcattgttaaaattttccccgaaagctgttcccagcagtgacataaacatagacgtactcatttggtccctcaggtacttggagtttcaggaggaattgtaggaagtgatttccatgacttttctgaacatttttgaaatcacttggttgcagactccttcctatattgttatgacctttcaagggtgtaatcacctttcacacctcacctctcagcagcatgaccctgagctgcaatgacagtcacagaatatgttgggaacccctgagcaagccacgcttcttctcatctccatgcttttgcatgcacagatccctcagcctgggggcttgcatttctggcaaacttcagtgactctccaagtcatgggtactctgggaagactctcgtcaatattgtcccactyccaagattaacttaacaattattttttgttttgtttttttgttttttttctgtttctcctagaagactatggactcattcaggacagcttatttcttgattatttttggttctccagtaaatgttaaacagatgaaggcattcaagctactcctcttataaacaaagaaactgagatcaggagagttaaataatgtgtctaggggcattaaaactagcagagacatcaggacagtttccattcgtcagtgaaaatacctttttttgatattttaatgtggatataatttccagaaatgatattatgtacaaaatatgaaaagaactctgtagttcttcataattaccctccatccttgtcaccctttaccttcccctaattgctttcatagagctcctttttggaagaatgagaagagaatgttatagaagataaaaatcacttgagaaaaaaaagtcatgttaag

SEQ ID NO: 34650 - DNA, 1190 bp, Homo sapiens
aatactctgattgctgcatctgtgacgatggaaagactaatgtttcccaaggcctagccaaaactgcaaattcatgtaatctcttaatgcttacatccttcactttcatctacactcccaaagcatggtggtgtgcccaacatttgttttttcaaaaagaatgacaaactgtttagccacagtagaaaaaccatgacaaataatactgccactaccattttataattttacaattaaatacataaataagtaaagtcatccctatgatgctgggttacatcaggctctaggcagccttgttccaatctcttcttgcagcattgttaaaattttccccgaaagctgttcccagcagtgacataaacatagacgtactcatttggtccctcaggtacttggagtttcaggaggaattgtaggaagtgatttccatgacttttctgaacatttttgaaatcacttggttgcagactccttcctatattgttatgacctttcaagggtgtaatcacctttcacacctcacctctcagcagcatgaccctgagctgcaatgacagtcacagaatatgttgggaacccctgagcaagccacgcttcttctcatctccatgcttttgcatgcacagatccctcagcctgggggcttgcatttctggcaaacttcagtgactctccaagtcatgggtactctgggaagactctcgtcaatattgtcccactcccaagattaacttaacaattattttttgttttgtttttttgttttttttctgtttctcctagaagactatggactcattcaggacagcttatttcttgattatttttggttctccagtaaatgttaaacagatgaaggcattcaagctactcctcttataaacaaagaaactgagatcaggagagttaaataatgtgtctaggggcattaaaactagcagagacatcaggacagtttccattcgtcagtgaaaatacctttttttgatattttaatgtggatataatttccagaaatgatattatgtacaaaatatgaaaagaactctgtagttcttcataattaccctccatccttgtcaccctttacsttcccctaattgctttcatagagctcctttttggaagaatgagaagagaatgttatagaagataaaaatcacttgagaaaaaaaagtcatgttaag

SEQ ID NO: 34651 - DNA, 519 bp, Homo sapiens
tgaacagagtatcacatttttttccccagtacctgcccagtgggtgacctaacacaatcatttagattgaaaggtggaagcgaaagaagataaaagattgagaagcaagaggcagagggacagaggggaacaaaacacaaataggcaaactgcaaagcaaatggaaaatgcattatttctaaaagggaaataccaaaagcactggcaggagcaataatggaaacaagagtgaccagatagatgggaaaattatgataggacctaacctaatattcacatgataaaagggtttctcaggctamaaatgcacacatatgcctatgtatgcagtcactgatttttttcctagttttatttgcttctttctttctcccaatttcctgggaaacaagaaagtttgtgttaactcctgactcaaaccaaaccggactacagtatggtcaagaattagaaacacagacaacactgaagggctgctctcgggataataattgcttgttacgcatttcttccctgcct

SEQ ID NO: 34652 - DNA, 535 bp, Homo sapiens
taagggcatatttaatgaatattcamaaatttttttgctgatcaaattatcattctgctttaaacttttgaaatgatccaaaaaaattttaaatgacttagatttactgttacaaaatgcttgtcttttgatgtcacaaacattatatactataatcactggccagagataattgctataagtataatgaaaagggaaatgatggaagatctctgcagctatcctcataaatgagggtgggaacacgatgggcagttccaaagttgaaaatagagaatatatgtggatttatattaacataattggtattcttggatagttaaaaatggctaaactgtaggagaagcccgagtaattactgttaacagaggaataaatttgagggcaataataatgatgataggccaggcactgtggctcatgcctgtaatcccagcactttgggaacccgaggcgagcggaccacctgaggtcaggagttcgagagcagcctggccaacatggtgaaacctcgtctctactaaaaatagaaaaa

SEQ ID NO: 34653 - DNA, 736 bp, Homo sapiens
tgggttttataccgagacattcagttcccaggggcaggcaggagacagtggccttcctctatctcaactgcaagaggctttcctcttttactaatctacctcagcacagaccctttacgggtgtcgggctgggggacagtcaggtctttctcatcccacgaggccatatttcagactatcacatggggagaaaccttggacmgtaccccactttcaagggcagaggtccctgcagctttccgcagtgcattgtgcccctgggttattgagactagagaatggcgatgacttttaccaagtatactgcttgtaaacattttgttaacaaggcatatcctgcacagccctagatcccttaaaccttgatttcatacaacacatgtttttgtgagctccaggttgggtcaaagtggctggggcaaagctacaaattaacaacatctcagcaaagcaattatttaaagtacaggtctttttcaaaatggagtctcctatgtcttccctttctacatagacacagtaacagtctgatctctctttcttttccctacaacattgaaacacataaccaaatacacattcacatcatgattcgaaactcatgttatttttcattatcttcctttaaacttggagaaatattttagaaactcatagcactcatggtgaagaaatgttttcttctactatgtgataggatcttattttagaaaattatacctaattatcttgatct

SEQ ID NO: 34654 - DNA, 736 bp, Homo sapiens
tgggttttataccgagacattcagttcccaggggcaggcaggagacagtggccttcctctatctcaactgcaagaggctttcctcttttactaatctacctcagcacagaccctttacgggtgtcgggctgggggacagtcaggtctttctcatcccacgaggccatatttcagactatcacatggggagaaaccttggacagtaccccactttcaagggcagaggtccctgcagctttccgcagtgcattgtgcccctggkttattgagactagagaatggcgatgacttttaccaagtatactgcttgtaaacattttgttaacaaggcatatcctgcacagccctagatcccttaaaccttgatttcatacaacacatgtttttgtgagctccaggttgggtcaaagtggctggggcaaagctacaaattaacaacatctcagcaaagcaattatttaaagtacaggtctttttcaaaatggagtctcctatgtcttccctttctacatagacacagtaacagtctgatctctctttcttttccctacaacattgaaacacataaccaaatacacattcacatcatgattcgaaactcatgttatttttcattatcttcctttaaacttggagaaatattttagaaactcatagcactcatggtgaagaaatgttttcttctactatgtgataggatcttattttagaaaattatacctaattatcttgatct

SEQ ID NO: 34655 - DNA, 640 bp, Homo sapiens
ggtatgtatcagtgcagataatccttgatttatgacagggttatgtcccaaggaaaccatcataaattgaaaatattattgagtcaaaaatgctttaaaacacctagcctactgaacatcatagcttagcctagcctaccttaaatgtgctcagaacacttacattggtctacagttgggcaaaaccatctaacgcaaagcctgtttttataataaagtgtggaatatctcatgtaagtcaagccaytgaatactgtactgacagtgaaaagcagagtagttgtatgggtacttgaagtatggttcccactgaatgcatatcatttttgcacctccgtagagtcaaaaaatcttaagtcaaatcatcatgagtcagggaccgttcgtacttcatttctttttattggcaaacaatactgcatcgtatagacataccacattttacttatccattcatcagttgatggttattagtgttgtttctgctgttcggctcttatgaataatgctgtcatgaatattcatatatgagtttttgtgtgaacatatgtttttaattctcttacaattagagattagctaaataatgtaataaaacactatggaaccatcaaaaagaataatagagagttgtatatgc

SEQ ID NO: 34656 - DNA, 599 bp, Homo sapiens
ggtcatgtccgctggaatctggattggccaaccagtttaagccccagaagtgttactgtgccagttctgtccctaaatcttaaaaaggcctgtcagcttctgcttttgtgcatctgggaaccctaaaccattatgtaaaaagtctggctgtcctgttggaaagacacgtggagaggccccataatgagggggaggccctgagatcccagatatgcaagcatccctcctaacccagtggctaaatgtagccacaccaatggcctctgacaagagcagcagggctgctacccaggtgaacccagtccagctacagaatcctgaacaacaacaacaacaacaacaaacagttattgtgtcttaagccacaaagtttgcaatagtttgatatgtagcaatagataacccaaacaaataactggctcctttgcctaagagagagaagttaataaagtttgaatgaaaacacccttaccccaaagggttaagaactaacttcttcattttcaacctagtactttcataagcaactctttcaagtcccacttagagggagtgagrtggttaaaagccaagtgaacttgagtagtgaacttcaatgg

SEQ ID NO: 34657 - DNA, 582 bp, Homo sapiens
gcaaatttagggagtcccatgtagattccctctgtctccccagctgtccttgtgctgcaggagggtaagggctgccatatctgcccttcctcacatggagccaaagttggactaaagaacatggggtctgcataggcmtattttgtagttgcttacacctacactgtggcatgaagtagtgggaaggagggggcaggagttcaccaggagagccatctccatgggaggggtggtgcagggaacgtcctgcaacaagtaggctgcccagtgagtcagccacgcctttggaagtgttgtggtagttttgtttacatttgcacatgtcccaaacagctaagtaatcatagaagaagtattgcttccatggaaagggcaaggacagacctctgtgaaaacaaactatatacatcttgtcaatggaatggcattctgcaaaatagaaaagcatgtgctatgtggtggtgagtgttagaacaacaaaccgtagcctagtgacgcctcctgagcagcttgtttttgcttaattacaagttgctatagctctttcccttactcaattgtgagcctctctcctaattgtgt

SEQ ID NO: 34658 - DNA, 582 bp, Homo sapiens
gcaaatttagggagtcccatgtagattccctctgtctccccagctgtccttgtgctgcaggagggtaagggctgccatatctgcccttcctcacatggagccaaagttggactaaagaacatggggtctgcataggcctattttgtagttgcttacacctacactgtggcatgaagtagtgggaaggagggggcaggagttcaccaggagagccatctccatgggaggggtggtgcagggaacgtcctgcaacaagtagrctgcccagtgagtcagccacgcctttggaagtgttgtggtagttttgtttacatttgcacatgtcccaaacagctaagtaatcatagaagaagtattgcttccatggaaagggcaaggacagacctctgtgaaaacaaactatatacatcttgtcaatggaatggcattctgcaaaatagaaaagcatgtgctatgtggtggtgagtgttagaacaacaaaccgtagcctagtgacgcctcctgagcagcttgtttttgcttaattacaagttgctatagctctttcccttactcaattgtgagcctctctcctaattgtgt

SEQ ID NO: 34659 - DNA, 582 bp, Homo sapiens
gcaaatttagggagtcccatgtagattccctctgtctccccagctgtccttgtgctgcaggagggtaagggctgccatatctgcccttcctcacatggagccaaagttggactaaagaacatggggtctgcataggcctattttgtagttgcttacacctacactgtggcatgaagtagtgggaaggagggggcaggagttcaccaggagagccatctccatgggaggggtggtgcagggaacgtcctgcaacaagtaggctgcccagtgagtcagccacgcctttggaagtgttgtggtagttttgtttacatttgcacatgtcccaarcagctaagtaatcatagaagaagtattgcttccatggaaagggcaaggacagacctctgtgaaaacaaactatatacatcttgtcaatggaatggcattctgcaaaatagaaaagcatgtgctatgtggtggtgagtgttagaacaacaaaccgtagcctagtgacgcctcctgagcagcttgtttttgcttaattacaagttgctatagctctttcccttactcaattgtgagcctctctcctaattgtgt

SEQ ID NO: 34660 - DNA, 582 bp, Homo sapiens
gcaaatttagggagtcccatgtagattccctctgtctccccagctgtccttgtgctgcaggagggtaagggctgccatatctgcccttcctcacatggagccaaagttggactaaagaacatggggtctgcataggcctattttgtagttgcttacacctacactgtggcatgaagtagtgggaaggagggggcaggagttcaccaggagagccatctccatgggaggggtggtgcagggaacgtcctgcaacaagtaggctgcccagtgagtcagccacgcctttggaagtgttgtggtagttttgtttacatttgcacatgtcccaaacagctaartaatcatagaagaagtattgcttccatggaaagggcaaggacagacctctgtgaaaacaaactatatacatcttgtcaatggaatggcattctgcaaaatagaaaagcatgtgctatgtggtggtgagtgttagaacaacaaaccgtagcctagtgacgcctcctgagcagcttgtttttgcttaattacaagttgctatagctctttcccttactcaattgtgagcctctctcctaattgtgt

SEQ ID NO: 34661 - DNA, 606 bp, Homo sapiens
gaaaatctatattatcagaaacagtccttgcctacatcagaaccttatatagaggacacatcatacaaatcaaactcttagagacaaacaagaagcagtttagattagaagtttctgaaaccacattcccacgaagaataaatccaaaacttttcagcacagcagacttccaaatcattcattctacaattcaaggaactttttatgaatggttattttgtccaggtasggtgctgggtgctggaaatacaaagtgaatgatatataatgtaggcaccccaagagtgtatcatctactggcatagacagacaagtaaattacaatgtaatgcaattacaatacaatgtggtaagtagatattaaatttgttatagaagcacatggcaggacatctaaaccagacctggttgtggaaggcattttagaggaagtgacatttgagtacagtttttttttaaagcagaattatgacttgaggataggtaatgatattccaacacgagtaggaatatcctcagatgggatgtgccgaccaaccttaaaatggccatgtatgttcccatcatggtaagtccccaaaaagggttctgacatcagagatagta

SEQ ID NO: 34662 - DNA, 606 bp, Homo sapiens
gaaaatctatattatcagaaacagtccttgcctacatcagaaccttatatagaggacacatcatacaaatcaaactcttagagacaaacaagaagcagtttagattagaagtttctgaaaccacattcccacgaagaataaatccaaaacttttcagcacagcagacttccaaatcattcattctacaattcaaggaactttttatgaatggttattttgtccaggtagggtgctgggtgctggaaatacaaagtgaatgatatataatgtaggcaccccaagagtgtatcatctactggcatagacagacaagtaaattacaatgtaatgcaattacaatacaatgtggtaagyagatattaaatttgttatagaagcacatggcaggacatctaaaccagacctggttgtggaaggcattttagaggaagtgacatttgagtacagtttttttttaaagcagaattatgacttgaggataggtaatgatattccaacacgagtaggaatatcctcagatgggatgtgccgaccaaccttaaaatggccatgtatgttcccatcatggtaagtccccaaaaagggttctgacatcagagatagta

SEQ ID NO: 34663 - DNA, 606 bp, Homo sapiens
gaaaatctatattatcagaaacagtccttgcctacatcagaaccttatatagaggacacatcatacaaatcaaactcttagagacaaacaagaagcagtttagattagaagtttctgaaaccacattcccacgaagaataaatccaaaacttttcagcacagcagacttccaaatcattcattctacaattcaaggaactttttatgaatggttattttgtccaggtagggtgctgggtgctggaaatacaaagtgaatgatatataatgtaggcaccccaagagtgtatcatctactggcatagacagacaagtaaattacaatgtaatgcaattacaatacaatgtggtaagtagatattaaatttgttatagaagcacatggcaggacatctaaaccagacctggttgtggaaggcattttagaggaagtgacatttgagtacagtttttttttaaagcagaattatgacttgaggataggtaatgatattccaacacgagtaggaatatyctcagatgggatgtgccgaccaaccttaaaatggccatgtatgttcccatcatggtaagtccccaaaaagggttctgacatcagagatagta

SEQ ID NO: 34664 - DNA, 731 bp, Homo sapiens
tttcaacagtcctatgagatgagcaatttattgtgttcactttacagatagggaaacaatagtggcatcaacattttagaaaaattaagataaagtaagttcacccgaggccaaaaaattcaaaacgataacagaattttcaaaatgggttgataactatgcaataaaaactaaacttaagataattatatgtaaaggtagagtaaggtgacttttacctgttagacattttgtgtgggcctgaaatctgtgagttagtgttttgttttgtttttggtttttttggccttaaacttagtatcgaaaatatatctagagtgaaagtagcaaagccaagtacttyataatttgagacattatttcagctttagtttctgaagtggatgttttaaaggataacatatttgaagagaatgaattccactcctgaataactaattttgccttttaaaatgattgagaacaagataatatgaaaattgtaagccaatttcaagagcaggactccaaagtacaatgggagtttccatagaagataaaaatcttaaaagtgatgattttattttacaaagcagaaaatgcctacctcttttccttagtaaaaccctaaacttcctaaatgagaagtaacaggtaacattactaatatttttaccttgttgttgatccttccttgagggtttgggagagaactgaaaattttttttttatttttaaattatttatttatt

SEQ ID NO: 34665 - DNA, 2515 bp, Homo sapiens
aaactccaagcctaaaaccagacaggattattcagactgaacttttcaacacattctcaattccctacgaaactcaacaaaactaagcattgtgttttcaaaccttcaaagattcacttcctacttttttaaaatttttatttatatccttcttagtctttcctacaaaacatgtgtttgtcaacttgggagtaatgttaaaagtaccggccgggcaccatggctcacacctgtaatcccagcactttgggaggctgaggcgggcggatcatgaggtcaaaagatcaagaccatcctggccaacatggtgaaaccccatctctactaaaaatacaaaaattagctgggcatggtgacacacgtctgtagtcccagctactcgggaagctgaagcaggagaatcgcttgaacccaggaggcgggggttgcagtgagccgagatcgcaccactgcactccagcctggtgacagagcaagactctgtctcaaaaaaaaaaaaaaaaaaagtaccacaccaccgcgaaaatatatgtcatgtggaaacagactagaaattatcattgaactccctgggaacatatgatagagcccaaaatgttggagtggttttaggttgaatagtgtcttgagggctctgtaaaatgctgggtgtaacatatggtcaaagtcggctttagattcactgacaaactgcattcaacagaaccctgctatcatccccaagacttatttagaagtttcctgaaagaaaacatgttattagtacaagcaatttctccaccaagcattacaaaacctacccaaacattacattacagaggggccaatctgagacatgaaaaatgacaccaaagagtttcataaacacagaataaagggaaaactgatattctagtgaagacagtgctaaaagccattatcagaagatatggattacatcctctaagaatacgagggagggagattgtgtttatagatatttggccatgtcagaaaaaaaaaatattctacctgagacttaggaactttaaatactctcctccagagtgcatgtgtttcccgagggagtgagagaagctgtgaacaggtacattcacagaccttgtttggttgctgaaggagtatgcatgacttgaattctgatgcaggctcacacagtgaatcaaatgatttggtgctgtcagaaaagaccattcttctctagagtaaagctggatgaggtcactgtctccaaaactggattatattaaattcttaggttgcaaaaattgttttgtgtatggtgactttcccttaacttgaccaagtaaaacggccttgtccctgagcaaaaaccagcctgccttcatgtctttaaacagattgttttccaaagcttacaaatgacctccagcctataaaatattcacattggtttttttccttcaatatttattatttagagtgtagccctttaaatattcatcatatttttctaaagatatggtatatattatttacatctggtcacattatattttcatagtgatgaaatggacacattggaatctttctgaagtcaggaacaaatagggtattgggccagatgcacacaacaggtagccagtgaggtggatttgcgtccagagatgattgagggaaaatggcaggtggccttctcacagtgactactcaggaaagatccagaggaaataaagggtccagggtagatggacttggggcctcctgtgggtaggtagacagccatgggctgaaggagaaagtcaaatatgtctcatcagagaattcacatgggatacaaaagcaataatggagttcacaaacacaactcagaattcaacaggtcacctccttagaaaaccaaagggaaggtgttggaatgtgtttatgaggattgcaaagaccctttaagatgggatttattccatttttaattaatttctcatgctttttccttaagccaaggtttttgaggtcccccaggtgtccatcttacctgtgtaaattacaactggaatgacatttaagacaatagtagtctggaatcctaattagaagattggggggatcatctgagatctctctctctctcttgctctgggggtaatcgggtcaaggaaaatgagttttggtgtttttttgttttttgggkttttttttccctaaaagcctgaatgaatttgtccatgcctcctttactctctaaagttacatttggaaagaagtcgctggcaggtaatcaatcatttttgaaatcttacttcccttagcagatcatcagcaatgctgttcgtgtatttattcatttgacaaatatttatgaagcactggtacacacaaagctctgtttactgagtctctggctgtggagcagttattccctgggagccaagaagtacagctgttctttagcaaatgagtagctgaagattagagtggtggctaaaagccatggcttctacatggacaaaatcatcctgttcttggaggctaaaacttgggaggctgtaatgca

SEQ ID NO: 34666 - DNA, 2515 bp, Homo sapiens
aaactccaagcctaaaaccagacaggattattcagactgaacttttcaacacattctcaattccctacgaaactcaacaaaactaagcattgtgttttcaaaccttcaaagattcacttcctacttttttaaaatttttatttatatccttcttagtctttcctacaaaacatgtgtttgtcaacttgggagtaatgttaaaagtaccggccgggcaccatggctcacacctgtaatcccagcactttgggaggctgaggcgggcggatcatgaggtcaaaagatcaagaccatcctggccaacatggtgaaaccccatctctactaaaaatacaaaaattagctgggcatggtgacacacgtctgtagtcccagctactcgggaagctgaagcaggagaatcgcttgaacccaggaggcgggggttgcagtgagccgagatcgcaccactgcactccagcctggtgacagagcaagactctgtctcaaaaaaaaaaaaaaaaaaagtaccacaccaccgcgaaaatatatgtcatgtggaaacagactagaaattatcattgaactccctgggaacatatgatagagcccaaaatgttggagtggttttaggttgaatagtgtcttgagggctctgtaaaatgctgggtgtaacatatggtcaaagtcggctttagattcactgacaaactgcattcaacagaaccctgctatcatccccaagacttatttagaagtttcctgaaagaaaacatgttattagtacaagcaatttctccaccaagcattacaaaacctacccaaacattacattacagaggggccaatctgagacatgaaaaatgacaccaaagagtttcataaacacagaataaagggaaaactgatattctagtgaagacagtgctaaaagccattatcagaagatatggattacatcctctaagaatacgagggagggagattgtgtttatagatatttggccatgtcagaaaaaaaaaatattctacctgagacttaggaactttaaatactctcctccagagtgcatgtgtttcccgagggagtgagagaagctgtgaacaggtacattcacagaccttgtttggttgctgaaggagtatgcatgacttgaattctgatgcaggctcacacagtgaatcaaatgatttggtgctgtcagaaaagaccattcttctctagagtaaagctggatgaggtcactgtctccaaaactggattatattaaattcttaggttgcaaaaattgttttgtgtatggtgactttcccttaacttgaccaagtaaaacggccttgtccctgagcaaaaaccagcctgccttcatgtctttaaacagattgttttccaaagcttacaaatgacctccagcctataaaatattcacattggtttttttccttcaatatttattatttagagtgtagccctttaaatattcatcatatttttctaaagatatggtatatattatttacatctggtcacattatattttcatagtgatgaaatggacacattggaatctttctgaagtcaggaacaaatagggtattgggccagatgcacacaacaggtagccagtgaggtggatttgcgtccagagatgattgagggaaaatggcaggtggccttctcacagtgactactcaggaaagatccagaggaaataaagggtccagggtagatggacttggggcctcctgtgggtaggtagacagccatgggctgaaggagaaagtcaaatatgtctcatcagagaattcacatgggatacaaaagcaataatggagttcacaaacacaactcagaattcaacaggtcacctccttagaaaaccaaagggaaggtgttggaatgtgtttatgaggattgcaaagaccctttaagatgggatttattccatttttaattaatttctcatgctttttccttaagccaaggtttttgaggtcccccaggtgtccatcttacctgtgtaaattacaactggaatgacatttaagacaatagtagtctggaatcctaattagaagattggggggatcatctgagatctctctctctctcttgctctgggggtaatcgggtcaaggaaaatgagttttggtgtttttttgttttttggggttttttttccctaaaagcctgaatgaatttgtccatgcctcctttactctctaaagttacatttggaaagaagtcgctggcaggtaatcaatcatttttgaaatcttacttcccttagcagatcatcagcaatgctgttcgtgtatttattcatttgacaaatatttatgaagcactggtacacacaaagctctgtttactgagtctctggctgtggmgcagttattccctgggagccaagaagtacagctgttctttagcaaatgagtagctgaagattagagtggtggctaaaagccatggcttctacatggacaaaatcatcctgttcttggaggctaaaacttgggaggctgtaatgca

SEQ ID NO: 34667 - DNA, 536 bp, Homo sapiens
catgcaagcaaatgaattctagagactatacttggggtgttcacaatagggactctcagcaggagagggacccgaagccaggcgtgatgcttcgtaagtttttaattcaaaggattgaaggacagaaaagatggaaaacaaaaagccaattacctgagaactctcgtctagaggaggactgagggagaggaaaggaggctttcccgggcaataaaccctgcagtgcagtgtctctctcttaaaactgttaaagagttcctgctggtcatatcacaggttctataaccctcgcctgcgtacgtccttgtgtagaaatggggaaagcctgagcagaatactcacttgctttccttggtttcttgatcaggtcacagacataaaagagaaattgaagctctctaaaaaggtctggtcagcattaccctacactatctgcaaggacgagagcrtgacagcgggcacgtccaacgaggaggaatgctggaacgggcacagcaaagccaggtgagggtgactcgatgtgtgcatggatgggg

SEQ ID NO: 34668 - DNA, 956 bp, Homo sapiens
taactgacacttggccttggttgggaagaagactgagagggtggaacatggtgcaaccctggaggacgatggccgaagaaagagaagagccacggcygggcgccgtggctcacccctgtaatcccagcactttgggaggccgacgcgggaggatcatttgaggtcaggagtttgagaccagcctgaccaaatggtgaaaccctgtctctactaaaaatacaaaaattagccaggtgtggtggtgggtgcctgtaatcccagctacttggggggctgaggcaggagaatagcttcaatctgggaggcagaggttggagtgagttgagaacataccactggactccagcctgggcaacaagagtgagactctgtctcaaaaaaaaaaaaagaagagccactggccttggcatcatgccacatggacacaggagccaggagaggtagagtttgttttacaatagaaatatatggatttgaacatggaatctcctggttttaaaattctctctccacttccatccttgtcttcatcatgatcatcatcaccgtcatccccaccaccatcatcatcacagcatgggctgaatgaaacacatctgtatagatagattaacactgatggctgacaatttgtaagctctgccttgcagcttggtttaagagcagtctcaggtctgaagccttctcagataatgccaattcatcttgctgtctgcattcttttcattttgcactcatttgcatatcgattcattcagcatttgcctagagcttaccgaatagcagggactgtgctgagggcatgctcatgatgagaacacaccttccagaacctttagttgaattcttcggctattttttgtgctacacatagcattggaaagtgttggagctggaaggcactcctgaaagtgaaatttattttgatcatcctatcacacaaataagcactttat

SEQ ID NO: 34669 - DNA, 578 bp, Homo sapiens
ccatgggccttgttaaagcccccagtgaccaacttcttggcctcataagcacttattggaagaaaccaaagccaaaaaaggatgagaaaaggggcccaaaagaattataaaagaaaaaattaaatttttgaatatcgggtaatagtcaaaggaatgtccagtttctagaacctgttcggggagattcttccagcctgctcttatccacctctcccttctttaattcctgttgcacaaagcattactgcctcatagtttgcaatgactgagactcagatggagaacagaaataaaatcttacatgactttagatttctccatcgcttattgacgagaagaaaaaaagagagagaagagcacatgtttttagttgacgaactctttgatataatccaaaattggcttaatatctatattccaatgcttaaaactttccctgaggaagaaatctcttgcttgaaaaagactggtamccaaattaattcaccttttacttttcctaagtagtgatccttgctttccatcttgcctaaaaatctttgtattcccaggtttaactcagaattttcatactagga

SEQ ID NO: 34670 - DNA, 830 bp, Homo sapiens
tgtgcctcaacctcctgagtagctgggattacaggcatgcaccaccacacctggctagtttttgtattttcagtagagtccgggtttcgccatgttggccaggctggtcttgaactactgacctcaagtgactcccaaagtgctaggattacaggcatgagccactgtacctggccaagctttttcttactatagagtgggagtggcatcttcttccagccttctgcatatgaggtacagtctacctttgctctggaactccctgctaggctggaagactcttggccaggtctgcatcatggtgtgaccctccccctgcccaattgcattttgcaagtatgactccccagtccactttttrtactccaaacactgctgcagtcttctccaggaagaactcaactggcacacagactgtatggagaatctaactaaaattctggctcatttgcccagaaaaaaacaaccatacatggaagccctaaatcctgaatacaagttcaaggtattcatggatgccttgaagcccatggaccccacctgaagagccctgggatttgactctccacctgcacttcatactcccatgggggacgtgctcttgatactgtcaagagttataactctagcaaggggcaatggttgcaatctgggcaggacaaccatgagaggcagtgcagtgatgcatctccctgggtggcaggcattctctctcaattatccttcctcattgactttggtaatgaaccttcataaagagaagataaattctcctgggatctttgggtccctgagaagcaggagagctgacattggaatagagaaaagct

SEQ ID NO: 34671 - DNA, 523 bp, Homo sapiens
gtattcctatatatgaagccctatatatgtatatattcatatatataaacgatatatatgaataatatgatgtgaatatacatggagcaattatatatatatatgaatcccttagcatagtgtaagagcctaacactgcaggtttaagagatgtagcagctcagtaaatggtagttcttatgaacattcatatacacgcacatagaggcatttaaatgactgaygtacacagtctgaatgctgatacaacatccacaaatttaaggagaaatgcaatcatagaaaccactcatgagttggcagagctgatgcatcctatgtttgctctaattgcaatatggctagatagcaatttaaaagattcaacaattatttaacatttgagaagccaagttgatttgaggctgtttttagaaatagaatatgttcatacgtggtaaaatttcgagagtcgtattcaaaccaagccaccaaatcatttcagtcgcctttcaaagatgcacctaccgatggcatggttcca

SEQ ID NO: 34672 - DNA, 1286 bp, Homo sapiens
acacagggcaggcctgctagtcccacggacctctggttctccaagctgcaaaatgcagatgactggctcccttggtggcaggagacagggtcaggttggaacctaagtaggcattgagtatcagatcttactaaaccaactccatcaaaccctctctgcttggagaggcccagcatgagagagagcgagacataaaggaaaaacagtgatggctaggagggaaaggaggtatagagcagcaaggtccgcagtctacctgaaatacaaaggctctgtgtctgtatgccgtctattttgtttgcatagcaatcctccttttccttcaattagtctgacagaggctttgctgatcgcaggcaagagagtgaagaaacgcccacacagcaagcgttctcatcttcrggcaagaggcaatgccagtctcctattataatggtcataaaaatgtcagttaccgtaccatgtacatatgttgaaggagaaattccttcttgctctctcctggtctctcttttttaattgcaggagactccttttggagcttagaattagtttgcattttctggacatgctccagctggccccaaagtgggtagcagagaggagctagttgtagaataatggagattttcctcaatatgtaagaacttccctcgcccgggcacagtgactcatgtctgtaatcccagcactttgggaggccaaggcaggcagatcactgaggtcaggagttggagaccagcctggccaacatagtgaaaccccaactttatgaaaaatacaaaacttagccgggcgtggtggcagatgcctgtaatctcagctactcgggaggctgaggcaggagaatcacttgaacctgggaggcagaggttgcagtgagccgagatcgtgctactgcgctccaacctgggtgaccaagcaagactctcaaaaaaaaaaaaacaaaaaaaaacttcccaagagtaaacactactaaaattttgtatttcagctggagagagtttaccagccacacacttggattaggatggggttaccataatctatgctggcacaagtgagaagtggatgtctgctgggggctgtcagaaaaattggtggggaaagagctctgctgcaggtaccagcgagccttgagatgttgtggactgttggcaagctttccaggcctaggaatttaggcctggcatcaccacggcctggagggcaaaggagaaggacttcggacccaaatccaaaaaaatgaagtagggagaggaggccaggtggagttggaggggtgg

SEQ ID NO: 34673 - DNA, 1286 bp, Homo sapiens
acacagggcaggcctgctagtcccacggacctctggttctccaagctgcaaaatgcagatgactggctcccttggtggcaggagacagggtcaggttggaacctaagtaggcattgagtatcagatcttactaaaccaactccatcaaaccctctctgcttggagaggcccagcatgagagagagcgagacataaaggaaaaacagtgatggctaggagggaaaggaggtatagagcagcaaggtccgcagtctacctgaaatacaaaggctctgtgtctgtatgccgtctattttgtttgcatagcaatcctccttttccttcaattagtctgacagaggctttgctgatcgcaggcaagagagtgaagaaacgcccacacagcaagcgttctcatcttcaggcaagaggcaatgccagtctcctattataatggtcataaaaatgtcagttaccgtaccatgtacatatgttgaaggagaaattccttcttgctctctcctggtctctcttttttaattgcaggagactccttttggagcttagaattagtttgcattttctggacatgctccagctggccccaaagtgggtagcagagaggagctagttgtagaataatggagattttcctcaatatgtaagaacttccctcgcccgggcacagtgactcatgtctgtaatcccagcactttgggaggccaaggcaggcagatcactgaggtcaggagttggagaccagcctggccaacatagtgaaaccccaactttatgaaaaatacaaaacttagccrggcgtggtggcagatgcctgtaatctcagctactcgggaggctgaggcaggagaatcacttgaacctgggaggcagaggttgcagtgagccgagatcgtgctactgcgctccaacctgggtgaccaagcaagactctcaaaaaaaaaaaaacaaaaaaaaacttcccaagagtaaacactactaaaattttgtatttcagctggagagagtttaccagccacacacttggattaggatggggttaccataatctatgctggcacaagtgagaagtggatgtctgctgggggctgtcagaaaaattggtggggaaagagctctgctgcaggtaccagcgagccttgagatgttgtggactgttggcaagctttccaggcctaggaatttaggcctggcatcaccacggcctggagggcaaaggagaaggacttcggacccaaatccaaaaaaatgaagtagggagaggaggccaggtggagttggaggggtgg

SEQ ID NO: 34674 - DNA, 1286 bp, Homo sapiens
acacagggcaggcctgctagtcccacggacctctggttctccaagctgcaaaatgcagatgactggctcccttggtggcaggagacagggtcaggttggaacctaagtaggcattgagtatcagatcttactaaaccaactccatcaaaccctctctgcttggagaggcccagcatgagagagagcgagacataaaggaaaaacagtgatggctaggagggaaaggaggtatagagcagcaaggtccgcagtctacctgaaatacaaaggctctgtgtctgtatgccgtctattttgtttgcatagcaatcctccttttccttcaattagtctgacagaggctttgctgatcgcaggcaagagagtgaagaaacgcccacacagcaagcgttctcatcttcaggcaagaggcaatgccagtctcctattataatggtcataaaaatgtcagttaccgtaccatgtacatatgttgaaggagaaattccttcttgctctctcctggtctctcttttttaattgcaggagactccttttggagcttagaattagtttgcattttctggacatgctccagctggccccaaagtgggtagcagagaggagctagttgtagaataatggagattttcctcaatatgtaagaacttccctcgcccgggcacagtgactcatgtctgtaatcccagcactttgggaggccaaggcaggcagatcactgaggtcaggagttggagaccagcctggccaacatagtgaaaccccaactttatgaaaaatacaaaacttagccgggcgtggtggcagatgcctgtaatctcagctactcgggaggctgaggcaggagaatcrcttgaacctgggaggcagaggttgcagtgagccgagatcgtgctactgcgctccaacctgggtgaccaagcaagactctcaaaaaaaaaaaaacaaaaaaaaacttcccaagagtaaacactactaaaattttgtatttcagctggagagagtttaccagccacacacttggattaggatggggttaccataatctatgctggcacaagtgagaagtggatgtctgctgggggctgtcagaaaaattggtggggaaagagctctgctgcaggtaccagcgagccttgagatgttgtggactgttggcaagctttccaggcctaggaatttaggcctggcatcaccacggcctggagggcaaaggagaaggacttcggacccaaatccaaaaaaatgaagtagggagaggaggccaggtggagttggaggggtgg

SEQ ID NO: 34675 - DNA, 547 bp, Homo sapiens
tagtcactgctgctggaagatttcttcctgacaatgattcatatgagccaattgtcaggagttttgaagttctgaaatagaagttgatgtatgtcttttactgtggtgcagtcactgaacatatttcatatgacggaaaatagctttgcagaaaaattaacctattccttatctttaaacaacgttgccttcaaaaattaccaactcattcacaagcattacattttctgagcttttcacatttcttaatcttatggtgcacagtcaccacaggagaaggtgtgatatgtcatttaaaaagcccaaacctttcgctttgtattgtcacaaggaactaaaaacaaggcaaataagtgtttcaacttatgytcttagaaattatttcttaaataccacaaactgatttgggtatatcacaaggaaagatcagataattctaatccatgctgaacatgtgattttgaaacagaaacagtaaagatgaaaggtgaaagctcccatagtaggaccagtactggaagagagagagagtgctttttgactgatg

SEQ ID NO: 34676 - DNA, 1852 bp, Homo sapiens
tgggtatggtagcacacgcctatagtcccagctacttgagaggctggggtggatcacttaagcccaggaggttgaagctgcagtaaactgtgatcacaccactgtactcctgcctgggtgacagagcaagaccctgtttcaaaaacaaacaaaaaaccgaaaaagcattattgtgcacttaattttgtgccaggcactatttaatgcatgtcctgagaatattaagatgaaaagacagcatctccttactcttgaaaaaatcagcctaatgagaaaggtgctcttgtaaataaagtgtaaagaggtcatcttgtcttaaattaccttttgcaagtatgcctccttcctcgagtattctggaatttattgagtaaattcaagtagatgctaaaacatttataaaccaagatattctacaaatatgttattcttgtattaagatgtaagttttaagtgtgtatcattgttctttcttttctgattctgactttcagtcattcttcaaaactgtttttcagtgcctcctatgtgccaggcactgtggtaggatgctgggatacaaatatgaatatgacattatctctgactctccaagttatttatttcacatctcctctctcctcaaacctccaacacttcatctttcctcactctcaactggtgatctcaatttacacttcactgaaagaacagaagcctcaggcagtaattatatcttcccaccatcgaatctaccaacctacctgaatctgaatacatgttctccctcctttcacaatgaggttgtcctttccagggctctggatcccatgccctcctgcctatttgaggatttcactcctgccattatgtgtcctcttttctgcatcatgccttagtattgtcttgcttgactaaactctctctagactctccatccttgctggcttctgccctctatctcagcatgccttcacagtaaagcttatcaagagttgcctatacttgctctctctactttctaacttctctttctctgttcaacccactccaattatatgttcattgcatctgctgaaataatatttaccagatctgtcaccagtgactttgaccttgccaaagattatgtcaattttcagtcctctcctatctgaccactctaaatttggcagaggtgaccatttcctcctatttaaaatccattctgtagttggcttctgtaaccatatgctctcaattttcctcctatttcactggtgtttcttcttggttacttcttcctctactcaacccccctaatctccttgaatatttaattgccttctcacatctccacttgtatttcttaaggcatctcaaatgtaacaagactgagaaaaattattggtctttccagaatttccttttctcyagaatttcttccagaatttctccttttccagttttgtacatcttgaataaagcatccccactcacctagtacttcctctcaccaccttcaaaccaatccatcagcaagtcttttcagccccatatgtaaaaaagaacttgaatcaaacctcttctcaccactgtgacagctaccaccctagtccaagtcatcatgtcttgcttggatgactgcagtggccatctaattattttccaggtttatcttcttgcccactattagagaagccagagagccttctaaaaacaaaaccacatctctgccctacttaacaccctatgataattttccatcgctcttagaaaaaaactgaagctcttttccaaagcctctaagacctgcatagctttcctaccactctccccttgttcactgcaccctggccacataggcctgctttacagccctctcatttaatgt

SEQ ID NO: 34677 - DNA, 598 bp, Homo sapiens
tccagttctttattacagtacctagtgcccaggagacccagtaagtaaatagataaatgagtaaacagtttctgcttcaatatgagaacatgattaagcttacctgcttgaggaatgtgaggaaaacagccaatgtaaaacrgccacaccctttctagagctgatgacagccaactcgtcccaaatgtggaagtccagcgaaaaatcagcagagccacctacccaacccacagttgacttagaagataattccagaagagctgtccaactaatgcagagactcctaagaaaaaaggtatagttattgttgtaacccactgccctttgggtggcttcttaggcagcatttttgtagcaataaataactggtgcaatatctgtaggttagattttacctgaggatcaccaacttgagagctttgtttgctaaaaaaaaaaaaaaaaggttgtaaatccaaggattgcttttacaaatcccactgtgaatgtgaagaatggatatatttataaatcagtagaaataatatttctcactacttaataatgtttaaagattagtagaagacatttttaaaaagaataatttaaaattaaaaaa

SEQ ID NO: 34678 - DNA, 598 bp, Homo sapiens
tccagttctttattacagtacctagtgcccaggagacccagtaagtaaatagataaatgagtaaacagtttctgcttcaatatgagaacatgattaagcttacctgcttgaggaatgtgaggaaaacagccaatgtaaaacggccacaccctttctagagctgatgacagccaactsgtcccaaatgtggaagtccagcgaaaaatcagcagagccacctacccaacccacagttgacttagaagataattccagaagagctgtccaactaatgcagagactcctaagaaaaaaggtatagttattgttgtaacccactgccctttgggtggcttcttaggcagcatttttgtagcaataaataactggtgcaatatctgtaggttagattttacctgaggatcaccaacttgagagctttgtttgctaaaaaaaaaaaaaaaaggttgtaaatccaaggattgcttttacaaatcccactgtgaatgtgaagaatggatatatttataaatcagtagaaataatatttctcactacttaataatgtttaaagattagtagaagacatttttaaaaagaataatttaaaattaaaaaa

SEQ ID NO: 34679 - DNA, 598 bp, Homo sapiens
tccagttctttattacagtacctagtgcccaggagacccagtaagtaaatagataaatgagtaaacagtttctgcttcaatatgagaacatgattaagcttacctgcttgaggaatgtgaggaaaacagccaatgtaaaacggccacaccctttctagagctgatgacagccaactcgtcccaaatgtggaagtccagcgaaaaatcagcagagccacctacccaacccacagttgacttagaagataattccagaagagctgtccaactaatgcagagactcctaagaaaaaaggtatagttattgttgtaacccactgccctttgggtggcttcttaggcagcatttttgtagcaataaataactggtgcaatatctgtaggttagatkttacctgaggatcaccaacttgagagctttgtttgctaaaaaaaaaaaaaaaaggttgtaaatccaaggattgcttttacaaatcccactgtgaatgtgaagaatggatatatttataaatcagtagaaataatatttctcactacttaataatgtttaaagattagtagaagacatttttaaaaagaataatttaaaattaaaaaa

SEQ ID NO: 34680 - DNA, 972 bp, Homo sapiens
tgaccaattacaacagtgtaataattaaaaattcatttcttggccctgaggaaggtctgaaaccaaatccaaggaacaataaatactcccatatggaactctaacagttaccaatgagcgttatcttcaggagtcctgtggcccaagaaggcggtgacacatcacatggagggttttcaggacgcgtaactcaggggtggtcacctgcctcaggacagtcctccccctatggtgtctggggctgcctgctgtttgaaaagagcctttttrttggttggttggttggttgattagtttatgacagggtctcattctgtcacccagcctgcagtgcagtggtgtgattacatcccactgcagccttgacatccctggtcttttaaatactgataagtccgcttgaatccaggaggcagaggttgcagtgaaccgagatcacgccactgcactccagtgagccgagatcacaccactgcactccaacctaggcaacaagagtgaaactccgtctcaaaaaaataaataaataaaaataaatgctgataagtcatcagtgtttgctggcttcttcattttggctctctctcatggcaacaatataaaggaaaaaagctcaaggatataagggtcccatcttgggctctgacttgccatgtagcttacttaggaaggtaaaatgaccgtatccacctgcgcagtacagaccaagaagaggacacaggcttggctgttccactcgggtatcctaaacagatgctgcttcctctcagaaccagaaggagcagtgtttgagttcacgccttccactgcaacaggaccttggcccccactttcaacttcaggcctgggtgacacatttgtttgctggtccaagtagaggcaggatccccaatgagcatgttccccagggacagtacagcgacacattctgaagccaaattcagaactggtagcctgatccctaagactgac

SEQ ID NO: 34681 - DNA, 972 bp, Homo sapiens
tgaccaattacaacagtgtaataattaaaaattcatttcttggccctgaggaaggtctgaaaccaaatccaaggaacaataaatactcccatatggaactctaacagttaccaatgagcgttatcttcaggagtcctgtggcccaagaaggcggtgacacatcacatggagggttttcaggacgcgtaactcaggggtggtcacctgcctcaggacagtcctccccctatggtgtctggggctgcctgctgtttgaaaagagcctttttattggttggttggttggttgattagtttatgacagggtctcattctgtcacccagcctgcagtgcagtggtgtgattacatcccactgcagccttgacatccctggtcttttaaatactgataagtccgcttgaatccaggaggcagaggttgcagtgaaccgagatcacgccactgcactccagtgagccgagatcacaccactgcactccaacctaggcaacaagagtgaaactccgtctcaaaaaaataaataaataaaaataaatgctgataagtcatcagtgtttgctggcttcttcattttggctctctctcatggcaacaatataaaggaaaaaagcycaaggatataagggtcccatcttgggctctgacttgccatgtagcttacttaggaaggtaaaatgaccgtatccacctgcgcagtacagaccaagaagaggacacaggcttggctgttccactcgggtatcctaaacagatgctgcttcctctcagaaccagaaggagcagtgtttgagttcacgccttccactgcaacaggaccttggcccccactttcaacttcaggcctgggtgacacatttgtttgctggtccaagtagaggcaggatccccaatgagcatgttccccagggacagtacagcgacacattctgaagccaaattcagaactggtagcctgatccctaagactgac

SEQ ID NO: 34682 - DNA, 552 bp, Homo sapiens
tgacrgggaagagtatagacttcaattttaagaagcttgacaactgaagggaatagttacaaagaaacaaaggaaaacaggaatttgagaattaggcaacttcattttatttttgaagccaagtaacattttaatcattggagacaaagacattgaaaataatgaaactgtatcattgatggcacacggtttctgaggaagtaggatgttgttagtatctttaaattgcaatggaaataattcaacttaaactaatttttaaaaaagaaaagaagagaaaattaaaaaaaaataagatctgcattgattcaccatttctgactctaaaaagacttggttattgctatttaagaaagcttccaaagacttgggagtgactgcaaaggaatagaagtaagagttgggtctaaactttagaacatattggggtggaatcgctaagtcattttcactgtggtctaatatttcagcccataaattaaaaaattaaaaacaaaacaactgcagtaatcactaatatgttatatttaaactagttggcaaactgactga

SEQ ID NO: 34683 - DNA, 553 bp, Homo sapiens
tgtggattgcagattaagaaaccttaaactagatctttctgaagatcttctctgacatcaagtgtctgtactcaaaatatttttaggtataagttcttatcccatggtatttgcagtctttttcaagggaccagtcaawtttgaacaacaatgagaatgttgtgagttttttctctttccttgactagtttttcatttatagacatgccgcctaaacagctccaagaaggaatagctagtatttgttaagtactcagtaccagacacatgcatatcatcctaggcattttgcgagtatatattatttaatcctaagaacaggtaagtatttccactgacacagagaagctacagcaagtggtggcactaaatgttatattcgtggtgaacgttctatatacattgaatagattatatgtggatatgttacattcaccgtgaaccacacatccttgcataagcaccttaaccattagaacatagaataaggaagctgtacaacatgaaagttttcacttatgctagggaatccaatttagatcactaataggtc

SEQ ID NO: 34684 - DNA, 603 bp, Homo sapiens
taaagagcacacatttttaaaattctgaaatctactgaacgcaaaagctggggtaaatgaaaaagatcacaaacagcccctaccccactagactgtaaactctacagcagcagggcccttgactctgttcaccattaaatccccaagaatcatacagaggtaaaaatatatctgtaattttaaaacagaaagccacgtgaagagaaagttcatttatttataagaaattggcctggtgcggtggctcacacctgtaatcccagcactttgggaggccgaggcgggcggatcacgaggtcaggagatcaagaccatcctggctaacacggtgaaaccccatctctactaaaaatacaaaaaaattagctgggcatggtggcaggtgcctgtagtcccagctgcttgggaggctgaggcaggagaatggtgtgaacccgggaggcggcgcttgcagtgagctgagattgtgccactgcactscagcctgggtgacagagtgaggctccatctcaaaaaaaaaaaaaaaaaaaaaaaaaaaaagagaaagaaagaaaaaaagaaattagatgaaatatatatttatatatttaattatcctgtaaa

SEQ ID NO: 34685 - DNA, 617 bp, Homo sapiens
tggcactctgtttccaaactgctcattccagcagaagccactgagtaattacacccaataggagattggtacccatcactgcaggggttttcacrttacccacatctgtctcaagcaaggccctattagggtgacaccatgcctaatctttgcaatggtgttcacataatctcaggcctttggtcatccaaccatccacggtagaatcccagttcttaagaccccctagctattactggccacagtgagggagggccgcctgcacagggaaggtggcagttgttggggtgggggttggggggaggttactaagaatgaggccactctacttctggagaggttggaggagggctggaaggaagcagaaatagataaagcatatctcctacaagacccagagcaaaacatagctgggagttctcagtcccttgctctgctacacagcactcggcccaggaatattttgaatcctcgcttcgaagtcccagtgtacttagtgtggccctagtgatgttcctctgctccatctcaccacgtccctcttcttcctggctgatgaagctatggaccttgagtccagtttgctcctccttctttttgttcctaaattatactat

SEQ ID NO: 34686 - DNA, 617 bp, Homo sapiens
tggcactctgtttccaaactgctcattccagcagaagccactgagtaattacacccaataggagattggtacccatcactgcaggggttttcacattacccacatctgtctcaagcaaggccctattagggtgacaccatgcctaatctttgcaatggtgttcacataatctcaggcctttggtcatccaaccatccacggtagaatcccagttcttaagaccccctagctattamtggccacagtgagggagggccgcctgcacagggaaggtggcagttgttggggtgggggttggggggaggttactaagaatgaggccactctacttctggagaggttggaggagggctggaaggaagcagaaatagataaagcatatctcctacaagacccagagcaaaacatagctgggagttctcagtcccttgctctgctacacagcactcggcccaggaatattttgaatcctcgcttcgaagtcccagtgtacttagtgtggccctagtgatgttcctctgctccatctcaccacgtccctcttcttcctggctgatgaagctatggaccttgagtccagtttgctcctccttctttttgttcctaaattatactat

SEQ ID NO: 34687 - DNA, 587 bp, Homo sapiens
gtctgccttcccattcaggggagatgtctattaagaaacatatcatcaacccaaattaaaaagaaacctttactaggtagctattattatgaaacgaatccttcactcatcaatgtgaatctacaaaaaaatcatcagacatttaaggacaaccacaagcagaaaattaaaaaaagaaagaccaaaacatacatagtctcaaaggaaaagaaataattcaaaaactagaagagattttttaaattgttaataaatatctttaaagaaatttgagaagatattgcatttataaaacaagaatagtatggctgaaaagagaactagcagagaacacagaagagttcctataaattaaacatctaacctctaaaatatgaaattcaaaagaacagctgaaatataaagtcaaaatactctcctagagcttaaagcaaatggcaaagagatggcaaatttgaargataaaggtaagagtcatagagaaataatacaggagttgcagaaatctatcaggtagctaagaggaattatagaaaaagacagagaaaatggatgggggaattttttaaagaaataatagggcatac

SEQ ID NO: 34688 - DNA, 553 bp, Homo sapiens
caccgcatgttctcacttacaagtaggagctgaatgatgagaacacatggacacatggtggggaacaacacacactggggtctggtggagggagaaagtgggggagggagagcatcaggaagaatagctaatggatgctgggcttaatagctaggtcatgggatgctctgtgcagcaaacctccatggcacatttacctatgtaacaaacctgcacatcctgcacatgtacccctgaactcaaaatgaaagttgaagataaaaaaaaaaaaagaaaaaagaaaacaggcctttggcatgccagagttcccgatgccatgccttcctgcgttcaccacatattttagagagcaactctgtgctggacacacagtcatctcattagtttcctgtaacaaccccttcctacacccacaaatccacatccacatatatcaacacttggatgtgatttttgtctctctgcaattctgaaatagtaycagaccacccaacggttcacaactagacttttgttgttgttgttgtttgtttttgtttttgttttgagacgg

SEQ ID NO: 34689 - DNA, 529 bp, Homo sapiens
tacaaacctggcgaacaccaaaatccaagaacagatgcctaaggtacactgtgtgaaacagaatttagggtcaaatttccacaagatacttatacaccatggagtactatgcagccacaaaaaaagaacaaaatcatgtcctttatggcaacacagatgcagctgaaggccattatcctaagcaaattaatgcagaaaaaatwaatcaaatacctcatgttctcacttaaagtgggagctaaacattggttatacatggtcacaaaaaagacaacaataaacactggggattctaaaactggggggaaggagacaagacttgaaaaattacctatcaggtactatgttcactacttgggcaatgggatcattagaagcccaagcctcagcatcatgcaatatacccatataataaacctgcacatgtgcccccctgaatctaaaataaaaattttaaaaaacgtattaagaaaaaactgaaatactccacaaagtaatgaagatgttgttaggcaagagtactttttgc

SEQ ID NO: 34690 - DNA, 644 bp, Homo sapiens
ttatttargtccttaatgatacaaataatttctttttttaaaaaaggtacaaaacttacagaaaacaaatttatcaggtagaagacagctaatttacctatacgtttaaagataaagaaaatcttttcctgagaagaataatcgatttgcccttcttcgtttgattccaaagattatagaagaaaatcagtttagcctcttttctatccaccttcccctaattctccctgaattcccatatctacccattctacttcctaaatgcctattaaaatagttaatcctaggccaggtgcagtggctcatgcctgtaatcccagcacttcaggaggcttagacaagaggatcgcttgagcccaggagttcaagaccagcctgggcaacacagtgagacccatctctacaaaaaaattaaatattagctgggtgtggtggcatgcacctgtcgtctcagctactcaggagcctgaggcagaattatcacttgggctggggggttgaggctgccgtgagccatgattgtgccactgtacttcagcctgggcaacatagtgagacccagtctcaaaatataataataataataataataataataataataataataatcccttcctctagatttccactatacaaagtag

SEQ ID NO: 34691 - DNA, 250 bp, Homo sapiens
atgcagagtggctggaaatgtaactattcccacccacttccgtgtggggcccttgaatgcagaatttattcaactgaaagtgaagaccttgaccgaaatatcgagggccttgagcttattttcttctgtatgaccatctttcagaaacaaatgaattctttcaaaacaaaaaaaaaaaargaaagaagaaaaaaaaaggagaaacaaaagtcaaagaagattttgaaaaaagtaataactgaccaatttg

SEQ ID NO: 34692 - DNA, 843 bp, Homo sapiens
attatgaaaaacagagcaatctgttattaagaacaagtgtggctgaattagaatttgttgctagaattttgtgcaacagtggatcatccactgttttatcatctttagaattgttggaagtgctttcataaccattattacagcttgatggctttatcttctcatgatagccctgatatgcccaaaaagatatctccatttccatacattttatgtgtgaggaaaataaaaatcactctggtcaagagatttctcaaagctgaggctccgtgctgctggataaagcagaaatggcaatgaatgaaatggaaaaggagttgtctggaaatctttgtacaataagaaataactccagaaaaaaaaaataatggaaagttaaatttacttagtgccttttcctgtacatcgtgtgaactcctggaagcaggtagaccaggctctcttgggtgtgctgcagtgtggtggcatttgacttggagtcttagtggatgaaagtgcatgaggttaactatatcaccttctgtctacagaaggaaatgctatgtttattctacctgtaaaaatattgaccgcrgtaaaatcagcagttaggaatgtatagaaataaagaagtttacagttctgagggggttggaacaaattgccagtaaaaataaaacaaaaatattctggccaggtgcagtgactcgcaaatgcaatcccagggagagtaaggcaggaggatcacttgagtccaggagttcaagaccagcctgggcaacgtggtgaaatcatgtctgtaaaaaaaataaaaacaaacaaacaaaaaatagcaatgcgtggtggtgcatacctgcagttcca

SEQ ID NO: 34693 - DNA, 688 bp, Homo sapiens
cccagaaagtaaattatagatctggatctgataatctcgattagtctgaaatacataaagacaccatacagctagactagggaatttctacccttgccctcatctcttgagtactactgcctcttttagtgccccagcccatagctgcatagttcagggcaaacccaatcattgccagcaaagcattttttcctatctactgattaagcatatgcagtaatgcaaggcatccattaatttctataaattccaaaatgctagaaaaggatggtgaaccatcagctctcaaggatggagttttatggaaattttatgaaaatattctctttctatattckaaagtaacaatgcttggtgcttgtccaagaagtggtaaatatttaaaatagaagtgggctcaggaaagatttttttcttttaagttgggttgatgcagccatgaatgctcattgctcaactgatttaaattctctgtggcagctgatttctctccattccacaccttttcccctgggctttcagaaggccacaccctgcaggtttttccttgttcctcaggcttcctgtgtgtctccttgtcttccctgttggtgtgtcccatgtctctgaacattgacacacccatgttctatcaaggattggcctatgaaaccaagaatccgtaccttccactgaaaagacattggca

SEQ ID NO: 34694 - DNA, 688 bp, Homo sapiens
cccagaaagtaaattatagatctggatctgataatctcgattagtctgaaatacataaagacaccatacagctagactagggaatttctacccttgccctcatctcttgagtactactgcctcttttagtgccccagcccatagctgcatagttcagggcaaacccaatcattgccagcaaagcattttttcctatctactgattaagcatatgcagtaatgcaaggcatccattaatttctataaattccaaaatgctagaaaaggatggtgaaccatcagctctcaaggatggagttttatggaaattttatgaaaatattctctttctatattctaaagtaacaatgcttggtgcttgtccaagaagtggtaaatatttaaaatagaagtgggctcaggaaagatttttttcttttaagttgggttgatgcagccatgaatgctcattgctcaactgatttaaattctctgtggcagctgatttctctccattccacaccttttcccctgggctttcagaaggccacaccctgcaggtttttccttgttcctcaggcttcctgtgtgtctccttgtcttccctgttggtgtgtcccatgtctctgaacattgacacacccatgttctatcaaggattggcctatgaaascaagaatccgtaccttccactgaaaagacattggca

SEQ ID NO: 34695 - DNA, 1036 bp, Homo sapiens
atggctattcactgctaaaaggaacgagtgttaagtaggactgtgtggtagagctttggctcaagttgcaagagtgccatcaccagttagctatgttcttcctgggcacaagagtgagggatgctagcccgtcatggtctgggcacccaggactttgcactattccaggactaagtaatgtatctcaaatataagtcattctggacttgctgtttcactctctgtaatgctcctcttctgtctaccagactttcttaacaggggttctgtgaggaaaattaagtcctaatgctctaaaaaggmcattgtatgtagtgaattaacttctctaaagtgcatctagaatggcagtaattatatcagtccttggagaaaccaaaaaacgttgctaaaattagttttgatgtcctgcggtgaacatgagggaccacttcattgcacctttttatcaatatattttctgtctgtgttagacactttttgcattgttataaaggagtacctgaaactgggccatttacaaagaaaagaggtttatttggctcacagttctgcaggctgtccaggaaatgtggaggtgtcatctgcttctggggaggcctcaggaagctttcaaacatggcagaaggtgaagggggagcaggcatctcacttggcaggagccggagcaacagcatgaggaggcgccacagtctcttaaacaaccaggtctctggagaactcactcatctccaaagggctgacaccaaaccattcaggagggatctgccccatgatccaaacacctcccaccaggccccacctgcaaccctggggatcatatttgagatgtggagggaacaaatatccaaactatattactatcatcacaaatttcttggcaaagtagctctagatcagtgcctctcaaccttggctatatgctacaattatctggaagctttaaaatagtaatgatgttcaggttctatctaaaaaactgtcagagtctccagggcaggacctaagcattggaaagtgtcagctgcttccccgg

SEQ ID NO: 34696 - DNA, 1036 bp, Homo sapiens
atggctattcactgctaaaaggaacgagtgttaagtaggactgtgtggtagagctttggctcaagttgcaagagtgccatcaccagttagctatgttcttcctgggcacaagagtgagggatgctagcccgtcatggtctgggcacccaggactttgcactattccaggactaagtaatgtatctcaaatataagtcattctggacttgctgtttcactctctgtaatgctcctcttctgtctaccagactttcttaacaggggttctgtgaggaaaattaagtcctaatgctctaaaaaggccattgtatgtagtgaattaacttctctaaagtgcatctagaatggcagtaattatatcagtccttggagaaaccaaaaaacrttgctaaaattagttttgatgtcctgcggtgaacatgagggaccacttcattgcacctttttatcaatatattttctgtctgtgttagacactttttgcattgttataaaggagtacctgaaactgggccatttacaaagaaaagaggtttatttggctcacagttctgcaggctgtccaggaaatgtggaggtgtcatctgcttctggggaggcctcaggaagctttcaaacatggcagaaggtgaagggggagcaggcatctcacttggcaggagccggagcaacagcatgaggaggcgccacagtctcttaaacaaccaggtctctggagaactcactcatctccaaagggctgacaccaaaccattcaggagggatctgccccatgatccaaacacctcccaccaggccccacctgcaaccctggggatcatatttgagatgtggagggaacaaatatccaaactatattactatcatcacaaatttcttggcaaagtagctctagatcagtgcctctcaaccttggctatatgctacaattatctggaagctttaaaatagtaatgatgttcaggttctatctaaaaaactgtcagagtctccagggcaggacctaagcattggaaagtgtcagctgcttccccgg

SEQ ID NO: 34697 - DNA, 1036 bp, Homo sapiens
atggctattcactgctaaaaggaacgagtgttaagtaggactgtgtggtagagctttggctcaagttgcaagagtgccatcaccagttagctatgttcttcctgggcacaagagtgagggatgctagcccgtcatggtctgggcacccaggactttgcactattccaggactaagtaatgtatctcaaatataagtcattctggacttgctgtttcactctctgtaatgctcctcttctgtctaccagactttcttaacaggggttctgtgaggaaaattaagtcctaatgctctaaaaaggccattgtatgtagtgaattaacttctctaaagtgcatctagaatggcagtaattatatcagtccttggagaaaccaaaaaacgttgctaaaattagttttgatgtcctgcggtgaacatgagggaccacttcattgcacctttttatcaatatattttctgtctgtgttagacactttttgcattgttataaaggagtacctgaaactgggccatttacaaagaaaagaggtttatttggctcacagttctgcaggctgtccaggaaatgtggaggtgtcatctgcttctggggaggcctcaggaagctttcaaacatggcagaaggtgaagggggagcaggcatctcacttggcaggagccggagcaacagcatgaggaggcgccacagtctcttaaacaaccaggtctctggagaactcactcatctccaaagggctgacaccaaaccattcaggagggatctgccccatgatccaaacacctcccaccaggccccacctgcaaccctggggatcatatttgagatgtggagggaacaaatatccaaactatattactatcatcacaaatttcttggcaaagtagctctagatcagtgcctctcaaccttggctatatgctacaattatctggaagctttaaaatagtaatgatgttcaggttctatctaaaaaactgtcagagtctccagggcaggacctaagcattggaaagtrtcagctgcttccccgg

SEQ ID NO: 34698 - DNA, 1455 bp, Homo sapiens
cccgttacatattttccttggcttttcaaacattggctttgaccctcatcttcctagtatttcctgggaggctgaaccctactaaggaaagttttctctatttacccataaatgtgtgaattctgccattttgtgtactccaagttaaagatcattttttttgtgtgtcctacagtaactataaatcaccagcaaccttcaaaaaactttctgatattccaaagaaatgcaaatacaaaatgtgaagttcgagcaaatacaaagttcgtattttgcctggttctctaaaatgaaagaaaaaaaaataaacttgggtctgaattaatgaaataatctaattatcaactaacatacaatgcatattacatatatttgaagaaatgttagattacatcagaagttacataagtgcatttatttatacaaccacccaacaaagatcaattgcatatgaaataagtaagaggaaaataaaagatatgggtatctgaaatgggtgtaatgacacatggcaggtggtgaagggtcaactcagcaggcccaggctgcccaagccctgcccattcaaaataaatgcctgtgtcatgaggactggcccctgcctggctactggcacatgccctttcagtcactgtaatactctgccctatgacagcagcactatgtctactcagctagttcccacmgaaaccctagacacgaaggctggggtgagctttcttggcagctacactttgtgggtgttgtctcactgcattgctgagagaagcatgtgctgtctatagaatttcactgggagacggtaactggaagcttgcacctcatttctcctgggcttgccctatgcaccttttccctttgctgattttaatctgtatattttaactgttgtaaaccacaatcatcagcagcatacagcttttccaagtcctatgagtccttctaggaaatcatggagcctgagggtggtcttggggaacccggacacacatggatgtgcataggatgggcagacacataaaagcagagatagttccgacggattgagggaagaggtcagaagatgtatggtctgaatcttgaagaggaaaagaacagtactttcatctctgcgtatctactaataccagatacagtgctttgtgattttatataaattattttatttaatattcctaaatgttttttgacataggaattattatccaactctattttactaacaattaggtttacagttagagttaatctaataagaatcacacatagattaaagaaatggatttaaggttccaagctatgtctgttagactccaaggtttgtgtttctacacaattctatgggcccagagggcattattctatgtaacctgttaagtaaattgccaatatctgggagagggtacagaatagagaggaaggaaaggatgttgctggaccaaataaaaagcatgc

SEQ ID NO: 34699 - DNA, 544 bp, Homo sapiens
ttatgaaaatatgtgatgaatccaaagaaaaccaatactaaaaaagaagtaattacatgctatgttataacctcttattttcattttaaaatataataaggatgcattttatatcaacaaatgtaaatctacaatggctatataaaatttcattatatggagttacctttaatttgtgtagacaattccccactgctgaatatggaagagttttcaacgttttggctgtaaaataatgatgagctttgattatacctctctatacatatttttaaaaattctaaacagtgctattatggggtcaaagggcaggccatagaaactttgggtacttcttaacaacctgcactcaaaaatttcttccagtttaaatttccacaaataatgcatgaaaatttctattccaacattcagaagtaatatgatttttcaaatgcaaaaagttgaagatgtyggaaaagtcaagtggaagtgagccagttgattgaaaatgattgtctgcagatcaataaagaggccagagcagaagtagaggtttgagagc

SEQ ID NO: 34700 - DNA, 795 bp, Homo sapiens
tcagggtgcaatcaataaacacttaaaaataaagatttagttacagatctttctataaggcacagataatgaaagtataaacattgtcatgagaaaggtaaccttaaaatgtaacttcactctaattatcaccttttgaaagagatgtgggatcaaaatagtcgctttacccaagggtaggttttctttttgactaaaactttattcttaaagattatttcgatcatttcatcgttgtgtcatttgcaacttagaggccaaaaggcctgctgaaacctgcattaaccattttgaatggggataattataaagtaaatggtcactctagtgctctcagtgacaccatgatarcttcccggaattaatgatagcttcaaagatttgtcccataagagaatatggtttatatttgaaaaaaaatatatcttaacaattatagtaatggtcacacaaaccactgaaagcatttttaaattaaaattgacctacagaaagaaaattcaaaatatcaaaataaaaattcagttcctaacaaggtaattattttaaaagcatgcaattaatgctcatgaaattgtagggaacaaatttggtattgaacaatacacagagatgtcagagatgatattagaaggtcaacaaatatttcattattatctatcatgtatacttcagtaggaattataagtttgctacaaaatgagttttatgagtcctattatttatttattatgcatttttcagaactatattcaggaccttttctcatttttcatcaatattgggtgaatagtc

SEQ ID NO: 34701 - DNA, 628 bp, Homo sapiens
gttcaaaygttattttcagcaacgaataatgtttgttattttccttgaagtgacaggctctctatttagtctcaagaaaaagtttgtcaaatagccaaggctgaataacaatagtttgcagtcagttgtcttttagggaaaaaatgcttccatgcaaaaataggctatttcagcctacaactcatagcaagtgtgtaagtattagagtatactgtaagtgcttcatgctcacaattactacaaatgtcaacatggtaaagaaggcaaataacgtcttaatattatttaaaaaatagttttgatcttatgctcctgcaaaaggatcttagagaagcccaggggtccacagaccacactttgagagccgctgctctagggtattctaacattaaattacaagactcattgaccccacacagatgaaatttacaacaatatggcttttaattaatcaacttttcctgcaacttctaccctatcaggaacaaataagccaagagcaaaatgttacaaaagattgtgataactgagtttaagatcaatgtacgagaactgtcttatcaatatcacccataattattagtgtaaagaagtcacaaaatgtcttttaaaaaattctaccctgaaa

SEQ ID NO: 34702 - DNA, 1100 bp, Homo sapiens
agtggagctcttgaaaaggatgtattttactatgatcctgactctcctgcaactaatctctagggctcagggctctacaattcatcaagcactctacagaatattaggcgtccagtgtctccccaaacccagccacagtctgtggctaatgctggaggcagaagtgatgggggtttgtggattcccggggagaaatcttcctcactctgtcatttcttgaaactcctcatatggctaaggggtgagaggagagaaagaaggaggaataagttctttggtgaaaggaagagtaagaaaaggaagaaatggaaatgtagaacaaaataaaagcaagaaggaagtgacaaaacaacctagaaagcccaggccaacccttttgcaatcagcgtgtccatagttttgctgtcagggtcaacaatatttgcatccattagattaatatttctttttttctttttttttgtgagacagagtctggctctgtcacccaggctagagtgcagtggtgggatcacgactcactgcaacctccacctccctggttcaagtgattctcctgcctcagcctcccgagtagctggggttacaggcacccaccaccgcgcccagctaatttttgtatttttagtagagacagggtttcaccatcttggccaggctggtctcgaactcctgacttcgtgatccacctgtctcgacctcccaaagtgttgggattataggcatgagccacygcacccggcctagattaatatttcttaaagtgtgatcagaacctcttcaggtacttgttaaaattcagattcctggacccaccctagacctactggatccaaatctctgcagacatggcctggacatcttcattataacaagcttccacatagattattttgtcagtggccatgtcttgctttgcttctgtggaaactgctctccatcttctggagtggaatgtcccccattgctatccacatggtcctcgcctccctgatactgtagtctcagatggcacctcctgaactgggccgagctcaatcactttcccagaccctgcccacctcgctggagctcagtggtcccatggtgggcaaaggagc

SEQ ID NO: 34703 - DNA, 465 bp, Homo sapiens
tcctcctccataaaagtgaggagttgagatcactctagtcataataggcaaactcataaactagaaattgcaagctatgtcttaatcagatactgtggaaagacactgtatrccaggcaggggaagagggagtcacaaaattaagtagagggcacaaagaatccctatttcccaaggacaggaaatccctgctatcaaacgttgccagtcctcagtccttgacatccaggaggggctcaatgacggggagcaagggaactggtctctgggctgctaactgtgccattccccagcgcacagcactgctccagctgccaccattttacacacactgtgatgtgaataggggccatgaggtggcccggagattccctagaataatcctgcgattgaaatccatacctaactgagtgacaggagcagtggctcagtgaaggaaggcactaaggtagagggcctaggcct

SEQ ID NO: 34704 - DNA, 465 bp, Homo sapiens
tcctcctccataaaagtgaggagttgagatcactctagtcataataggcaaactcataaactagaaattgcaagctatgtcttaatcagatactgtggaaagacactgtatgccaggcaggggaagagggagtcacaaaattaagtagagggcacaaagaatccctatttcccaaggacaggaaatccctgctatcaaacgttgccagtcctcagtccttgacatccaggaggggctcaatgacggggagcaagggaactggtctctgggctgctaactgtgccattccccagcgcacagcactgctccagctgccaccattttacacacactgtgatgtgaataggggccatgaggtggcccggagattccctagaataatcctgcgattgaaatccatacctaactgagtgayaggagcagtggctcagtgaaggaaggcactaaggtagagggcctaggcct

SEQ ID NO: 34705 - DNA, 1364 bp, Homo sapiens
  misc_feature (1)...(1364): n = A,T,C or G
cccgagaaggaaagaagcatatgggcaagataataaagccagaaataaaaatatatgccacgcagcaaataagaacacagtattctctcactcagcaaggttctgagaacaaaacatcattttcacaaatgtctcagacagagaacatttttctacaggtgatggctttgccacaaatgtgaaacatcaccaaggcggttggaaaagcatggggcttggagtcagcagaatttctagctaaatctcggctctatcacttaccccacctctattaatagagctctgggagccctgttttctgcacctgtacagtcgggttggtaatcccygccctgagcagctaataagtttgacatggagatggaaatcagaccgtggcgtgccacacagacactggggtcagatggtctgagttcaaatcctcattcttttattttttttttttttgggagacggagtcttgctctgtcgcccaggctggagtgcaatggnncnnnctcanntnnnnnnnnnnnnnnnnnnnnnnnnnnnnnnnnnnnnnnnnnnnnnnnnnnnnnnnnnnnnnnnnnnnnnnnnnnnnnnnnnnnnnnnnnnnnnnnnnnnngcactccaagcaggggtgacagcaagactctgtcttaaaaaaaaataaaataggaataataatagcacctcagagttgcgagatttttttgagatgttttatataaacagctccgcagacagccaggtgggaggggggtccccggaaaaactccaactggcctgtgctcctataacactagtactaatgctgtctgtctaccctgcaagctatcagaaccaagcttcttcacttctgtgaagttcttttattttgggtttatctatttattacctgctcccctgtctagaatgtttatctagttcacaaacacagtttcagagcctaggacagggttggacacatattagagtcttcatgcatgttccgtggagaaatgaaggccagaaaaacatttaagaatgtatattacctgccaaagactgggttgagagtgttgggaatgtagtgatctcggtcttcaatgacttttttgcccagtgttatttttatgtaagggtcacactgtgggacaaaatagacgggatgttacatcattgtagggcgcaaggtgaagtcaagttcagggacagactcagctcgcctccacacccactcccagctgatgacaaggtggccgccatggcaccccgtgcctaagacaagggagcaatgctctcctttgggtggcatgcagccagttgtgtgggtgcaggggtggtggcagggggcggggggggagtcctggctcacacctgtaaaatgagaaggatgaaccagg

SEQ ID NO: 34706 - DNA, 1295 bp, Homo sapiens
aaaatccatagaaaagtatccctttttttttttttgagacgggttctcactatgttgcccagggctggtcttgaactcctatgctcaagtgatcctcccacctcrgcctcccaaagtactgtgattacaagcgtgagccacggcacctgggcagaaaagtatcttaattaatgaaagagctaagccatcaagctgggacttaattggatttaacataggttcacagaaagtttcctaaccagagcatctttttgaccactcagcaaaacttccacagacatccttctggacttaaacacttaacattaaccacattattaattgttgctgagtttattcccccttctaactgatggctggcatctgatatgcagagttagtcaacagacactggcatcaattacaaaatcactgctgtttctgtgattcaagctgtcaacacaataaaatcgaaattcattgattccatctcaggtccagatgttaaacgtttataaaaccggaatgtcctaacaactctgtaatggcaaattaaattgtgtgtcttttttgttttgtctttctacctgatgtgtattcaagcgctataacacgtatttccttgacaaaaatagtgacagtgaattcacactaataaatgttcataggttaaagtctgcactgacattttctcatcaatcactggtatgtaagttatcagtgactgacagctaggtggactgcccctaggacttctgtttcaccagagcaggaatcaagtggtgaggcactgaatcgctgtacaggctgaagacctccttattagagttgaacttcaaagtaacttgttttaaaaaatatgaattactgtaaaataatctattttggattcatgtgttttccaggtggatatagtttgtaaacaatgtgaataaagtatttaacatgttcaactgtctgtgtatcattcaattcagcatggtagcctcagcaaaacactgacaacctgtaaaacctttggtgattcttccatttcctagcaggtgtggttggagatttatcttttatttttggagatgggttcttgcttgttgcccaagccgtcctctaactcctgggctcaagtgatcctcccgtctcaacctcccaagtacctggattactatgaacttttgctaaatccacaccacacctggcaggctggagatttttaaagagcccaaaaaggtgcaagaaatatatggagtaatcttaccctccacctttaatatcataagacagaggttcccatgacaaaatggagttcattgacgcac

SEQ ID NO: 34707 - DNA, 1295 bp, Homo sapiens
aaaatccatagaaaagtatccctttttttttttttgagacgggttctcactatgttgcccagggctggtcttgaactcctatgctcaagtgatcctcccacctcagcctcccaaagtactgtgattacaagcgtgagccacggcacctgggcagaaaagtatcttaattaatgaaagagctaagccatcaagctgggacttaattggatttaacataggttcacagaaagtttcctaaccagagcatctttttgaccactcagcaaaacttccacagacatccttctggacttaaacacttaacattaaccacattattaattgttgctgagtttattcccccttctaactgatggctggcatctgatatgcagagttagtcaacagacactggcatcaattacaaaatcactgctgtttctgtgattcaagctgtcaacacaataaaatcgaaattcattgattccatctcwggtccagatgttaaacgtttataaaaccggaatgtcctaacaactctgtaatggcaaattaaattgtgtgtcttttttgttttgtctttctacctgatgtgtattcaagcgctataacacgtatttccttgacaaaaatagtgacagtgaattcacactaataaatgttcataggttaaagtctgcactgacattttctcatcaatcactggtatgtaagttatcagtgactgacagctaggtggactgcccctaggacttctgtttcaccagagcaggaatcaagtggtgaggcactgaatcgctgtacaggctgaagacctccttattagagttgaacttcaaagtaacttgttttaaaaaatatgaattactgtaaaataatctattttggattcatgtgttttccaggtggatatagtttgtaaacaatgtgaataaagtatttaacatgttcaactgtctgtgtatcattcaattcagcatggtagcctcagcaaaacactgacaacctgtaaaacctttggtgattcttccatttcctagcaggtgtggttggagatttatcttttatttttggagatgggttcttgcttgttgcccaagccgtcctctaactcctgggctcaagtgatcctcccgtctcaacctcccaagtacctggattactatgaacttttgctaaatccacaccacacctggcaggctggagatttttaaagagcccaaaaaggtgcaagaaatatatggagtaatcttaccctccacctttaatatcataagacagaggttcccatgacaaaatggagttcattgacgcac

SEQ ID NO: 34708 - DNA, 1295 bp, Homo sapiens
aaaatccatagaaaagtatccctttttttttttttgagacgggttctcactatgttgcccagggctggtcttgaactcctatgctcaagtgatcctcccacctcagcctcccaaagtactgtgattacaagcgtgagccacggcacctgggcagaaaagtatcttaattaatgaaagagctaagccatcaagctgggacttaattggatttaacataggttcacagaaagtttcctaaccagagcatctttttgaccactcagcaaaacttccacagacatccttctggacttaaacacttaacattaaccacattattaattgttgctgagtttattcccccttctaactgatggctggcatctgatatgcagagttagtcaacagacactggcatcaattacaaaatcactgctgtttctgtgattcaagctgtcaacacaataaaatcgaaattcattgattccatctcaggtccagatgttaaacgtttataaaaccggaatgtcctaacaactctgtaatggcaaattaaattgtgtgtcttttttgttttgtctttctacctgatgtgtattcaagcgctataacacgtatttccttgacaaaaatagtgacagtgaattcacactaataaatgttcataggttaaagtctgcactgacattttctcatcaatcactggtatgtaagttatcagtgastgacagctaggtggactgcccctaggacttctgtttcaccagagcaggaatcaagtggtgaggcactgaatcgctgtacaggctgaagacctccttattagagttgaacttcaaagtaacttgttttaaaaaatatgaattactgtaaaataatctattttggattcatgtgttttccaggtggatatagtttgtaaacaatgtgaataaagtatttaacatgttcaactgtctgtgtatcattcaattcagcatggtagcctcagcaaaacactgacaacctgtaaaacctttggtgattcttccatttcctagcaggtgtggttggagatttatcttttatttttggagatgggttcttgcttgttgcccaagccgtcctctaactcctgggctcaagtgatcctcccgtctcaacctcccaagtacctggattactatgaacttttgctaaatccacaccacacctggcaggctggagatttttaaagagcccaaaaaggtgcaagaaatatatggagtaatcttaccctccacctttaatatcataagacagaggttcccatgacaaaatggagttcattgacgcac

SEQ ID NO: 34709 - DNA, 1295 bp, Homo sapiens
aaaatccatagaaaagtatccctttttttttttttgagacgggttctcactatgttgcccagggctggtcttgaactcctatgctcaagtgatcctcccacctcagcctcccaaagtactgtgattacaagcgtgagccacggcacctgggcagaaaagtatcttaattaatgaaagagctaagccatcaagctgggacttaattggatttaacataggttcacagaaagtttcctaaccagagcatctttttgaccactcagcaaaacttccacagacatccttctggacttaaacacttaacattaaccacattattaattgttgctgagtttattcccccttctaactgatggctggcatctgatatgcagagttagtcaacagacactggcatcaattacaaaatcactgctgtttctgtgattcaagctgtcaacacaataaaatcgaaattcattgattccatctcaggtccagatgttaaacgtttataaaaccggaatgtcctaacaactctgtaatggcaaattaaattgtgtgtcttttttgttttgtctttctacctgatgtgtattcaagcgctataacacgtatttccttgacaaaaatagtgacagtgaattcacactaataaatgttcataggttaaagtctgcactgacattttctcatcaatcactggtatgtaagttatcagtgactgacagctaggtggactgcccctaggacttctgtttcaccagagcaggaatcaagtggtgaggcactgaatcgctgtacaggctgaagacctccttattagagttgaacttcaaagtaacttgttttaaaaaatrtgaattactgtaaaataatctattttggattcatgtgttttccaggtggatatagtttgtaaacaatgtgaataaagtatttaacatgttcaactgtctgtgtatcattcaattcagcatggtagcctcagcaaaacactgacaacctgtaaaacctttggtgattcttccatttcctagcaggtgtggttggagatttatcttttatttttggagatgggttcttgcttgttgcccaagccgtcctctaactcctgggctcaagtgatcctcccgtctcaacctcccaagtacctggattactatgaacttttgctaaatccacaccacacctggcaggctggagatttttaaagagcccaaaaaggtgcaagaaatatatggagtaatcttaccctccacctttaatatcataagacagaggttcccatgacaaaatggagttcattgacgcac

SEQ ID NO: 34710 - DNA, 1295 bp, Homo sapiens
aaaatccatagaaaagtatccctttttttttttttgagacgggttctcactatgttgcccagggctggtcttgaactcctatgctcaagtgatcctcccacctcagcctcccaaagtactgtgattacaagcgtgagccacggcacctgggcagaaaagtatcttaattaatgaaagagctaagccatcaagctgggacttaattggatttaacataggttcacagaaagtttcctaaccagagcatctttttgaccactcagcaaaacttccacagacatccttctggacttaaacacttaacattaaccacattattaattgttgctgagtttattcccccttctaactgatggctggcatctgatatgcagagttagtcaacagacactggcatcaattacaaaatcactgctgtttctgtgattcaagctgtcaacacaataaaatcgaaattcattgattccatctcaggtccagatgttaaacgtttataaaaccggaatgtcctaacaactctgtaatggcaaattaaattgtgtgtcttttttgttttgtctttctacctgatgtgtattcaagcgctataacacgtatttccttgacaaaaatagtgacagtgaattcacactaataaatgttcataggttaaagtctgcactgacattttctcatcaatcactggtatgtaagttatcagtgactgacagctaggtggactgcccctaggacttctgtttcaccagagcaggaatcaagtggtgaggcactgaatcgctgtacaggctgaagacctccttattagagttgaacttcaaagtaacttgttttaaaaaatatgaattactgtaaaataatctattttggattcatgtgttttccaggtggatatagtttgtaaacaatgtgaataaagtatttaacatgttcaactgtctgtgtatcattcaattcagcatggtagcctcagcaaaacactgacaacctgtaaaacctttggtgattcttccatttcctagcaggtgtggttggagatttatcttttatttttggagatgggttcttgcttgttgcccaagccgtcctctaactcctgggctcaagtgatcctcccgtctcaacctcccaagtacctggattactatgaacttttgctaaatccacaccacacctggcaggctggagattttyaaagagcccaaaaaggtgcaagaaatatatggagtaatcttaccctccacctttaatatcataagacagaggttcccatgacaaaatggagttcattgacgcac

SEQ ID NO: 34711 - DNA, 558 bp, Homo sapiens
atttttwaaaatacttattttcaagttcactggcttaaccattctatgattttttttttttttgtctcaggccatcgtttgttagtaaaatacattagcttctatctactggtaatgccattaataaaccgtggacgtcatacatttagtttctcagcttagcccagacaagcatagcctgtggcatttttgaaataactgctggtgccattccaacccgatcttcaggcatcctcctatacactcattatctcaaaatatatttgcaagtgtagcttgactgaactacttgtgcctgcctgcttgcttgctctctctctctctctttctctctctttcattgttactgtctttggggctttctttctgctgtgccctgaagtcttgaatgttctactttcttccaatccaagacttcagtctttttaaaggttatctcaaggtccatatatgacaagaaactaattcttacaggcctttgcaatgtaccaaataaattattatttatattgtctgttttgtcatgtcagattgctgtatctataatatagcagttat

SEQ ID NO: 34712 - DNA, 558 bp, Homo sapiens
atttttaaaaatacttattttcaagttcactggcttaaccattctatgattttttttttttttgtctcaggccatcgtttgttagtaaaatacattagcttctatctactggtaatgccattaataaaccgtggacgtcatacatttagtttctcagcttagcccagacaagcatagcctgtggcatttttgaaataactgctggtgccattccaacccgatcttcaggcatcctcctatacactcattatctcaaaatatatttgcaagtgtagcttgactgaactacttgtgcctgcctgcttgcttgctctctctctctctctttctctctctttcattgttactgtctttggggctttctttctgctgtgccctgaagtcttgaatgttctactttcttccaatccaagacttcartctttttaaaggttatctcaaggtccatatatgacaagaaactaattcttacaggcctttgcaatgtaccaaataaattattatttatattgtctgttttgtcatgtcagattgctgtatctataatatagcagttat

SEQ ID NO: 34713 - DNA, 700 bp, Homo sapiens
tgtgttcaaataagttaggtaaatacttataaccacaactgctagattgcatgctaaytctctgctgagttttctaagaaactgccaactgtttcccaaaatggctataccatattgcattcccactagcaataaatgagtctctatttctctgtatcccagccaggaattattatcggtttctttttttaatattagctattctattggtgtgaactagtatcagattgttgttttaatttacaattccttaatgacaaatgatattgagcatatttttatatgcttatttgccatctgtatatcttgtttagtgaggtgtttgtttagttatcatccatttattaatttttttatttttgaattttaagagttctttgtctattttagataaaagtcctttaacagataactattttacaaatgctttctgccaatctggagcttgattttttattctcttaaccatgtccctccatttcatcatatcatggactgttttctgcataattatttctgcatttgaatcttctaaattaattagcaaatcaaaaaggacaattgtgttttactaactaaaacaatcctcttacgtttttgtcaggtttccccctgcagatattatgaaatgtctttacctattcaataatagctttaatagaactattgactctaggtcattaattttccagtgtctttg

SEQ ID NO: 34714 - DNA, 512 bp, Homo sapiens
agaactaaatgtttttgcttggtggacttttgagaacatcatctttcactgggtataatggtttgctttaaattactgaaacagatgagcttttataagccccataatacttaacctgaatattttcaatgttcatttgtgagtaaagcagaaattacctgtattctatggcaagtcgaagtttaagctatcttaaatgaaaactatctttgattccttataaaaatatttgaacgaatctgatttaaatttattttattccatctttgatttgtgtgcaagccttatttgataagctttatcactgggctgtgtataacatacaacctgcttatttaatgaaaatagtagagcttaaaaggtatttttagacattaatgtttgtctactactgtatctttcaaaagaagcattatagggcttatgattcctctgttggtgctggtaagaattgsaaagaggcatatttccatcacttttttagaactttcctattcatagaaatttatttc

SEQ ID NO: 34715 - DNA, 541 bp, Homo sapiens
ttgcttagaaatatataatgtagctcttataatctacaaggtagatatgaatataacttgaattatttaaaataagaatcagctaagtgatatgaatggcacaatttaattatttggttcagaactatactctttatcaacatgtaaacatagttgatattcagataaataagttatgtttaatagtgtgtcctttaagagctaaaggatytctgtgtcctgcacatgttttatgactacaagatgaaaacaaattgcttgaggttatatttgtatcttaaacatgaaaaacttgaagcacatgcaaaggttgtaaattagactgttctttaaaaaatgtagtaaaacctgtctgatgaaaaattgcattgcttactgagagttcacctgtgggagaagatgacaaaaaaaaaaaaaattgcatctgaattttcctgtgtggctaagccaagaaagtatttttccacagggttattttctttattctccctgaatactaagtatttgaaaccagaagttcctcccatcttccaccactaca

SEQ ID NO: 34716 - DNA, 541 bp, Homo sapiens
ttgcttagaaatatataatgtagctcttataatctacaaggtagatatgaatataacttgaattatttaaaataagaatcagctaagtgatatgaatggcacaatttaattatttggttcagaactatactctttatcaacatgtaaacatagttgatattcagataaataagttatgtttaatagtgtgtcctttaagagctaaaggatttctgtgtcctgcacatgttttatgactacaagatgaaaacaaattgcttgaggttatatttgtatcttaaacatgaaaaacttgaagcacatgcaaaggttgtaaattagactgttctttaaaaaatgtagtaaaacctgtctgatgaaaaattgcattgcttactgagagttcacctgtgggagaagatgacaaaaaaaaaaaaaattgcatctgaattttcctgtgtggctaagccaagaaagtayttttccacagggttattttctttattctccctgaatactaagtatttgaaaccagaagttcctcccatcttccaccactaca

SEQ ID NO: 34717 - DNA, 1163 bp, Homo sapiens
tgaataggtaactgggcctaaattcaaaatagagcaaagtggccatttgctgactagaggtcacattcacactctgctttctcagaaaactcacatgctcacgtaactttgagactttcatagctatctgttcctctttacttcaactgaatcaacagctgctggaaaaatcctatgttgtcttctgaaattaaccaataggctgtaagttgtgctgaccaatcagaactaaataagcatcaaccaatcagaactgaacaagtttgcatcccttatttgcatagcagatcagactgggaacctgggtgggaactttctcttttttctataaaaggcaactcctctctttgttccctcagaagaaaccttggttttgtacagaaggctgtgtctccccatttacaaactgtttcctggaatgaagtctcttttcttcttaaaaaagaaaatccttttgagtggatttgtggccatactgcaaaaataattctcactctagttcaaagactttctgagcaaatggaatattagcatgacaactctccaagtaattcaagtaactctgtaacagttacctgcgatgaaataaagatgaagaggccctgtaaacacttttttaaaacaaaaagcaaatattttttgaatgcatagttacctagagcaacagaaagattcatatttctggtcctcctttcaaaataaataaataatgcctttttaaaaaataagtccttatgggctctctgatacaaagccctaagaaacacacaatctcacctctgtggtattcctgccaaagacatataactgtacctarccatgaggaaatatcagacaaacctaaactgagatatgttctacataataactgacctgaactcttttaaaaataccagtactataagagacaaagaaagatggaggaactgttccagattaaacaaggttaaagacacatgccccctgaatgtaacatatcatcttagattttcttttacaataaagcacattattggtgtcacaaaatccttggggtgtcacttcaccagctggaaacttctttggctggcagtgcctcttgcctgagtattacttgcacccgctgggcccgttccacccactcagcccagcaggctatgatcggctcacacttctggcttgga

SEQ ID NO: 34718 - DNA, 549 bp, Homo sapiens
tgcctttccacyctgttgtttcctttgcagttctagtatcattttgatatgagcttttttgttctcttgaagctaatttttgtacacagatattacaacgtttatttttgttttaataattggtacttaacatataaaagttacttcaaaaccccactctgtcagcttttaaggtcagtttacaaatatttgtaagtcagacatttctaagaagcctttgaatgatattcagctcctttttcaaagttaagtagcttcaacaattttaaaattttctaaaattaatttttctaattttatttttctgtacttcatctgtttaatctgaattaacaaacaagatcttccatgggtttaaataacttcaatatacataagagggtaagtatacaaataagctgaaactaaaattttcttaaatgttccatcaccatacataagttgaggaagttatcaccttagactctcaagtctaaatcaattactcaattccatatcctagattgaagttagaaggctgtccctctactaggacaaattattttataa

SEQ ID NO: 34719 - DNA, 549 bp, Homo sapiens
tgcctttccactctgttgtttcctttgcagttctagtatcattttgatatgagcttttttgttctcttgaagctaatttttgtacacagatattacaacgtttatttttgttttaataattggtacttaacatataaaagttacttcaaaaccccactctgtcagcttttaaggtcagtttacaaatatttgtaagtcagacatttctaagaagcctttgaatgatattcagctcctttttcaaagttaagtagcttcaacaattttaaaattttctaaaattaatttttctaattttatttttctgtacttcayctgtttaatctgaattaacaaacaagatcttccatgggtttaaataacttcaatatacataagagggtaagtatacaaataagctgaaactaaaattttcttaaatgttccatcaccatacataagttgaggaagttatcaccttagactctcaagtctaaatcaattactcaattccatatcctagattgaagttagaaggctgtccctctactaggacaaattattttataa

SEQ ID NO: 34720 - DNA, 594 bp, Homo sapiens
aaaaggcaagaggaaaattatagtcgtgttagagatgaagttttaaaaaagtgatttttgtcttgatttcctgcgattctctttccctatctaattttgactctcaacagaaaatagagagtgaaatgagacaagtaggctgccattttgacctggtaatttggagttgtggcaattctccgttctgtgagaatcaactttgctaatgagaaaaaaaagctgtcgtgttgcgtcatgtacactttttactttgattatggtcttcttgactctaggtgagcagccccgccamggttccttcctttctctcggctgcatttattttccacagcagtggcctgagagcagccaggtcaggtccctgttcaccatcctgagcagggtctgcataatctgtttaaagatttgtgtactttccagagatgaagcactacccagtcttacccaagttcgaagagaaaacgacctctatgttttgcctcctttacaagaggaagaaaaacacaggtaaatgtttaactatttaagaatattattttagtcattgctacattcagacacatttaaaccttgatgtgttatctacatgataag

SEQ ID NO: 34721 - DNA, 1257 bp, Homo sapiens
tttacacaaaagacttaagtttaaaacaagataatatggtaagatgatgtagaaagagaaataatttctctgaaagtaattaaagttaaaaaataagaatcttaggccaggtgcggtggctcacacctgtaatcccagcactttgggaggccaaggtgggcagatcacctgagtgaggagtttgaaaccagcctggccaatatggcaaaaccccatctctactaaaaatacaaaaattagctgggcatggtggtgagcacctgtaatcccagattttcaggaggctcaggcaggagaattgcttgaacccaggaggcagaagttgcagtgagccaagatcgtaccgttgcactccagcctgggggacagagtgagactccatctcaaataaagaaataaataaataagaatctttttaaaaaataaaaatctttttctagagatatgggagcctatgctctgcttggaaactacattgtcagtagaaatatggctatgatcagtaactacaggggctaggcactgaacacaggccctgtgaacaaggatgagggctcctatggttcccaaccagagtgggtgatctctgttgtccatagggagaatcagtgccctacacatagccaaagagcattgcctgcatgayagtaacagtatcaactgccctggatgaagactcctccatcattttttttttcaagaccaagcaagcgtctaaagttcttgaacaattcgaagagtagagccctaataagaccaacgtaatattcttctgctaaccaggcagactgaagcataccaattttttcttaatcttttaaaaaatgtgagaagtataatattattacaccagtattatagtttatgtatgtttcaatagcaaaacgtaaacagacctaggaaattcaactcaaataaaaagtgggcacaaatatgccaactctaaaggtcaacacggttgtctttggctctgtgctattttgaaatgatcagtctgtgttgaaggctaagatcttttttaaaaggcaagttccaaagcacatttattgttatgactttacttgagctttctgaagaaaacataatggttttaagaaaatattgaatgtggctttcaaaatccctaaatgaatctacatatacataaaaaatgcctaatgccacatataaaggtcatataccttcttgacccttcatccaggagccaaattcaggtgggtgccgacgacttctcagctactggtagatgaccactcc

SEQ ID NO: 34722 - DNA, 589 bp, Homo sapiens
ttccattgtgtgcatataccacattttgtctattcctttatctgttgatggacaacttggattgtttccawctcttggcgattgtgaataatgctccaatgaacatggtgtccagtatctgttcaagtccctagattcagttcctttggatatatacctaggagtggaattgctgggtaatataacattcttcacttagtatttttgacaagcaaaaaagcaacatagcatctgcaacattttacattcccaccagcaatgtacagggttccaacttcacatccttgcaaacatttattattctgttttctcaattatagccatcctagtgtcaagtggtatctcttttattatctgatgcctgggctattataatctcctaactacttatttctgctttaatatttctttcttaatgtatctagcacaataatgctatattttcttaccttgaaaaacttactcaccagtaactttcaatggctctttattgttccttgaaaaaaagtctaaagtctactagcttgcaaaactttctattttcttggcctcaatctaccttagtagttccctaccttattgtgtattt

SEQ ID NO: 34723 - DNA, 795 bp, Homo sapiens
ttttctatcagccaaggctctggtgatagctgggcgcaggaagatggtgagttatctgtgcaggagggctgtgtcctggaccgtgaagaaaggcagacctgtatagcttctccgctttgtctttttgctttctctcggtcccaccagcctggctccttttcccttattaggactccacacttaggacaagccaggcgcatcccatgtgctccagagaggaggccattgttattagtaaaggtgaagatggaattggggtactccttcctaagctcagatgatcccctgattcttgkcactcatcaggccgccacacatccactcattgtttcaaatcaaccctgagcagaatgggaaggtgggatcggaggcgcctgagggagcacgttctggaagtagatggtggcgatggtggggctaccttgtgagtccaccaaggccacacatgctcaagtgtttgtggattctaccacaatttaaaaatgatcatttttttgtttttaagtgcttgtgcccctgcgatccatgccctcaagagtgtacagccccggggaggatgtcactcgggaggcagaggtgccttggacacatctgcctctcactcctttatcctcaacgcagttactgctcattgagaagcagggttttcaatcatggagaagcttcctccagccacagtgctcccatgtggcctctcggtcctcaagggtcccttgctgccactttttatagcctctttcttctttgagaactgcttggggtccttctgatctccctcaccgtggggagccctgg

SEQ ID NO: 34724 - DNA, 572 bp, Homo sapiens
tttttgctgttgagaacccatgattatattaagcatttgaactatacttaaaatatcctgataatgattgttcacatctacttgtgccttgtgtggtagttatttaaaaactccttaatctagaaaaaaataatttaaggctagacttttttcccttaggatattttccttattgtctgcaacaatataatttggagtataaacctgtgtttatagacaaaatgcaatgtcctcattagaagtgatttttgtgattgttaacataatgaagcataggctgtaaaactagcacattttgtatgtgttttcggtgaacttacctggcccctaataggactcaggttgtcttggattttgatggattgatgaaaccttgtacataaattgccagtcctggaaccaatcttccttcatttcttccctgttttatttagtttttcttccagttgtatttcatttttggcttgttaataattgtgrtttagtaaaaataacttgagactgtaagctaaaagttggctatggtctagggaagtgggcttcttctcgtggactagaaatgtttaaactta

SEQ ID NO: 34725 - DNA, 984 bp, Homo sapiens
tgggggagttctggtacattgaatttaatgtttgcccagtcgttctgctgcggtaataaagcaatcaattatggacttgaatgagttaccaataaaaactagttsactatttgtatgagtccagctcaccttttaaatgtggcaaaataatatgattttgaagctacctttaaaaatgatcagtttgagaaaaacaatcaatgaaaactattagtagaaaatagtattctttgggtgaagtgagataaattatgatgaagagattcttaaactggcagttgaagcagaacgaaatattacttttctttaatgtgaaactaactctttgaaggatggctttggatatagaagtgggtctgtgtctccacataaaggatatagactatggagaacaactcaccattgtgtgtggtgctcttctttgtctctagacttgatatcttggttatttgctttttgatgggctgttggctctctgtataacacattgaggggagggaatagtgatatatgtgatttttgagaatgctaacaaaaaacctgatattggcatcttgtaattgcatctgttatttatttactttcagtttgattaataagcttaaacctggcgtcattaagaagatcaatagactgtctacaccaatagcaggattggtaagtagtaaattatcttcacaactaaatttatttgtctttgaaatgtaaagaggtgggcataggcagatttttgtatctgcaattaccactgaaattaggttatggtttttttgctgaagcaaagtgtgtttggtgatgtcctccttttatctgcagttcctttctctgtttcccttttgcctggaggcttttatttatttatttatttatttaataagaaaaactagatgtatatttaaatggcacaaatgatatagatgacatacttgtgttttagtggttactaatttctaaactaaattgctaattttaaaaatgaaaaat

SEQ ID NO: 34726 - DNA, 1995 bp, Homo sapiens
atgcaattacctaaaccagtcatgtagtattaatgtaatctgcccatttctacagctgaaaagaagtttaatatttaaagagtgagtaaaaagagacaacttggtgccccacaattcccctagcttggaaccaaataataattagcttgccagtttactctcaaaatcgactaacttccagttaaccattatgccttagaaatctttacttagtcatatgataaattgatattaacataataaatgggcagttatacatatataggcattcctatctgtctccatacaagtcaaactgagatctacaaaatcactgatcagccacttctctgcttaaaacttaacagtggttcctcactgccctcagaacaaattctatctgtacaaggcccttaaatatctgttcttacttacctcaagtctcacctctcaccatcttctacaccacaaaactcaacttttcagctgtctagacttgcctgaacctatcgagctctcgtcaatgagctattttctttgcctggaacacacaatctgttccctttttgcccagataatttctagatattcttctgcttccaactaagtcggattattcttctaaatagaattggcctgactcctccagtcgaatgttagrtactattccaaattgttctcacggtccctcgtacttgctccatcacagcactatttaaacaggcaagtataactaagtgcaatttgtctatatccctcaatagaccaaaagatcagtaatgacaggaactagaagtagatctgtctcattcactactgcatctccaacatctaatgcagcatctggtacaaagcagaaactcagagatattaaaagactgaataaataattttgatattaatatttaggattttggagggtgaaagtgcaaagcttatctatctacttcctcaacaaaaactggtcacattctatttggtttattcagcaagtatttactgtctacccacataaaaatcaaaaagaatataatccagagtccagtcttaaggaacctacagtcttgagagaaaataagacatgtacaaacataaatatgaaacatcaaaaaagtgtgttattagattctaaagtgtgctgcacagacactgagtgccaaaaaagagataaggattgggaaagcatcctagaagtaggatttgagctgagccttaatggataagtaaggctgaagacagaaaatataaagacaaatgtgctacagttcagcacttctcaaagtgggtcagaagacaacttccttctttcaagggtacttaaggtcaaaagtattttcataataagcctaagattttatttgctttttttactttcattcactctcaattatacaatgccgttctccagaggccatatggcatgtgatatcacaaaggattaaatgcagaagcagatatgagaatccagctgttttctactaagccagacacttaagagtcttataaaaatgcaagacagtgccactcattatatttttgttttgaaagttatcttttctacaaatgttatttgtgttaacatggcatagtatttatttcatttttatttttagagccaagtctcgttgtgttgcccaggatggtctcaaactcctggactcaagtgatctgcctgcctcagcctcccaaagtgctctgattacaggagtgagccacccatatactatatgattttaggatagtgatgcctaaaagtaaaggaataaagaaacaaaagaattaatgacatgctttaaagagaaagaaaatttctggtcatgcataacttcaaaatgtgtttaacatacaggcacaggctttcttctcaataactatttttacttagtacaaaaatataaaaataaccttttaaaatcatacttatcctctcacccaaacacaataatacagtttcatattccttttatcataaataggtgttttcacaatgtttcacgattaccatttagtgcaaaa

SEQ ID NO: 34727 - DNA, 875 bp, Homo sapiens
tgcatctctccaaaccctgcccctgtctgcacatggccttctcccctgtatgtctcagatctctctttcattcctcttttaattaaaccagtcactggatttagggcctastctgaatccaggatgatctcatctccacatccttaaattaaagactttgtttccaaatgagatcacgttcacaggtacccagagttagaacttggatgtacccttttgggggacacaattcaacccactgcagcggatgttgctgcgtaattccctttaacggaggtaaagagtggagactaaattgaaggaataaaaaaaatgacatggataaaactaaacagatataaaaagagaatagaaaaatataagaggttataaaagatttatggaaattttgtgtggtcaaagcttactgagattggataaatttgtttataaggttttattaaaattaggtttagtatgaatacagaaacacgtataaaatttggttttctcttttgaaaaagatgtttgtgtagtattaataggaagcaaaaactgtagtagtaaagaaatgatgtttaaccttctttgagttatcttatatatgcatattattaacaggtgttccaaaattatatgattcctaaaatgttgatatgtcttggtatattttatgtcataattatgactatttggttaaatttttgtagaaaataaccaaaaaaaaaaaaaaaaaaaaagagtggagactgccctgacagtcaacttcccctgcccccgggtgttgctgggcatgcctccacggctacatattctctccaaattggagcctgctctgacccaagcccagtactgggtgttgttttattctcacaagtactctgcaaggtccccac

SEQ ID NO: 34728 - DNA, 1825 bp, Homo sapiens
ctcccacaacacgtgggaattatgggagtacaattcaagatgagatttgggtggggacacagagccaaaccatatcaggttctctgtgggacacacacacagaagttgcacagagagagtctccttgtttccatccttcagtgtgtccatgagactgtgtccgtaacctcatctggagaatctacccaacgtccacattcgaggttccttgttactatgagcaaccccacttcctccctccataagctctgcttttcagaacaccaagccaccaccctgcagtctgtcccctgtgccccgtccacagtgggtgccaggtgagtagcaaaccacttggagaaaggctcactttggtcaacagacaacccagggagagtgtaagtcaggtccagacaccctgctggccactcatcccacaaggaacggaggtcacagtccttcccaccccccttcaccccgcccccactctggcttattttccccagtagcacttactaccataccctctactgtgttttctcatgtgattatttctgtcttcctccaacatgagggcagggatgatgctcacttactagctgcgtgtctgctaccatttagcactgtgctgtgcgtagtaggtgctcaatagctgtcaagcgaatgaacaaatggccctctccctcaaggcaccaaccaagctaccaggcaggggtggtctgtcccccatgggtgtttctcagccagccccagagcctggctcccaggcccttccctctgctaagatcagcagcccaggggcttggcctgccacattctgcccaggctgatgaaagcagccagtttttctgcagacacatacctccctcaaaactggtaccgacagccagatctccttaattagggaggctcagccaatgacctayggcatgaatacattacgtggatgtctttggggtgatattttctggctttttgaacaggtccctcattaatgacctgctcagtcccctgctgaaactgtgccaggctcatcccaggggaaggcaggggctcccagggagaggagagagacacacatcccaagcaatctcggttgaaagctgacctataccgtatgctcacaggggaacttaccccagctaagtcatctggatgtgcctcagtttccacaacaaaatgaatgggaaggccattttccaatccaggaaaaataaaatggatacagcacacaatactctgcaaaaaggacccatctacctgaatgatctggaaggactgacccccccgggctatatcattgatgatgatggtgacgatgaaaagctttaataagcacctatttatgccactctgttaggtgttaccacaaaacttttctcatttaaacttccctgcaattcaagaaataggcattatgaccccatttcacagatgcagagctggccctcgaaggattgagtgacaatgctagtggagaggtcaagtgggggagccagaaggtcttttgagaaggaccctgtcagaacccaaccccttgtgctgcctgcacagatatctcaggctccaagagaatcaagcccctcccctggccacatggcctaagtggccagacacacaagagatgctcccagccttgctgacctctcaccttgtccctaagaccaagtggccttggaatatttagtgagacctgctggctgaggagtggagtagcctgaggggcaagcaggaagaggccaggtcaacacagtgaggcctcagatgaaattaggaagagcatccagagtacaactgactgccgagccccaggcaaaaggatcaggccagctctcgggccagggct

SEQ ID NO: 34729 - DNA, 978 bp, Homo sapiens
ggacaaaggacttgtaaaaatgttttttgaacccaaactaagtgcaagcatgttttgcttgtaagaagaggagaactatgcaatggagaactccaggcagagatcaagtcaagtataattaaaatctcccaaaagctgcatacagtggtcatcctgaaggtggagaccaccatccttctttgcctactaatcaaccttctgcttttccatcaacgattttttctattttccataagttctagaaaaggaattcagaggcccaaagttgccacttttgccacttccaagtaagacttttagaagggtgatcatagctctgggattctgtttctttctttctccaggcacactacagggataagatgaaagaacagccrctttgcaaaaagatggggaactggaacaagccatgacccccaaaatagacatgaagatacagagactgtatttttctacccaatagcccaaaggagaaactcttcaattaataacacttttgatacaaagccagactgcccaagatgactgcctaaaaatacacaaaaatctaggaaaaacaagctctccatcctggagggaatgtcaatggaaaatagttgctaggcttttccagttaccagtaataaaagaaaaataggctccccattatgaatccagtgctggagggctcgtcagctggttctgagccagctttggtattttctgagtgcgttacaaattacaggaacaaaatgtggacttttcactctaaccatgttttctaaggccagacaatttattattaggtttacttcctaatggtctatagttggaaaagatgtctccacgtatggataatatttataagcttttaaagcacacatattcttattatgaacagcaattacacaatgtgcacagattttaaatgaaagaattaagagaaattcaaacagaaattaataggacatgaatcccttcattattaagcattataat

SEQ ID NO: 34730 - DNA, 311 bp, Homo sapiens
tctggtatccttcagtgtgagggcaggctccccactctgcaccagcacaccctcggtgtgtgcaacttcatgggtcttctgaaatgtacatctgtgttaatgtgcagcaggcctcccttggatggaatctgaattacagtcctggctctgtgaggacctagctgtgagatgtataaaaacttgtcagcaccccaagaaattaaggttaaaaaaggttgaataactggcccaasatcttataacctagcaagtattaaagcccagatttatgggattatagaacctgggctttctccattgcccccaaaata

SEQ ID NO: 34731 - DNA, 494 bp, Homo sapiens
accaatggatatttcattagcaccgacagagagtattttcactatggatcagtggtgacctaccactgcaatcttggaagcagagggagaaaggtgtttgagctcgtgggtgagccctccatatactgcaccagcaaagatgatcaagtggkcgtctggagcggcccagtccctcagtgcattatacctaacaaatgcacacctccaaatgtggaaaatggaatattggtgtctgacaacagaagcttattttccttaaatgaagttgtggagtttaggtgtcagcctggctttgtcatgaaaggaccccccgcaccgtgtgcaatgccaggccctgaacaaatgggagccggagctaccaagctgctccaggggtgtgtttgcctgaggcctagaagggccctgcaagtgacatgcattgctgttggatcaggagatgagtatttgtttagggggagggatgtatgttgaggagggtgggaaagtaagttttg

SEQ ID NO: 34732 - DNA, 1926 bp, Homo sapiens
ggtgtagataggatcttttgtccattttacattacggaaaagtgaagaggaaaaggagagatggaccttctccaagaggaaggggggtcattctctaattagcctattttgagcttttataggaagaaaaaacccaaccacctaaagctagaaagtggagttccctgcttctcttagtaatgttctgcttttctaagagaaaacaattattcctaagctgattttagtgtatgcttgctttgtatgccagagcacctgtcagggaaaaaaaaaaaaaaattccacttgtcacaggaagtatcagctggtcagtggtggaattcctaaatgaataggctcctgccttgtccttcctccccacctgtcctccccctgtgacaactgggacatgccatagacggaaaatctggcccttcccagcacccattgaaagggggtggaatataatattttggataacctttaaagcagtctgagtgatagtcctgaaatatatcactaaggaactatttgttttgagacagcgtctcactctcttgcccaggctggagtgcaatggcgcgatcttggctcactgcaacctctacctcctgggttcaagtgattttcatgtctcagcctcctgagtagctgggattacaggtgtgcgccaacacacctagttaatttttgtatttttagtagagacagggtttcaccatgttggccaggctggtcttgaactcctggcctcaagtgatctgccccaccttggcctcccaaagtgttggggttataggcgtgagccactgcacctggttagraactatttgtgtacagttttccttcaacttaacttcaagtcacatttgaaggtttggtaatattttgtatggatggagcttgatggagctgggcaagggaggagggtgagcagggtgtcccatttatagaagcaatttgttcttggaggctacttaaatgcacattccagtaaccatcaaataggtttaaagagagtcagaaatctaaagctcatgttaatgggttggtgagattttgcacatttttgtaaagggttgaaccaaaactcttaaaaatgcattcttgagaaggcccattctgaaaaactaggggacaagagtagcaggagaaaaggactcttgcctcatagaaacactcaccagtctgtcttccttccctcagaccctgaggtttccctcgtgctcctaggaggatgcaccttggctcctattgtaggaagtaggtagagtctgggaatcttctaaattctgtttttggcagataaggacaccacgacctaacctcagagaattaacttgcctgaggtgttaggtgattacaaggcagggtctcctgtctctcagaccagcatttctcccacaggcctgtggtagtctccaagtgaggtctcttggtctcaaagacctgcctgtgcctttccacagttgtgagaaaatgtccatggatctatgtgatggtggtgaaaggatcacatcccaagtctagctgtgtagggttcgactttgcaactacagtggattcagggaaggctcaattgttatacaattgggagtttagggaggtaattaaagggaatggagttttatctaagccaagagtgttacctccttttctctcataccctttatgatgtaccacaggcacagattaagttgaagactggaaacccccattagcagagctccctgagccccactgactatactatacctagtgctgatttgggggcttttccatcatttggcactagatgggtacagagggcctaggaagtacctctctgaggtttggcttagagtcggtgtgcaactcaagtttcctactttgctgtgcagcctctaaaccttctttccctctgctttcaaaacctacagcagtcaactctaagccctgctcaccgga

SEQ ID NO: 34733 - DNA, 773 bp, Homo sapiens
attggctcatagatctcagggaaacatttatgtttaccagtttataataaaggatattgcaaaggatacagacgaagagacgagtagggcgaggtatgtgggaaggggtgcggagcttccatgccctccctaagcgccacgctccaagaacctccatgtgtccagctatggggaagttccccacaccctgtcctcttgggtttttatggaagcttcgtgacatcagcattcctttccccgctttacagggtgggaccctcataggaggtctcaagatgcacagtcagaaaggctggggaacatttgagtgggaggaaggcaggagaaggtctgaagcctrcccgtgaggcctaacacacccaacattataataaaagactaacgagggctatgggagttattagccaggaaccatgaatgaaaaccagtatctgtcataacaccatggggctacacttgcattcaccaccctctgtggccagctctggcaacttctccttattagaagtgaatctcttgactgaggtacacgtttttaagataagcaccctgggaaggatgggaaacctgaatgtctgaactccagaggctgccccagaaaagaaaccctctccagcctcatctgctttttggaggccacagagacattcccagaccaaagcaagcaggccaggagcaacttttccactccagcccagaggaagcatcgcttgatgttgagagtaagctttttccttacccatattctgtacagagaagacccacttctttcc

SEQ ID NO: 34734 - DNA, 529 bp, Homo sapiens
taaaaagtagctgttagagtgagatctgaaaattagactagagaaatgatagtgggaagagtgttctaggtataggaaacagcacaaagactccatcgtccttctaaattcactctcatattttatgttcttatagcattttattctcctttgtaatattagtcacagtaatcattraatagttatttggaaaacacttgcctctcccactagactgttactctcataaggccagtagtaatagtatatgcctttctctgccctttcctaagcaccaagcacagtgagagtctaacccatggtggatgcttacaaaggtctgctgatgaaatacagacagtattaatggactgggaggtcagcaagggaagcactgcattacaacttttaatcaatactaaagctctgcttaaatatgtgcaatgaaattaggtgcactttgcccatttaaaaaatttaaacttaagtatgcatgttagaggacatggtgggcataatactgaaaggaaaagatcaaaaggtagaaata

SEQ ID NO: 34735 - DNA, 592 bp, Homo sapiens
cctgggtctccagcttataaacagcagatagtgggacttcttagccttcataatcccttgagccataatgagctttcttttgtacatgtatgtatctatcttactggttctgtttcttgagagatccctgacttacaattagcataggctatctgattggcccaaggctgagttaaacaaagacactcttgccaggcaaaatatcctaaggrctcagaaattatcttcaagagcttcttgagggatgtcctttctttggaacgtggagaaactgacgacccaagtctgctgagctctgcttcactgcatatgaccatccccttgcatggacagttgctcattttccttcttctcccacctccaagcaaccccctgccaggagcatttgcccacctcaacacttccttaaagtacccattcccagaagttactcctatcctcctcccaccttgaccctattatttcacccaagctccatcccactctcttccaaatccaagcttctcatctcagagaagaaattgacctctttaattcccaaagtcttgtaatggtgtgcttgatgggagcctggatgcccttctggtgaggg

SEQ ID NO: 34736 - DNA, 1319 bp, Homo sapiens
ctagtgcataagctagyccatgagttattgaaagagtgttaagggtatgtttgtggctgactggtgtttaacacatacatggtacacccaataatttgaagagttgacagaaattcttcccccaaattattttcccatatttaacttctcagcactcctactatgctctcaaacctggtaagaattctcacattcacttcctgtgatggacacctccatgtgtcaacatggctaagctgatgtacccagtgactcaaccagacactaacctacacgcttcagtgaaagtatttggcagatgtggtcggcatctgcaagcagttggctttcagagagggagcttatccttaatagtctgggtgagccttatccaatcagttaaaaggctttaagagcaaaacggaggtttccccaaggaagaagaaactctacctggggattgcagtgtcagctcctgcaggagagtttcctgcctgccctcccgctttcccactggacagcttccccaatcatgtaagccaattccttgcagtaaatctcttaatatatgtgtatctatagatctatgtctctatatccacatgtctctatgtccatattcatattcatctctctatatatagttatatagatacagagatagagatctatccataaatatccctgtatagatagatagatagattcaaatatatatatggttatagagatagatacccctctattctatttccctgtacagagagatcttagagatctctctctttctccttctcctgctctcttttcataaacacacacacacatatttccttagtctgttttgtgctgctataacacaataccacagactgagtaatttatagtgaacagaaatgcatttggctcataattctggaggctgtgaagttcaaaattgagcagcctcatctggtgagggccttctcactgcatcatcccatggtggaaggcagaaggagaaaagagcccatgcgagagacagcaagagatcaaactggcagcctcagatcctttttaaatcagcattaatctattcatgagagcaaagccctcatggcctaatcacttctcaaatgtgccacctgtcaacactgttgcattggggattaagttcccaacacaggcttgctggggggcacatttaaattatagagtgtatagatacagatataaagatatatgaatatagagatgggtatagatctataaatataggtatctgtatacacatggatataggtttagagattaggtatagatgtagatatatctatatccatatcaatatatctatcata

SEQ ID NO: 34737 - DNA, 1319 bp, Homo sapiens
ctagtgcataagctagtccatgagttattgaaagagtgttaagggtatgtttgtggctgactggtgtttaacacatacatggtacacccaataatttgaagagttgacagaaattcttcccccaaattattttcccatatttaacttctcagcactcctactatgctctcaaacctggtaagaattctcacrttcacttcctgtgatggacacctccatgtgtcaacatggctaagctgatgtacccagtgactcaaccagacactaacctacacgcttcagtgaaagtatttggcagatgtggtcggcatctgcaagcagttggctttcagagagggagcttatccttaatagtctgggtgagccttatccaatcagttaaaaggctttaagagcaaaacggaggtttccccaaggaagaagaaactctacctggggattgcagtgtcagctcctgcaggagagtttcctgcctgccctcccgctttcccactggacagcttccccaatcatgtaagccaattccttgcagtaaatctcttaatatatgtgtatctatagatctatgtctctatatccacatgtctctatgtccatattcatattcatctctctatatatagttatatagatacagagatagagatctatccataaatatccctgtatagatagatagatagattcaaatatatatatggttatagagatagatacccctctattctatttccctgtacagagagatcttagagatctctctctttctccttctcctgctctcttttcataaacacacacacacatatttccttagtctgttttgtgctgctataacacaataccacagactgagtaatttatagtgaacagaaatgcatttggctcataattctggaggctgtgaagttcaaaattgagcagcctcatctggtgagggccttctcactgcatcatcccatggtggaaggcagaaggagaaaagagcccatgcgagagacagcaagagatcaaactggcagcctcagatcctttttaaatcagcattaatctattcatgagagcaaagccctcatggcctaatcacttctcaaatgtgccacctgtcaacactgttgcattggggattaagttcccaacacaggcttgctggggggcacatttaaattatagagtgtatagatacagatataaagatatatgaatatagagatgggtatagatctataaatataggtatctgtatacacatggatataggtttagagattaggtatagatgtagatatatctatatccatatcaatatatctatcata

SEQ ID NO: 34738 - DNA, 1319 bp, Homo sapiens
ctagtgcataagctagtccatgagttattgaaagagtgttaagggtatgtttgtggctgactggtgtttaacacatacatggtacacccaataatttgaagagttgacagaaattcttcccccaaattattttcccatatttaacttctcagcactcctactatgctctcaaacctggtaagaattctcacattcacttcctgtgatggacacctccatgtgtcaacatggctaagctgatgtacccagtgactcaaccagacactaacctacacgcttcagtgaaagtatttggcagatgtggtcggcatctgcaarcagttggctttcagagagggagcttatccttaatagtctgggtgagccttatccaatcagttaaaaggctttaagagcaaaacggaggtttccccaaggaagaagaaactctacctggggattgcagtgtcagctcctgcaggagagtttcctgcctgccctcccgctttcccactggacagcttccccaatcatgtaagccaattccttgcagtaaatctcttaatatatgtgtatctatagatctatgtctctatatccacatgtctctatgtccatattcatattcatctctctatatatagttatatagatacagagatagagatctatccataaatatccctgtatagatagatagatagattcaaatatatatatggttatagagatagatacccctctattctatttccctgtacagagagatcttagagatctctctctttctccttctcctgctctcttttcataaacacacacacacatatttccttagtctgttttgtgctgctataacacaataccacagactgagtaatttatagtgaacagaaatgcatttggctcataattctggaggctgtgaagttcaaaattgagcagcctcatctggtgagggccttctcactgcatcatcccatggtggaaggcagaaggagaaaagagcccatgcgagagacagcaagagatcaaactggcagcctcagatcctttttaaatcagcattaatctattcatgagagcaaagccctcatggcctaatcacttctcaaatgtgccacctgtcaacactgttgcattggggattaagttcccaacacaggcttgctggggggcacatttaaattatagagtgtatagatacagatataaagatatatgaatatagagatgggtatagatctataaatataggtatctgtatacacatggatataggtttagagattaggtatagatgtagatatatctatatccatatcaatatatctatcata

SEQ ID NO: 34739 - DNA, 1964 bp, Homo sapiens
catccctctatctctgtccttccactcgctagtttccccatcagcgcaatggagtttgagcaaaggatctcactggagaagtcgcagcgacagtggatctaagagcagagggcaagggctgcctgagccttgtgaagctcaattctgccccctggtgcccagaatgccgcgccagcaatgggatgcaggaagaagaggcaggagacacctgaggtctcttaccttttccaagctactcagacctccctcttacagggcagggaacacagggcaccagccctactaacccaatctgaggggaaactctgaggctccctctcctgcagagatctcagactctgtggtagagttggtgtggggggacacgtgacgtcagcaatagccctgtccatccagcacctggacaccccgagtggttccttctatgggaggcagaggcagggctgccccctctgctgtgcaattcctggggtcttcatctgagttaaattcttttaagtcaggatttttctggctgaaatttcacatttgtgttcagtgggagtactcaaaaaatgtagcatgcatggatgaattccatccctttgcattgtcttcagaagatctgtcctatgaagcacagggaaaagtgagttcgttaatttgcatagttggcggaagtagggctacaaagaggaatgggatgggrgaagggagagatttgatgggaggaggatctcaagagagttcagatgaagggaaaataatggggggggtatgttggagggatcaagaaaggctttctggaggaagtggtatttgacacagggtttgaaggacacagaaagcagcaatggtgttcaggtggagggaacaatctgaatagcgacatggagccagaagcataaggtgggcttgtgctggtgagaaggctccagtttgagggaacggaaggaggcagtgctgtggtggagccatgggagaggaggctatggaggatcctggagacatgctgatgtcagaccaaggaattggtgttttgtggcaaaagcactgaactgtgagcctggggtctaggtcctaacccaagctccactctgactgggttccactgtctcagccttgctctctggagccctctccagacgtcagtgggaatcatggcaagttcttaatcaggacagtgcctagaaatcacagctcacagaatggtcaagctggtaggtaccatagaccttatcaaatctaaccccctcaatctgaaactcagatgagaaaactcaggtccagagagatgaagggacttcccagcatcacacagcaagtcacggacagagtcaggacttggacccagatctccagcctctctgtttggggctctttctccactgcagtctggggtagcatcagggggactgaattggaggaaagcagctagaggcagaagaccaccaggagattacagcctcacccagaccagagatcatgaggccggggccagtcagaaaatgtttattgagctcctcaccctgctccccatcctgggcccatctgaggaatattgagcacccacacagagggaccaacaaagaaaaggaacctggtggggttccagaaggaggagacataaggtggacatggtattcatgagaaggaaggggcatcaggagcacacttgggtgaggatctacaggagtaacaccaagaaaatgctttagaagcagggtctcactatgttgcccaggttggtctcaaactcgtggcctcaagcgatctgccagcctctgcctcctgaactgctgggattacaagtatgagccaccacaaccagccccgtgtttcatgagctgttactccattccaggagcctatcacttgggccccctctgattcttgaccaaggtgtccacctccttcatgaaccggagacacagctcctcttcccatggcaaagcaatgcactgcacagtcaccagaactccgac

SEQ ID NO: 34740 - DNA, 1964 bp, Homo sapiens
catccctctatctctgtccttccactcgctagtttccccatcagcgcaatggagtttgagcaaaggatctcactggagaagtcgcagcgacagtggatctaagagcagagggcaagggctgcctgagccttgtgaagctcaattctgccccctggtgcccagaatgccgcgccagcaatgggatgcaggaagaagaggcaggagacacctgaggtctcttaccttttccaagctactcagacctccctcttacagggcagggaacacagggcaccagccctactaacccaatctgaggggaaactctgaggctccctctcctgcagagatctcagactctgtggtagagttggtgtggggggacacgtgacgtcagcaatagccctgtccatccagcacctggacaccccgagtggttccttctatgggaggcagaggcagggctgccccctctgctgtgcaattcctggggtcttcatctgagttaaattcttttaagtcaggatttttctggctgaaatttcacatttgtgttcagtgggagtactcaaaaaatgtagcatgcatggatgaattccatccctttgcattgtcttcagaagatctgtcctatgaagcacagggaaaagtgagttcgttaatttgcatagttggcggaagtagggctacaaagaggaatgggatgggggaagggagagatttgatgggaggaggatctcaagagagttcagatgaagggaaaataatggggggggtatgttggagggatcaagaaaggctttctggaggaagtggtatttgacacagggtttgaaggacacagaaagcagcaatggtgttcaggtggagggaacaatctgaatagcgacatggagccagaagcataaggtgggcttgtgctggtgagaaggctccagtttgagggaacggaaggaggcagtgctgtggtggagccatgggagaggaggctatggaggatcctggagacatgctgatgtcagaccaaggaattggtgttttgtggcaaaagcactgaactgtgagcctggggtctaggtcctaacccaagctccactctgactgggttccactgtctcagccttgctctctggagccctctccagacgtcagtgggaatcatggcaagttcttaatcaggacagtgcctagaaatcacagctcacagaatggtcaagctggtaggtaccatagaccttatcaaatctaaccccctcaatctgaaactcagatgagaaaactcaggtccagagagatgaagggacttcccagcatcacacagcaagtcacggacagagtcaggacttggacccagatctccagcctctctgtttggggctctttctccactgcagtctggggtagcatcagggggactgaattggaggaaagcagctagaggcagaagaccaccaggagattacagcctcacccagaccagagatcatgaggccggggccagtcagaaaatgtttattgagctcctcaccctgctccccatcctgggcccatctgaggaatattgagcacccacacagagggaccaacaaagaaaaggaacctggtggggttccagaaggaggagacataaggtggacatggtattcatgagaaggaaggggcatcaggagcacacttgggtgaggatctacaggagtaacaccaagaaaatgctttagaagcagggtctcactatgttgcccaggttggtctcaaactcgtggcctcaagcgatctgccagcctctgcctcctgaactgctgggattacaagtatgagccaccacaaccagccccgtgtttcatgagctgttactccattccaggagcctatcacttgggccccctctgattcttgaccaaggtgtccacctccttcatgaaccggagacacagctcctcttcccatggcaaagcaatgcactgcacagtcaccagaastccgac

SEQ ID NO: 34741 - DNA, 994 bp, Homo sapiens
tgtgccctggccaccacctgctttaagtagctacagaggatgctctccagactcagctcttcggtccgaagctgctgggccagctctgccaggggcagctccaggattggcttggggtccagatctggctcctgcagaaatgagatggagtaggcagatatccaagatggacccgctaaggcccactcccacacactccacatcacaccccagactcccctatgcacagctgcacacacrcccatgtctctcggtacatgttccggcactcatgcttagcactaaaaacatctgttgtgtctccaggttgtcatgaaaaccctccaagggcacgatgttctcctctgcctctgcccccagtggccagcccagggcctggcgtggagaagggcctgccccttcatgctgctcttcagaagggtcacaactggagtgggggtgactccacatgtgacatcatgagactggaggttatggaagtgaagttcagccctgggtggctggccttcaggggcatcccaggcatcccacctctcctccctacccagtcctccccctgctgagctgactttagggaggcaggagtccagcatgggtggcaagagagttagcaccatcttggccgcgcccttggtcagctgggtaactggaggtggttctctgctcctcccatggcctaggtctcctcagagagggaaggactaggagtccatcctgagtcagcccctcaactgctctgagccccgtccttcaggatatgaggggaggtctgataccaggccctcaggactgccgccctgggcaagtgtgacatgacaaaggtctagcacacagcaggcactcaggaaggcaaagttctcttcctcttgcccccctcagctctggttaagaccccgatgcctccaagctggagtatgggttgggcaagaagtgggcttttcttggtcctggaggtgggggaaggtggagacaaataaatttcccttggaggtta

SEQ ID NO: 34742 - DNA, 505 bp, Homo sapiens
cacacagatgcaagcagacacttaggaattcatagcacaggttctcagacctgcagatagacttataayaacacagacacaccccagcgcaccatggcagaaagccctccttcatcctctgcttgctcacctctgaggacagagctcacagcctctgaaggcttccctttccactggaaaatagctctggctgtagatccaaatgtctcttcttaccactcccctttggccctggcttacttgcagttttccacagagtcccctgcctctctctgtcctgcagacccatccgtctcccaagctacactgaatactcccaggcattgcttgtctcaggcgtcccatgtcccaggctactctgccacttgtgtttgggtgaggtccaaacagcctagagaagatggaactgtctcccattatctgctcccctgcagccactccagagtggcatcccggctgcagattagtaagggccacagagagagctacacagtcagtgtgacaa

SEQ ID NO: 34743 - DNA, 505 bp, Homo sapiens
cacacagatgcaagcagacacttaggaattcatagcacaggttctcagacctgcagatagacttataacaacacagacacaccmcagcgcaccatggcagaaagccctccttcatcctctgcttgctcacctctgaggacagagctcacagcctctgaaggcttccctttccactggaaaatagctctggctgtagatccaaatgtctcttcttaccactcccctttggccctggcttacttgcagttttccacagagtcccctgcctctctctgtcctgcagacccatccgtctcccaagctacactgaatactcccaggcattgcttgtctcaggcgtcccatgtcccaggctactctgccacttgtgtttgggtgaggtccaaacagcctagagaagatggaactgtctcccattatctgctcccctgcagccactccagagtggcatcccggctgcagattagtaagggccacagagagagctacacagtcagtgtgacaa

SEQ ID NO: 34744 - DNA, 505 bp, Homo sapiens
cacacagatgcaagcagacacttaggaattcatagcacaggttctcagacctgcagatagacttataacaacacagacacaccccagcgcaccatggcagaaagccctccttcatcctctgcttgctcacctctgaggacagagctcacagcctctgaaggcttccctttccactggaaaatagctctggctgtagatccaaatgtctcttcttaccactcccctttggccctggcttacttgcagttttccacagagtcccctgcctctctctgtcctgcagacccatccgtctcccaagctacactgaatactcccaggcattgcttgtctcaggcgtcccatgtcccaggctactctgccacttgtgtttgggtgaggtccaaacagcctagagaagatggaactgtctcccattatctgctcccctgcagccaytccagagtggcatcccggctgcagattagtaagggccacagagagagctacacagtcagtgtgacaa

SEQ ID NO: 34745 - DNA, 894 bp, Homo sapiens
ggggtgcagggatcctccagacactcacccgatgcccgtgaagctgacccgtaagcccactatctggcagagcccatcccgaggcccgagtgcttgtccttcgccatggccttcgcctggggcgggtttccactcctctgcacctctgcctttctgttctgcattccattcggggtctgggctgacagattcccgcctccttgcaggagtaggcgcccccaaakactgcaggggtggggtaaggtgtttacccccctcctgagtagcaatgccctgcttcttttcccaaaagtgtgtctaccccagccatacaggagagagatttgagccaattatccagagaatttgctctcactaggcagcaaattcgatttttttctgaacacctagacacacataaacacagctggtttgcagaaaggggaggtaggaactaaattcattcgtccttaggccagagtgcctttccattcgaggggagaaccagggatgtgggtaagtgaaacacaaatccccgaaaaattgaaaacaacccccactacacccacctaaaactaacagaccatagaactttctagaaaggggttggacagagctgacccgcctgcagcgcacagaatccctagcactagagaggggaaaggactctggtcgccctgccatcgccacagccaggtaggaacttgcacaatttcctcggctgtggagcacacaacccttgcggtacagacagcccctttcctccaaggtccatcaagtcaataaagccctcctctttccccaacgccctcaaactggaggcgcccttagtaaaccaatatcggcgcaccctgccccggcctccgaggacttttctcaaacgaaaaagaccttctggggcccgggtcggaacca

SEQ ID NO: 34746 - DNA, 1457 bp, Homo sapiens
tttgtgaccgccagaaagttcagccggtggtgcccgggaccctgcacagtccatcagggcccctggcctgtcgccgtcaacgactgagttacggccatccagtgtgggaagcctagggaggaaagaccctggcagtcctcgcaaccctttgactgctcccctagaagcgccccgagagccgctccggggactggccccagcctgccgttcctcgccggagctcgcctgacccacgccggctgaggccgcgggaggcaaaacgaattctagggaactagggccactgcgccccaaacacccacctgaaggttcctagaccaaggccgcgtcttcgagggcagaggctggctgagcgccgaaccaccctcaactggaaaattcgtgcagaatcgcaatccagagagaaaaggcgcacttggtggcagctgagtttgaacgggatctgcgcgggcgagaccaaagccagacccgggcaatgcccggagcactgcggggttcgcgtggaccaggaagctgggagggygtgggcggcctctgcgctccgcaggctgggaactgggctgccggccgcgccccctccccagcccccgcccagggctccgcaactccccaggccgcatctggtccgcattacgccggccacctccctccccgcgccgcccccttccaaactgagaaggatttgtctccgcttaatatccaaaccttttttgtattttttttttcaggggcgaagtaatatcttccaaatgaggcaaaaccgtgacggatccgaagcgttctccgcgggtgcctgcgtctccgcgggccaaggccttcgtcctcgcctcggcgcgtttctacccacggcttgccctccgctctctctgcctcggaatttcgagttctgcgctctttctgtctccctaagttgctcactttctgccaccgttttcagccccgggtatctcttcctctgtctcaccctgggtctctctgtctgtccccgactcggtctttctggcatccctccgctttctctgtccctgcgctgtctgtctgtctcctagtccctggctccctgcaaactttctgatccgcccagtgggtccgggactgcaggaccgcaagaggggaggctgtccccgggttctcacggcccgcgtcctccctgcagcgactgtcccgcactactcccggctcggcccgccagccccgcccgctcgtacctggtcaccccggcccgcgccgccgcctccgctgccatctacgcgcgacggggcctgggctggagttttaaactgcgtttcccgggcgcccggcgcgggcccgggcgcttcctaatggccctggtggctgccaatcacgcctcgctcccgccccgccctgccccgccccgctggtgccgcagcccagctcccgaccaaggtggcccgacagtcggtgggtctgtgcgccgggctcgcgtccgtcacctc

SEQ ID NO: 34747 - DNA, 725 bp, Homo sapiens
cagtgcattatgttatcaaaacctgttggtgaagtcctaattgggtgacagtttgctagggagcatctggggatatagagattgatgagatgaaggtgaaagtttgcatgaaaattggaacattagaacggacttcctgtgaagtgcttgtgtatcctctacctaagtgtattattagatggaatcatgtctgactgggagcacttcccattcctagtattataaaatcaaaggtaygtaagtttgcccttctgcaatcattaattgggcatattaaatgggaacctatagaattgcctgagcccgcatagcttgttaatttgacacagtgtcagatgaatcctggtagacaaaaagagattaccactttaactgctgacatgttagaagttggagtgctggtactaacaaatgttctgtacaaatgtcccatgtgtggcccatgaaaaagggaagtggctcatcaagattgcagtagattttccaggcttgaataaagtagtattggccaggtgcggcggcgcacgcctgtaatcccagcattttgggaggctgaggcgggcaatcacctgaggtcaggagatccagaccagcctggccatcatggtgaaacctcactgctattaaaaatacaaaattacctgggtgtggtggcatgcacctgtagttccagctactcgggaggctgaggcaggagaatcacttgaacccgtgaggcgaatgtt

SEQ ID NO: 34748 - DNA, 744 bp, Homo sapiens
tgcccgctccccacttcttctgggtgccgagaaagcctggggctctgggtgtctggtttccagggctaggaggagttggagaggcttccccggctgggtctcacccagtaagcacctgacatgttcctgctactgcagttgcaagcagtcaccttcccgaacctgaagcctggttttggcctctcctcagagctttacccgagggcctggcctggtctgcagtgcccgcatcaccggcccacaggtccctaggccttycccaggactgtgctccttgagagaagagcgatggatccggacgagacttccctggaggtctcaactcccagctcctgactgatgtcaacgtcaatcattgaaaaagccagggcctcccccaacctgcatagctcgtgctggtgaagccccagcagtcccagcggttatcagtcatctgaaagtgacatgatgacccactagcccaaccagccttcaaaacttcggctcagttgcatctcttcgtgctatccacactggatttcaaacccattcacactgcagagacccctcgaaacaaaggaggcaagctgtgagatgagagaccccttagataccagaacttaggtaacaaagaaggcagaggcctgggttagtgtccttccttggtttaaaggggcttctgctcacagaggccttgaggcctcgcagtgagactgctgacaggtagcctgttcatagcactcacacagagcgccattcaaacag

SEQ ID NO: 34749 - DNA, 530 bp, Homo sapiens
ggcctcccaaagtgctgtgattacaagcctgagccaccacacccggccctgggagcttttcaatagtattttctgaaacgcttgtttatctttctgtggttaaaggaacatttgactgtgtgaagaaaacagaccaattggctgggcacagtggctcacgcctgcaatcccagcactttgggaggctgaggcaggcagatcacctgaggtcaggagttcaagaccagcctggccaacatggcaaaaccccatctctattaaaaatacaaaaactagctgggtgtggtacaacgcacctgtaatcccagctactcgggaggctggggcaggagaatcactagaatccaggaggtggaggttgcagtgagccaagagtaagccaagatcacgccaccgaactacagtctaggtgacagagtaagactccaacaaaagaagaagtgagaagaagaagaagaggaagaggaagcagaccaatagaaaggtatctggtcttgagacacaatmttttcaattaaacttcctattca

SEQ ID NO: 34750 - DNA, 581 bp, Homo sapiens
tcccttcaagaaaaaaaagaaaaatcttacaatgtacttcttagagactgattatctatttccataaccctcagtcatagacatttctatttacactaggctctgtaaattgaagaattttcttgttattatccagtaatcaaaggtggttgggttacctagtatggtgcctcaacatatcaagcagttcactgtgcttattctgttcatgcttcgaagtttagcagtgctaattagtaggtgttggcattataatcaaagaatttcaagtaaatatcgaacatcagacttgaagtataaattatccttaagaataaggcgtttaagaaaatattatctaaagctgtaaccaacagttggttttgtgaaaatcatcaggttctagatgtttctgcactctgacgaacactgaagatagtgggccacatrtttaggcattgtcaccaatgttgtaggtaataaatgctttgtgtttactgtctccatgtggtttattatcaaatggataccatctgttggaaccattttatactaaaattaacagataatttatcaagtaaaatggacatttcactttttga

SEQ ID NO: 34751 - DNA, 1305 bp, Homo sapiens
attgatacgtttttatgttatccattccacctataacatcattccccattctccactgaaatttgtaatcttatgaatagtcattgtgccctataatgggccagtaactgtgctatattgtagggatataaagacatgtgagacgtagattctcatatgaagaagcacaaggtcyaattaagagatacaggcagataaatgaataatataatactttgttattactgtattggcaggattttctaattttctacaaaacataatggcagcacaaaaggattctgtaattatgaactacactggttggggtggagtgaaagagaaaattcaaggaaagggtaacagaagaagttatgcttgttttgattcttaggggatcattaggtattcaccaggaggataggtcaaagagcagtctgtctcaaagaaataacaggtgtgatggtgtcacaggttgggttttcttggaagcagactctgagttggagttcagtgtgcaggttacttattaaggagttcaatacttgggttcaatatttatggaaggaaggagaaagaagaactactcagaggaagaaacccagtggtgatacacatctagaagtatatacaaggagctctgaagatggaatagccttgcagagttgtaagttgacactcgtgggtcgaagtgtccagatatttatgtgcctgcattggtcattagatgtgagtttcatctaggaagggagtgaactttgaacagatcagctgtctacagctgaggcagtccttgaaggggctgccagttgaggattgtccactcatagaattcctagcagctggggaagaaagtccttccttgaacagtatctggctggtgcatcatagatggcaaggaagagtagaatagctttccaaggccgggcatggtggctcacgcctgtaatcccagcactttgggaggccgaggcgtgtggatcacctgaggccaggagttcgagaccagcctggccaacatggcgaaaccctgtttctactgaaaatacaaaaattagctgggcatgatggtgggtgcctgtaatcccacagctactcgggaggctgaggcagaataatcacttgaacctgggaggcagatgttgcagtgagccgagattgtgccattgcactccagcctgggtgacagagcaagactctgcctcagaaaagaaaaaagctttccaaatttagaaacaagcacattatatatatatatatatatgcacacatatatatatgcgcatatatatatgcacatatatatgcgcatatatatatgcacat

SEQ ID NO: 34752 - DNA, 556 bp, Homo sapiens
gctctatgatatgctttgactatatgaaattttgtaatagctacataagaattatagaatgaataagtaaaagatggcaaacatgttttaaaagttttaacagagatgacagagttctaactatcttattacataaagtatcctacaaataaaaaggttttaatataaaaattggtatagggtatgaacagtgatagaatttggatatttgtccccactcaaatctcatgttgaattgtagtccccagtgctggatttgaagactggtgggaggtgtttgggtcacagggtggatccctcatggcttggtgtcatcttcacaatagtaatatgatttctcacagaaaatggccttttaaaagtatatgcggccaggcgcggtggctcacgcctgtaatcccaccactttgggaggctgaggcgggtgtatcacctgaggtcaggagtttgagaccagcatgggcaacatggtgaaaccctgtctctactaaawatacaaaaggattagccgggtgtggtggtaggtgctgataatcccagctactcaggaggctga

SEQ ID NO: 34753 - DNA, 540 bp, Homo sapiens
atccaaaattttaaaaaagaatctaaatataaaatcctcgatccttgatttgatggttttattggaagcaccaattaattcctctttattttagccaatgaaggaaatgagttttactttatatcatgatcttaatctgtaaaataagggcagtggctaaggggtctgttctgaagcattagtgactaaaaatttgggggtcgaaatgtctctttagtgaagattttcctttcttgtgcattttctgcgggtgtccttggcctttcattactgacaaaaacaattatctagttcattttgacattaataactataatgacatatattgatcttaggcatttatatagctagatagagagataattttacaaattgctatcatmccctaatggctatttttcataataggcattaaattcagttctacttaatttaatagaagcaaaaaagaaacagtataaatgaagtaatctttaaacttcaaacattgcttctccaaattaaatattaggtcctgcaacatctattgtaggataagaa

SEQ ID NO: 34754 - DNA, 679 bp, Homo sapiens
tgcataatgttagtaacagccatacatttggaagagagtgttgcaatcatcctcccttttgcataagaagtttgggggaacctgagattttgaagtttttctttatttcgttttaaaaaaytcaatgaggtttaatcttaggccacttctcttgtctacctgtaagcttgcctcctcttacctaatttgttatttaaatgattatttttacattgttaagggttataccatttacattgtcttctgtgtttttaattttaacaagtcttagtagcaatacctaggcaaaatagatttcaagacaaaaactataagaagagacaaacaaggtcactatataatgataaaggagtcaattctgcaagaggatgcaacaatttaaatatatatgcgcccaacatgggagaacccagatatataaagcaaatattattagagttagagagataggcaccaatacaatcagacctggaggcttcaacactccactttcagcatgggaaagaccttccacacagaaaatcaacaaagaaacattggacttaatctgcactgtagaccaaatggatctaatagatatttacagagcatttcatcaaagagctgcagaatacacattcttttcctcagcacatggatcattctcaaggtcaaaccatatgttaggtcacaaagctag

SEQ ID NO: 34755 - DNA, 1263 bp, Homo sapiens
gcatcttttcttctctgacatcctgtcaattacatgggggggtcaaaagcccacttagattcaagaggagagtacatagaacttaccactcaataggaagaatatcaagtctatgttgtagaaaagcatgtgggataaggattattgttgcagacatttggaaaatgcaatctatcacatcaagtctttttcatttcaaaaaaatccccactcatctgcctcagatgctttgccttttcaacagaaacatacaatattactggtactatatcgaatctccaaaaatcaatctcaaaatatttggttacagggagtgaccaaaagaatttaaatatactgagtgtattctgggtgcatttttaaaaattggaaatatattctcattctactgaataaaaatgtctgggatgggacttgtcagtctatagtttattaacaggctttctagtatcacctgggactttgttgaaaattcagaatcttaggtcccaccctaggcctactgaaacagtctaagcagatttccaggtgattagtatgtgccttaaagtttgagaagctctagtttaagtgattttgatgttctttcagttgtgaaaatcaatctctttacaataattaaaagtaatggcaaaaaccacaattacatttgcaccaacctaataatatcatcagaatgtggttgactatgtaggcccatctgtggcagaatcgtttattaaagtgctagaagttgagacactagaatctacattttattaagcttttcatctcaagttattcttttgccaactttggtttgagaaccgcttctctaaagcagtgtgaattattgcacgactctaagcattcttattattccagcaccattactatcacctaggatcttagaaatgccacattctcagatgcyactccagagctactgaaccaaaaactctaggggtggggcccgccaatcttcgttttagcaaggtcttttggtgattctgacacacactaaagtttgagaactgctgtgctaacatagagacgatatacccagaaatagctaacataaaattattagcttaccagacaggagtttgttctatttctgacaccaaataattttactcaatctttcaaactgtgttaactaccctagctaaaattattttttaaaaaacgattttgtatcatgcctggctttcataagaaaacacatttattgtcatgcttacattttggcagagtacttttatttaaattttaaagtatgca

SEQ ID NO: 34756 - DNA, 1610 bp, Homo sapiens
ctttttcccttctgggatttactgtctggtcttacatttatcctgtgtgcagttttacatagtcgatgccacaccatttatataaaaatgctttttcagttagtagtatattgcaagcattttctcacatcattaaattcttctaaacatgaattttaatgtctgtgcaatatttcatcacatgtatttaaccattttcccactggaaatataggttgacttaaaaaacatttttggctataataaatgatactctgatgaacatctttgtcttaagatttttgtcagcatttctgattattttctcagggttaattcttaaaagtggaatttctggttcaaagaataccacagctataaaamtccatgtattttgctaattttctttccagaaatgctaaatcaattttatattgatgcataacaacatggaatttcaattcctgctctgaataaacctttgtttcatagaggattattagaaaatcatcttttggtgacagatatttaaagtagaagaatgtatgcaggcgtgttgaaattgtgtgaggaaaattttttcttctcatccttttcatgaaaagtcagaatgtagtggttgcatggcacctgcatttagaacactaactttagtcagccgatattaattggaagcctaggttcaaatcatggctttgccacttactaacttcgtgattgtggtcaggtcagttactctctctaagttgtcgtttccttatctgtaaagtgaagaaaagattagcattgttatgagatggagataaggcatgtgaggaatccagcactttgaaaagagctgagattaccatgacagcaaccatatatagctactgaacacttgaaatggagctggttcgaattgagatgtgctatacatgtgcagtgtgcaacacacactaattccaaaggcttcgtcccaaaaaagaatgcaaactctttattaataaaagagttgattaattattaataaattttgatatcattacctgttgagatactatttgaatatctcgatttcaaataaaacacattattaaaattaattgtaatacatttattttgctttttaaatgctttttttccctctttgaagtggcttgtgttataatcttactggacagtactgctgtagaatataataaaggctggaggagcaatttttagaagaaaaagtgggttatttctccattatggaattatccagttgtcatcttatcttttggggacatttgattcttaggaaatgatgaggcatttggacagggtcctctgttttggtccggaaggtttagaaaggctagagtagggatgatgcataatctttcattgtttgttagaggggtgagtggagagtttaaaaatagcgtcccctccctcctcccctcccaatgctgatccctcatgagttatttctgttggccgcattaggaacctgacatttgattcattcagtgggtcctgcctaggtcctttaaaacagaatggactgttagggaaaggctgccctgggccatgcaggccgaggagaccaaggggattggaataaccagtatggcaaaatgcttggtcaagatccagactcgacgaag

SEQ ID NO: 34757 - DNA, 760 bp, Homo sapiens
tcaccccctcttctgcttttctttattctctgtgggttgagttgtttgcccagtcagtcccaatgcgagaacctgggtatctcagtttgaaggtgctgcatttactagcccctttttattcatctccatgagtgctgcagaccacagctgcctctaattggccagcttgggttccagcrttctgagtacctgtttttaagtctttggagtatgtacctgggagtggtattgctgggtcatctgataactttatgtttgattttttgaggaactgtcaatttttttctcacaatggccagaaccaattatagtttcactggcaatatgcagggttctaatgtcttcacatcctcaccaacacttgttattttcagtttttaaaaaagctgttgccatctgagtaggcataaagtagcatcttattgtggttttgacttgcatttccctaatgattaatgatgttcagcatactttcatgtgcttgttgaccttttgtatatttcttgtatttttatggtatttttcatttggacttctcagtgctatcagactagagctatcatgaaatatctgttgatttttgaatgctaaaaccagtaagttatgcctgtacaccttgaagagagaaaaatcacataatagattcattaaaagctggtttatggttcccgaaatgcacctggctgccattttgattgtatggtagatccatcctggaggacacttctttgatgctaactttatttcccactatggatcc

SEQ ID NO: 34758 - DNA, 579 bp, Homo sapiens
gcctcccagctcctctgcagggtgcagtctgtacatgccacctataggcatgaaaaagatgcttgctttctccagcatagccagtgggactgcttagtgggctgtaaaccccaaagattgtagcaggcagagcagaagtcaagggagaggcaaagggaatggttcacgcaaaacttgtgacattaagagagagagtggggagaaaagctgcaagtgaatttaaggaaagaaaacagaagcgtaaccacattaaattaagggcagggaaaacaaggagaatgatacatcagttacaaactggaaacagaggttgtcttttaccaaaagccaaactacctgcacagtgataaattattagaacacaaaatagtttcttcttttagtacgataaaccgggaaacaatgcacaatgcacacgtttwaaaaaaaaaaaaaagaaagaaaacaactaggcacagtggctcacatctgtaatctcagcactttgggaggccaaggcaggtagatcacttgaggtcaggagttcgagaccagcctggccaacatggtgaaaccccatctctactaaaaatccaaaaa

SEQ ID NO: 34759 - DNA, 630 bp, Homo sapiens
tgcttaaaatcacttcctccaccgaagaatatgtttaccaagctccttgttcaaggcagggacacctttatagaatatctttcctaggccccatagttgactgaatctctgagacccaggttagccttctaccaacaatcctgaccacatgctcagcagcatggcggccactggaataggaatcactggtatgtccctgccccactactgccctagcttgggccttcctcccctccttcagatagctctgccacccccactccccctctcctctgcagctcaatttaaaggccagagcaggtaaggtctgcagcagmgtcccagtggatagatctgaaaactggagggcacaaggcttctctgcccccctacccacataatccactacctaattgacccttactctgtggacagaaggcctatctggctattgcagcttccccagtaccaccgatgtccattctgcctctgttagggctccctcctgctgttccatactctgtgcccaggagggctgtcctgtgcgttcggtccacaatggcccctttctgttcttcaggcattccatcatgctccccctcaaccctggatgccaatcctccacatgcccacacagttaactcccgcacc

SEQ ID NO: 34760 - DNA, 951 bp, Homo sapiens
tttgtgcggagaccattaacaaaatattaagcctcagaggtagctctagaaatttgcgggttttcttgtcatgagttttcagcccaagtactagttcctcaaggatggcaaatatgtttttaggctaattccagtgtgacagagaggtagatgatgcctggagtgttgagaagcattgtgaggctgattttgatcagaaacaggtcctagatacattagtgatatctgcaaagggtgagggaggggtgaataccatgttaataacactgtaaataacatagcaatatgttaagttacttcaagtctgtgtaataggagataggatacaaagaggtaaacacctgwaaaaaaaaaacccatggaaaatgtaaatggtattttacgtgccttttcttgttttgttattttttaattagaaaaaagccatgttggcattccatacttcaacaccagctgcctgcaaacatctttggaagtgtggagtggaaaaccaggccttttataagtaagtggcttttattcatttaattatagcttttaaaagcacccatggaattctttatgttttgcaaatggctgcatatttatttcttttaatacagttttaaaagttatatttaagtaaattaaaattttgtgcattgttcagggtgactcccggtgattgttggcttgttggcctgaccgagttctgagctctatgttggatgtttcctgtggaatggctgtgggccactgtgtgtgtgtgtgtgtgtgtgtgtgtgtgtgtgtgtgtgtgtgtatttcaaatagctatttccacaaaatatgtcacaggatcaatttttggttgccctcctccccccacccccacaaagcagaccttgagatagtttggtacaagtagcttatttgggatgtaatcaatggacataccagtaggggagtggtggggggtggtgagatggggaa

SEQ ID NO: 34761 - DNA, 1290 bp, Homo sapiens
ggatgacagcagcacctgtcattttctttgatgtgagatctgtccaaggtgctgccccggggacctcaatctccccagagacagcattgtggtcaaagccatagtgatgtgtgaaaccttcattcaggcaactcctccttccatcccagtagctggttgtgtggtagaaaattgttcctcttggacacttgtttggttttcaaagtatttcagcttctttgaagctgctgtcaaaagtgagaatgtagtaataagctctcctcttgtggtgggcgttcagaggtgatagtctacaatggtggtgataatactttaattagtgaattttcttcacattctgakattctactcttcaaataatgccaagttcacagactcctacatctgctgaggtgtgtgtgtttatgtagagaaacagaagcagactgagaacactttcttggaatttttcttcttcaaaaagaggagcagaagctaactctgatgttttcatgctgatcatcattgatgacaagatacccaagccaaaccctcctgaactggccactgggtgacaatcatctgcctgttccagaggcccagtgagagggctgtagcttggtgagccgagggctggttgtgtgagccacctgggcatagcagccaccacagcagacactctgaggcagcatttttaccgaacacaagcacctgtgtaggggtcacgagtgggttctaatcttagctgtgttgtttgccaactgtatggccttgggtaaatcacttctcagatcatcagcgtactcatctataacatgagatttacaacatcactttgcccaacttctaggctttgttatgagtattaaagtgctttaaaaattctaaagtgccatacaaatatgaggtgttgataatattactaccatctcttatccaaaaatgaaaaactggaatatgacagatacattcacattaaaatccctccaggtggagtttttagaggctggcactacttcttttaatttcaaggagggatataggaactccaggagtcactattttatgctaccatttttgagtcctgagtctgcctatataagcatcttttagttgagttacataatgtcagtttcctcacctgtaaatatggtatttttcttgcccatcttacatgcacaatgagaaaaacaaatgggataaatatattcaaaccacatttgccccagtattagaatataattgtagttcccaaaggaaacctttctatttcaatagagttcttaatgacaacttcatttggagaccatt

SEQ ID NO: 34762 - DNA, 1290 bp, Homo sapiens
ggatgacagcagcacctgtcattttctttgatgtgagatctgtccaaggtgctgccccggggacctcaatctccccagagacagcattgtggtcaaagccatagtgatgtgtgaaaccttcattcaggcaactcctccttccatcccagtagctggttgtgtggtagaaaattgttcctcttggacacttgtttggttttcaaagtatttcagcttctttgaagctgctgtcaaaagtgagaatgtagtaataagctctcctcttgtggtgggcgttcagaggtgatagtctacaatggtggtgataatactttaattagtgaattttcttcacattctgatattctactcttcaaataatgccaagttcacagactcctacatctgctgaggtgtgtgtgtttatgtagagaaacagaagcagactgagaacactttcttggaatttttcttcttcaaaaagaggagcagaagctaactctgatgttttcatgctgatcatcattgatgacaagatacccaagccaaaccctcctgaactggccactgggtgacaatcatctgcctgttccagaggcccagtgagagggctgtagcttggtgagccgagggctggttgtgtgagccacctgggcatagcagccaccacagcagacactctgaggcagcatttttaccgaacacaagcacctgtgtaggggtcacgagtgggttctaatcttagctgtgttgtttgccaactgtatggccttgggtaaatcacttctcagatcatcagcgtactcatctataacatgagatttacaacatcactttgcccaacttctaggctttgttatgrgtattaaagtgctttaaaaattctaaagtgccatacaaatatgaggtgttgataatattactaccatctcttatccaaaaatgaaaaactggaatatgacagatacattcacattaaaatccctccaggtggagtttttagaggctggcactacttcttttaatttcaaggagggatataggaactccaggagtcactattttatgctaccatttttgagtcctgagtctgcctatataagcatcttttagttgagttacataatgtcagtttcctcacctgtaaatatggtatttttcttgcccatcttacatgcacaatgagaaaaacaaatgggataaatatattcaaaccacatttgccccagtattagaatataattgtagttcccaaaggaaacctttctatttcaatagagttcttaatgacaacttcatttggagaccatt

SEQ ID NO: 34763 - DNA, 349 bp, Homo sapiens
gagagacttcactggtataaagtatttctaaaattatatatgaaaagactaatggtgttagacctacacyagtccagtacactaaccattagccatgtgtggctgtattaaactaagtttaaattcattgtaattaaaaatccatttcctcagtcacaatagccagattctcagtgctcaatagccacatgtggctggtggctgccatattggacactgagactgagataatttcctctatcactgaaacttctattggatgttgatgtctgccactgtaatcacaattaaattggtggcaataaagagttctccacaagtatctctacactcgtcatcccatttattc

SEQ ID NO: 34764 - DNA, 349 bp, Homo sapiens
gagagacttcactggtataaagtatttctaaaattatatatgaaaagactaatggtgttagacctacaccagtccagtacactaaccattagccatgtgtggctgtattaaactaagtttaaattcattgtaattaaaaatccatttcctcagtcacaatagccagattctcagtgctcaatagccacatgtggctggtggctgccatattggacactgagactgagataatttcctctatcactgaaacttctattggatgktgatgtctgccactgtaatcacaattaaattggtggcaataaagagttctccacaagtatctctacactcgtcatcccatttattc

SEQ ID NO: 34765 - DNA, 565 bp, Homo sapiens
cagagattgtagaatcctccccagcccccactagctatagagtcacagtggctgaccagcatgggaggccctggccacagcttttcatgagttggtggtcttaagtcacctgtctctctggagaatcagttttataatcttaaaatgaagaggtttcaatgaggctgctccacatctaaacttgtgtggctcctttgkctttctatgccaccttctctttgtcttcctattattttatgggatatcgctttatatctagtcctctttctcaatcccatgttaaaattcttggaatgctcttgagtcttattggtctgatcccctctatattttctgtagaattatgtaatattactacaagtaccatttgggtgaaaggaactctttgatcttcaaagtagtgaaatgattctaagtatggataagagtggtgaatatagagacctaggaaccagaatttctgttacttatgtttattcaagttaatatttacagtggcctccccttatccacagttttgctttcccccatttgagttacccatggtcaaccatggtccaaaaat

SEQ ID NO: 34766 - DNA, 565 bp, Homo sapiens
cagagattgtagaatcctccccagcccccactagctatagagtcacagtggctgaccagcatgggaggccctggccacagcttttcatgagttggtggtcttaagtcacctgtctctctggagaatcagttttataatcttaaaatgaagaggtttcaatgaggctgctccacatctaaacttgtgtggctcctttgtctttctatgccaccttctctttgtcttcctattattttatgggatatcgctttatatctagtcctctttctcaatcccatgttaaaattcttggaatgctcttgagtcttattkgtctgatcccctctatattttctgtagaattatgtaatattactacaagtaccatttgggtgaaaggaactctttgatcttcaaagtagtgaaatgattctaagtatggataagagtggtgaatatagagacctaggaaccagaatttctgttacttatgtttattcaagttaatatttacagtggcctccccttatccacagttttgctttcccccatttgagttacccatggtcaaccatggtccaaaaat

SEQ ID NO: 34767 - DNA, 565 bp, Homo sapiens
cagagattgtagaatcctccccagcccccactagctatagagtcacagtggctgaccagcatgggaggccctggccacagcttttcatgagttggtggtcttaagtcacctgtctctctggagaatcagttttataatcttaaaatgaagaggtttcaatgaggctgctccacatctaaacttgtgtggctcctttgtctttctatgccaccttctctttgtcttcctattattttatgggatatcgctttatatctagtcctctttctcaatcccatgttaaaattcttggaatgctcttgagtcttattgrtctgatcccctctatattttctgtagaattatgtaatattactacaagtaccatttgggtgaaaggaactctttgatcttcaaagtagtgaaatgattctaagtatggataagagtggtgaatatagagacctaggaaccagaatttctgttacttatgtttattcaagttaatatttacagtggcctccccttatccacagttttgctttcccccatttgagttacccatggtcaaccatggtccaaaaat

SEQ ID NO: 34768 - DNA, 1300 bp, Homo sapiens
tgcatagcttgaggaaacagtgttaccagcataaaataacccagggtgtgcttcttgcaccagtcccaccaaatgctcacatagatttttttcaacgtggattaaaccaacatctcaggagatctagatgaacaaaactaagctagtcaatgacagaaataagaacaaggaggagctgtttcccagagaaatgctgttttaacatagctcagcgggcctcaaaatgagaaaaacatcacagtttgtgtgaaataggtcggtgttgccaaccccacttctttgggaaggagactgttccccgacattcctggcccacttcctagctgtgcctccagggcagtcaccctaagtggcttctctgacttctattcccttactggtgaaacagggataayagttcctcctcctcctgattcttgtgaggattaaatatttaaactcatggaaagcattcaggacagtgccaggcacaaaaataccaagtattattatgattatgagagtacatcataatgaagacattatgtgcgtccttcctactttatcagctcctctagctggcagtgctctgcaggccctccagtcccttgtactgacattttactgtacagtaaagtctttgagactgcttgtgaagtctcaaagtctggatattacgacctaagacttggtagtaaactgaggccaggactgacacctggaagagccagcccaatggatggccctagagtgtgctctcctgcccctgtcggggttggggctcagctagatgagcatgcttaaacacagtacagacccagtttagaagggcatgaaagcaatttggaatgtgaagaccaacatgtcttaaacattttaaatagaaaacaatgccctgcacttaaaaacgtgaatgttgtttagtaaaacttttaattcagttattaatatatagtatctgggtatatacatttcttattacatgtcactgtaaaaaaacaaaccactaccagtaggtgggcctctaaaggcccatggtttcccatggttctgtcagaaaaggaggcatgcagtcctccaacgcaggaagtagcacacagggtggaaggagaaaacagggaagagcaggattatggttttgtttttgttttttgagtcacagaataccaactttaaatagttacagaaatagttattattttttaaagtgctcattacccttctaaagcagtggtcccaaatgtttttggcatcaaggactggtttcgtggaagacaatttttccacggataaggggaatggtttctgaatgattcaaatg

SEQ ID NO: 34769 - DNA, 1300 bp, Homo sapiens
tgcatagcttgaggaaacagtgttaccagcataaaataacccagggtgtgcttcttgcaccagtcccaccaaatgctcacatagatttttttcaacgtggattaaaccaacatctcaggagatctagatgaacaaaactaagctagtcaatgacagaaataagaacaaggaggagctgtttcccagagaaatgctgttttaacatagctcagcgggcctcaaaatgagaaaaacatcacagtttgtgtgaaataggtcggtgttgccaaccccacttctttgggaaggagactgttccccgacattcctggcccacttcctagctgtgcctccagggcagtcaccctaagtggcttctctgacttctattcccttactggtgaaacagggataacagttcctcctcctcctgattcttgtgaggattaaatatttaaactcatggaaagcattcaggacagtgccaggcacaaaaawaccaagtattattatgattatgagagtacatcataatgaagacattatgtgcgtccttcctactttatcagctcctctagctggcagtgctctgcaggccctccagtcccttgtactgacattttactgtacagtaaagtctttgagactgcttgtgaagtctcaaagtctggatattacgacctaagacttggtagtaaactgaggccaggactgacacctggaagagccagcccaatggatggccctagagtgtgctctcctgcccctgtcggggttggggctcagctagatgagcatgcttaaacacagtacagacccagtttagaagggcatgaaagcaatttggaatgtgaagaccaacatgtcttaaacattttaaatagaaaacaatgccctgcacttaaaaacgtgaatgttgtttagtaaaacttttaattcagttattaatatatagtatctgggtatatacatttcttattacatgtcactgtaaaaaaacaaaccactaccagtaggtgggcctctaaaggcccatggtttcccatggttctgtcagaaaaggaggcatgcagtcctccaacgcaggaagtagcacacagggtggaaggagaaaacagggaagagcaggattatggttttgtttttgttttttgagtcacagaataccaactttaaatagttacagaaatagttattattttttaaagtgctcattacccttctaaagcagtggtcccaaatgtttttggcatcaaggactggtttcgtggaagacaatttttccacggataaggggaatggtttctgaatgattcaaatg

SEQ ID NO: 34770 - DNA, 1300 bp, Homo sapiens
tgcatagcttgaggaaacagtgttaccagcataaaataacccagggtgtgcttcttgcaccagtcccaccaaatgctcacatagatttttttcaacgtggattaaaccaacatctcaggagatctagatgaacaaaactaagctagtcaatgacagaaataagaacaaggaggagctgtttcccagagaaatgctgttttaacatagctcagcgggcctcaaaatgagaaaaacatcacagtttgtgtgaaataggtcggtgttgccaaccccacttctttgggaaggagactgttccccgacattcctggcccacttcctagctgtgcctccagggcagtcaccctaagtggcttctctgacttctattcccttactggtgaaacagggataacagttcctcctcctcctgattcttgtgaggattaaatatttaaactcatggaaagcattcaggacagtgccaggcacaaaaataccaagtattattatgattatgagagtacatcataatgaagacattatgtgcgtccttcctactttatcagctcctctagctggcagtgctctgcaggccctccagtcccttgtactgacattttactgtacagtaaagtctttgagactgcttgtgaagtctcaaagtctggatattacgacctaagacttggtagtaaactgaggccaggactgacacctggaagagccagcccaatggatggccctagagtgtgctctcctgcccctgtcggggttggggctcagctagatgagcatgcttaaacacagtacagacccagtttagaagggcatgaaagcaatttggaatgtgaagaccaacatgtcttaaacattttaaatagaaaacaatgccctgcacttaaaaacgtgaatgttgtttagtaaaacttttaattcagttattaatatatagtatctgggtatatacatttcttattacatgtcactgtaaaaaaacaaaccactaccagtaggtgggcctctaaaggcccatggtttcccatggttctgtcagaaaaggaggcatgcagtcctccaacgcaggaagtagcacacagggtggaaggagaaaacagggaagagcaggattatsgttttgtttttgttttttgagtcacagaataccaactttaaatagttacagaaatagttattattttttaaagtgctcattacccttctaaagcagtggtcccaaatgtttttggcatcaaggactggtttcgtggaagacaatttttccacggataaggggaatggtttctgaatgattcaaatg

SEQ ID NO: 34771 - DNA, 695 bp, Homo sapiens
accccatttcccaattggctctcctgaatgtcggtgggaagtaaaatgctccagaactgaggttgttggactttggagtgacccagacctgagcttatagctgtgggacttttgataaatacattctttgacctgtgttcttgcctgtaaagtggggatattatggggtggaggggggaggacctatggtgasgattaaatgagagaaggcattaatgtccacatcctagcgcctaatgggaagttctccctggggagcaagtgtggatgcccgctgggaccagacaggggctgggtgattataaggcaagagtggaggatggaggctgtggagagccaagtatgtcagctctagctgcctgtcaccatgtaggactaggtatcatggggttatccagtttaataagagaaggtggagatctcgccttttttcagtgcaattcttttatttttatacattgccgatttgtttgaatcgaagtccgccatctgattttgccagtttgcaacttctcgtaagcactcatcaaaaggtgttttatttcaggtcctcagtccttcatccgcaatcctgaaattcaaaaaaactcaaaaagtttttataactgatgaggcagcagaacttgacctgaagggagaaaaggctagtgacagtcctcattgttgttttgttgacgtttatcctatgtagggtt

SEQ ID NO: 34772 - DNA, 695 bp, Homo sapiens
accccatttcccaattggctctcctgaatgtcggtgggaagtaaaatgctccagaactgaggttgttggactttggagtgacccagacctgagcttatagctgtgggacttttgataaatacattctttgacctgtgttcttgcctgtaaagtggggatattatggggtggaggggggaggacctatggtgacgattaaatgagagaaggcattaatgtccacatcctagcgcctaatgggaagttctccctggggagcaagtgtggatgcccgctgggaccagacasgggctgggtgattataaggcaagagtggaggatggaggctgtggagagccaagtatgtcagctctagctgcctgtcaccatgtaggactaggtatcatggggttatccagtttaataagagaaggtggagatctcgccttttttcagtgcaattcttttatttttatacattgccgatttgtttgaatcgaagtccgccatctgattttgccagtttgcaacttctcgtaagcactcatcaaaaggtgttttatttcaggtcctcagtccttcatccgcaatcctgaaattcaaaaaaactcaaaaagtttttataactgatgaggcagcagaacttgacctgaagggagaaaaggctagtgacagtcctcattgttgttttgttgacgtttatcctatgtagggtt

SEQ ID NO: 34773 - DNA, 1152 bp, Homo sapiens
tatggcactttacatccatccatcctttaatcttccagagtatccttagtgtggacagggtatggctcctagcaacgatccctgcatctgctttgtcatccccaagcaccttgtaaggactggatcatgtagttaaaagagtcctgtgtgtgtgtccaagggcagcgtgcgtccaggcagtgagcaaaccagggctgagttctcactctggggtgttggggcaagagctsgttggttgtcacgcccctagtgctagagactgcagggtggaggggaggagggcagttgtaatgccaggacggggacagcaccatggagagatagcaaagctatgtcagcagctgggcagcactgggcatcagctggcgacgtgggcaggaaggtggaggggtcacagttctgctggggcgcttccttatcctttcattcctaggagaagatggccagaggagttggaccttggagaattagaaaaaggagtagttgctaagtcatagccttggcatgaagtaatggtgaacagagggagtgtgtttatcctttgtttagacgtccagtgtgagggcttagggatggcctcgctctttagtggttgagctccctgacttctggggtctgcataggacctcatgtgtgcaggatggtctttgcagggtggtgggtctctgcaggacagcatgggcccctcattggcctctactccatacctgtctgttggggatattctatctgggagacagagaggtggcccctcagagaacagtgtacattgctaattggtcagaattgcaccattgccagacccattggtaaacgaaggtagcgtgtctgtttaaaatgccattaacactgcttctccttaacgtcctgggcaaccttccacatgccacagcaccctcaaaagaagttcccagctttaactgttgaaccccaccctgctaaattttggagtttgtgacttgacaagattgcccaagactcttgctttcccccagtctaggtttaacttaaccaggaaatttactgttaatatttaaatcatataccatctttgtgaactccaatattacctaacgttgtggctgactgacaccgtacaatgaggaaaattaagtgcctaagaattatctccaactaatgatatatttatgc

SEQ ID NO: 34774 - DNA, 1152 bp, Homo sapiens
tatggcactttacatccatccatcctttaatcttccagagtatccttagtgtggacagggtatggctcctagcaacgatccctgcatctgctttgtcatccccaagcaccttgtaaggactggatcatgtagttaaaagagtcctgtgtgtgtgtccaagggcagcgtgcgtccaggcagtgagcaaaccagggctgagttctcactctggggtgttggggcaagagctggttggttgtcacgcccctagtgctagagactgcagggtggaggggaggagggcagttgtaatgccaggacggggacagcaccatggagagakagcaaagctatgtcagcagctgggcagcactgggcatcagctggcgacgtgggcaggaaggtggaggggtcacagttctgctggggcgcttccttatcctttcattcctaggagaagatggccagaggagttggaccttggagaattagaaaaaggagtagttgctaagtcatagccttggcatgaagtaatggtgaacagagggagtgtgtttatcctttgtttagacgtccagtgtgagggcttagggatggcctcgctctttagtggttgagctccctgacttctggggtctgcataggacctcatgtgtgcaggatggtctttgcagggtggtgggtctctgcaggacagcatgggcccctcattggcctctactccatacctgtctgttggggatattctatctgggagacagagaggtggcccctcagagaacagtgtacattgctaattggtcagaattgcaccattgccagacccattggtaaacgaaggtagcgtgtctgtttaaaatgccattaacactgcttctccttaacgtcctgggcaaccttccacatgccacagcaccctcaaaagaagttcccagctttaactgttgaaccccaccctgctaaattttggagtttgtgacttgacaagattgcccaagactcttgctttcccccagtctaggtttaacttaaccaggaaatttactgttaatatttaaatcatataccatctttgtgaactccaatattacctaacgttgtggctgactgacaccgtacaatgaggaaaattaagtgcctaagaattatctccaactaatgatatatttatgc

SEQ ID NO: 34775 - DNA, 1152 bp, Homo sapiens
tatggcactttacatccatccatcctttaatcttccagagtatccttagtgtggacagggtatggctcctagcaacgatccctgcatctgctttgtcatccccaagcaccttgtaaggactggatcatgtagttaaaagagtcctgtgtgtgtgtccaagggcagcgtgcgtccaggcagtgagcaaaccagggctgagttctcactctggggtgttggggcaagagctggttggttgtcacgcccctagtgctagagactgcagggtggaggggaggagggcagttgtaatgccaggacggggacagcaccatggagagatagcaaagctatgtcagcagctgggcagcactgggcatcagctggcgacgtgggcaggaaggtggaggggtcacagttctgctggggcgcttccttatcctttcattcctaggagaagatggccagaggagttggaccttggagaattagaaaaaggagtagttgctaagtcatagccttggcatgaagtaatggtgaacagagggagtgtgtttatcctttgtttagacgtccagtgtgagggcttagggatggcctcgctctttagtggttgagctccctgacttctggggtctgcataggacctcatgtgtgcaggatggtctttgcagggtggtgggtctctgcaggacagcatgggcccctcattggcctctactccmtacctgtctgttggggatattctatctgggagacagagaggtggcccctcagagaacagtgtacattgctaattggtcagaattgcaccattgccagacccattggtaaacgaaggtagcgtgtctgtttaaaatgccattaacactgcttctccttaacgtcctgggcaaccttccacatgccacagcaccctcaaaagaagttcccagctttaactgttgaaccccaccctgctaaattttggagtttgtgacttgacaagattgcccaagactcttgctttcccccagtctaggtttaacttaaccaggaaatttactgttaatatttaaatcatataccatctttgtgaactccaatattacctaacgttgtggctgactgacaccgtacaatgaggaaaattaagtgcctaagaattatctccaactaatgatatatttatgc

SEQ ID NO: 34776 - DNA, 541 bp, Homo sapiens
ttctcattttcttagattgacataatcagcaattttgaacagtgtgtaaaatcaatgaacaaggtcctgccgcgatagatgccgtataggattccagttaatttctgaaagaaatttgctaaatttaaccctactgtggcacagtgaatcgtacgaaggacactacaccatctgttccctgtaagtttagataaataaatgttttttatagtgtcacgaaagctaattttacaactgaatgagctttataaaacttgtaaacattgtataaacttatttcgaggaggtagaccagctacaaatgactgacaatacatgaacagattctggaggcttaaacaggtagataaagttgttctcaccaattattccccacacacttctggttgaattaggtaggcaccttgtttttgctagtgcactggmgagatccattctttgcctatatagaaacttacaggtatcttgggaattctgcttactcagttttcaaattcctgtgtttcttttggtcttgttgaaatcatactgttaggaatat

SEQ ID NO: 34777 - DNA, 546 bp, Homo sapiens
tgagcgccgtggcttatgcctgtaatcccagcactttgggaggctgaggtgggcggatcacgaggtcaggagttcgagaccctcctggccaatgtgatgaaaccctgtctctactaaaaatacaaaaaattagctaggtgtggtggcgtgcacctgtagtcycagctacttgggaggctgaggcaggagaatcgcttgaactcgtgaggtggaggttgcagtgagccaagatcgtgccactacactccagcctggtgacagagcgagactctgtcaaaaaaaaaaaaaaaaaaaaaagcctggtcagtacttacacacattaacaatacttgttatttacaaataccatctcccatatgagtagccaggattcaaatttagagactctgcctctagagcctgtatgtttaacctttttatttcatctgccttagtgtccccattagaaaaagaggataatagtatctacctgtgtactagttaacctattactgcataacaaattaccccaaaacttaattagaacagtaaacacttactatttca

SEQ ID NO: 34778 - DNA, 1201 bp, Homo sapiens
caggtagtattgcccccaatggggtgaaaattggttcttgagaactcaaaaaaatacacagtatatctatgatattaaaatttcatagaggggttgattaagaaaaacatgtcttaaccggctccttaggagagcaatgatttttttaatggttgaaaaacatagatgaatataaagaacttaacatagcatgtgacacatagtaggtattcaatacatgagaawtgtagttgctattatagtcattagtcgttattatgattgttctacaaactcattagagaaatcatccagacccatcatagttagggcagagaaggttgtgctgtgccaagttcacagatgaagctagcttttggcggattttgcctgagctagaggtcagaactgcccagggttctagaaaacagaaagattcttgcacactgctgggatgagcagaaacatttgtgtacacagtgttaaaataaaatttaaaaagtggggcatggcatgaatgtttaggctgtgttcagactttcacaatgcctgctatcatcctctggggaaaggacatgattaaggcatgaatgtagggttggggaaaatgctgggcaacttctcatacatgctgcatgtgctctgcaggtttgtaaaaacctaaatatctaatgaatattgtttttgtttttggtttttttttttttttttttaggcagagtcttgctctgtcaccaggctggagtgcagtggcacaatcttggctcactacaacctccccttgccgggttcaagcgattttcctgcctcagcctcccgagtagctgggactacaggcgcccaccaccacgtctggctaatttttagtattttagtagagatggggtttcagcatgttggcaaggatggtctccatctcctgacctcatgatccgcccgccttggcctcccaaagtgctgggattacaggcgtgagccaccgtgcctggcccccaatgattattcttaaaacctatgtttgtatgactctcagtgtacaaatgtacacttatttaagtgtaaattaattaagtgtaattaaataaattttaaaatgtaaattatcaacaattgtggaaagcagtgtagtgattcctcaaagaactaaaaacagaactaccattcgacccagcaatcccactcctgggtatatacccaaaggactgtaaatcgttttaccata

SEQ ID NO: 34779 - DNA, 1201 bp, Homo sapiens
caggtagtattgcccccaatggggtgaaaattggttcttgagaactcaaaaaaatacacagtatatctatgatattaaaatttcatagaggggttgattaagaaaaacatgtcttaaccggctccttaggagagcaatgatttttttaatggttgaaaaacatagatgaatataaagaacttaacatagcatgtgacacatagtaggtattcaatacatgagaaatgtagttgctattatagtcattagtcgttattatgattgttctacaaactcattagagaaatcatccagacccatcatagttagggcagagaaggttgtgctgtgccaagttcacagatgaagctagcttttggcggattttgcctgagctagaggtcagaactgcccagggttctagaaaacagaaagattcttgcacactgctgggatgagcagaaacatttgtgtacacagtgttaaaataaaatttaaaaagtggggcatggcatgaatgtttaggctgtgttcagactttcacaatgcctgctatcatcctctggggaaaggacatgattaaggcatgaatgtagggttggggaaaatgctgggcaacttctcatacatgctgcatgtgctctgcaggtttgtaaaaacctaaatatctaatgaatattgtttttgtttttggtttttttttttttttttttaggcagagtcttgctctgtcaccaggctggagtgcagtggcacaatcttggctcactacaacctccccttgccgggttcaagcgattttcctgcctcagcctcccgagtagctgggactacaggcgcccaccaccacgtctggctaatttttagtattttagtagagatggggtttcagcatgttggcaaggatggtctccatctcctgacctcatgatccgcccgccttggcctcccaaagtgctgggattacaggcgtgagccaccgtgcctggcccccaatgattattcttaaaacctatgtttgtatgactctcagtgtacaaatgtacacttatttaagtgtaaattaattaartgtaattaaataaattttaaaatgtaaattatcaacaattgtggaaagcagtgtagtgattcctcaaagaactaaaaacagaactaccattcgacccagcaatcccactcctgggtatatacccaaaggactgtaaatcgttttaccata

SEQ ID NO: 34780 - DNA, 550 bp, Homo sapiens
tggcctcaggcaatcctcccacctcagcttcctgaatagctgggaccacaggtgtatgacaccatgcccagttaatttttaatttttttgtagggatgtggtcttgctatgttgcccaggctggcctcaagcaatcctcccacctctgcctcacaaagcattgggattgcaggcatgagccttcatgcctgcccaaaaaaacctctgtcaaggcaaaatgttattctaatataatgagttactgttgaggaatatcatgctccatttaattaaggataactcaaaaatcagttcaggaattttttttaatgccatctaatacaagtttaataataaaatagtttaaatgagaaaagaatgtaattaattcsttcagagatgcaaataacttttttagctgagaaaataaacaactattggcacttacagtgtattattatagtatagaaggacattgaaagaaaatgtgtgatgggtgaaaaataggctaggatgggagagaaggagaggacagtaagaaagtcagagatacacagatgggcactgcagg

SEQ ID NO: 34781 - DNA, 556 bp, Homo sapiens
caggctgatataacagagtacctcagacttacacaacagaaatgggtggcttgaacaacagaaatctatttcccacagttgtggaggctagaattcctagatcagggtgccagcatggttgggttctggtgaggaccctcttcatagtttgtagttggctgtcttcctcstgtgtcctcacatggcagggagcagagaaaaggcaagcaggctgtctggtgtctcttcttagaaggggactaacctatcacaaaggcttcacccttatgacctaattacctcctaaaggccccatctccaaataccatcacaactggggcttacagtttcaacacatacattttggtgggacacaaacattcaattaatagcacagccttcacgtactcctatgggttgatgtagcaaggatgagtaattatctgtggttcagaagtcacagaagtcaggtaggtatgggctatcttgattgctgaccaagaagatttcttgtcaggaaaggattctcaacaagaagttttgctgtgacctgccaaggtgtggcagaggtcgagca

SEQ ID NO: 34782 - DNA, 627 bp, Homo sapiens
atgatcaaccccactgttcagcctttttccagcctgtgggcagacagaccaggccccagaaagggctctgaacatggctggtagaaaacatgtgattcctcccatgtcacttaaaggtactggaattgtaggatctagggcattatagcatttgggtctcatggtccaggagccccagatctctgccccaccaccccctcctcccaggtctctcagggactgggcactaatgggtggaccccggaggtgaccggagctgctcatcagagggaagcctgccaccactcagtcgtgtctgtgtgacctgggctatatcaccttccctcactctgcctggggtgtcctttcaccccgggcttggggtaggacttatctgagcatccaggtggctctgggtaggagaaggctctgccttggctgcatttgcagagagcagaggccctggttttatagaggggtattatggtgtaagaacacaaaatagcagagactctttattccagaaaattaagtcatcctttttccttgagcatctcacttctgaccaagaaaggctggtggtagagactgggcccggttcagggctggctctgytgacccaagaggcaatgacacagatcttgtcca

SEQ ID NO: 34783 - DNA, 527 bp, Homo sapiens
atttatttttgagacagagtcttgctttgttgcccaggctagagtacagtagcgctatctcagctcactgcaacctctgcctctcaggttcagttcaagtgattctcctgtctcagcttcccgagcagctgggattgcaggcgcccgccaccacgctcggctaatttttgtatttttagtagagacagggtttcattgtgttggccaggctggtctcgaactccgacctcaagtgatccacccaccttggtctcccaaagtgctgggattacaggtgtgagccactgtgcccagtcccaaaccatatttgaattagagctgaagggctccaggcccaaatgactgttgaggggcaggaccagctgcgtcactgtcactctcctttccagagaaaagctattctggtccaattcctagctgcgtgcctttgggaaaactctttcatctctctgtgcctcagtttcttcatctgtaaaattttttttttttttgagacagmatcttgctcttgttgccaaggctggagt

SEQ ID NO: 34784 - DNA, 1309 bp, Homo sapiens
gcctttttctgcaggtctccctcacctgtgaaatggttaagactctcaatttgaccacaccaattgagtcatgaaatgtcgtctgatttgctgtaagaagctgaagtgacagtgatgtcatttgactgtgtgagaccaggaggagacctcacaagtgcaatctataaattgcctcctgtccccgatcccctcacctgcccaccacacctggcattacattagggcattcagggctggcagacacactttgagtgtcagtggctgctggtgggatgacagcatgactgcagagaccccactctaggcagtcagaagtttgtccctgcaggcctggtatctctagtgctaatgaggtcagcttggcctggcctgctttgtcaccacccaagtgctgtgcccgggaccctgggcagctggagagcagagatggtgtcatggcaacaatatcagtctagaagtcaggaaaacctggcttctcttcctacctccctctgtccttggaccagtcacgcctccctacccatcagttgatctttgtggtcccttccaggtgtgatatttctgtcattccactgactctggaaactctggcaagtcactcagccttggacctcagttttcccattgtaaaatgatgaggctggatgtggtctcctttccaaaagtctgtttctgccttggaaaggcatttttctgcctctgaaaacaggagttctagcatctggccatgagtggagagaaaggtggtctaaagatctgaagagtccctgttcaggcctcaaaaatgaaagcccatttttcccagcttcacctttgcagtgtggaattcagccaccactctgccacttagcagcatctctgagcctcagtttcctcatgtataaaaggggaactaagctgggcgcagtggctcacgcctgtaatcccagcactttgggaggctgaggcagggtggatcgcctgaagtcaggagttttgataccagcctggccaacatggtgaaaccccgtctctactaaaaatacaaaaaattagctgggcatggtggcggctgcctgtaatcccagctactctggaggccaaggcaggaggatcgcttgaacccaggaggcggaggttgcagtgagccaagattgcgccattgcactccagcctgggcaacaagagtgaaattccgtctctaaataaataaataaawaaaaataaaatgggaactaatagtatccagttatagtgctattaatgtgattattacataaataaatgcacataaaagtttgtatacacaggaagtgttcaatgagtgaca

SEQ ID NO: 34785 - DNA, 1133 bp, Homo sapiens
cccttctcagaaggctcaaagagcaaacagggaaggtaagtcactttaaacaaaaataaataacagccttgaggaattagatttaaagccatctttaagaggagacatgcataggagaagttttattcatttcagtgcaagtctacaatagtgatatgactctgcagccagaaagctttggttcaaatactagtctaccatttactagctatgtgaccttggacaaattattttatctttgaatgtttaattttcctcatttggaaaacagagatgacaatagtatctactctacccctatgaggttattataaggattaaatggaattatgacaggtaacacccttaacagtgtctgtcacatagtaggccctcaatcagtattagctgttacggctgtgatcattattatctaaggaatggccatgggttcatgagtcctagtcaatcattttccaagtctagaacatggcaaagtatcacatatatatatayagagagagagagagagagcaaacaatacaacagacctgctacaatagacttgttatagagataaaacttgggtacagactctgccattcgggagcttgaaggctgttggtataatatagcagacagataattatcaaatagagaagcggtaagtccaaagataaattatacttgcaatagccaagatgtggaatcaacttaagcaaccatcaatggatgaatgaataaataaaatgtagtatatatacacaatggaatactagttggccataaaaaaagggaaatcctgccatttgcaacaacacagatgaacctgaaggacattatattaagtgaaacaagccaggcatggaaagacaaatagtgtacaaccttactaatatgtggaatctaaaaaagttgatcttacagaagtagagagaagaatgatagttaccagaggctggggcagttgagggaggggttaggaagatgttggccaaaggatataaaattacagctaggtagaaggaataagtttaatagatcaattgcacggtgactacaccatggtgactatagataaaatactgtatttctgaaaaatgttaagagaggacattaagtgctctcactataaaaaatgataatgtgagata

SEQ ID NO: 34786 - DNA, 1133 bp, Homo sapiens
cccttctcagaaggctcaaagagcaaacagggaaggtaagtcactttaaacaaaaataaataacagccttgaggaattagatttaaagccatctttaagaggagacatgcataggagaagttttattcatttcagtgcaagtctacaatagtgatatgactctgcagccagaaagctttggttcaaatactagtctaccatttactagctatgtgaccttggacaaattattttatctttgaatgtttaattttcctcatttggaaaacagagatgacaatagtatctactctacccctatgaggttattataaggattaaatggaattatgacaggtaacacccttaacagtgtctgtcacatagtaggccctcaatcagtattagctgttacggctgtgatcattattatctaaggaatggccatgggttcatgagtcctagtcaatcattttccaagtctagaacatggcaaagtatcacatatatatatatakagagagagagagagagcaaacaatacaacagacctgctacaatagacttgttatagagataaaacttgggtacagactctgccattcgggagcttgaaggctgttggtataatatagcagacagataattatcaaatagagaagcggtaagtccaaagataaattatacttgcaatagccaagatgtggaatcaacttaagcaaccatcaatggatgaatgaataaataaaatgtagtatatatacacaatggaatactagttggccataaaaaaagggaaatcctgccatttgcaacaacacagatgaacctgaaggacattatattaagtgaaacaagccaggcatggaaagacaaatagtgtacaaccttactaatatgtggaatctaaaaaagttgatcttacagaagtagagagaagaatgatagttaccagaggctggggcagttgagggaggggttaggaagatgttggccaaaggatataaaattacagctaggtagaaggaataagtttaatagatcaattgcacggtgactacaccatggtgactatagataaaatactgtatttctgaaaaatgttaagagaggacattaagtgctctcactataaaaaatgataatgtgagata

SEQ ID NO: 34787 - DNA, 1133 bp, Homo sapiens
cccttctcagaaggctcaaagagcaaacagggaaggtaagtcactttaaacaaaaataaataacagccttgaggaattagatttaaagccatctttaagaggagacatgcataggagaagttttattcatttcagtgcaagtctacaatagtgatatgactctgcagccagaaagctttggttcaaatactagtctaccatttactagctatgtgaccttggacaaattattttatctttgaatgtttaattttcctcatttggaaaacagagatgacaatagtatctactctacccctatgaggttattataaggattaaatggaattatgacaggtaacacccttaacagtgtctgtcacatagtaggccctcaatcagtattagctgttacggctgtgatcattattatctaaggaatggccatgggttcatgagtcctagtcaatcattttccaagtctagaacatggcaaagtatcacatatatatatatagagagagagagagagagcaaacaatacaacagacctgctacaatagacttgttatagagataaaacttgggtacagactctgccattcgggagcttgaaggctgttggtataatatagcagacagataattatcaaatagagaagyggtaagtccaaagataaattatacttgcaatagccaagatgtggaatcaacttaagcaaccatcaatggatgaatgaataaataaaatgtagtatatatacacaatggaatactagttggccataaaaaaagggaaatcctgccatttgcaacaacacagatgaacctgaaggacattatattaagtgaaacaagccaggcatggaaagacaaatagtgtacaaccttactaatatgtggaatctaaaaaagttgatcttacagaagtagagagaagaatgatagttaccagaggctggggcagttgagggaggggttaggaagatgttggccaaaggatataaaattacagctaggtagaaggaataagtttaatagatcaattgcacggtgactacaccatggtgactatagataaaatactgtatttctgaaaaatgttaagagaggacattaagtgctctcactataaaaaatgataatgtgagata

SEQ ID NO: 34788 - DNA, 1893 bp, Homo sapiens
agggtttgtaaaatgttttcttggttcttcccaacatatgataaacatgtattagcttttagatgtaagaggcactatcaagacatagaaggattggcccactttatgcaatgacttaaaactggaaaaatgtaattgttctgcattgctttatatttagtaatattccttgtcactgcctgattcattcattcatttaaccaagatttgagtgtctactctgtgctaggcaatgtgctgggttgcttgttttacagtggtaccactgcgttgttattactaaaaataggaaaaaaatcacattattaagacaaaaagaacataaaacttatttatggtgatattttttaaatggaattatgtacatccaagtttttttttttaatggcaatttttaaaaatatctgagcagccctctctgggcctccttttcccaggaatatgtattaccttcattttctatacccctgatagctacacttttaattgcggtacaaataaattacatgaataatagcagagaaatgtcctagaagtcccaaagtatggtgaagagatgatttcaactaagataatgactctacattttctttataccctctttctgcatgtcagtcattagcaacaagtcccaacatctagtggagaaaaagcagcatgcatcatagtatatcttgaggaacaccacttctaaagacttacatttatgtgatggggttaagagtcttacggtcaataagtgtgggaatgtcaggttaaacaaactaaacatatttcattatcacaaggctgctcaaagtctttattgcatcatgaaacttgtggagctccaagaaggtggcctttggaaacttactggaccatggaaccctagtttagaagagcaaactgagagctaaaatagtgtttagtytaatatatctagaaagctctgcattgggagatttccatttacagctacaagtgacatgaatgttttagtaggctgccgatcctttaatgtgagttgagcagacacagaataaatatatgcccctcaaatgtggaggagagaccattcacaatgtggtaagcgccatgaaaacaaggactgcatttggttctggtttctactatagctccaacatctagcactacctagcacatagtagacacttgatcaaatttgtttcataaatgtacaaaggaatgaattttatagaaatgacagaaggctcatggagattttggaatgagtggccacactgtttttctgtctttaatgattttaatttccatatctagactttaagacggtacttaatttattttcttagaacaaaggagtaagaattattccaacagccttttgcatcacgaccctgtattaatctaataaaagaaaggttacactcctatttgttgatgaacagcacattaatgagatcttcttgaaataatcccatctctattatggaggcaaaattacattttccagcataattactgtgtcagtcaagctcccaaattttgatattaattttttcccttgcaaaggcaatattaacttattagtttgtcaaacctctggaaaatcaagggtaacctcatagttttaaatagtgattatcaacctctactgctctgtttgtttgttttaggatggagtcttgcttcactggccaggctggagtgcagtggcacgatctcggctcactgcaatcccgcctcgcggttcaagcaattatggtgcctcagcctcctgagtaggtgggattacaggtgtgtgcaaccatgcctggctaatttttgtatttttagtagagacggggttttgccatgttggccaggctggtctggaactcctggcctcaatcaattcacctgcctaggcctctcaaagtgctgggatta

SEQ ID NO: 34789 - DNA, 1246 bp, Homo sapiens
ttagtcacttaatttcttataacatcactatcttcatatacacaaacaaaaatgggattagaataactgtcctcacagagttgttttaaaactttgaaattatatatgtagatctagctcctagttaatgttcaatacacaggcaggtattactgctggataactattaaccctggacaatcctgaaaggtagcgagaagttggcagcttagtgagttttaactagtctttgtatgagagacaataatacctgtacaggtgggagaaaatggcagctgtcccaaagtatctagaccaagatgcatctagcagctgagaaatgcctctctccctgcttttgctgcaactctgtcaggttctccctctttgcactgtttttctcatgctcaatctcacttccctctaaatagaaatgatgaaaccagagggtaagacatgtactcaccaagaaaacaaaatgcctttccattttataaccacattgcgaacctacagggaacaactggtagtggtgctaagaaggaatgaggcatttatataagaaaatgtttttcttcgctgaactccctgcttatagacaagaaagcatttattttatgaacctgcaaccattcatgtttaggtcctgggtccaaacaagtataggcacatgaatttgcctcatggtttgtaaaacctcaccatttagggtactccagttgtaactcagcctttggctacatttcttaaagttctgaagccacctccctacagttctaattttaagaaaatctgcactcatcgactctgaacttcacatcatctaggaaagaaaacaaacaaacaaaaaactccaccagcatatgctgccagcatgagttacagatgcctgctgtttcagcttctggataaagaggtaactgcagttcagtgacatagagctmcaaaaaaaaaaaaaaaaaaaaaaaaagaaggacccccggaagctgctgggaaaatagaattactgacctcttgcctgcctctcactgggaaaaaatgtgacaagatgcttaagaccagcaggtttctcctaaaatgaaaaagacaccatcaccaccaattttgctgtggctgtccacaggtgagggaggcataaccaaggacatcaaatttagttattcttaaaacatagactgaagttgtgtgacttcctaaaatccactctgcttagtgctaatccaaaatagctatgaagacaaataaggaagaagagaattaggctgca

SEQ ID NO: 34790 - DNA, 523 bp, Homo sapiens
tcgtatttctttgtaactctggacttcatttaatggttgattgggagttccaggtaaattaatctttcacttgactgctttatgggagaaagcataaatgaagcagaaatgctgtattattgagcacaacatttgtgatagaaagcaaacccattattgagagatgcttcctctctgggctattataaaaatcccacgaaaaaggcagcctatccaaataagaaacayactcttaacttgtgtttttgacattgcttcctgtcaaatgttttgtttaacctcattttatcagcaaatacccttcttatcattacagcatttgttctcaaatattttagcatacaagaattgtcaggagtctccattttaacaagcatttccagtttacaactttaactagacatttctattcaagacagcattggtatctaccacaatttttttgaagttttttaatctttaattcgtgtgagtacatagtagatctgagctttttaagctaaaacgaagccaggcttcatgc

SEQ ID NO: 34791 - DNA, 576 bp, Homo sapiens
gatggaacaatttcatccccaaaycatcctcactacaccctcctgtccatggaaaaattgtctccacaaaacaggtccctggtgccagaaagttagggtttgctgctctagaacagcagagtacgtttcataatcattcgacacaagtgtggccaacctaccctacaactccaagtctttcctagtgccttcctagtgccactgattagtgcaggaattcaagttttaaaaatcctatggttatccagacaccataaaaggggctttcaaagtttcaacatacatgtttgtaagccaaaagagcatagggtcaatctggtttattctgctggcttctattaaaatatataaccatatttctatagtacttacagctatcttgttgagaaaacacagacaccacagtctaaagtggttttacatattcatttctgtttaaaatggtctgaagaattcagggaaaactaaatttagcctctttacacagaagaatattaaaacagaaggctctaaaccagcaagaaaagtattttaattagcatttattagaggaggaaaatgataagtaggaaagag

SEQ ID NO: 34792 - DNA, 559 bp, Homo sapiens
gtgtcagctttctcacccaagaagaattttatcattgcctcctttccaatctttccaggctctgagatggccattactcttctgttacagtctgtaatctactttaaattactgcagtataatcaatgtgatattgtgcatataccagttggtttacactttcatgttcaggagtcatcaaggaaacgtgctataaaggaggcaagactagggtggcaaagtaacattcaatcagtaagagccacactccagaggcagcgactacaagcccttttattatctctatatcgatcaagagcagaaactttgccaatagccaataaacatcaacattagatttttattggtgaaagtagtggttcactaattagcatgatagatgtaataatgaaatttcattaggtgatgtttaagatattcaaagtatgtgcatgggtaraaatatgttggacatacccccaccactgtataaacatgtaagaatccagccaggcctgttatcatgtatcccttaggcttgaatcccgtacctcttagaaaaatggcgtctgtggcttga

SEQ ID NO: 34793 - DNA, 559 bp, Homo sapiens
gtgtcagctttctcacccaagaagaattttatcattgcctcctttccaatctttccaggctctgagatggccattactcttctgttacagtctgtaatctactttaaattactgcagtataatcaatgtgatattgtgcatataccagttggtttacactttcatgttcaggagtcatcaaggaaacgtgctataaaggaggcaagactagggtggcaaagtaacattcaatcagtaagagccacactccagaggcagcgactacaagcccttttattatctctatatcgatcaagagcagaaactttgccaatagccaataaacatcaacattagatttttattggtgaaagtagtggttcactaattagcatgatagatgtaataatgaaatttcattaggtgatgtttaagatattcaaagtatgtgcatgggtaaaaatatgttggacatacmcccaccactgtataaacatgtaagaatccagccaggcctgttatcatgtatcccttaggcttgaatcccgtacctcttagaaaaatggcgtctgtggcttga

SEQ ID NO: 34794 - DNA, 652 bp, Homo sapiens
gtattacttcctgtcaaatgcatatgtgcaaatattttctcccattctgcaacttgtctgttcattctgttgattatttcttttgctgtgcagaagcttttaaatttcattaagtctaatttgtctgcttttcttccttgtgcttttgaggacttagtcatgaattctttgcctagaccaatgtccagaagagttttccctagattatcttctaggatttttatagtttcaggtcttacatttaagactttaatccatcttgagttgatttgtgtatacagtgagggataggggtccagttttattcttctgcatatggctattcaattttcccagcaccatttattgaaaaggatgtcctttctccagtgcctctgtctaccttttaaatctaggcattcwcaggcttctgaacaggcaatcattcacaaaaccgaagcagctgtcatggtagagaagacttttctgcagggaaaaagattccctccagatgattataacatgtcaaaacccagccctagaaaaattatgatgattattgttgctatacaattttacaaacagatttcttgcctcttccttcttactgcatgtcttagttctgttttcactcaccttctgatttctccagaaacttgttcctttaattatt

SEQ ID NO: 34795 - DNA, 652 bp, Homo sapiens
gtattacttcctgtcaaatgcatatgtgcaaatattttctcccattctgcaacttgtctgttcattctgttgattatttcttttgctgtgcagaagcttttaaatttcattaagtctaatttgtctgcttttcttccttgtgcttttgaggacttagtcatgaattctttgcctagaccaatgtccagaagagttttccctagattatcttctaggatttttatagtttcaggtcttacatttaagactttaatccatcttgagttgatttgtgtatacagtgagggataggggtccagttttattcttctgcatatggctattcaattttcccagcaccatttattgaaaaggatgtcctttctccagtgcctctgtctaccttttaaatctaggcattcacaggcttctgaacaggcaakcattcacaaaaccgaagcagctgtcatggtagagaagacttttctgcagggaaaaagattccctccagatgattataacatgtcaaaacccagccctagaaaaattatgatgattattgttgctatacaattttacaaacagatttcttgcctcttccttcttactgcatgtcttagttctgttttcactcaccttctgatttctccagaaacttgttcctttaattatt

SEQ ID NO: 34796 - DNA, 727 bp, Homo sapiens
tttttttcaaaaaggccattttcaacggcaacaaaaaaaggcatttaagaataaatttgtaaaacttcatggaaagacaataaaagcctgaataaatcaagagataagctacaatcatgcatagaatgtgtcagttttgcaaagatgtccacatctcccaatttaattggatacttaaatgcaattccaatcaaattctcaatggggtttctcatcraatgtggtaagctaatagtagatttacatggctatgcaaaggatcaagaagagccataatgattttgaagaagaaaaacagatggcaagactatcaaattgtaataatttttaaaagataagacagtggtgcaagaatggacacatagatcaatgaaataggataaagagctcataaacagacccaaatacctatggagacttgatatatgacatctgacatatgacatgattactgatcagcaaggaaagaataagctaatataaaatgctgagttagttactcaaattgaaaaaagaagtcaactggattgttacctaactatatgcaaaaatcagttccagacacaatgaaaccctaaatgtgagagacaaattttaattcttctagaataaattatgggagtatatttaatatatgaatgatctcaagatagattcggatttctgaggcaagacacaaaagagggggggtgggaaggaaaaacggaaggaaagaaggaaggaagga

SEQ ID NO: 34797 - DNA, 727 bp, Homo sapiens
tttttttcaaaaaggccattttcaacggcaacaaaaaaaggcatttaagaataaatttgtaaaacttcatggaaagacaataaaagcctgaataaatcaagagataagctacaatcatgcatagaatgtgtcagttttgcaaagatgtccacatctcccaatttaattggatacttaaatgcaattccaatcaaattctcaatggggtttctcatcaaatgtggtaagctaatagtagatttacatggctatgcaaaggatcaagaagagccataatgattttgaagaagaaaaacagatggcaagactatcaaattgtaataatttttaaaagataagacagtggtgcaagaatggacacatagatcaatgaaataggataaagagctcataaacagacccaaatacctatggagacttgatatatgacatctgacatatgacatgattactgatcagcaaggaaagaataarctaatataaaatgctgagttagttactcaaattgaaaaaagaagtcaactggattgttacctaactatatgcaaaaatcagttccagacacaatgaaaccctaaatgtgagagacaaattttaattcttctagaataaattatgggagtatatttaatatatgaatgatctcaagatagattcggatttctgaggcaagacacaaaagagggggggtgggaaggaaaaacggaaggaaagaaggaaggaagga

SEQ ID NO: 34798 - DNA, 727 bp, Homo sapiens
tttttttcaaaaaggccattttcaacggcaacaaaaaaaggcatttaagaataaatttgtaaaacttcatggaaagacaataaaagcctgaataaatcaagagataagctacaatcatgcatagaatgtgtcagttttgcaaagatgtccacatctcccaatttaattggatacttaaatgcaattccaatcaaattctcaatggggtttctcatcaaatgtggtaagctaatagtagatttacatggctatgcaaaggatcaagaagagccataatgattttgaagaagaaaaacagatggcaagactatcaaattgtaataatttttaaaagataagacagtggtgcaagaatggacacatagatcaatgaaataggataaagagctcataaacagacccaaatacctatggagacttgatatatgacatctgacatatgacatgattactgatcagcaaggaaagaataagctaatataaaatgctgagttagttactcaaattgaaaaaagaagtcaactggattgttacctaactatatgcaaaaatcagttccagacacaatgaaaccctaaatgtgagagacaaattttaattcttctagaataaattatgggagtatatttaatatatkaatgatctcaagatagattcggatttctgaggcaagacacaaaagagggggggtgggaaggaaaaacggaaggaaagaaggaaggaagga

SEQ ID NO: 34799 - DNA, 727 bp, Homo sapiens
tttttttcaaaaaggccattttcaacggcaacaaaaaaaggcatttaagaataaatttgtaaaacttcatggaaagacaataaaagcctgaataaatcaagagataagctacaatcatgcatagaatgtgtcagttttgcaaagatgtccacatctcccaatttaattggatacttaaatgcaattccaatcaaattctcaatggggtttctcatcaaatgtggtaagctaatagtagatttacatggctatgcaaaggatcaagaagagccataatgattttgaagaagaaaaacagatggcaagactatcaaattgtaataatttttaaaagataagacagtggtgcaagaatggacacatagatcaatgaaataggataaagagctcataaacagacccaaatacctatggagacttgatatatgacatctgacatatgacatgattactgatcagcaaggaaagaataagctaatataaaatgctgagttagttactcaaattgaaaaaagaagtcaactggattgttacctaactatatgcaaaaatcagttccagacacaatgaaaccctaaatgtgagagacaaattttaattcttctagaataaattatgggagtatatttaatatatgaatgatctcaagatagattcggatttctgargcaagacacaaaagagggggggtgggaaggaaaaacggaaggaaagaaggaaggaagga

SEQ ID NO: 34800 - DNA, 533 bp, Homo sapiens
cttttctcaaccaatgtttatccttyttatataattttgcttataatcgtcctttcttatagtctcactgcctccattttagtttaggcccctttagcttagaatctttatcaatgccatgttccccaaatgccttaggtctcttcattactgccttcatgaccattgtctccttaaggctaacatcaagttgacaacttgatactggtatgcatacagccccatcccactggcattaagatcttccacaatctgatccctttctacctctgccgcctgatctcttttttaacttctgccagactgtaggaaatgtttgtttacaatggaaaactaaagcatacctctcaaggggttatctgattctgagtctatgggggctctatacctgtcaatgcctttgagctattttaaaattgtataaatggtagatacctgatagcaatgcaaaataattcttgtctatagacatgaaaaactgtccagtgaaggttcagtggacttccctcccccacatgaaagaagccagtttt

SEQ ID NO: 34801 - DNA, 586 bp, Homo sapiens
tgccagttaaccatggtataaactttggagacagcagcctgcagtcaattcctatgtaaacactagctttgtaaacctgagaaaggttcttaacctatttcagctgtaatttatttgtctcttaaatgggcaataataactcacaagatgttaccaggattacatgagatgacatatttaaataattagcacaaaatccagcaataaatgatggtgtcgttattgtagccccctggctattagatgcactcagacaactctggtaaacaggctcacttatttcttacaacctcagaagattcctgtattgggactctttgcagtaagtgatagcaactcaactcaaattggcttaatcaaaaaaagatagtttattcactcatgtggccaggcacagtggctcacacctgtaattccggcactttgggaggccaaggcaggaggactgcttgaggccagaagttcaagaccagccttagcaacataggagaccacgtctgtacaaaaaatttttaaaaattagctagggacygggtgcggtggctcacgcctgtaatcccaacactttgggaggccgaggtgggca

SEQ ID NO: 34802 - DNA, 528 bp, Homo sapiens
ttaagagacayggacagtctctatctttgaacagagaaataaagcctttgaaaaatattctacatgttgtactaaatatgtaacattttgattgtttctttgaaattctgccaagcaacatcagctatatagcattcctcctacgctctaccactcatctccaacccacccttaacgatttaacatttaagcctttggtaattgtaagtgctagttgttgttgttgtttttaaattgtgtgtttgtgccctagtttatggcaaggttcagaattacttttcctcttaaaaattacagtttaatgccattataaaaagtttacaatagaaaacctttaaagaagcctctttccttgctgagaacttttcttgttcatgagatggttatgaaaccttaagttcaagtttgttcagcctgtgccacatgcagcccaggaaggcttttgggattattttttttttaagcttatcagctatcattgatgttagtgtattttatgtgtggaccaagacaattattcttcttccc

SEQ ID NO: 34803 - DNA, 306 bp, Homo sapiens
atattaactaagtttttaaaattgtaaaatgggatttaaaattaccttgtcctacttaatttcattgccgtataaattggcaccagaaaaacaacttgaaacttgacggtgtagggtttaaagagttaagaatttactgatgggttttaatacattaaaaaaaattttttttttttagagatagggtcttgctgtgttgcccaggctggcctcaaacttttgagatcaagcsatcctcccccatcagcctcctgagtagctgggactacaagcatgtgccaccacactggcataaatttttttttt

SEQ ID NO: 34804 - DNA, 633 bp, Homo sapiens
ctaagaaaatattcaagggagacaaaaatgatctttttgggatgcaatcatgtcttataccctttgcttactagcattgaaggacttcctcttagccctggaatgaaactcagctgcgatgcatgcaaggacttcctttatctggccctgacacccctacagccctcagtgccttgagtctctcacccttggttctccatgtgacactcatactgaagttctttgggcccctggaatgtccctgagctctcttccccctgtgcttttgcacactcagttccctcagtctggaatgtctatcaccatctgccctacacatggccgagccccactgacctattctgtttttttttttttcaaagaagcattccatgaaccctggaccaaaataagtcccctggctgcacacatctacagcgccccaacccctgtcacctccagggttactgtgtcagactcattcactatggtaaccccagcagcgccccagagcatagcagaggtggaatcagtatttgctggayttaattttatgtatgtcttaagagttctgtgcaaactatagaagaggaagagataacttgtatttggagggaagaggtgggcttgaggaggaagtggcatggcacgagg

SEQ ID NO: 34805 - DNA, 2416 bp, Homo sapiens
  misc_feature (1)...(2416): n = A,T,C or G
atcctcccgtttctctttctcactccctgcctcattttccatacctaggcaccaagttcccctcgattccacctccagaatgtggcctcccctttcttccattcccaccacctctctcagttatttgttgcacctactcttttagcaaacgcagaaggttttcccgtcttttttctgtcctaccttccgtcacaacactagtatccaaaaagccatgatactattttccctgcctgaatactcttctgtggtccccaactgcttctacaaaattaaagccaaattattcaaccttgcaattaaaccttcccagatctgactctagtttcactttctgacacaattctacacatttgtgctttggccacaccaaattatttacaacttcctgannnnnnnnnnnnnnnnnnnnnnnnnnnnnnnnnnnnnnnnnnnnnnnnnnnnnnnnnnnnnnnnnnnnnnnnnnnnnnnnnnnnnnnnnnnnnnnnnnnnattcctactacttcctgataatcttctaatgcctctaattcacttcctcatcacaaaggtgatctcttaacaaataactaagattctatcatatctgtctctatgtccacctgtaaacccgaaaaccctgtgtcctagccagctgtcacttcaaaccattcatctaaaccattcaaatctctctgtttccaatatttgttagtctgtctcttgtacctggatattatcttctacttttcagtttctctgccacctcccctaatggtatttgtcacttgttacttcatcctcttttctccctggcccccaacaacatacttagagctgttgctgctaatctgctgtaggctgagtattcagatactcaaacttattaggaaccatatgctaagacgaagccaacactgaggctcagaaaaggaacaagtaggtggcttcagtgcagggtattaaacacacgtatctatggtgctcaactatcttttscatgtacagctgacccttgaacaatacaggcttgaactgcatgggttcactcatatgtggatttttttcaatgaatttattagaaaattatttggagatctgtgacaatttgaaaaaacgcacagatgaacagtatagcctagagatactgaaaaaattaagaaaaagttaggtatgtcaagaatgcataaaatatatgcacattttgtcatttactaccataaaacatataaaaactataaaaagttaaaacccatcaaaacgtatacacacaaactgtacatggcaccattcacaattgagtgagatgtaaacaaatatacagtattaaattacaattgtttacagattcatcatttattataaaccgtgtttctaacaaagccaaatcaccgttatttctaaaacaaattataacagaaaagatggtgaacaggaaaggatcccatggagatgtatgttaaacatacacataccgccagccctagaccaattccatttcacaaattttattttgttattttcttaactttttctctttttcttcattcttcccttcctccgtttcaatattacattctttactcttacccacctttccaaacaaaatctttccaaataaaatctttcacaaaatctgtaagaaaatctcaatcaagtgatctgcacatgatttatgaaaatatacctttgtctaaggacatttgtacatgaaaagagaaaaagctaaacattaaaggaatgactctttaagacactgacaaggaaatacaattgaatagagccaacataacaaagaggctttctcagtctactcccaatgtcataacatacagataaatgtctctgtaaagtttaacccacctgcataagtgtctaatagagagtgcttctctgaaggttgccttccacatctaagcaggcattttcccctcaaaaatataaggcttctgttagcctccctgttttctctagtctcaatcataaacttctttatcattagattactactacagggaaaaacctctaaggcctatccttatcagaaatcaaaacctctaaggcctatccttatcagagatcaatctgtccttttgtagatggctaacttcattgaaaccatatcttcctaatttcacaataaaaacggcactcaatattttgagaaacacagcagtttataagtcctgctatgacatataggagaggcagacatccaatataaggatatctgggtcaagtggaataaaagaagcaaagtgttatgcaagtataggtggaaaagagtaatttctattgcaataattgggaaaagtttcttggagaagtacacgggctcagaaacaatacgaggactctcaatggacagttatggggaacaaggaacaacagctttaaaaattgatatttcagaaatagttgatgcactctatgtggg

SEQ ID NO: 34806 - DNA, 2416 bp, Homo sapiens
  misc_feature (1)...(2416): n = A,T,C or G
atcctcccgtttctctttctcactccctgcctcattttccatacctaggcaccaagttcccctcgattccacctccagaatgtggcctcccctttcttccattcccaccacctctctcagttatttgttgcacctactcttttagcaaacgcagaaggttttcccgtcttttttctgtcctaccttccgtcacaacactagtatccaaaaagccatgatactattttccctgcctgaatactcttctgtggtccccaactgcttctacaaaattaaagccaaattattcaaccttgcaattaaaccttcccagatctgactctagtttcactttctgacacaattctacacatttgtgctttggccacaccaaattatttacaacttcctgannnnnnnnnnnnnnnnnnnnnnnnnnnnnnnnnnnnnnnnnnnnnnnnnnnnnnnnnnnnnnnnnnnnnnnnnnnnnnnnnnnnnnnnnnnnnnnnnnnnattcctactacttcctgataatcttctaatgcctctaattcacttcctcatcacaaaggtgatctcttaacaaataactaagattctatcatatctgtctctatgtccacctgtaaacccgaaaaccctgtgtcctagccagctgtcacttcaaaccattcatctaaaccattcaaatctctctgtttccaatatttgttagtctgtctcttgtacctggatattatcttctacttttcagtttctctgccacctcccctaatggtatttgtcacttgttacttcatcctcttttctccctggcccccaacaacatacttagagctgttgctgctaatctgctgtaggctgagtattcagatactcaaacttattaggaaccatatgctaagacgaagccaacactgaggctcagaaaaggaacaagtaggtggcttcagtgcagggtattaaacacacgtatctatggtgctcaactatcttttccatgtacagctgacccttgaacaatacaggcttgaactgcatgggttcactcatatgtggatttttttcaatgaatttattagaaaattatttggagatctgtgacaatttgaaaaaacgcacagatgaacagtatagcctagagatactgaaaaaattaagaaaaagttaggtatgtcaagaatgcataaaatatatgcacattttgtcatttactaccataaaacatataaaaactataaaaagttaaaacccatcaaaacgtatacacacaaactgtacatggcaccattcacaattgagtgagatgtaaacaaatatacagtattaaattacaattgtttacagattcatcatttattataaaccgtgtttctaacaaagccaaatcaccgttatttctaaaacaaattataacagaaaagatggtgaacaggaaaggatcccatggagatgtatgttaaacatacacataccgccagccctagaccaattccatttcacaaattttattttgttattttcttaactttttctctttttcttcattcttcccttcctccgtttcaatattacattctttactcttacccacctttccaaacaaaatctttccaaataaaatctttcacaaaatctgtaagaaaatctcaatcaagtgatctgcacatgatttatgaaaatatacctttgtctaaggacatttgtacatgaaaagagaaaaagctaaacattaaaggaatgactctttaagacactgacaaggaaatacaattgaatagagccaacataacaaagaggctttctcagtctactcccaatgtcataacatacagataaatgtctctgtaaagtttaacccacctgcataagtgtctaatagagagtgcttctctgaaggttgccttccacatctaagcaggcattttcccctcaaaaatataaggcttctgttagcctccctgttttctctagtctcaatcataaacttctttatcattagattactactacagggaaaaacctctaaggcctatccttatcagaaatcaaaacctctaaggcctatccttatcagaratcaatctgtccttttgtagatggctaacttcattgaaaccatatcttcctaatttcacaataaaaacggcactcaatattttgagaaacacagcagtttataagtcctgctatgacatataggagaggcagacatccaatataaggatatctgggtcaagtggaataaaagaagcaaagtgttatgcaagtataggtggaaaagagtaatttctattgcaataattgggaaaagtttcttggagaagtacacgggctcagaaacaatacgaggactctcaatggacagttatggggaacaaggaacaacagctttaaaaattgatatttcagaaatagttgatgcactctatgtggg

SEQ ID NO: 34807 - DNA, 701 bp, Homo sapiens
cagcagctgtctcagctgattgggacacaggtttaggtaccatgctcctcattaaaaaacccggctaagtcccacattaatcttcatagttaatttcttttacttaaaggcatacatgtttgtggataagaatttgactaacagttgtttggccagaagctaaaataaaattttaaattctaaatgacatcgtgtaatatacatgatattacacgaatgtgaagccagctatgccaagcccctcagccaccccagtactctgctcttgaggtggtccaagctcacctgtagaaaaggtaaacacaaatcgagtagtacatgtgaaatccattcgttccctggtctgtgtttacaggtaccatgcttgcagccacacatcaagtaaggatttttggccatgaaactttccaaatgaagtctgctaactcctgaataacagccaacagctatctcaccaacgtttccttggggacctccaggacttaattccttcaaagagttctgtcttctccatctgcacaccattctatttgtaaatgtgagactttgaactcaagagaggagatctaattagtagagaaagcagagggacgttcaacaggtctatctaggggatmggggcctttagtacacaatagggagagagaagcctcagcaccacttgtgagactcacagaaaagtgacaattaagttctctgag

SEQ ID NO: 34808 - DNA, 607 bp, Homo sapiens
aggctttagtattgacaatggtattattaatatttcaggtactaataaaatttgtattttactataattttatcaacatgctacattttcaaatgtgttttgattatattaggcctcatggaccgcaatagagttggcaaattaagatgttttatttctctcttagctttcctggcctataaaacaaagacaactagataaaatgaagcttaaatcattttcaacttaaagactctgtgattctgtggtactgatctccaatttttctcacgtaaatctaaagaaaattaataattmcttaaaattcattctctttttaattcacattttctgggattctctttctgtctttaggaaggcacacctgtttttgcgggggatggaaaataaaaacaaaagtaatccaccaggagggagaattgtaccaatgccagatcttacaagtatttgttgatcctaggctggcattctctccatctatgccacacatttctacgaaccctggtgtgtcagcttctctgtgggtctagggccaggatggaggtcaaagctggagctgaaggttgggatctgccctcacagagttctcatcagtgttctttcttcc

SEQ ID NO: 34809 - DNA, 607 bp, Homo sapiens
aggctttagtattgacaatggtattattaatatttcaggtactaataaaatttgtattttactataattttatcaacatgctacattttcaaatgtgttttgattatattaggcctcatggaccgcaatagagttggcaaattaagatgttttatttctctcttagctttcctggcctataaaacaaagacaactagataaaatgaagcttaaatcattttcaacttaaagactctgtgattctgtggtactgatctccaatttttctcacgtaaatctaaagaaaattaataattccttaaaattcattctctttttaattcacattttctgggattctctttctgtctttaggaaggcacacctgtttttgcgggggatggaaaataaaaacaaaagtaatccaccaggagggagaattgtaccaatgccagatcttacaagtatttgttgatcctaggctggcattctctccatcyatgccacacatttctacgaaccctggtgtgtcagcttctctgtgggtctagggccaggatggaggtcaaagctggagctgaaggttgggatctgccctcacagagttctcatcagtgttctttcttcc

SEQ ID NO: 34810 - DNA, 800 bp, Homo sapiens
atccccagtacatgaggtaagagcccatccaccaacattcaacctggatccagaacagagttcctgggaaccagacagaggcaatgtcaaaaccattaactggggaggaaaataacccagagctatggggagaagtgagctcctcaggaagagcatacaaacctaaatttgaaagaaaatttaacaggaagaaagttagacaacaagctcaaagaccagcaacatttactccctccaaatagaaacacctgagcaatctcaaaagcatttaaaagaagcatgcttaaaaccctcagagataaaggaagtaattacatctatgagaaacaaacaaacaaaaaaagcagatatgaataaacaatatatggttctgaaaagcaaccaaatactagtcctgaaaacagaatatactgtcattgaaattggaagctcacagactgcccagaagatagcacagaagataaaaagaagacatgaaaagggtcatcagaagccaagaggacagactgagggattccaasagaagactcacagcagccccaaaatgaaagaatagaagaattggtgtagaaaagaatatatagaaggaactaacagttcataattttccagtattgaaaaaaatcatagatttatagtgaacactgggcatcaaatatatatattcctaactagatgcattgtaatgaaactgcagaacattgctatagagaaaaaaatttaaaatctaacagggaaaaagacaatccacaaagtagtagcaataagaccaacagcagacttctcatcattaacaacaa

SEQ ID NO: 34811 - DNA, 1163 bp, Homo sapiens
acggagctagaccacttggctccctgacatcagccccctatccaggggagtcaagggttctgtcttgctggcattccaggcaccactgggggtatgaaaaaaaactgcagctcgcttggtgtctgcccaaacatgaccgcccagttttgagcttgaaacccagggccctgctagtgtaggtgcctgagggaatctcctggtctgcgggttgcgaagaccatgcgaaaagcatagtatctgggccagagtgcactgttcctcatggcacagtaccttatggcttcccttcgaactccctctctgaccgcctgtgcttcctgggtgaggtgatgccccaccctggtcctgctcgccctccgtggggtgcacccactgtctaacctgtcccaatgagatgagcccggtacctcagttggaaatgcagcaatcacctgccttccatgttaatctcactttgagctgtagactggagctgttcctatttggccatcttgtcagccactgcccattacagtatttttaattccaaaggtgtaaacaatgtaaatagcccaaaatagagttgtgataaatataactactctgtggcatcgttaaaaatcatgtaaggacatgggtcagtgctcacaatatactaagagggaaactgtaaggttaaaaacaatatataaattatgatcccacttacttttaagcacttatacattaatttatttaaaaaaaattccaaaatgttaaatatgttataatttctggatgattccagtccaagtaatttttatctgctttatattattctgcattttttttttcttgagacagagtaccactctttttgcccaggctagagtgcagtggtaggatctcagctcactacaccctccacctcctggattcaagggattctcctgcctcggcctcctgagtagctgggattataggcactggccactacacccagctaatttttgtgtttttagtagagatggggttttgccatgttggtcaggctggtctcgaactcctgaactcaagtgatcggcctgcctcagcctcccaaactgcagggattacaggcgtgagccactgtgcctggcctatttttctgtattttacaaaatgtttrcaatcactatatattacttttagaattaggaaaaaga

SEQ ID NO: 34812 - DNA, 1783 bp, Homo sapiens
gccatagagaaccagtgaagaaaaccttgttttctttaaaggacttagcaccatgtgtgggacagaggaagtgctcatataattgttagttcccttacttgcccttgcctattatgggctgaaaaggagaaatccaggagctaaaaggatgggaatgccacagtggcatatttcactggggcactatcacaagccttacagttttgggggccataagcagttaacttgggatgttgtctcctgaaaattgttgcctataagctgtggctgactctgactcaggaatactcctgttttgaacaaaaatgatcaatccaaagtcaggagaccatgattcctcattaatggagtcctccacgaggcgccgtaccttaaaaagctgcccaactgttccttccagtggaaagatggtaggggctcagcattgcaatcctatgttcaaaatgaggacttgagctacggaatgcgttgctggatgagaagttctgcctatgctgacagttttaaaacaatactctatttttgattccaataccatatgatactagggaagccttgaaaaccagaaacatttttcacccaagtccacggcaaagttcaagaatgactccatggctaatacttaggttgcaaatcgataaatgagctcctctcggatccaatgaattgaattgaaaaataaaactataattacagtaggaagagtgcaataaaagatgaaaacccaggctccaagcccctatttttcttttgttcaaaacaccattattggtttcaaatatgcttgtctgtcaacaggggttagtatcctatttgcctaaaggcaagaggcttgatctgatggttttctagggccccttcctggtctaagaactctaatctaatgtggttttactaaacccagagctctccaaaatcatgactttcgtcttaattgcctgcaggaacctgggggttaccctcaagctctcactgaataaatgatacctaaagtaaatgctgaaaactgcctttcctatttatgaagtgcgtattcagaataatatttcttttttcttcaaatttgattaaagtagccattccattatgccttttcataagggagtcacattgaagtcataaaaatgttactggaatcattttcattccaacaaattagatattaatgagggtttatccttacaattgaagaaaggarctaattcattaggaaaatgagtaacacatatatatgcttatcaagggaccctaaaagaaatactttcatatgaaagatgtgtttttatatcctaaaattatttccaacatttggtatggagccaaggcaattcagtaactttgccatttatagcaaagtttaggccaagttgcggggcacacaaaaaagtatacttgcttgacaatttaagtccatagggccaatctgaatgtccaggcaggaagggactttgtctcaccgatattctgagctctttgaaaatgaaggagagtccctatatttccacaggtgtatagctcgcagagaacttacagggggaaaaaaaaaagccataagcaatgaaaaataaagttcagagaagaaacatctcagctcctaaaagagaaatcgaaaagaaaaaagaaaaggacagtcactgatatacagacctatcttctcacttcacttgggaatatatgaagactagaagggagtgaaagtagctaaactagggaagagaaagaaggtgaatccattcaccatttgagaaaacatctgcctgccaagcatagacaattcagttgt

SEQ ID NO: 34813 - DNA, 1783 bp, Homo sapiens
gccatagagaaccagtgaagaaaaccttgttttctttaaaggacttagcaccatgtgtgggacagaggaagtgctcatataattgttagttcccttacttgcccttgcctattatgggctgaaaaggagaaatccaggagctaaaaggatgggaatgccacagtggcatatttcactggggcactatcacaagccttacagttttgggggccataagcagttaacttgggatgttgtctcctgaaaattgttgcctataagctgtggctgactctgactcaggaatactcctgttttgaacaaaaatgatcaatccaaagtcaggagaccatgattcctcattaatggagtcctccacgaggcgccgtaccttaaaaagctgcccaactgttccttccagtggaaagatggtaggggctcagcattgcaatcctatgttcaaaatgaggacttgagctacggaatgcgttgctggatgagaagttctgcctatgctgacagttttaaaacaatactctatttttgattccaataccatatgatactagggaagccttgaaaaccagaaacatttttcacccaagtccacggcaaagttcaagaatgactccatggctaatacttaggttgcaaatcgataaatgagctcctctcggatccaatgaattgaattgaaaaataaaactataattacagtaggaagagtgcaataaaagatgaaaacccaggctccaagcccctatttttcttttgttcaaaacaccattattggtttcaaatatgcttgtctgtcaacaggggttagtatcctatttgcctaaaggcaagaggcttgatctgatggttttctagggccccttcctggtctaagaactctaatctaatgtggttttactaaacccagagctctccaaaatcatgactttcgtcttaattgcctgcaggaacctgggggttaccctcaagctctcactgaataaatgatacctaaagtaaatgctgaaaactgcctttcctatttatgaagtgcgtattcagaataatatttcttttttcttcaaatttgattaaagtagccattccattatgccttttcataagggagtcacattgaagtcataaaaatgttactggaatcattttcattccaacaaattagatattaatgagggtttatccttacaattgaagaaaggaactaattcattaggaaaatgagtaacacatatatatgcttatcaagggaccctaaaagaaatactttcatatgaaagatgtgtttttatatcctaaaattatttccaacatttggtatggagccaaggcaattcagtaactttgccatttatagcaaagtttaggccaagttgcggggcacacaaaaaagtatacttgcttgacaatttaagtccatagggccaatctgaatgtccaggcaggaagggactttgtctcaccgatattctgagctctttgaaaatgaaggagagtccctatatttccacaggtgtatagctcgcagagaacttacagggggaaaaaaaaaagccataagcaatgaaaaataaagttcagagaagaaacatctcagctcctaaaagagaaatcgaaaagawaaaagaaaaggacagtcactgatatacagacctatcttctcacttcacttgggaatatatgaagactagaagggagtgaaagtagctaaactagggaagagaaagaaggtgaatccattcaccatttgagaaaacatctgcctgccaagcatagacaattcagttgt

SEQ ID NO: 34814 - DNA, 528 bp, Homo sapiens
tttgaagaacaacagaggcaagagctcagcctttgtgcataagccccttttcctagaactttattagaaccaactgaaaattgtgtaatttgtaccaaytgtcctttgggctctgttcctctttgttccaaaagctcagtccctttgatatccctgcaacacatttaagcatttccacttggtccactccgtgccagaaatgtcttgcaagtgacacatttctccactacgtctttgctaattaatctacagaacaagaatggcaaaaagggaagggactttccttttgttctcacaaaagagtttgtcatacaagccctgctacaaaaggtgaatcaattggtggcttacgagtcttagagatttgttccaggtcaaaaagtaagtgtccccaattcccacgttaagactgttggagcagaaagcagcatgcatgacccccaaagggtagcattacaagaaaacatgggttaggtttccttgcagtttcgctgcagtagtttcaactgctgggtaggatgcatactg

SEQ ID NO: 34815 - DNA, 1071 bp, Homo sapiens
atcagaagtttagtgtgactggagacaagggcaggagatgagatttgaggtgtggattttttggaaaatcttcaaagaaacatttgagttgttttgaagcatgagtatatgatttttgaaagcagggaggaaggtgagggccaatccagcagtaggagtggtaggggcaaaggaagcattggtacaatattgaaatacccctagcttagggcatagttatgtagatgttgatgatggtgttgctggcccgcaagagggagtggtggtgttacaagttagttagtggccagttatgagcctggaaagattgattactaagggcaagttctttccacatgttttgcctctctcctttctaaaaggttctaaaaggaggtataaaggataatagccccccccctttttttytaacacacagaaaagttgctagaaacaagttagtgttaaacatagtagtttttaattcaactatgcattaataataaatgtatatatttaaacaaactatcaaaaatcccattgtacacaaggtatgggtagcagtagaagtcaaatctatcaatttttctttccaaatttgagtccttacgattctgcttccttgtgaagattggttatgtgtgataatttttgaaacaagtgttcctattctccagttgtcttccagaaaataaaactgcaaatgcctaaagcttttggattcatctatattttagtcaaattttcttctacactgtatggaaaacttattcagagccatagtttgcttctttctctgtatgtatacaaatgcatatatttatatttggaaaatagctcttcatagagaagagaggaaaggaatgcattccagttttgtcccctgttaatcattcatggcctacatgtaataccatttactttgtgaagattttcctggtccatctactgagatgttattgcctcttttaactttctaagtcctccatcatttttttttttgagacagtgtcatgctcagtcacccaggctggagtgcagtgacatgattatcacacactgcaaccttgaattcctgggctcaagggatcc

SEQ ID NO: 34816 - DNA, 1071 bp, Homo sapiens
atcagaagtttagtgtgactggagacaagggcaggagatgagatttgaggtgtggattttttggaaaatcttcaaagaaacatttgagttgttttgaagcatgagtatatgatttttgaaagcagggaggaaggtgagggccaatccagcagtaggagtggtaggggcaaaggaagcattggtacaatattgaaatacccctagcttagggcatagttatgtagatgttgatgatggtgttgctggcccgcaagagggagtggtggtgttacaagttagttagtggccagttatgagcctggaaagattgattactaagggcaagttctttccacatgttttgcctctctcctttctaaaaggttctaaaaggaggtataaaggataatagccccccccctttttttctaacacacagaaaagttgctagaaacaagttagtgttaaacatagtagtttttaattcaactatgcattaataataaatgtatatatttaaacaaactatcaaaaatcccattgtacacaaggtatgggtagcagtagaagtcaaatctatcaatttttctttccaaatttgagtccttacgattctgcttccttgtgaagattggttatgtgtgataatttttgaaacaagtgttcctattctccagttgtcttccagaaaataaaactgcaaatgcctaaagcttttggattcatctatattttagtcaaattttcttctacactgtatggaaaacttattcagagccatagtttgcttctttctctgtatgtatacaaatgcatatatttatatttggaaaatagctcttcatagagaagagaggaaaggaatgcattccagttttgtcccctgttaatcattcatggcctacatgtaataccatttactttgtgaagattttcctggtccatctactgagatgttattgcctcttttaactttctaagtcctccatcatttttttttttgagacagtgtcatgctcagtcacccaggctggagtgcagtgwcatgattatcacacactgcaaccttgaattcctgggctcaagggatcc

SEQ ID NO: 34817 - DNA, 1071 bp, Homo sapiens
atcagaagtttagtgtgactggagacaagggcaggagatgagatttgaggtgtggattttttggaaaatcttcaaagaaacatttgagttgttttgaagcatgagtatatgatttttgaaagcagggaggaaggtgagggccaatccagcagtaggagtggtaggggcaaaggaagcattggtacaatattgaaatacccctagcttagggcatagttatgtagatgttgatgatggtgttgctggcccgcaagagggagtggtggtgttacaagttagttagtggccagttatgagcctggaaagattgattactaagggcaagttctttccacatgttttgcctctctcctttctaaaaggttctaaaaggaggtataaaggataatagccccccccctttttttctaacacacagaaaagttgctagaaacaagttagtgttaaacatagtagtttttaattcaactatgcattaataataaatgtatatatttaaacaaactatcaaaaatcccattgtacacaaggtatgggtagcagtagaagtcaaatctatcaatttttctttccaaatttgagtccttacgattctgcttccttgtgaagattggttatgtgtgataatttttgaaacaagtgttcctattctccagttgtcttccagaaaataaaactgcaaatgcctaaagcttttggattcatctatattttagtcaaattttcttctacactgtatggaaaacttattcagagccatagtttgcttctttctctgtatgtatacaaatgcatatatttatatttggaaaatagctcttcatagagaagagaggaaaggaatgcattccagttttgtcccctgttaatcattcatggcctacatgtaataccatttactttgtgaagattttcctggtccatctactgagatgttattgcctcttttaactttctaagtcctccatcatttttttttttgagacagtgtcatgctcagtcacccaggctggagtgcagtgacatgattatcacacmctgcaaccttgaattcctgggctcaagggatcc

SEQ ID NO: 34818 - DNA, 621 bp, Homo sapiens
atacaaaaaattagccaggcatggtggcacacacctgtaatcccagctactcaggaggctgaggcaggagaatcgcttgaacccagaaggtggaggttgcagtgaggcgagatagtgccattccactccagcctgggcaacagggcaggactctgtctcaaaaaaaaaaaaaaaaaaaawaaaaaaatatatatatatatatatatatatatagaatgccacactgtaatagcacaaaagtggtgaggtggtgcacgcatgcagtcccagctactcaggagacggaggcaggagaatgcttgaactgggaggcagagattgcaataagccaagatcatgccactgcactccagcctggcaacagagcaagactctgtctcaaaaaaaaaagtggaaataactgtcctgtagtaggaatatggattaataaactatggtttgttcaatcaattatcatagaacagttaaaatgattttatgtatcaaattagataaatgtcaagacataatattgattaaaaataaagttacaaaggattgtgtacaaatatatcatctatttaaaaatttaaaatacacaaaatgatatatcctgtatatatccaatacatggtaatgata

SEQ ID NO: 34819 - DNA, 621 bp, Homo sapiens
atacaaaaaattagccaggcatggtggcacacacctgtaatcccagctactcaggaggctgaggcaggagaatcgcttgaacccagaaggtggaggttgcagtgaggcgagatagtgccattccactccagcctgggcaacagggcaggactctgtctcaaaaaaaaaaaaaaaaaaaaaawaaaaatatatatatatatatatatatatatagaatgccacactgtaatagcacaaaagtggtgaggtggtgcacgcatgcagtcccagctactcaggagacggaggcaggagaatgcttgaactgggaggcagagattgcaataagccaagatcatgccactgcactccagcctggcaacagagcaagactctgtctcaaaaaaaaaagtggaaataactgtcctgtagtaggaatatggattaataaactatggtttgttcaatcaattatcatagaacagttaaaatgattttatgtatcaaattagataaatgtcaagacataatattgattaaaaataaagttacaaaggattgtgtacaaatatatcatctatttaaaaatttaaaatacacaaaatgatatatcctgtatatatccaatacatggtaatgata

SEQ ID NO: 34820 - DNA, 621 bp, Homo sapiens
atacaaaaaattagccaggcatggtggcacacacctgtaatcccagctactcaggaggctgaggcaggagaatcgcttgaacccagaaggtggaggttgcagtgaggcgagatagtgccattccactccagcctgggcaacagggcaggactctgtctcaaaaaaaaaaaaaaaaaaaaaaaawaaatatatatatatatatatatatatatagaatgccacactgtaatagcacaaaagtggtgaggtggtgcacgcatgcagtcccagctactcaggagacggaggcaggagaatgcttgaactgggaggcagagattgcaataagccaagatcatgccactgcactccagcctggcaacagagcaagactctgtctcaaaaaaaaaagtggaaataactgtcctgtagtaggaatatggattaataaactatggtttgttcaatcaattatcatagaacagttaaaatgattttatgtatcaaattagataaatgtcaagacataatattgattaaaaataaagttacaaaggattgtgtacaaatatatcatctatttaaaaatttaaaatacacaaaatgatatatcctgtatatatccaatacatggtaatgata

SEQ ID NO: 34821 - DNA, 621 bp, Homo sapiens
atacaaaaaattagccaggcatggtggcacacacctgtaatcccagctactcaggaggctgaggcaggagaatcgcttgaacccagaaggtggaggttgcagtgaggcgagatagtgccattccactccagcctgggcaacagggcaggactctgtctcaaaaaaaaaaaaaaaaaaaaaaaaaawatatatatatatatatatatatatatagaatgccacactgtaatagcacaaaagtggtgaggtggtgcacgcatgcagtcccagctactcaggagacggaggcaggagaatgcttgaactgggaggcagagattgcaataagccaagatcatgccactgcactccagcctggcaacagagcaagactctgtctcaaaaaaaaaagtggaaataactgtcctgtagtaggaatatggattaataaactatggtttgttcaatcaattatcatagaacagttaaaatgattttatgtatcaaattagataaatgtcaagacataatattgattaaaaataaagttacaaaggattgtgtacaaatatatcatctatttaaaaatttaaaatacacaaaatgatatatcctgtatatatccaatacatggtaatgata

SEQ ID NO: 34822 - DNA, 599 bp, Homo sapiens
tcattttattcaattcaatgaacattttttatctcttgctgtgtgccagccattctattagtcaccgaggtgccatgatccggcaggatccagctcatgattgagtaggattcaaattaaaaatagagagtgagaaataaaaattgacgaatcaaaaaccaaacaatcttacaattgctatcataaactttaaaagatgatcttacatggatgagtcacactcagatataatatcagtcctaaatcctattccttctgcctggaacactgttacctactgccctagaaaatcccactcatcctytaagcctcaatccagatatcacctcctccagttaatcttctatgacgtccactcccactcatgatagatggctcattagatcctctgtcttaccacttataacactgaatagtattcatttctttacttgtctctatctccaactggacaatgagttcattagtgcatcaatgactggagcagagtctatctctgatttccatgcacctaaccagtgggcatgcaatataaaataagttgaatgaacaaatgaatagatgactaaatataataaccataatagctaacatttatt

SEQ ID NO: 34823 - DNA, 555 bp, Homo sapiens
caagtctagattaataaagttaggtacttgaggtgtcagaaaagtctatggttagggaaacatccrtttgtggcacagcaatcagagcattacttaattttctggcatgaagggtttaaaatcaaaatagtcaaaaataacaacagctacaattagtggctaaggaagacataatagataaagaagcaaattacagccacaaaatatgaattatgagtggaggggaaaagtctagagtatttttatgcaatcaaaattaagttgctatcagtttaaaatagtctattataactatagcacttttaatcctagccccatggtaaccacaaagaaagaaattgcagcagatacacaaataagaaggagaaagaaaacaaagtttagcaccacagaaaaccaccaaactacagaggtaaacaataagataggaagaaaaaatcaaaggctgtgcaaagaaactagaaataattaacaaaatggcaagagcaagtctttatcagtaataaccttgaacgtaaattgattaaattcttcaactaaaaaatgtatagtagc

SEQ ID NO: 34824 - DNA, 657 bp, Homo sapiens
catttcatctttgagttttgcagtcttttaatacatcagcctgaaaattagtatgacttctcttgtcaataagctggaagtatgattgtgattgtcttctattgctatcactatttcagtgtgtgtttgtggtatttaatttcattagtactggagaaaaatgcttttgacacatatttgccattacggcaaaaactgtcaacacaaaaagaatttgaccgctkggcaagtggacttggataacaactagttctcagtgagaccttaataataatggtcaaataataataactgttggatataaatcgatttggctgaagaaaatgttgtaaggctgtttccaagcataaaatacgaacttttatttgttaggtttaaggaaatgtacagctagaaatcttaactgttctcaccaagataaatcaatggaattatatattaaaccactccaaaagctgcatattgagagccttgatcagatttagcacggaaaaatgctagttctggttgttacttgctttcattatttatctgcatttctctatacaagtgtctgaattacaaagagcaagtttaaaaagtaatcagcccaacaaaccaacacagactttgcaattcatttggatttgcattcatagttgtaggatcagattttac

SEQ ID NO: 34825 - DNA, 774 bp, Homo sapiens
ctaattattattttttcttttgtagagacaggggtctcactatgttgcccaggctggtctcgaactcctgggctcaagtgaatcctcccgcctcagcctcccaaagtgctgggattacaagaatgagttatcacacccagcccacactttattctttctaaaatttttaaactttgtcacagtagacagaaccacaatgaattcttaatgaccttttttctcccttccatgaagaacacaaggtcattactctaaagtgatagagtaagggttgagtaggtctgagaacattaaagatttcgagtatcagctagagagaagaggaggtccagggtgagatgtgtgaacagaaagtagtacatttacagaaaggccactgcagctgcatcatagttctataactcttcaaagtccccaggcaccctaagtagatagcttgmagcttcacctttacaaagtccaatccattgcatcaaaagcctacattatcccatttcctgtggcctagagattacaaatcacctgaagtaataccaaaacccagtgagtaaagacggaagtaaatctagtgagtttccaaccacccaccgcccccgagatcttaaaggaagcagtaacaagcaactagaactcacatgagaatttataggccaagagattttaatgtaagcattcttataattaaatacctcttacaaaaaatgccatttaatcagacaaggggaaaaaagtagcatcaaaagagatgctgacaaggagacaatgaaatcaaat

SEQ ID NO: 34826 - DNA, 529 bp, Homo sapiens
aatgactcttaagattttggcttgctggccaggtgcagtggttcatgcctgtaatcccgacacttgggaggccaaggtgcgcagatcaccggagcccagagttttgagacaggcctgggcaacatagtgagaccttgtctctacaaaaagtaaaatcagccaggcatggtgtcacgcacctgtagccccagctactcagggggctgaggtgggaggattgattgagcccaggaggtcaaggctgcagtgcaccgagatggagccattgcactccagcctgagcgacaaagtaagaccctgtctcaaaaaatatttyctttggcttgatgctcacaggatagaggattctgctgaattggaagagactgttgtaagaacaaagagtctacagggcaggggaggatggagaaacaggaaaagacaatttgggagtttggtctaaggcccattaagtttgagatgtttagtacacatttgttctggttatttgctttgtaacaactccacccttaatggcataaaacaagca

SEQ ID NO: 34827 - DNA, 537 bp, Homo sapiens
ttcaccatgctcctgacttgaggtgatccacctgccttggcctcccaaactgctgggattacaggcgtgagccaccacacccagcaggttaaccacgttaatggtggccagtgtgagcccattctttttaattgattaatggtgtccctgacatttagagtgtctatagtctttttgctattacaaataatactgtgatagtctgtgtgtaatctctgtgcacacatgcaagtgtttctgtrggacagtgtcctggaagtgggttagaggtatgtgcatttaacattgtggtagataccaacatggtatttcataagcacaaatcatttttaataataactagataaactccaaatcctgtgcatggggttagggctggctcacagtagatgctcaacaaatattttggaataaataaacacaattactcttctcatttcaggcatgggtgtaaggcccaaaaagattaatatttttgctcaaggacactttgaaagagcttttgacttatggcctttgtttcactttatgcttttg

SEQ ID NO: 34828 - DNA, 1103 bp, Homo sapiens
ttttattttttcatgtcctgatgcaggtttggcaagtgctgagcatcgttttgtcatgctcatcctaggcagcaggctttccttccctgcgttgctcctcagtgtctacctacctgctcctgaagccctggggctctatagcagttcctcctgtgttgctttttctggcttcatttgctgttgctgccaccccccacaaccccccattactagaccaccccctgggtagctgacccaggctccaggatgtccatcacacaggccccagtcacctgctttttgctcctaccaccagcgtgccwaaagggtttataaaggcctatcttgaaaagacccctcctgcaggagacctacactcaccctttcaaaacgccctttcatccatgccctcatgagaaattcacaaccaacccttgcgacattcacaataggtagtattgaccccattttgtcagtgatgaaattgaagttccaaaatagaaattcagttatttgtcctatggaacaaagccactttgcaacagccctggcacatctagatcttcacattccaaatttagcagtgaatctcctaatccaatccatgctacccaaagtcagacttgaattcttatttgtagatggagaatttgaaagcagacttaacagcggtatttaactttagttcaaagatgccataggtcttggcatttgggtctgtttgaggtatggaaaaatatttgtagatgtagaacttttcttacataagaagagtttccaaataaataggagaggtcactaaagttcttgcaagtacttctcaaaacttttttaaaggtatacattagtttcttctacctggactgcttgaaatagaatcctgcctcaaggaattagtaaatgataagagccctccatgtacttcttagtcattttatttttctctctttcctggaagcgtaactttcttagaaaccacaactttggttcttctcactgatgagcagaacttttaaaaataaggtgattattctgaaatagttctgaagcatgctgataccaaagcggagttaaaatctacttcttggatcagctttttccaactctacataaatacacataaa

SEQ ID NO: 34829 - DNA, 1103 bp, Homo sapiens
ttttattttttcatgtcctgatgcaggtttggcaagtgctgagcatcgttttgtcatgctcatcctaggcagcaggctttccttccctgcgttgctcctcagtgtctacctacctgctcctgaagccctggggctctatagcagttcctcctgtgttgctttttctggcttcatttgctgttgctgccaccccccacaaccccccattactagaccaccccctgggtagctgacccaggctccaggatgtccatcacacaggccccagtcacctgctttttgctcctaccaccagcgtgcctaaagggtttataaaggcctatcttgaaaagacccctcctgcaggagacctacactcaccctttcaaaacgccctttcatccatgccctcatgagaaattcacaaccaacccttgsgacattcacaataggtagtattgaccccattttgtcagtgatgaaattgaagttccaaaatagaaattcagttatttgtcctatggaacaaagccactttgcaacagccctggcacatctagatcttcacattccaaatttagcagtgaatctcctaatccaatccatgctacccaaagtcagacttgaattcttatttgtagatggagaatttgaaagcagacttaacagcggtatttaactttagttcaaagatgccataggtcttggcatttgggtctgtttgaggtatggaaaaatatttgtagatgtagaacttttcttacataagaagagtttccaaataaataggagaggtcactaaagttcttgcaagtacttctcaaaacttttttaaaggtatacattagtttcttctacctggactgcttgaaatagaatcctgcctcaaggaattagtaaatgataagagccctccatgtacttcttagtcattttatttttctctctttcctggaagcgtaactttcttagaaaccacaactttggttcttctcactgatgagcagaacttttaaaaataaggtgattattctgaaatagttctgaagcatgctgataccaaagcggagttaaaatctacttcttggatcagctttttccaactctacataaatacacataaa

SEQ ID NO: 34830 - DNA, 1298 bp, Homo sapiens
ctatttagcaaacttttttttttttttgaatgcccacaatgtcctaggttctggaaatacaaaattacttggtaccagtaactcgactgtcacctttccagccatggacttggttcagacaaacccccagtccacggttgtcgtccacttgcagtgcccgccgactgtggatayatgctggggatcccaacacaacgcagcactcttggagcttggactgtcctatcaccttcctgtgttcttcaggttcttctgcacttctggttccctgttacctcagcttcacttaccttcctacctttccacaaaaagatcaaatcagcagttctgaaaggcataggcttagccaaggattctttgacatctgaagatatctctgccatttagaaaggggaaccaaggagaaaatctacccattgaatgtcatttgaaagccagctttactgggtacaactattcattgcgtatatccttttaaaaaattatttttattgtacagatacctttaggtatttgttctttataatgttctaaaacatttcagttaactctttttttgagacaggtctcgctctttcacccagattggagtgcagtggcatgatcttggctcactgcaacctccacctccccagcctaagcaatcctctcacctcagcctcccaagtagctgggactacaggcacatgccaccacgcccagctaatttttgtatgtttttgtagagacagggtttcaccatgttgccctggctggtcttgaactcctgagctcaagggatctacctacatcagcttcacaaagtgctgggattactggtgtgagccaccacgtccagctaatttttgtgtgttttggtagagacggagtttcaccatgttggcccaggctggtcttgagcttctgagctaagcgatccacctgtgtcagcttccctacgtgctgggattacaggcatgagccaccacacctggcccacgtttcactgtagaatgaggaaaaccagggctgaggtcctatagacaatccacttgtcttcattttgatgtaaattcagaactcacagtgaagcaatttcatggccttctgtagcctttgtttttgtttctctgcctgccctatatttaagtggttgatgggctgtgttgcccgattacttcattggtccctaaagaaacattcattattgactgaattctgatttcagggtttttttggttggctttcctttttttacgtttctccttatatacagatagcaagataatagctaaaatcaatggaactcagcaaaaacc

SEQ ID NO: 34831 - DNA, 765 bp, Homo sapiens
gggcatattcatctttttcccatttgccatcaaacagagcagctgagggtgtgggaggcagtcaggcagccagcaggagaaattcagccgtggtgtcagactggccaggagcctgctcctctactgaaatttctgctaccaaataatttactttctcttgtcaaagggtctttgtgccaagttgagtactgtggaccacttttctccatccacagcctatgttaaccaccccttttttgttgggctacttctccttgtccctaggtattctaacttcagggaagcttctgctggtaagttcaagatccatttcttcccaaggctgggatggatactactgacagtgtgcatacacacacacacacacacacacacacacacacacacacacacayacaaatacatatatatatatatatatatacccaatattatattgtcattatctgtggacctgtctgccttcccagtgagattgttacccctctgagggcacctcagtttcctcagcactggccccactgttgagcctgagtagatgatgtataaacacttattaaatgaatatgtacatttcttctttattctttcatcatcatgctaaaattaaaactttacccatatgtggactttatttattcttacttccaccttcttttgatgctgatatggtttggatctgtgtcctcacccaaatctcatgttcagttgcaatcctgtatgttggagttgggccttagtgggaggtgattggatcatgggggt

SEQ ID NO: 34832 - DNA, 765 bp, Homo sapiens
gggcatattcatctttttcccatttgccatcaaacagagcagctgagggtgtgggaggcagtcaggcagccagcaggagaaattcagccgtggtgtcagactggccaggagcctgctcctctactgaaatttctgctaccaaataatttactttctcttgtcaaagggtctttgtgccaagttgagtactgtggaccacttttctccatccacagcctatgttaaccaccccttttttgttgggctacttctccttgtccctaggtattctaacttcagggaagcttctgctggtaagttcaagatccatttcttcccaaggctgggatggatactactgacagtgtgcatacacacacacacacacacacacacacacacacacacacacacacacawatacatatatatatatatatatatacccaatattatattgtcattatctgtggacctgtctgccttcccagtgagattgttacccctctgagggcacctcagtttcctcagcactggccccactgttgagcctgagtagatgatgtataaacacttattaaatgaatatgtacatttcttctttattctttcatcatcatgctaaaattaaaactttacccatatgtggactttatttattcttacttccaccttcttttgatgctgatatggtttggatctgtgtcctcacccaaatctcatgttcagttgcaatcctgtatgttggagttgggccttagtgggaggtgattggatcatgggggt

SEQ ID NO: 34833 - DNA, 765 bp, Homo sapiens
gggcatattcatctttttcccatttgccatcaaacagagcagctgagggtgtgggaggcagtcaggcagccagcaggagaaattcagccgtggtgtcagactggccaggagcctgctcctctactgaaatttctgctaccaaataatttactttctcttgtcaaagggtctttgtgccaagttgagtactgtggaccacttttctccatccacagcctatgttaaccaccccttttttgttgggctacttctccttgtccctaggtattctaacttcagggaagcttctgctggtaagttcaagatccatttcttcccaaggctgggatggatactactgacagtgtgcatacacacacacacacacacacacacacacacacacacacacacacacaaatayatatatatatatatatatatacccaatattatattgtcattatctgtggacctgtctgccttcccagtgagattgttacccctctgagggcacctcagtttcctcagcactggccccactgttgagcctgagtagatgatgtataaacacttattaaatgaatatgtacatttcttctttattctttcatcatcatgctaaaattaaaactttacccatatgtggactttatttattcttacttccaccttcttttgatgctgatatggtttggatctgtgtcctcacccaaatctcatgttcagttgcaatcctgtatgttggagttgggccttagtgggaggtgattggatcatgggggt

SEQ ID NO: 34834 - DNA, 481 bp, Homo sapiens
ggcattcctgagagtgaaaccctagtaataaggatttacattatgaaattaagacaaaacaaatgtagctgttacggattttaaaagttaggtcactacatgagtctagtgggaagaagttatgagaaccaccagaatcatctagaaatttttataagagaacatgactaaaattagctaaaacttacgaattagattagaaaaacagatacatccattcatttgaattgcttctataagcaacagtgtttcttttctaaaatattaatacagtaatcatcactctcctaaagctctccttctgctaggaggaaaatatttcctcaccctactgatgttgggcttagtcatgtgatttcattcacattaattaagatgcagaattttatctagaaatattacatgacttagtctaacattaaaaattaggttgacaaaataatcaytttacctaagaatatctagttacttttaaattaga

SEQ ID NO: 34835 - DNA, 481 bp, Homo sapiens
ggcattcctgagagtgaaaccctagtaataaggatttacattatgaaattaagacaaaacaaatgtagctgttacggattttaaaagttaggtcactacatgagtctagtgggaagaagttatgagaaccaccagaatcatctagaaatttttataagagaacatgactaaaattagctaaaacttacgaattagattagaaaaacagatacatccattcatttgaattgcttctataagcaacagtgtttcttttctaaaatattaatacagtaatcatcactctcctaaagctctccttctgctaggaggaaaatatttcctcaccctactgatgttgggcttagtcatgtgatttcattcacattaattaagatgcagaattttatctagaaatattacatgacttagtctaacattaaaaattaggttgacaaaataatcattttacctawgaatatctagttacttttaaattaga

SEQ ID NO: 34836 - DNA, 608 bp, Homo sapiens
tttttgcagagttcaggagaagggtgcaggaggtattagaaaagatgcacataggtcttatatctcatcaaagcatgaatttccaactcattaaaacactccattctctgccctaatctcycaaagagcattcagctgaatgaaaagctgctgacattcgtgccagttcacagctagaatgacatggctgggggacaggagatgctgcagtttccattatccattgaacaccttggcaattcttaattcatcctgtgaatgtgatacttactcttgtactgctctggctatggaaagggccgtagatccagtttcattaacgctatctaaggtcacatttggcaggtcatcatcatcactgtcacttttactttgtctgggagataggcctcgggggtccatttgtgctggagagaaaaggcatatataatgaattaaaatcagtgcgcagaaagttaaccttgtcctggaccaacatcaagtatggaacttctgtgcatatcatgcaaatggaattctctagacatcacaggaatcagtgaaagctccaggttttatgttctgagtacttactgattctttttcccttcattggagttacaaaacct

SEQ ID NO: 34837 - DNA, 762 bp, Homo sapiens
attcctgtttattttttactgtggctactagaaaatttaaaattatgtatgtggcttacattatatttctattggaacgctttagatcttttaagcgcacacagtgagggttgtaatatgtattcatattacctagtctgaagcatacattagtattaaaactttccttctcaatttatatctgataaaacttttaatttctgataaaatacactatatttactcaaatgtattttgtcattatcaacttctgcaatgaagagttagaagagagctacttatttttggtaycacacttgcaagacagttgcaaagcattggagccaccaactgttcaaaagtggcaatacccagctaattgactcacagaacaagaaataaatatctgtaagaaacacaattctgtgaaggaaaaaatgttgaataacatgtagacaatatgtattatttatattttaaagcaatgtgatttatccattgaggaaaaaatatattggcttgcatttcagtaagttctgtttggaaaatagatggaaatatttcatgataaaagaatactgataagtacattaaaaaccatataaaaatcaaaaaatttctagcaaatattgagtaacatatagttatgctatttgaaaattttaattagcagaaatcagaaaataacatttgatattttacataacaggaaataaagcagattatgcatatttttaaataaatacttataagtttgagaacttttttatgatttaaaaaaat

SEQ ID NO: 34838 - DNA, 1148 bp, Homo sapiens
agccatgctgacagctgttgttagaagagacctaagattatcctatgtgaaaytcacactgggctctgtagtccactgcctatgtatattccatttaggctagaattagcctctaggacaactcttctgtttgtttgtttttttttttccccgaggtggagtcttgttctgtcacccaggctagagtgcggtggcatgatctttgctcactgcaacctctgcctcccaggttgaagtgattctcttgcctcagcctcccgagcagctgggattacagatgtgtgccaccatgcccagctaatttttgtatttttagtagagacggggtttcaacatgttgaccaggctggtcttgaacttctgacctcatgatctacccacctcgccctcccaaagtgctggtattacaggtgtgagccaccatgcccagcccacattttcttaaaatgaacaaaacagacaaaaatctgcttttatttattatttattttcattttttctattatttttaatttatgagacagggtctcactctgttgcccagtccaaagtgcaatggtgtgatcacatggctcactgcagcctcaacttgccaggctaaagtgtttctcctactacagcctcccgagtagctaggactacaggctcatgacaccttgcctggctaatttttgatattttatagagatagggttttgccctgttgccccatctggtcttgaactcctgagctcaactcatccacctactttggtcttccgaagtgctgggattataggcataagccaccatgcctggccaaaaatctgtttttagaaggactcatgattatgacctgggacttcactatattctaagggcaatcatccatgaagtattttatagggcagaaaaagaaaactgctacccttatgtcagttgctgttcataaataagtagtgctgtttgcaaggaggaatgttggctttgtcacagtgcaaacaataactgttcttcattttcaggggcttagtaatgttcatgaataaagcagaacagcccaggataatacaagagtttgtttcccattggtggttttgctataagattttctgctttaaaaatattttggaaatatttgttataaatattttgtttctttatacatg

SEQ ID NO: 34839 - DNA, 1334 bp, Homo sapiens
ggccgaaaaaagtattcttatgttactgtttctgaaacttccagaaactttagtcgactcaatggatgatgatgtacatgcagaccacaaattataaataaaataataggctccttttagcttttaacattaaaactaaatatatgtcaaaagtaaaattagtggctcttttatgtcatgagaagaatgtcagtgttagaaagccttcaccaaaatatttgtgttaggcttagtaatgagtgctttgcaccaaaaattaagttcatttgtttttatatgtgtcttttttctttctttgttatttctagaagtattttaattttaaaatgtaaactatgactgtgttaaatgccttcatttctaygcctttttgttaatattttgcctgactgaaaagatgagtttttaaaaacattttcttgaatcaaggccattaattaacatagagacaaaatagtaatgaaaatcgaccttgattagtaaaacaattatctagctcctagtaatccttacctgtctcactcaacataaagtctacatctttgcatctctcttagttataaggaagtggagtttgatcgaattggtcagcacgacattgggtaaaatgtaactatgttttggtctgacagttgcacttatttattaccaaagaagttgatttttttagtatgtgatattttactattttctatttatttagggaaactaaactgacaaagcatgaaattaaaattttatttcaaatggaaaatgcttaaacatgttttatcataactaaagctaaaaatatttttggatttttaaattaaagaacatctcaagtacttcaagttaccttcccctgacagtagattatatcttactttattgctaaaattgagtttggctgtcttttttggctgtattcatcattttcattctatttttttgtgcaatatttgcatcatgcatttctcattttaatagttgtagttcatgcgatgtgattttcaaacaattgtcctattgacatggcaagccatctgcttaatcagcagtcactttactttcagtcttttcaaagccactttgtctgaaaagcaaagagacaattcaacccagtgtgccaagctggtcccctccagtgaccatctattcaaattcacacaggcaatctctggtgaaggaaggaaggtgcacttcaacagcattttcacagcaatgtggaacagatattataacataaaagatgaaacattgccttcaaggaaaaatagttgatttttcttattctgtgtacaggagtatctgatggttgtaaggttgagaataaagagtaaagttgggccagg

SEQ ID NO: 34840 - DNA, 1264 bp, Homo sapiens
aatgcgtatccttttgggggtaatttggctttatttctgcttttttatttttacatctgggactggagaaattgctagaatttcaataaggttgatttgaaatcaggcaacagaaaatcccagaaaacactcaaggttgtatgtactggataatgcctttaggtgaggcttatacataaaacacaattcagtaaaatttatataatcattcaagtttgttaaatttgataacaaaatgcctatgacatattaggcacttgtcttagtttgtctttgacatccctatcttggagaagctgatattacatgaaaggatattactaatataatataataagaagtggaacaaatacttatgtgctagaaacattcccattaataacccttaaatacattttattctggctcaattctttttttttttaattgatggagtttctctcttgttgcccaggcttgagtgcaatggcatgacctcggctctcttcaaccttcacctcttgggttgaaactattctcctgcctcagcctcccaagtagctgggattacagcacctgccaccatgcctggataattttttgtatttttagtagagatggggcttcactatattggccaggctgttcttgaactcctgatctcaggtgatctgcccacctcggcctcccaaactyctgggactacaggcatgagccaccacacccagctggctcaattcttttggcaccactgttttttgtcccacaggcttcttcccaccaaatttaagccatggtgttttcaagtttgtatttttagttttatttgcttgttttgttttttacttttttggaaaggggagtgtgggcttacctctgtgaaatgagatcagcctatttgtagttttacctagtaagcttcatagttgacatcattatattgagtttccctaggccaccctgagcttcagagctgaccatcctacctcattcctcttggtttttcaggctctgatgttaagtccctctcacttcaaatttgagctttcataatgcctcagttcgaaagaagcagaagaaagtgttgccatatttatctgggtgaggatcaagactttacatccatcattcatagtaaaaaacaacccttttaataatgtggacatgtttcactcaaattaaatataagcagttttagcaacatgccaatatagtcaaaataaataactatcaagttgaccaaaatgttctgctttagattttcccagcacaaagatcaatatgt

SEQ ID NO: 34841 - DNA, 1264 bp, Homo sapiens
aatgcgtatccttttgggggtaatttggctttatttctgcttttttatttttacatctgggactggagaaattgctagaatttcaataaggttgatttgaaatcaggcaacagaaaatcccagaaaacactcaaggttgtatgtactggataatgcctttaggtgaggcttatacataaaacacaattcagtaaaatttatataatcattcaagtttgttaaatttgataacaaaatgcctatgacatattaggcacttgtcttagtttgtctttgacatccctatcttggagaagctgatattacatgaaaggatattactaatataatataataagaagtggaacaaatacttatgtgctagaaacattcccattaataacccttaaatacattttattctggctcaattctttttttttttaattgatggagtttctctcttgttgcccaggcttgagtgcaatggcatgacctcggctctcttcaaccttcacctcttgggttgaaactattctcctgcctcagcctcccaagtagctgggattacagcacctgccaccatgcctggataattttttgtatttttagtagagatggggcttcactatattggccaggctgttcttgaactcctgatctcaggtgatctgcccacctcggcctcccaaacttctgggactacaggcatgagccaccacacccagctggctcaattcttttggcaccactrttttttgtcccacaggcttcttcccaccaaatttaagccatggtgttttcaagtttgtatttttagttttatttgcttgttttgttttttacttttttggaaaggggagtgtgggcttacctctgtgaaatgagatcagcctatttgtagttttacctagtaagcttcatagttgacatcattatattgagtttccctaggccaccctgagcttcagagctgaccatcctacctcattcctcttggtttttcaggctctgatgttaagtccctctcacttcaaatttgagctttcataatgcctcagttcgaaagaagcagaagaaagtgttgccatatttatctgggtgaggatcaagactttacatccatcattcatagtaaaaaacaacccttttaataatgtggacatgtttcactcaaattaaatataagcagttttagcaacatgccaatatagtcaaaataaataactatcaagttgaccaaaatgttctgctttagattttcccagcacaaagatcaatatgt

SEQ ID NO: 34842 - DNA, 1110 bp, Homo sapiens
atttgcctttacaatcagcctctgctttcaggaaccttgtcttgattgtctttgcatccccagcatcttgcacatggtatgacacttaatagatattaagtaaatgcttgctgaattattaaatgaaagtgataatatatcaaaagagggctacatcatgagtccatcaagaattaaaacctaacttggccaggtgcaatggcttatatctgtaatcccagcacgttgggaggccaaggcaggaggatcacttgaggccaggaatttgagaccagtctgggcaatataccaagaccccgtctttacaaaaaacaaacaaacacaaacaaaaaaccaaacccaactgttactcttttaagtgaattctatagcagttgaagacgacttttctgtcaatcacaaatgtattgatgaaggacagttggtgattttcagccatggctttgggagtaatatgtacttttttgatggagggagagagagagtgtgtgtgtgtgtgtgtgtgtgtgtgtgtgtgtgygcgcgcgtgcacatgcatgtgatgtacagtattagttacatttagtgaaataggcatcaaaataatctacttaagtttgaaattgtagaaatggtacatataacctatgctaatttctttagacattttagtttttcttgataaggttagagagttttattaaactttggccaagggaaattatgaaggaagaaattaataggaaagaaattagtctaatggaagaagattcagtcattcttaataatctaattttcaggccatattcttattaatcatgatcttaaattatatctttgtttgcatcttccaaataaagagtaaggtactaagcaaaaacctagacttatgagctttatatattatttgttggcgttccatatagataatataaacaaaagagaaataatgacatttccctctcagcttatcaggtagcggaagttattacaacattggtaaattgtgctttacttgctgtacttactatctgctctatctatagacagaaaacctgtataccttctgatactgtgttcaatgcatattctgtctactaccaatttagaatgctgaagtaccatatcaat

SEQ ID NO: 34843 - DNA, 549 bp, Homo sapiens
gtcctaaccccctatacctcaaaatatgaccttattttggagatagggtctttacagaggtaatcaagttaaagtaaggccatgagagtgccctaatcgaatatgatggtgtccttatgagaaggggacatttaaacagacacacacagagagatgatttgagagcacacggagaagacgccatctacatgccaagaggagaggccccagaagaaaccaaccctgctgacactatgatcttgggtttccagcctcaagaactgtgagacaacaagtttgttatttaagccacccagtttgtrgtactttgttacagagccttggcaagttaaaacacccatggatagacctcaggtggaagatgtgtatgatgttagtgagaggtgacagcgtgctggcagtcctcacagccctcgctcgctctcggcgcctcctctgcctgggctcccactttggcggcacttgaggagctcttcagcccactgctgcactgggagccccttttcgggctggccaaggccggagctggctccctcagcttgcaaggag

SEQ ID NO: 34844 - DNA, 549 bp, Homo sapiens
gtcctaaccccctatacctcaaaatatgaccttattttggagatagggtctttacagaggtaatcaagttaaagtaaggccatgagagtgccctaatcgaatatgatggtgtccttatgagaaggggacatttaaacagacacacacagagagatgatttgagagcacacggagaagacgccatctacatgccaagaggagaggccccagaagaaaccaaccctgctgacactatgatcttgggtttccagcctcaagaactgtgagacaacaagtttgttatttaagccacccagtttgtggtactttgttacagagccttggcaagttaaaacacccatggatagacctcaggtggaagatgtgtatgatgttagtgagaggtgacagcgtgctggcagtcctcacagccctygctcgctctcggcgcctcctctgcctgggctcccactttggcggcacttgaggagctcttcagcccactgctgcactgggagccccttttcgggctggccaaggccggagctggctccctcagcttgcaaggag

SEQ ID NO: 34845 - DNA, 440 bp, Homo sapiens
attcttctctataagaagcatatggaataaacaaactgagaataagtatcctttcttaaataagatgtgtcatagaccacataactcttcctagaaataagcagcatagatgccataaagcaagtactggttaatactgagggtcaacttgattggattgaaggatgcaaagacctgttcctgggtgtgtctgtgaggatgttgccaaagaaaattaatagttgagtcagtggactaggggaggcagacccactctctatctgggtggacaccatctaatcagctgtcagcatggctagaataaagctggcagaagaaagtggaatgarcagacttgctgagtcttctggccttcatctttctcccatgctggatgcttcctgtcctcaaacattggattccccgttcttcagcttttgggaacttacaccagtggtttg

SEQ ID NO: 34846 - DNA, 580 bp, Homo sapiens
aggaaagttatctaaagagatatgcacaacactcaactggttagttgagggctaacacgttcccagccatgttcttccttctcacaaagaaagggcattaaaggagtcagtgggcaccaaggagctgaatcccacaagcaggggtggactttggtccccagtgtgtccccacactgtgtgttttgccactcattgcaaagcacacagcatcccccctggagctgggcaagttgatgggcatgtctttgcagccatgtctcctggaggaaaggtgaaaaggcatcatgtcacaccacctccctttgcaggtgaggaaactgaggccacgggtctgayctgaagtcagtagagagaggcagagccagaaatgacagtctggatcataggactccctcacctctgccacaccacagtgccccttttcctaagatatgcccatggtaggtcaatagctgcttgacaggaactgtacccagcactttccaaccagcccaaggacatgttagggtgaccaaccatccctgtttgcctgagattaggaggggctcctgaaacatgagattttcagagctaaaacgag

SEQ ID NO: 34847 - DNA, 1563 bp, Homo sapiens
ctttcaataacagctttccatttatggggcaagagatggtgtgggaaagagataaagtattgaaagcaatggtaatccctcaaagaacattttaataatgcccatcatttaagtaaccaggtgtttttcatttatatagcaacagaagccacatcctgaggattcctgtcagggtacagcatgggaccaggagtcttgccaatacttccccagctctgccactacgaggtgtgagccccagatcctgttactcccctctctggggcccagtttcctgagctagaacacaggagctcctaagcctgtctcccctccttcggttcagggcatcccattgtcagcccctacctatgcaacatctgctctctccccactcccatgccattccaccccctagacttgatttctgaggtcctgccccttgtggctggctttccctttctctaacctgttcacctatcattcttcctccagtagtttggcccttttgaaagtgctctctatcctggtatcctgtgagattccatgatctctctagggaggaagaagcataaagttctggtctctgctacagatcggccagrttttagattttttccctaaacccattcagatcactttcagtgtgccaggccttgtccaaagggctttacattttaactcacgtaacaccaggaagtagatactgctattgttatcatcatcatcatcatcatcatcatcatcatccccatatttaaaaggagaagaatggggcacagagaggttaagtaatttgccctaggtcacacagctggtaaggggcagagatgcatgtttttccaggcggtctggctttacaatccatgctcttttttttttttttttttttttgagatggagtctcgctctgtcgcccaggctggagtgcagtggtgtgatcttggctcactacaacctccgcctcccgggttcaagcagttctctacctcagcctcccgagtagctgggattacaggcacacgccatcacgcctggctaatttttgtatttttggtagagatggggtttcactatgctggccaggctggtcttgaactcctgacgtcgtgatctacccgccttggcctcccaaagtactgggattacaagcatgagccactgtgcccggcctctatagcctgcacaaaataataacagtttctcagttgtgagaaaggacaaagttaggaaattggttattattttgctatataaattgggcaagttatttaaccttgtcatagctgtaaatgctgaaccatttaagagtatgtggcagacatcatgacatttcactctaaatatttctgtgtatatctaccaagaacagagacactgccctatatgacctgagcactatcatcgctgatacactgatacacagtgtatcatctaatacactgtttattttcaaatgtctctgtctcgaatctcactctgttgcccaggctggagtgtactggcatgatctcagctcactgcaacctccacttcctgggttcaagagattctcctgcctcagcctcccagatagctgggact

SEQ ID NO: 34848 - DNA, 619 bp, Homo sapiens
atttgagtgattttgatttatttagaatcactcgaggttacccatatgtcgtgggggatgggggagtgctaactaactagagcaagagtaggctctgcagcaagtttagactgtagtacaagccactctaccatttgggccttatgatcctgcagatccaatgacactttaagtgtccatagcaaataagggtgctgtacagaatgtsttgcaagcaccaataagggaaccacacatggacctttaggaattgggagcaaatctattccttctttaatgataattattcaccttttgagaaacaacttcttgggccttggtagaaagtaaacaccttactatagaacactgggtaaccatgtggcctaagcttcccatcaggaattaggtattgtctaacttacgtagctacaagactggacatgcacagcagcaatctattatcaaatgaaaatggcttataagagaccaagcatatactggtaataagaacagatacacagaccaaaagaatagagagctgataaataaaacctggatatataaggtcaaatgattttcaacaacaatgccaagaaccaatggggaaaggacagtcttttcaacaaatggtgctggg

SEQ ID NO: 34849 - DNA, 887 bp, Homo sapiens
tgcatctaggcaaaaaggtaaaggggtaggggagaaggcaagtaagaatgatcagcttgcattattcagggctgttcttcatatttgcttctacaattcttaagagttattacccttataacycttcagttatttgagcaagacaatgaatttgtctgcacaacttcatgcaagatgacattttaaagatcagaatttgggccgggcgcggtggctcacgcctgtaataccagcacttttgggaggctgtggcgggtggatcacctgaggtcaggagtttgagaccagcctgaccaacatggcgaaatcccgtctctaaaaatacaaaaattagccgggcgtggtggcgcatgcctgtaatcccaactacttgggaggctgaggcaagagaatggaatgaacccaggaggcaaaggttgcagtgagccaagatcgagccactgcactccagcctgggccacagaacgagactccatctcaaaaaaaaaaaaaaaaattaaaaaaaaaataagttaaagaaggaaagtagtaaacttacagcatttcccaggagagctaaacccagaagtcaaaacaggaaattacaagtcaaatgaacacatgcagaagtcataggtactgggtgactgtactagccaagttgccctgacaggcactggcaaacatccattaactaacagcgccagacctctcattgtttcttactccaactttctgctatactaccaaaagcttaatttttgcccagaaacccttggacacttaatcaaataacattagtataaaacatgccatgtcatgaagcttgcttcatgatgactcagcagcttctgcaaaacatccagttgacagcctaggataataaacagcaagtgggtagaccctat

SEQ ID NO: 34850 - DNA, 582 bp, Homo sapiens
tgttctgctgctgaggacatctcagccttccatcagccacacctgttccattgttactgccttgatcttcccactgacccccagcagccacttaaagaaatttaagtaaaaagactgaaagatatagtctccaggctcaaggggaaggtgtttgaggaaaacaaagtgaacaatgcaaagaacttcagatcctaacacctgggtggagggtccactttactaggtgacaatgggaaaatgacttagcctatgacctagacttgctttccttaatttaaaaagtagggacaataatacctgttatagttacctcacaggktttaacacacacacacacacacccacacatacacacatacacgtgaaatttatatatggaagcccttcatgaatttgcaaattacagaataataggtcatgttattactcctcttctcctggtcttagactttccatcaaagactttgtgggaaaatgttaatcctttgaccttctgagatatcctttctccactccctgcaaagcaccagttaaaccacttaaggtggagaagctgtgtagacagaacagatatttgtaaca

SEQ ID NO: 34851 - DNA, 1317 bp, Homo sapiens
tgcatctatatttccgcacatttgccatctcccattgactatgtgactccctttgtatattacttaaggctcaacaccaccattccctgcagggactgggggcctcctatgaaagtcacttagccaggccctgtcactctgccaagcttttaccaatcctctccaaagtaaggcaatgagtctgggctatgaagccaagactcaagtcttactttggaaggactggcatacccattgctcatctggcttggagaatcactgatacgggcaaactcctattgttcaataccataataaccagacaagacaagactcctttagaaatggagtctgtctgggcttaccactttgccgcattctgtaatgagcttccagtaaaycagcctaggggctggcataccagtaaggtcttataaactctctctgactcaattttatacttcatgaaaccctgaagttgctgcaaggactggtagcagctggtccagtgtaagcaccatacgcatgtctgtaattgtcatctttatcctatcattttccccagggccggtatttcctattcccaatgtagtcttcctcctctattatccagtgcttttacgtttcatgatactgaaattggaagatttgacagattatgacaaatattactgacctcaaagctatttttctctttcttttgggtaatgtggtcccagcagtaattctgttgttgtatgttgatgatttcctatatgaaagtacacattttagataataaattttagcatagggattactctgtgtgtcagtactgctttacccatcaaactcactccaagaataatgtttcctcttcagaatgggttcttgtcttcccttccctatttgtttgcctggatctgtggtaacctagcaggtcagttatcagacttcttcctgaccaggaatattctcagcgtaattgctgtccggaaactcttcacagcagcaggtaagcaacagccagaacatttaagcacttgggagatacttctcccctatctttaggatgcacctgactatgttgtctgaatcactccccaggatttctccttcctgcaatctttggtgtctgcctgccttacctgagttccaccttctacagcattgtcattttcctaatacttgctggtgcaacaggcagcttttgcttgggtggagtgtttataaatggcttggatattgctcccaggtaggatttgtttatacgcttttttttaacctttaacaaataaatattgtatatatttattgtgcacaacatgatgatttaaaatatggatactttgtggaatg

SEQ ID NO: 34852 - DNA, 806 bp, Homo sapiens
cctcctgctgtgttaatgtactacttgattgggtgattcacaatccatgaattattaattactaacacaaccaatatattattagcaaaaacattaactagaactctaattttaaaaaccaaggtagttctgaaactgtctttggtatatgatgttcaagtctgataaaaggaactcactggcagctagtgtacttggtattggccaatagtgttcttggccagcaccccaggcagtaggaagcatttggccttttgaactgcctggaggtatggtcaatcatctgttacaatgggccagatgggaggccttaccagtgatccactcgaggatgccattgcaaaaggaatttatgattcacatggccttgggtcagatgccagtgtatctgtttcaacatcctacaagattactagttgttcacttagagtctctgagcagcagaacttctatttctctcgtctttcttgatcttaaccctggcatcctgttggaaaatattctgatgcaatggagcttccaagtttgctataaggaggcaggccacctatggaacagaaaatctcacaggccaaataaagatgatagatatrcatggttggttaaataaatttaaaatccactgcaagaagcaagggaaaaagatagcataattttacatacttagaatagggagcaagcaagatggtaggaccatagtgctgacctggaagtacagaatgtgccaacatcctgtctttccctgccacattaactttcccagctaatggtatgattacaaggactagcactgagattccagcaag

SEQ ID NO: 34853 - DNA, 1264 bp, Homo sapiens
tagtttatgtattgtgttgtatattttctaacttgacagcatatagttttccatattgctttattagattcacaaagtgtgaatatctttgtgaatcttataaagcaatatggattcttaaaggatacacattatattccaacatatccaatagatgaagtatttcttagctgaaaaatcttcttgtgactggatatttaatttgtagggttttcttttgttactcggctattatatctatatatgaactatatatgttacttaggttattagatgtttatgaactatgtatgtaagttatgatatatgatgataaatgaatattatttaacatgacactagtccacattggaattatttcttcagggtttattcctaagaaatgaaaattgtgaggcaaagagtttacgtatttcatttcctttgttcactacagagacgttagtttttaatccaaacaaaaataaaaacacagggaggattttgagcagaagaggaggtgattttattcatggtatggtgagaatactccaactgctgtattgagaatagattagaagcaaggaaccaagctgaaggttactgcagaaattcaggcaggagatattggtaactagaaccacatggaattagctcttagccaaaaaataacagtggcccttgtgagaagttgttggattctatacacattttgaatatgaagaccatagtacattccagatcaaggattgcaaagtgtttggaagaatragatttctatcaactgagctggggaagactctgggtagaagttttgaggtggtagggctcaagagtttggttttggacctattcagtttgatctgttaatcagttgatcaattgagttttagtggaacaaaaattacgatgtatcaatggtgtcttcagtttgacaaaatgcagtattattgtattatatctatgctttattttaatttaaaacatgctattgcaccaatagtattttccacttatgtaaccaattatcttagcagtactaattacatgatctagttttcttccattaattgccacaacaccatttacacactgcatgattcttttggatgtttttctattgttccttagatttttctgagtattcttattcttcaatacaataatgtcttaacattttagtctcatgataaattttgtaatgcaaatatttttcaatacctcccaaaattcttgtatagtcattcaactaggctttattattttttgccaactgtactcattt

SEQ ID NO: 34854 - DNA, 597 bp, Homo sapiens
ttctgtacagcctgcagaactgtgagccaactaaacctattttctttataaattacccagtctcaggtatttctttatagtaatgtaaaaatggcctaatacatattastaccctgcaagctttgcagttcaattgatctgtatatcaccagagcctaagatgtcctggtatgcatgtctcttgagtgatttacttgctaagtgaatattgatataaggtccctatttttcattaaatgattttccattttcatttctgccattaaatacgaaagtttgtctctgtttcatgactatactgtctacaatgaatgatgttaattttagtactgcttcccaaaacttccactactgttactttactgtggaatttccaaagagagactaagttggtcagtaaaaaagccaacacaagcaagaaatttctttgaagtcttaggaattaatctttaaaatttatgtaaattgtgagtgaaaaaatctataacatacctgaatttgtcttaataaaactaacattttcttctacatatttgagtagaattcatgccccaggaaaatggaccacatttgtccatacaaagacccaatagttct

SEQ ID NO: 34855 - DNA, 597 bp, Homo sapiens
ttctgtacagcctgcagaactgtgagccaactaaacctattttctttataaattacccagtctcaggtatttctttatagtaatgtaaaaatggcctaatacatattactaccctgcaagctttgcarttcaattgatctgtatatcaccagagcctaagatgtcctggtatgcatgtctcttgagtgatttacttgctaagtgaatattgatataaggtccctatttttcattaaatgattttccattttcatttctgccattaaatacgaaagtttgtctctgtttcatgactatactgtctacaatgaatgatgttaattttagtactgcttcccaaaacttccactactgttactttactgtggaatttccaaagagagactaagttggtcagtaaaaaagccaacacaagcaagaaatttctttgaagtcttaggaattaatctttaaaatttatgtaaattgtgagtgaaaaaatctataacatacctgaatttgtcttaataaaactaacattttcttctacatatttgagtagaattcatgccccaggaaaatggaccacatttgtccatacaaagacccaatagttct

SEQ ID NO: 34856 - DNA, 597 bp, Homo sapiens
ttctgtacagcctgcagaactgtgagccaactaaacctattttctttataaattacccagtctcaggtatttctttatagtaatgtaaaaatggcctaatacatattactaccctgcaagctttgcagttcaattgatctgtatatcaccagagcctaagatgtcctggtatgcatgtctcttgagtgatttacttgctaagtgaatattgatataaggtccctatttttcattaaatgattttccattttcatttctgccattaaatacgaaagtttgtctytgtttcatgactatactgtctacaatgaatgatgttaattttagtactgcttcccaaaacttccactactgttactttactgtggaatttccaaagagagactaagttggtcagtaaaaaagccaacacaagcaagaaatttctttgaagtcttaggaattaatctttaaaatttatgtaaattgtgagtgaaaaaatctataacatacctgaatttgtcttaataaaactaacattttcttctacatatttgagtagaattcatgccccaggaaaatggaccacatttgtccatacaaagacccaatagttct

SEQ ID NO: 34857 - DNA, 597 bp, Homo sapiens
ttctgtacagcctgcagaactgtgagccaactaaacctattttctttataaattacccagtctcaggtatttctttatagtaatgtaaaaatggcctaatacatattactaccctgcaagctttgcagttcaattgatctgtatatcaccagagcctaagatgtcctggtatgcatgtctcttgagtgatttacttgctaagtgaatattgatataaggtccctatttttcattaaatgattttccattttcatttctgccattaaatacgaaagtttgtctctgtttcatgactatactgtctacaatgaatgatgttaattttagtactgcttcccaaaacttccactactgttactttactgtggaatttccaaagagagactaagttggtcagtaaaaaagccaacacaagcaagaaatttctttgaagtcttaggaattaatctttaaaatttatgtaaattgtgagtgaaaaaatctataacatacctgaatttgtcttaataaaactaacattttcttctacatatttgagtagaattcatgccccaggaaaatggaccacatttgtccwtacaaagacccaatagttct

SEQ ID NO: 34858 - DNA, 524 bp, Homo sapiens
taatacaccaattttttttgaaatgttttttatgagttttctgcttttgctatctgatctctctctggttttatctgggggttttggaagacccaaaatgatgactggaatcaatttttcagcatactcatatatttatttaattagtactaaattttcaactaaaattaaatttaaactaatttttttaatttaacagaatttaatttgagaaggaatgattcatgaattgggcagtctccygagccagagtaggctcagagccatatggtggaagaagatttatggatagaaacaaggaaaggaaaggaaagaaaatggaagtgacgtacagaaacaagtgaccaaaacttagggccttagtgccactctcagttaatatcatttggggtttctggtcacagcacatcatttataaattgtggtgtcctaatggccacacatttcttcgagctcttatcattccagctggagaccatagaacaatctagaaatggttccatgcaaacgcttaaaacttttga

SEQ ID NO: 34859 - DNA, 1214 bp, Homo sapiens
atgaagcaaaggccaaggaagaaattcaagttaaaattaaaagagaaaaaggcaggcaaattaatgttctccagaaaaacaaaattaataggctgtatatagacagagaaagagagggctttctttttaaaaattggcttatgccactgtgtgtgctggcacattctaaaatctgcagggcagactagccgaccgaaaacccacagaagagttgatgtggcagttgtgagtctaaagactgccyggaggcagaattccttcttttccaggggacctcagttttttctcttaaggtctttgactaattagatgaagcccacacacattacagagggtaatcaggttttcttaaagtctactgatttaaatgttaagtatatctaaaaaataccttcacagcaacatctagtctagtgtttgactaaatgtctgggtataatagcctagccaaattgacagataaaattataaaactaccaagcaatcaaatagcttgctttctatttgattctcagattttcaaatttaatgtgctttttttttttttttttttttgagacagggtgtttttctgttacccaggctggagtgccattgcacagtcatggctcactgcagcctatgtctcctgggctcaagtgatcctcccgcctcagcctcctcagtagctagggctacaagcatgggccaccatgcccagcttaattgatttctgataattggatggaattataagacatgaaatcagttttgctggatgattgaaataacaatctgcctagtggcagatgactagaacaaacttctcaaagtctatcttgttttttcaataaaaaacttttgagtttaaataccaaaagtaaagtcaactgaagatagctatcaatgagaagggatgaatttgaacgtgtaaacagtaagataagcaaagcaagaaaaactagtagccaccaaacacaggatgtgtcatattcatatctctgaccccattaatttaaactgctaagcaaaacaaatacaactgctcattttcaaaacactttgtaaaagaaaacaaaattaactattataatactagggtgattctcattttgctcctgaagaaactgatgagaaagtttaatggcctttgtaaggtagcagttgagctttgacaaagttgggatttaaaaaatagctccctgccctgtcttcaccaggatacctctctccct

SEQ ID NO: 34860 - DNA, 520 bp, Homo sapiens
ggttgcccatgctggagtgcaacggcgcaatcttgcctcacygcaacttctgcctcacaagttcaagcgattctcctgccttagcctcccaagtagctgggattacaggcatccaccaccatgcctggctactttttttgtatttttagtagagatggggtttcaccacggtggcccagctggtctcgaactcctgacctcaggtgatcaatccgcccaccctgacctcccgaagtgctgggattacaggcgtgagccaccatacccagcttcatttcaccttttttaaaagaaaagtattataaatgttttgcagctgcatttctctcagcaaacaatgtggctaagttttatagaattagtgaaacagaagctgtaacagtcttcatccacattgaccacttactatctagaaaatcttcctaatcaccattgttgtgtcccttacctcatcgtcatgctcagattgacccgtctctatctcattgatggatctgcttacgtattcattttaaattat

SEQ ID NO: 34861 - DNA, 1011 bp, Homo sapiens
ggaaggttggaagtccaggccctcacactggatctctccacygctatactttttaactcccatcgagcagagagaagaacaaacttctgaaaccttctgagagcccaggctggcgacaagttgggtcagtacacctcaagtctctacacacatgcctgcacatgtggctcgggtatggtttgagagtagtacaagcaccaaaggctggctatcacaaaaccccccaccccaagcccacctaaataaacataaaacccatctcaaagcactgtctgtgaaaaacaaaatgccatttcaagacaagttctctagctatctcccacttcaacacccacattcatcctcacagaaattctgaagctgctgttttaggcacctgagaggaagctcagaaaataaaggtgatttagattgccacctttcaagaatccccaggaactggtgctgtctctattagatgtaaagtacaattcaatttacaaaaattagatctgttactacacactcagggagatgtccccacacttatctgagtaccatctgcttaaatgtttttgaatattggaagcaaaaatgcaaagcaaggttcaaacagttcaaatagacttttagttcactggagttttttggttttatccatgcattttctaagaaatcccagaaatcacaaaaacaaaatttaaatgaaccatcatatattctcacctgaaaggaggaaaggagtttgcttatttctaacagcatgactgccttcttggtccatccaggcatttcccaaattttcctgtgggaagtcactttaaatttattcctctactattgaagattacatctggctgggggaaacgtcttacatactttatttattataagttatttggaagactgttgctgtatgctcagtgtgtaccccaatgtcattctgaaaagcctaatcaccacatatggtggttggaaaaagcaaccactctttcatcccacaatcataagaaaaaatatttctaaccccct

SEQ ID NO: 34862 - DNA, 1011 bp, Homo sapiens
ggaaggttggaagtccaggccctcacactggatctctccactgctatactttttaactcccatcgagcagagagaagaacaaacttctgaaaccttctgagagcccaggctggcgacaagttgggtcagtacacctcaagtctctacacacatgcctgcacatgtggctcgggtatggtttgagagtagtacaagcaccaaaggctggctatcacaaaaccccccaccccaagcccacctaaataaacataaaacccatctcaaagcactgtctgtgaaaaacaaaatgccatttcaagacaagttctctagctatctcccacttcaacacccacattcatcctcacagaaattctgaagctgctgttttaggcacctgagaggaagctcagaaaataaaggtgatttagattgccacctttcaagaatccccaggaactggtgctgtctctattagatgtaaagtacaattcaatttacaaaaattagatctgttactacacactcagggagatgtccccacacttatctgagtaccatctgcttaaatgtttttgaatattggaagcaaaaatgcaaagcaaggttcaaacagttcaaatagacttttagttcactggagttttttggttttatccatgcattttctaagaaatcccagaaatcacaaaaacaaaatttaaatgaaccatcatatattctcacctgaaaggaggaaaggagtttgcttatttctaacagcatgactgccttcttggtccatccaggcatttcccaaattttcctgtgggaagtcactttaaatttattcctctactattgaagattacatctggctgggggaaacgtcttacatactttatttattataagttatttggaagactgttgctgtatgctcagtgtgtaccccaatgtcattctgaaaagcctaatcaccacatatggtggttggaaaaagcaaccactctttcatcccacaatcataagaaaaaatatttytaaccccct

SEQ ID NO: 34863 - DNA, 641 bp, Homo sapiens
aatttcttatattgttgtataactagcagttttatataatttttattctgctttctctaatttaatggtgtattattaatatgtaatacatttataattttattataattggtatgttaaattttttttctttytttgggggacggggtctcactttgtcacccaggccgtagtgcagtggcgtgatctcagctcactgcagccttgacctcctgggctcaagtggttctcctacctcagcctcctgagtagctgggactacaggcatgcaccaccacgcttgactaagtttttgtattttttgtagagacagggttttaccatgttgcccaggctggtcttgaactcctgagctcaaagcaacccgcacaccttggcctcccaaagtgttggaattacaggcgtgagccacctcgcccagccaaatatcttaaattatatactaacaataatgaatcagcaaaatacatttactgatatataacaagacgtgttgctacatggtcttcagagtaatcattttaatgtttgcataatatttcatcttattgctataacagttaaaagttattttttattgagggcttcttctgtttcgggtaccctgtatatagcatatatatatataccccataacaatc

SEQ ID NO: 34864 - DNA, 641 bp, Homo sapiens
aatttcttatattgttgtataactagcagttttatataatttttattctgctttctctaatttaatggtgtattattaatatgtaatacatttataattttattataattggtatgttaaattttttttctttttttgggggacggggtctcactttgtcacccaggccgtagtgcagtggcgtgatctcagctcactgcagccttgacctcctgggctcaagtggttctcctacctcagcctcctgagtagctgggactacaggcatgcaccaccacgcttgactaagtttttgtattttttgtagagacagggttttaccatgttgcccaggctggtcttgaactcctgagctcaaagcaacccgcacaccttggcctcccaaagtgttggaattacaggcgtgagccacctcgcccagccaaatatcttaaattatatactaacaataatgaatcagyaaaatacatttactgatatataacaagacgtgttgctacatggtcttcagagtaatcattttaatgtttgcataatatttcatcttattgctataacagttaaaagttattttttattgagggcttcttctgtttcgggtaccctgtatatagcatatatatatataccccataacaatc

SEQ ID NO: 34865 - DNA, 634 bp, Homo sapiens
ttacctactccctaacaagaattcctccagatcttatatacggggcctgcagggcaggacacaggcctatggtaattacttccaatgtatcgggcattgtgctaagcactttgcatgggtggtcacagcacctctggagccaagtgttgtcccataagggccacaaggcttyaagaggacggagcctaccccttggtcactgaggggtggccctggtctgcaaggctacagaactgccttgccaccctgtggcactgcctctcatttcatagctggcacatgtcattttgccacccccatcacatgtcatgctggcatcaacccagggaggtgggtagtatttttgttgaagagctgcaagaactctgcccagagaagtcgacaacctgctcaagttgtgcagctaataactacaaaagccaagactcaactcagatctgttgactctcagtattaccccaacctttatgccccaaaccaaaggatgcccttttcatttcagtcacgggtaaaatgaactttggcccattccgaaagatgataccagctatttgaacagacaggtacttgaggataatgaggtaattttttctaataagtaaagataattgtttgggtattaaaagctatgatt

SEQ ID NO: 34866 - DNA, 634 bp, Homo sapiens
ttacctactccctaacaagaattcctccagatcttatatacggggcctgcagggcaggacacaggcctatggtaattacttccaatgtatcgggcattgtgctaagcactttgcatgggtggtcacagcacctctggagccaagtgttgtcccataagggccacaaggcttcaagaggacggagcctaccccttggtcactgaggggtggccctggtctrcaaggctacagaactgccttgccaccctgtggcactgcctctcatttcatagctggcacatgtcattttgccacccccatcacatgtcatgctggcatcaacccagggaggtgggtagtatttttgttgaagagctgcaagaactctgcccagagaagtcgacaacctgctcaagttgtgcagctaataactacaaaagccaagactcaactcagatctgttgactctcagtattaccccaacctttatgccccaaaccaaaggatgcccttttcatttcagtcacgggtaaaatgaactttggcccattccgaaagatgataccagctatttgaacagacaggtacttgaggataatgaggtaattttttctaataagtaaagataattgtttgggtattaaaagctatgatt

SEQ ID NO: 34867 - DNA, 1128 bp, Homo sapiens
gagagttgacgaggtccgcaggggaggagttactggtatggccagtgagtgtactgaatactgattccaggaaaattaggaaaacacttctggtgtgtttgctcctgtaaccccggctgctgcaccaagcttctagtgtgttgtttttcttctattctctgaccccctcctctcaagtaagccatattttgtgcagatcttcggtctttggggaatgtgtctcttccattttctccctcccagccctgcccctcctctctttccgacctttgggtcctccacttcagctgagggaccctaaaaacttggctaccactttcccaaatctcaaaggaagataacagtgatggccattaaaatactgttcagctgggcatagtggctcctgcctgtaatcccagcactgtgggaggtccaggcgggtggatccattgaggccaggagttcgagaccagcctgggcaacatggcgaaaccccgtctctattaaaaatacaaacattagccaggcatggtggcccatgcttgtaatcccagcttctcacgaggctgaggcaggagaatcacttgaactcaggagacagaggttgcagtgagctgagatcctgccattgcactctagcctgggcggcagagyaagtgaaactctgtctcgaaaaaaaaaatactgttcaattacctctagaggaaagcaggaatagttaaaattggtattgctatgacaccagaaaacaaattttagactgacagatcacagcctagtgtctacttagactattatttttgcattgatttgtctacagttaacatcatacagaccatctaggagttactgcaaaattgataccagggaattaaaatacactttaaaatacaaagttctatataaattgtaaatcatctttcctagcggaggttgctcttctatatcagctttcttcctctgagcctctcatcatgtctcattaccttttgctgaatgcagcaggctgttcaatgctgttctcactgtcaacttttaagccgtgggtgccatgattatatagctgaaggagcttattttccggaagatttatgaaacctttgggagtcatctgctttgacagaaccctttgtggaatgagggagg

SEQ ID NO: 34868 - DNA, 1373 bp, Homo sapiens
tgcatagggattataactgatctctttttttcccttgtcaagcacatctcttctgtattttaggtcagggctccatccatcaaacatgagcctgtcctcacaagtttgtctcaatgcagaaaggagtcagaaatttctcatgtatagaaggaaaaaaaaactactcacaagaatattcttatttagactcagccaggagcaaaatcatttaagcagataaatgctgcactcctacctatgatactctcttccattcctcccaccaacgcacttcccgtctttcctttaagcatcttcttaagactcatctaatttagcacaaggcacttccaaagctttcttatgccactgctctcctgtgaatgccgtgcctattgcatatgcaggaacgtcagcactgtgaccaaagagcractggggtcctttcgactgtcgtcatcctctgctctcaccctgtgaccacttctgcaaagagggccctctttttttttttttttttaattgtcccagcaccctttggatttgaaatcgcccatctcctttccatgtgactagagcatggctgtcaattacaaagtcctgcattccctcccaccaagatgtgactcgtgtgggtcagcgtcccccatcccctcaaggtacagtcatcagaccagctaggggccaagacaccggcaaggccaggctgggtcattctgagagactgagatggatacagggcaagagacttttcttttttttccctcctgggattgcagtctgcagggactggagactgagcaccggcagtggccatctttcccacgatgtggaaagtgcctgacagagaaagaaacaacagagaagaaagtgggactgagggggtggtggtgatcaacacaggggcttcatccaagcaggagccaagagtttccttttttgcttcattcatttgaagtcaggtttctgatgcttgccactagaagactcaaatacacagggatgataaagaatattttcctcctgatcatcctggccaacatggcaaaaccccatctctactaaaactacaaaaattagccgggtgtggtggcacccacctgtaatcccagctactcgggaggctgagggaggaaaatcgcttgaacccgggaggcagaggttgcgctgagctgagattgcaccactgcactccagcctgggccagagggcgagactccatctgtctcaaaaaaaaaaaaaaaaaaaagaatcttttcctcccctctggtcagacacatctcttctgtattttaggtcaggacgctatccatcaaacgtgattctgtatgatttggggcactcgcatattaagtaaacattcataggcagtgctgtagagccattcacgtcaa

SEQ ID NO: 34869 - DNA, 1373 bp, Homo sapiens
tgcatagggattataactgatctctttttttcccttgtcaagcacatctcttctgtattttaggtcagggctccatccatcaaacatgagcctgtcctcacaagtttgtctcaatgcagaaaggagtcagaaatttctcatgtatagaaggaaaaaaaaactactcacaagaatattcttatttagactcagccaggagcaaaatcatttaagcagataaatgctgcactcctacctatgatactctcttccattcctcccaccaacgcacttcccgtctttcctttaagcatcttcttaagactcatctaatttagcacaaggcacttccaaagctttcttatgccactgctctcctgtgaatgccgtgcctattgcatatgcaggaacgtcagcactgtgaccaaagagcaactggggtcctttcgactgtcgtcatcctctgctctcaccctgtgaccacttctgcaaagagggccctctttttttttttttttttaattgtcccagcaccctttggatttgaaatcgcccatctcctttccatgtgactagagcatggctgtcaattacaaagtcctgcattccctcccaccaagatgtgactcgtgtgggtcagcgtcccccatcccctcaaggtacagtcatcagaccagctaggggccaagacaccggcaaggccaggctgggtcattctgagagactgagatggatacagggcaagagacttttcttttttttccctcctgggattgcagtctgcagggactggagactgagcaccggcagtggccatctttcccacgatgtggaaagtgcctgacagagaaagaaacaacagagaagaaagtgggactgagggggtggtggtgatcaacacaggggcttcatccaagcaggagccaagagtttccttttttgcttcattcatttgaagtcaggtttctgatgcttgccactagaagactcaaatacacagggatgataaagaatattttcctcctgatcatcctggccaacatggcaaaaccccatctctactaaaactacaaaaattagccgggtgtggtggcacccacctgtaatcccagctactcgggaggctgagggaggaaaatcgcttgaacccgggaggcagaggttgcgctgagctgagattgcaccactgcactccagcctgggccagagggcgagactccatctgtctcaaaaaaaaaaaaaaaaaaaagaatcttttcctcccctctggtcagacacatctcttctgtattttaggtcaggacgytatccatcaaacgtgattctgtatgatttggggcactcgcatattaagtaaacattcataggcagtgctgtagagccattcacgtcaa

SEQ ID NO: 34870 - DNA, 1373 bp, Homo sapiens
tgcatagggattataactgatctctttttttcccttgtcaagcacatctcttctgtattttaggtcagggctccatccatcaaacatgagcctgtcctcacaagtttgtctcaatgcagaaaggagtcagaaatttctcatgtatagaaggaaaaaaaaactactcacaagaatattcttatttagactcagccaggagcaaaatcatttaagcagataaatgctgcactcctacctatgatactctcttccattcctcccaccaacgcacttcccgtctttcctttaagcatcttcttaagactcatctaatttagcacaaggcacttccaaagctttcttatgccactgctctcctgtgaatgccgtgcctattgcatatgcaggaacgtcagcactgtgaccaaagagcaactggggtcctttcgactgtcgtcatcctctgctctcaccctgtgaccacttctgcaaagagggccctctttttttttttttttttaattgtcccagcaccctttggatttgaaatcgcccatctcctttccatgtgactagagcatggctgtcaattacaaagtcctgcattccctcccaccaagatgtgactcgtgtgggtcagcgtcccccatcccctcaaggtacagtcatcagaccagctaggggccaagacaccggcaaggccaggctgggtcattctgagagactgagatggatacagggcaagagacttttcttttttttccctcctgggattgcagtctgcagggactggagactgagcaccggcagtggccatctttcccacgatgtggaaagtgcctgacagagaaagaaacaacagagaagaaagtgggactgagggggtggtggtgatcaacacaggggcttcatccaagcaggagccaagagtttccttttttgcttcattcatttgaagtcaggtttctgatgcttgccactagaagactcaaatacacagggatgataaagaatattttcctcctgatcatcctggccaacatggcaaaaccccatctctactaaaactacaaaaattagccgggtgtggtggcacccacctgtaatcccagctactcgggaggctgagggaggaaaatcgcttgaacccgggaggcagaggttgcgctgagctgagattgcaccactgcactccagcctgggccagagggcgagactccatctgtctcaaaaaaaaaaaaaaaaaaaagaatcttttcctcccctctggtcagacacatctcttctgtattttaggtcaggacgctatccatcaaacgtgattctgtaygatttggggcactcgcatattaagtaaacattcataggcagtgctgtagagccattcacgtcaa

SEQ ID NO: 34871 - DNA, 1285 bp, Homo sapiens
aaacatttccaaaggcctgcaatgtgccaggcagggcactgaggaatgaggccatggagatgaactggatgcagtctctacacttaggaaacagagagagagagagagacagacagacagacagacagacacagagagatatagagagacagagagagatctgagtttcattataatatcatttgctaagtgctgtgattccccaaatccattcaacagctgactttcctcatgggggagctacagcagcttacaggtgccttggcatacagcttctcaagttatttgtcatgaagaaccagttgttttgttttgttttgttttgttttgtttttttctgagacagagtctcactctgttgcccaggctggagtgcaatggtgtgatcttggctcactgcaacttctgcctcccaggttcaagcaattctcctgcctcagcctcccaagtagctgggattataggtgcccaccaccacacctggctaatttttgtatttttagtagagacggggtttcaccatgttggccaggctggtcttgcactcctgacctcatgatctgcccgcctcggcctcccaaagtgctgggactacaggcgtgggccaccgtgcccagccgaaggaccagtttttaaaaaattttccacaccattagagatgactactttaataaaatatagtaaaaatgaactgctagaaaaaggaaatgaaaagatactgatacaaagtgcaagctcacttttaagttctttgattcaacagattattctgtcaaatcggcatgaaagttactaagcaccgactcaatttctgaacttatctcatggaccgctaaagagtttgcagagagcaccactcctgagccacagctgagtagyagcattgctatagtagagacttccacattgcacacctttcctaagatgtctagctgatatgttcagagagggaggctagaaagaaaaatgatttcaaattcactctctggactataaaaagttagttcagagagtctctctttgggaaggagaaccacagcaggagctttgggaaagtgtggctccatgctgtttggagataggtggtggcacccacctgctgtgttcaggtaacaaagtgtgaggctcatggaaagctgttcctggagccctgtctgcctccaccctgaacttcccaaccctaactatggcaaccccgcctgaagctccctccctgaatgagaagaacaaagagtcatctattaaaatgcactgggacatttcagaaaataaatcattttcaaga

SEQ ID NO: 34872 - DNA, 1285 bp, Homo sapiens
aaacatttccaaaggcctgcaatgtgccaggcagggcactgaggaatgaggccatggagatgaactggatgcagtctctacacttaggaaacagagagagagagagagacagacagacagacagacagacacagagagatatagagagacagagagagatctgagtttcattataatatcatttgctaagtgctgtgattccccaaatccattcaacagctgactttcctcatgggggagctacagcagcttacaggtgccttggcatacagcttctcaagttatttgtcatgaagaaccagttgttttgttttgttttgttttgttttgtttttttctgagacagagtctcactctgttgcccaggctggagtgcaatggtgtgatcttggctcactgcaacttctgcctcccaggttcaagcaattctcctgcctcagcctcccaagtagctgggattataggtgcccaccaccacacctggctaatttttgtatttttagtagagacggggtttcaccatgttggccaggctggtcttgcactcctgacctcatgatctgcccgcctcggcctcccaaagtgctgggactacaggcgtgggccaccgtgcccagccgaaggaccagtttttaaaaaattttccacaccattagagatgactactttaataaaatatagtaaaaatgaactgctagaaaaaggaaatgaaaagatactgatacaaagtgcaagctcacttttaagttctttgattcaacagattattctgtcaaatcggcatgaaagttactaagcaccgactcaatttctgaacttatctcatggaccgctaaagagtttgcagagagcaccactcctgagccacagctgagtagcagcattgctatagtagagacttccacattgcacaccyttcctaagatgtctagctgatatgttcagagagggaggctagaaagaaaaatgatttcaaattcactctctggactataaaaagttagttcagagagtctctctttgggaaggagaaccacagcaggagctttgggaaagtgtggctccatgctgtttggagataggtggtggcacccacctgctgtgttcaggtaacaaagtgtgaggctcatggaaagctgttcctggagccctgtctgcctccaccctgaacttcccaaccctaactatggcaaccccgcctgaagctccctccctgaatgagaagaacaaagagtcatctattaaaatgcactgggacatttcagaaaataaatcattttcaaga

SEQ ID NO: 34873 - DNA, 385 bp, Homo sapiens
atamatacatacatacataaaataaaaataaatggaggaactttttaagtattaataacactttgataacccaggtcagtgtctgacctctaacaaagtgaacaccagcgggctacttactctcatgtttttagcaattggttttatagatataagtaatgtctttcccattcattttacttttttaaaagcaggggccattcctttatttgccattaaaacctaattccctgttctgtatctaactggcttctgtagccaataaacgtgaagtacatcctgatagatgatgttattccttatctggcaaaaatgtagcaagtgtttgaaatgttgctaggtgaaaagcatgagatatggattttgagggtcaggaattacaaaa

SEQ ID NO: 34874 - DNA, 385 bp, Homo sapiens
atacatamatacatacataaaataaaaataaatggaggaactttttaagtattaataacactttgataacccaggtcagtgtctgacctctaacaaagtgaacaccagcgggctacttactctcatgtttttagcaattggttttatagatataagtaatgtctttcccattcattttacttttttaaaagcaggggccattcctttatttgccattaaaacctaattccctgttctgtatctaactggcttctgtagccaataaacgtgaagtacatcctgatagatgatgttattccttatctggcaaaaatgtagcaagtgtttgaaatgttgctaggtgaaaagcatgagatatggattttgagggtcaggaattacaaaa

SEQ ID NO: 34875 - DNA, 948 bp, Homo sapiens
ttctgggagaagaacaagagctgcacacagcaattcacttccagctctttatctgaaaacatttgacagccacccaagtggctttttttcctgtgcttattttatcaagtacctgtttatgctttgtattcattttcctatggggtatctatattttttattgatttttggagttatttayataatctatatacaagcccactgtcacatgtacacattgcaaatgtcttgttctgcagtgtgctgttttactcttaatttttcttaaaatatgttcttagttttaatatagttcaacttaataatttcctttaagattagagttttgtgttctgttttaggaatctatgcctgtcccaaggtcatgaaaatattgtgctgtacttctagaaattttattgttttgcttttagatttagatctacaatacaccagaaattacatttctatataatgtaaaagataggccaagttccattttatctccactatgaatatccaatagatcttgtaccatttattaaaaaggctgttacactgatgtgtaatacaaccttacccgtaagtgtccaaatatgtgtgggtctactgctgggttgtcgattctgtttctttcattgataaatctctttccttgtaccaattatatcttaattatcatagcttaataatctcttgatgtttggtatttctattggaacttcattgaatcattaaagagaattgaaatattttcaatattgaatcttctatcccatgaacatatcttcccatttgttttggttcttaaaatttctctcaataatattttattattctcttcagaggatagacacaccatgtatttatttgaaattttttattcatggcattaaaaataacatttaaaacattattgttgtttgttatagtagagtgtaacaaatttgtatatgttgaatatatatg

SEQ ID NO: 34876 - DNA, 561 bp, Homo sapiens
cccgcctgaggctgctttacagttagcttttttttttaaagtagaaggagtacactctaaagtaaccattaaaagtatagtatagtaaatatatgaaccgtcgagagaattttttgttatcatgatcaagtattatttactatatataatgtatgtgttacacttttgtgtgactggccgtgcaacagatttgtttacaccagcatcaccacaaacatgtgagtaatgcattgtaccacgacgttaagttggatacaacatcactaggtgataggaatgtttcagctcctttataatcttatgagaccaccatygtgtatgcagtctgtcattgactgaaatatccttatgtgacacaggactgcactagaaactagggaaaaatagtttgaagatcatcatttaatgaacagttcaacgtagagacttaatgattaaagaacaatggattttgctttctacaaaagaatttcaggatggcaaggaaacaggaaacacaacatcatttgtcaattttgtttctgattgttttaccatattccttctgggaagagataaaaa

SEQ ID NO: 34877 - DNA, 1241 bp, Homo sapiens
gaatatatgtatacatctgaaataaaaataaaatgacattttggcatcattgctaacaagaattattataataacctagatttatgaagctttgtgagcatttgcctagttatcaaaaaccgaggaaaaagtttactaaaagcatttaaacctatgaatcaaaaattaaaacataattgttgttattgcacatttgtgccctttcagaattgtgtgtgctataatcaatgctattgctttagaagttaagggaagtatatttgagtaggggttcaattcactgttaaagcatataaatgacagggcatgtaatttattaaagttctgggctactctaatctagtgtgaactrtgggaaaattttcccagcaatcttagggagggtaaggataactagcaagaccccagcgaaagtttttaggacccaaccctaaagaagcctgagtttgaatatttatatttgcaagctgccctcattctgccctcattcctcattctgggaagtaggggcaggctgaatatccactctaggatgcttctctaatgttaggggttttaggaaacctgtccctacctggctggcctcatcctgtatctgtaaaattaagctagataatagagattcgtggacaatataatgccagaggatggaatctcaatctggtccttttcttcttaatgtctctttctccctatttacactatgggccatgctttgccttcttcctcccccaccacccatgttaccctgactcatctttctcatttcccacaggggaaaagatgcgtgtaaagttatctgtataaatcttaaatctgtgagggaaagttaaaatcttttaaagtaatggttattttcttatgtaaaattgattcaaattcgtttgcagtcaataggaggtgaaagcaaacaacatgcttgtatatttccatcatgtacataactcttaaaagtgctgttgggataattaacataggaaatccaagggagaggctttagagatggaagttcaatgacaaaattactatttggtgatcaaagtgcttagaaaccccaaaacgaaaattgtctacacagcactttaacagagaacaatggtacagataaagtgttattaatttttaaggccttgtgatattttttataataagattctttgtattactttcaaggaggaatgatgtcataccaaattctgatgtctctagagcagtttggttaaaataagcatctgtttcag

SEQ ID NO: 34878 - DNA, 362 bp, Homo sapiens
agaagctgtgtgcccaggactgggagcagagaccaacatgtatatagcttactatttcataactatttgtattaactaataacttctcaaacccaattgcagctattgtattttaaggaaactttataacacaatctttaatatattgatmaaaatttaaaatatatatatatacttttttttttttttgagacggagtctcgctctgccgcccaggctggagtgcagtggtgcgatctccgctcactgcaagttccgcctcccgggttcatgccattctcctgcctcagccttccaagtagctgggactacaggaacccaccaccacgcctggctaattttttgtatttttagtagagatg

SEQ ID NO: 34879 - DNA, 1313 bp, Homo sapiens
tgcatatagccctgaatgggacttggggctgcctgcttggggaaggggataagttggtctgtgtatgaagaagagtgaaattgatattttgttattagaaaggtatatcctggcagagactgactagatactgaccaaactcatttttctttcttggcacagaaacaaacgacatttcacagcctccttggacctagttagctagatgtgctggttcctaccaatggaatgtgagctgaagtgatatgaaacttctgtattaaggcagttaaaagaaaggacgcaaaaccattctctttctttccttactgactggttggatgatgtcataacaatcttaaaactatgtgttgatgacaagcagcctgggttcctaaatgactgtgtggagcagagccccaatccaaccccactgacccacaagggatagtgatgtgagcaagaaatacatttttgatgacaagctactaagatttcaaggattatgttatagcagctagggtcatttactccatagtttaccaaaaaatwtttaggtatgtgtactaaagatcatattactgacatttctattacgtatgattactgttataccttcaaaatatctgttttaagcttttaaacacaaatgtaaaaatctgttttagaattcctattactgaaatggttttacctataacaacaaagatataagatgtgtaagaaaatctctgtagttaccgctaacatactcccaaacagcaatgatgagtggtaccatctctcctttaaaaatactaattagcactacagatcaatggaagactactacacttagcattgaagtgaatgaattttagtggaaggttcactgcatcatttttttctcaactcacacaaatgtagaaacaaggccaggagatcaccacatgtggatttacatcatgaggatacagtataggaaggaggctgaaaacatgtctgttgaagacacaaatgaacaaatgacaacatgaatggatgacagactatttcacagaagtattttatggagatcaaagacctgacaatgtaagtggttaagcacatggatggcctgtgttcctggtctacaactatatgaccttgggcaatggctttatttattttaatctcttaggcttcaatcttcttgtctatgaaatagggataataatggagtataacccatggagatgctgtaaggttaaattaaataatatacgtatagtatgtgcccaaagtaaatgtgaaaaatgttagctgttatcatctaccagtaaattgagttaatctcaggtgcatttcttgaatta

SEQ ID NO: 34880 - DNA, 522 bp, Homo sapiens
attgcttatggctacatagatgagtagtactgtaatagtatataaaacatgaaagggcatgatcaccaaatttaagagagggagaggattgacactcgggggaggcatacagagaatatcaaatatatctaatatttatttctcaaaacagaatctgaaaagtgatgttgcaagatttgatagaactgggtggtgggtacatatattggytctgttattccatgtactttcctgcactgaaaatcatttgcagtcaatgaaaacgaaagataaagaaggaatatgcaggggaggttagcagtatcaaatgctgaaaataggacaagaaaatgagggccaaagagactttctttggacgtgtcaaggagttcactggagaccaataattgtttggtttcaataagtggtgaggatagaaacaagattatggggaattgaggaggaactgtattgtgagaaaacggagacaagagaccacagattgaagaggtttggaaataaaaaggaacgaagtacaatttt

SEQ ID NO: 34881 - DNA, 522 bp, Homo sapiens
attgcttatggctacatagatgagtagtactgtaatagtatataaaacatgaaagggcatgatcaccaaatttaagagagggagaggattgacactcgggggaggcatacagagaatatcaaatatatctaatatttatttctcaaaacagaatctgaaaagtgatgttgcaagatttgatagaactgggtggtgggtacatatattggttctgttattccatgtactttcctgcactgaaaatcatttgcagtcaatgaaaacgaaagataaagaaggaatatgcaggggaggttagcagtatcaaatgctgaaaataggacaagaaaatgagggccaaagagactttctttggacgtgtcaaggagttcactggagaccaataattgtttggtttcaataagtggtgaggatagaaacaagattatggggaattgaggaggaactgtattgtgagaaaayggagacaagagaccacagattgaagaggtttggaaataaaaaggaacgaagtacaatttt

SEQ ID NO: 34882 - DNA, 1410 bp, Homo sapiens
gctcacctgatttttggttcttgtgagggtgcttttctgtgtgcagatagttgtgaaaatttggtgttctagcaggaggaacaaatgatgtaagcttctattccgccatcttgctgtgttcccgagatcaccacactcttgtagacaaccaaatctcacatgaacccagagtgagaatcaacttattaccatagggagggcaccaagccgttcatgagggatccgcgtccatggccaaatcacctcccaccaggtcccctccaacactgggtattacattttaacatgaaatttggaggggacaagcatccaaaccatatcatgaagtttctctcttcagccctgtctccagctctctattgattgaactgaccagctggtctggtaccatgcggacacagtctatgtgtcatagatgcagagaacgctccctcaaactcccaaatgcaataaacatgactttaaccttgaggaaatccaaaacacatggaaaccataaaaatggcattggagaaattaacaacaggttatgagagagacaagagtctctagttgtgttatattgatgagtcatgactagatcctgttaaaaaagaacctggatgatattataatgatatagatagcagagaacatgtaggaataagttaaatagctatctgatgagcaggtggagatactcaacaggtctctaaaaatttcagtcatcaaatcatgctattcacaggctaccctatcttataacatatttttcataatatatgcataaaaatgcatgtaatcattgcctatgttcatcaagcagctaattactttaaggatgaaaaaaattattagatcatattctccagtgagtggtttgtttatttaactggtgagatgaagattccagtttaggcccttatggcccagggggttgaattctgcaaaagcctcctacttgaccttccttagtagtgtttctcctactggagaatccaccagaatcacctatagggcttgttaaaccacaggcttttgggcctcaccctcagagtttttgattcagtaggtttggggtgggggtcaagaaktggcatttataacaagttcccaggttctgttgacactcctagcccgaggatcacacttggagaataaacactgtatagccactaaagcaaccatctgaaaacacttactttgtttgtatcactcttctcaaatactttcagaggcttacaattgcctacccaaaaaagtttagattctagtacctaacactgcaagctccagccaccttctctctccaaacttccctctcagcaatcagaagcacaaacccttcattccagccaagaaggtttcttcattggtccctgactcaatatgcttactgcttgctgctgacttcaatccttgcttcatgct

SEQ ID NO: 34883 - DNA, 549 bp, Homo sapiens
tatgattctgctggttagctggacaggatattctagtctaggctggctcaactgggaccggatggtgtaataaagcctcattcacatttctggggtctcatctgggacagctaagatgacttccrtagctagggcctctgtccacatgatctctcaccttttcaaagtctagcacaggattgttctcacagtgatggatagtttcctagaagtgggaggcagagagtttcaatgtgcaataattttccaaatgtttgcttatatcacattttctaatgtttcactgaccaaagcaagccacaagcctaagccaagattcaatgcaggagtggactacccaggaaggcatgaacaaattggggctactgctacaattatctagcacagtggctacatctagtttggaggtttggcattccatagttccatgcaccttcagatataagccatgtcttctgacttcaccacttgggagaaataaaggtgacattttaatctctaaatggaacttcttcatctttttgctcactttttttcaaaaataacatg

SEQ ID NO: 34884 - DNA, 533 bp, Homo sapiens
aaccctaaccccaaatgtgactgtttttagagatgggcctttgggaggtaattaggtttagatgaagtaatgagggtgaggaccccatgttggcatcaattcccttttaagaagagacaccagagagtttgcttccctctatgtccaccatatgaggagacagcaaggaggaggtaaggaagaggccttcaccaggagcagaagtggcttgcaccttgagcttcagaactgtgagaaaccaaatttccatcgtttaaaaaccacgcagggctatggtattttattatgggaccccatagtgactaatatacaaatatagccgaagattatttacatgatattaagcagatgatgaaacgagagagtagtaagtctgccraaaaagctaagctatttttaagcatgctactattaagccagggctcccctatccagcccttatttagtggtttttcatcccaaaggagagcaccttaaacatatcttaagtcacctggtaagatgtgcttcagtggttaggagagcacaggata

SEQ ID NO: 34885 - DNA, 526 bp, Homo sapiens
aaaatatttgaacactgaaaggcaaaagtgttaaggaaggataaactaacttaagctttttagatttttttttctgtactccgttttggagcagtctagtatttattacaggtatagttgaccccccttttgttttattttatttatttatttatttaatttattttgagatagggtctcactgtgtcacctaggctgcagtgcagtgacataatcttagatcactgcaacctccgcctcccaggttcaagcaattctcctacctcagcctcctgagtagctgggactacaggtacataccaccatgcctggctaatttttgtatttttttggtagaaacaagatttcactgtgctggccaggccrgtctcaaactcctgacctgaagtgatccacccacctcagcctcccaaagtgctgggattacaggcgtgagccacgcccccccccccccctttaaatagttttaccagcttcttgctccttttagtcttttcttcctctagcatttcctcccaaaagaaaa

SEQ ID NO: 34886 - DNA, 639 bp, Homo sapiens
aaattttcccattattctttgttttttgagacagagtcttgctttgtcatttgttagaaataaattttcggtgccaccaaagaaatagcactcaaacataaattttctcagcaaggcaattttacttctatagaagggtgtgtctcgcggatggagcaatggcaagagtacacctgaacaaaggaggggaaggggttcttatccctgacgcaggtagcctctactgctgtgtcgttcccctattggctagggttggaccacacaatctaagctaattccaactggctattttaaacagagcagggatatgagccagagtggcggggtgagcagtttcggcaggaaagacggttatggaataggtgactaaaggtgactcaggtcagagtaggtgaccaggggtgactcaggacrgagcaggtgaccaggggaacagatgtgaactactgattagaactggcgggaaggttgtttactgaaactaggggcaaagagatgaagagaacaaggaagttaaacttgaaaatggagaacaaagaactgaacatactgacatactgattctttgaagagaaacttagaactcgctgtgtttaacacccaggctggagtgcagtggcgcaatcttggctcactgca

SEQ ID NO: 34887 - DNA, 678 bp, Homo sapiens
agtctcaggttcaaggctacaacaaaaatcaccatctttgtcaaactttggagagggaaaatcttcactttcttaagcaacaatggatattgcctgtgtttgccactgtgtttccctgcctctcaattcgctgaaaaaggaactacctatccttacatttcacctactaatgtctcttctaacatcttagaggtccatggagaaggcatatggagaacatgttttatactgctctataaatagtattccaatcactgtgcttaatttaaatagcattmtcttatcatttatcagccttttatgtattttccaagtaaaatattaacatattatttcattggtcttcttttttatctggttctatatgaatgctattttttcccttctcttctaacatgaaatatattttctctttttgatcttgtgctatgaaacaatcttccaaagaactgtataaggtggtcataagtgaatattttaattaaaattggtaaaaataaataataacagtaataatcatgcactatagaaaatggctaaactgagattctaaattctacaaacagaaacaagtttaagttatgtatccctgattggttactgggttttcctatattcaaaaatattaaggctatatatacacaagataaacaaataaaatatatcaaagagcatgca

SEQ ID NO: 34888 - DNA, 678 bp, Homo sapiens
agtctcaggttcaaggctacaacaaaaatcaccatctttgtcaaactttggagagggaaaatcttcactttcttaagcaacaatggatattgcctgtgtttgccactgtgtttccctgcctctcaattcgctgaaaaaggaactacctatccttacatttcacctactaatgtctcttctaacatcttagaggtccatggagaaggcatatggagaacatgttttatactgctctataaatagtattccaatcactgtgcttaatttaaatagcattatcttatcatttatcagccttttatgtattttccaagtaaaatattaacatattayttcattggtcttcttttttatctggttctatatgaatgctattttttcccttctcttctaacatgaaatatattttctctttttgatcttgtgctatgaaacaatcttccaaagaactgtataaggtggtcataagtgaatattttaattaaaattggtaaaaataaataataacagtaataatcatgcactatagaaaatggctaaactgagattctaaattctacaaacagaaacaagtttaagttatgtatccctgattggttactgggttttcctatattcaaaaatattaaggctatatatacacaagataaacaaataaaatatatcaaagagcatgca

SEQ ID NO: 34889 - DNA, 489 bp, Homo sapiens
ggcgcccacctcgagaccctaccatggggctggagcccaaagtgctcgccccagctctgcatctgcccttctgcgtgctccctttcccgcaaggggtttgagaagcagcaggacggtgacctgtcagtcactccacacccctgtcacaagtactgagagggggaaccgggaactctcccatttcacagggactctaacttacttcctcatcactaagtttagagttgctccacacttgcttttttcttctrtgggtataggggagttggagttgctaaaatgtgctgcaacccatgttttccctttagcctggagtactcttgcttggtcccttccctcatcctactctcaccctacagtcacactcccaaaagtttgcccggatatggcttacttactgtacccattcttcatgttacctcctcaaagccttctttgaaactttccaccttcaagatcaggtatcctgtagtactgatatatatgtag

SEQ ID NO: 34890 - DNA, 489 bp, Homo sapiens
ggcgcccacctcgagaccctaccatggggctggagcccaaagtgctcgccccagctctgcatctgcccttctgcgtgctccctttcccgcaaggggtttgagaagcagcaggacggtgacctgtcagtcactccacacccctgtcacaagtactgagagggggaaccgggaactctcccatttcacagggactctaacttacttcctcatcactaagtttagagttgctccacacttgcttttttcttctgtgggtataggggagttggagttgctaaaatgtgctgcaacccatgttttccctttagcctggagtactcttgcttgrtcccttccctcatcctactctcaccctacagtcacactcccaaaagtttgcccggatatggcttacttactgtacccattcttcatgttacctcctcaaagccttctttgaaactttccaccttcaagatcaggtatcctgtagtactgatatatatgtag

SEQ ID NO: 34891 - DNA, 1341 bp, Homo sapiens
gagggctaataatttaacatacaatttctgaagtgttccatctcctagaatgatggttgccctggggccttccastcatgaagcaatggatttaagatcttcagggaaagggtggaggccaactctagcaatggagttatttctcatctttgactagcaaataggatttttgagtcactagcaagataatagtcttcaaagtcaggctttggtgaagaaaaataaatttctaaattccttgagctcccattaacatgtcaggaatcattgctggtggactggctcatagagtttctataaaccttgatagagaaaacttagcatataatgtaagggaagccttggctacaccggaaaggcagggagaaatcttgcatctttagggttgaggaattgtgggaagaagaagataggaaccagggaacagccaaagagttaaacacatgtgttcacagtttcgcttcttgggagaatcttgagtgaatccaacactgaggttggtggcctgctaccctcactggaacctctgtgctttgcaactgcaggggcaccagttacattgtattctttgtgaacggccattcctggagttttgtaatgctgtggcccttttttcaagcaaggccttatgaggacttcaggtctctaggaaaaatctggtagaaggatatggggcagcaccagtagaggaaagtggcttgaggggcgagcctctggaagctctcttggctctgctgaactttggtgtgttgggtaaaaggtctgaagcttgcttcatggcctggtgagaactcacagagctgccaagaagggcctggcatcagaaataagcaactaccaaggacaggaaagtcaacaacaaatgccagccatgagcatcagatgataaacttcatgccacgaggccaggtgaaattgtcagaattggcaaatgccaatcctgagatcagatcgacaccccatgccaggttggcagagaggggcagtacccaggccagctttctctcaccacctcaacccccttcctatgtctccactcccccagttatcagaaataccctcaagctttcacctccacccagaagccatcttgaaaagcaggaagaagacgggggtaaacagctctgttcaaagagtttaagttaaaattatatgaatgtttgttcccaaaaaagcatttgaatatgtagatactattaatttccaaattctgcccttattctcaccccatctccctactatctagcaagattgggagggagactggcagttaataaggaagactggatcagttaaagactataaagaagcttgtattttgttttgttttgtttttgccag

SEQ ID NO: 34892 - DNA, 517 bp, Homo sapiens
ttcctgcagggctaaatgttgagaaaaaccatgtgggcagttgactgtgcctacatgatggagccccagtgagaattctggatatcaaggcttagcaagcttcccttgttggcaatactccatgcacattatcacacatcagtgctgcaaaacagcactttccttactccatgggggagaagataattagaagttccactttcagctacctttccttgactytgccctatgaattacttcttcccttggctgattttaatctgcatcttttccttataataagccataaccacaagtataaaatagctttcagtgacctctgagagtctttctaatgagttatcaaaaccaagggtggttttgggaacacctcgaactcacaattggtttcagaagagtgtattcctatgagagctgttcccctaactttgcagttagttaacttttgcacctccattcaagatgaaaatacaccctgcctccaggaaacctttcctgaccacctcaattaaaaaaa

SEQ ID NO: 34893 - DNA, 511 bp, Homo sapiens
tacttgggtccatgtcttatcacctctagtagacaatgagctccttaagaggaaaatttctttcatatcttcccgattccctaagtgcttagtacactgactatgttagkgtggacatagaatctcaatttctttcccttatttcatctcccctgcccctctaaactttttccaagggtctctaaaataatattgactcttctattctgaggaaagaattttctgttaattttaaactggtaagatgatggtgcagtacagccaatatgcaggaggagtctgcaacttgatcatgtaatagtattgtacttcatttctttatttctggctttaagtaaatctaagcagggtgaaataaagctcaagctcaaacttgtggaatattttaaataattaaggagtttaaattcatttttcttcttgagcttcagttttaagagtaagttaattaaaatttgcaatttgctttttgttattgttgcttctagaattaggattaaaactgagattc

SEQ ID NO: 34894 - DNA, 511 bp, Homo sapiens
tacttgggtccatgtcttatcacctctagtagacaatgagctccttaagaggaaaatttctttcatatcttcccgattccctaagtgcttagtacactgactatgttagtgtggacatagaatctcaatttctttccyttatttcatctcccctgcccctctaaactttttccaagggtctctaaaataatattgactcttctattctgaggaaagaattttctgttaattttaaactggtaagatgatggtgcagtacagccaatatgcaggaggagtctgcaacttgatcatgtaatagtattgtacttcatttctttatttctggctttaagtaaatctaagcagggtgaaataaagctcaagctcaaacttgtggaatattttaaataattaaggagtttaaattcatttttcttcttgagcttcagttttaagagtaagttaattaaaatttgcaatttgctttttgttattgttgcttctagaattaggattaaaactgagattc

SEQ ID NO: 34895 - DNA, 615 bp, Homo sapiens
tgacatttagagagacaaagaagtttctcaggaytgtattctgtgtggatcaaatttccttcaggattcacagcagtatgcggcattggcaaatcctcacatgtaaaagcaaggatcctggagttctccttagatcattctaaaaaaggaagctttcaccaacccagcagtgttgaaggaaaactctcccattttgatcctatcatcatcacatcaccagttccttaagaaagaatcggccgggcacggtggctcacgcctgtaatcccagcactttgggaggccgagacaggcagatcacgaggtcaggagatcgagaccatcctggctaacagtgaaaccttgtatctactaaaaatacaataaattagccgggcatggtggcgggcacctgtagtcccagctacttgggaggttgaggcaggagagtggcgtgaaacgggtgggggggaggtgggcagagcttgcagtgagctgagatcgcgccactgcactccagcctgggcaatagtgtgagactccgtctcaaaaaaaaaaaaaaaattgcccatctttgtgctatttttttgagaactttaaaaaagatattgagacaaatgttacaatcaaacacaa

SEQ ID NO: 34896 - DNA, 615 bp, Homo sapiens
tgacatttagagagacaaagaagtttctcaggactgtattctgtgtggatcaaatttccttcaggattcacagcagtatgcggcattggcaaatcctcayatgtaaaagcaaggatcctggagttctccttagatcattctaaaaaaggaagctttcaccaacccagcagtgttgaaggaaaactctcccattttgatcctatcatcatcacatcaccagttccttaagaaagaatcggccgggcacggtggctcacgcctgtaatcccagcactttgggaggccgagacaggcagatcacgaggtcaggagatcgagaccatcctggctaacagtgaaaccttgtatctactaaaaatacaataaattagccgggcatggtggcgggcacctgtagtcccagctacttgggaggttgaggcaggagagtggcgtgaaacgggtgggggggaggtgggcagagcttgcagtgagctgagatcgcgccactgcactccagcctgggcaatagtgtgagactccgtctcaaaaaaaaaaaaaaaattgcccatctttgtgctatttttttgagaactttaaaaaagatattgagacaaatgttacaatcaaacacaa

SEQ ID NO: 34897 - DNA, 628 bp, Homo sapiens
gatgcaatgctgttgggaagtggggcctaattggaggtgttttggtcatgagaattccaacstcatgaatgaattaatgccaattataaaaaggctgacactgtgagctcattctcctgctctcttgcaccctccctttgcctttcccccatgggatgatgcagcaaaaaggcccttgcaagatgctggccccatgaccttgaacttcctagtcttcaaaactgtaagccaataaatttctgtttattataaattatccagtctcatggattctgttataacagcacaaaacagactaaaacagaggtcagtcatcacagttaccagttttggcaagcttttaatgaacaaaagaatcacttaatttgtactgcaaaatggcatgtttcctgcagatctgcaatgagaaaggaacagatgatgttacgctttttttctcaagcttccatgagatggggattcaacaactcttctaggaataatataagctatgacatagtttgatgaaatccatagaagtgaattgatttaatgccatcattaaaatttccactgtagaatggcaaggaatttattgagatagtatcctttttgttgttggtgtttctaaatacaatctgaaataatt

SEQ ID NO: 34898 - DNA, 795 bp, Homo sapiens
aaaggcgtgaggatcacctgaggtcagtagttcaagaccatcctggccaacatggcaaaaccctgtctctactaaaaatacaaataggtacctgtaatcccagcttctcagaagctgagacataagaatcgcttgaatatgggaggtggagcttgtagcagtgagccgagatcgcgccactgcactccagcctgagggacagagcaagactgtctccaagaaaaaaaaaggaagaatgtgacacattaaaaacatgctaaggaactggtttgtcagaactgaagatgctctaattcattcatatttttaagtaaaaagtgagaaatgaaaaaaagaagctggttttagaaaagagcatatgatttcagtttcgtaaaagtcttcaacaaaaaacaagaataaagttcttaagacaaggttaggggttacaaaaagttaaattatagtgacaatytctgactaggccaggctcagactcgtttaacaaagagctggtaccatctttttccctgaaatacttatctgctctggtcagacagtgtctttactaccctaccctttccccccaactctccgcaacatatatgtaattttaagctctatgcccatgcctgttgtttccacagttccttgcaaaatgctatacaagtccactaggtacttaacaagcacaagataataggtagagtcaaagctattactgttatctgtaataacccaaataagaaaaccagcaaaggccgggtgcagtggctcacgcctgtaatcccagcacttttggaggccaaggcgggt

SEQ ID NO: 34899 - DNA, 1079 bp, Homo sapiens
actctggttcactgataggtttgtcttttttatagaccaacgatgctttatcattatcattattgtgtaactctgtgatccatctatgtgtctggtgagggcaaactttccagaagccccgcagggcagtgagtaaaacagaaagaaagtgctgaaacccaggacatggaagctttgttttcacagagtcagagggcaggggccccagaggaaaaggtacttgtcccaggtcacccagcaaggggttcctgacccccactggagtccctctctgctccctcytgttgaaagagaccctgacccaaccagagggccctcccctcagcactccactggagtgggcctccttgggtcctcacaccgcctgggcagaccaccatctttcataaggaaatccatactgatctcctttacccagccctgattgtgcggcacgaggaggggaccaagagaagaaaggccctgttcctggcagcagctgcctgggaatctgcatttccctcccttggggaacctgctctggagggaaaggtttggggtgaccctgggacagatgagcctcctcctgggcagagggtagtagggcccaggccttccctcctagccccgctccctggacctctggccaggggccgggggaggacatatcagagtccccttagtggatggagctccttcgtgcagctggggctgatgggtgcctgcagcgcaggcccttcctgagagatgccatgggcccctctcccccagctctgctgccagccttggcctctgaatttttcttgggcaccttggaatcacctgcaatggaagtaaaatcctcttttcctgagccgcctatggctccagctcagggacgctttcttcacccaaagctagcaatatgggtgccccaggggtcctgctcctctattctgcacagcacagcctcaccctctcccccacaggctcctgcctgtcagtctatcacatggcgagagaggaaagagatgctaggctcgttttaataatcagatctcacatgagctagaatgagaactcacttattaccttgaggatgatacgaagacattcatgag

SEQ ID NO: 34900 - DNA, 612 bp, Homo sapiens
ctcccacagggggaagaaaaaaccccaccactaatgatgagcttactgtaaaaaaaagtacacatctcatgtgaatacaaactttcaaaagggaaagttagtagaagcaataaacagaacagttaacatccccccaagacctgggaacaatagaataatccaaaagtgctataaactcagcatgtttaatattctaaaaaagatcaaaggggccgggcgcggtggctcacgcctgtaatcccagcactttgggaggccgaggcaggcggatcacgaggtcaggagatcaagaccatcctggctaacatggtgaaaccccgtctccactaaaaaaatatacaaaaaattagccgggcgtggtggcaggcgcctgtagtcccagctacttcggaggctgaggcaggaatatcacttgaacccagaaggcagagcttgcagtgagctgagatcgtgccactgcactctagcctgggcgacacagcgagactccatctcaaaaaaaaaaaaaaaaaaaaaaagatcaaaggaagtatcagctgtatctttaycacagatccagatcccccagtcccttcccaccactgctcaccaaattgtcagataatggagatc

SEQ ID NO: 34901 - DNA, 1051 bp, Homo sapiens
atgcttcttccactagcaaattttcagaggagaaaatttagtttgagtcaagacccaaaactatgccttataacagtaagatttcactcagaaaattaatataaaataattaatttagactctgggacgtagaaatgttatgagtggctcattctgtcccagacaagccaccactgattttctgagccagaacatggggatcctatgccatccatacattagagcatagcatgtggctgctgtgggaagggcacagactgacagaaacccagggctagaagtgctcctgagagcttaaactttacaggggctctaagcatacagaaaacatccccatcatgcttttgccagcttctactcatgttcctctggaatctgcacttgcaccaaatatcccagatccagtactacctcttaaagccatacagaycaagcccaatccttcttctacatctatgaaagatgctgtaaagttacttgcacatttgtcacctgagataaatttcagtagtataagttattatggtctgaagactcataggtggaaagtcctttgctgggtgctattccaatttcattcattccttgacagccagtaaatgaaatgcctattcagccttttctccatgctactcatcttgagtctttaaatgggactattttctaaatgagcctcttttagtcatactaatgttgtagggcattttaaagtgtgatatcacttatcacaaccttttattttttgagcagagttttgctcttgttacccaggctggagtgcaatggtgcggtctcagctcactgcaacctttgcctccctggttcaagtgattctcttgcctcagtctcgcaagtagctgggattaccgggcccaccaccatgcctggctaattgttgtattttcagtagagaggtggggtttcaccacgttgggcaagctgatcttgaactcctgacctcaggtaatctgccttcctcagcctcccaaagtgctgcgattacagccactgtgcccagcctacaacttttgtatggtttaataacaaccct

SEQ ID NO: 34902 - DNA, 1051 bp, Homo sapiens
atgcttcttccactagcaaattttcagaggagaaaatttagtttgagtcaagacccaaaactatgccttataacagtaagatttcactcagaaaattaatataaaataattaatttagactctgggacgtagaaatgttatgagtggctcattctgtcccagacaagccaccactgattttctgagccagaacatggggatcctatgccatccatacattagagcatagcatgtggctgctgtgggaagggcacagactgacagaaacccagggctagaagtgctcctgagagcttaaactttacaggggctctaagcatacagaaaacatccccatcatgcttttgccagcttctactcatgttcctctggaatctgcacttgcaccaaatatcccagatccagtactacctcttaaagccatacagaccaagcccaatccttcttctacatctatgaaagatgctgtaaagttacttgcacatttgtcacctgagataaatttcartagtataagttattatggtctgaagactcataggtggaaagtcctttgctgggtgctattccaatttcattcattccttgacagccagtaaatgaaatgcctattcagccttttctccatgctactcatcttgagtctttaaatgggactattttctaaatgagcctcttttagtcatactaatgttgtagggcattttaaagtgtgatatcacttatcacaaccttttattttttgagcagagttttgctcttgttacccaggctggagtgcaatggtgcggtctcagctcactgcaacctttgcctccctggttcaagtgattctcttgcctcagtctcgcaagtagctgggattaccgggcccaccaccatgcctggctaattgttgtattttcagtagagaggtggggtttcaccacgttgggcaagctgatcttgaactcctgacctcaggtaatctgccttcctcagcctcccaaagtgctgcgattacagccactgtgcccagcctacaacttttgtatggtttaataacaaccct

SEQ ID NO: 34903 - DNA, 662 bp, Homo sapiens
agcctacagaattgtgagaaaataaatttctgatctttacaaattgcccagtttcatatattttgttatggcagcacaaatgaagtaggatatcattagtatgccaattattttaaataataaaaccaaggcaaagagaataatgttacaatgtaamtataattaataatactgaattgtacacttaaaaatggttaaaatgttaaattttatgtcatgtatattttgtcacaattaaaaataaaaataaataacaggaaaaaagaataagttacttgaccattgttacatggctactaagtatcagggctgggatttgaattgaggatttaagaacaattggtcttattacttaggacttagtgaagtcttctttgggttgaatgttattagagactttcaagcttaggtaccttgatgtccacatctcttcccagatttggagagttttcagccattatttatttaaataagctttctgcctctttctctccctctcttgcttctagaaatctcataatgtgaaagttagctcttatgctggtgtccaataaatcttgtaggcatttcttcacgtacttttttttctttgcatattttcaaatgtcctgtctttgagttcacagattctttcttttgcttaatcaagtctgctgttgatt

SEQ ID NO: 34904 - DNA, 662 bp, Homo sapiens
agcctacagaattgtgagaaaataaatttctgatctttacaaattgcccagtttcatatattttgttatggcagcacaaatgaagtaggatatcattagtatgccaattattttaaataataaaaccaaggcaaagagaataatgttacaatgtaaatataattaataatactgaattgtacacttaaaaatggttaaaatgttaaattttwtgtcatgtatattttgtcacaattaaaaataaaaataaataacaggaaaaaagaataagttacttgaccattgttacatggctactaagtatcagggctgggatttgaattgaggatttaagaacaattggtcttattacttaggacttagtgaagtcttctttgggttgaatgttattagagactttcaagcttaggtaccttgatgtccacatctcttcccagatttggagagttttcagccattatttatttaaataagctttctgcctctttctctccctctcttgcttctagaaatctcataatgtgaaagttagctcttatgctggtgtccaataaatcttgtaggcatttcttcacgtacttttttttctttgcatattttcaaatgtcctgtctttgagttcacagattctttcttttgcttaatcaagtctgctgttgatt

SEQ ID NO: 34905 - DNA, 1319 bp, Homo sapiens
gcatttactaccagcatcagggttattaatgcctctagatctagtcagaaaagagaaccaatccagatttgtatctctaagatgttgatgaaaaaactcaaacattgtaaaacatttcaagaggctttctgagccaaatgtgaggaccacgacctgtgtgtgacacagcctcaggaggtcctaagagcatgtgctcaagatggtttgtttacagcttgattttatacattttagggagactgaagttacaggaaaagacataaatcaatacatgtaaggtatacgttggttcagcccagaaacacaggatatctcaaaataggagcttccaggttatatgtggatgcaaaaatttcctgactgacaattggttgaaagaattaagctttgccaaaaaagttaaagtcagcagaaagaaatgcttgggattaagataaggggggttgtggtagccaagattcttgttacacagatgaagcctccaggtagcaggcttcagagagaatagattgtaaatgtcacttaccagagcttaaaaggtatcagactcttagttaaatctttcctgcatcaggaaacgatctggaaagagaaaggggttctctatagaatataaattttccccacaagagatggctttgcaagattattctaaaatatgtcaaataaatatattttggggtaaaatactttgatttcctttagggcatgttacctgtcatgtgatgttattccagagttaggttggaattggtatcttattgctacaaagagtctgttctctcagtcttaggatcaatgttaatgctggtcagttttatctaaaaaacaaaaaggagagggtataatgaaacttgtctcaggccatcttcccatcatggtctgaattaatttttcaggtttctttggaatcctgaaagaaatcccccckttggctgagggggaggggtacattctgtcagttggggggcttagaattttatttttggtttacaaaggttctgtctctctcaaacgccttctgctactaataaatgaatcaagtagagatcagagaatcaaagccactataagtgctatgggataagagaactatcataggaattagatcttacaaaattttgagaggaggtggggcaatgatagtctagaaggcagagttgagggatcagaggaataagacatgaatcagtcctcctgaagcattgatgtgaggaggtaagttagagcctgagagaatcaaagaagccacatgtgaccagctgccagtgggggatgatgaggggatgatgcgtaggtgatgatgggaagtgagttcc

SEQ ID NO: 34906 - DNA, 618 bp, Homo sapiens
atttgtcaaagatgttggaaggatgggaaatcctaacagaagatgatgtcaagaattaaagaaccaagatgtctttcttacctctgttttctcaaatgtggacctcaccaagaagcccatgaacctgattttggtactagcgaaagtgaaactggcatcctctgtggcratggccaacaggaccgcctggtggcttcagggtgtgaggaatggagatgttgctttggtccttagcacctgtgagagccgcgtgctcaggcctagtctcacctcggcccagctgggtgcagggcccagtgaccaaggcatgttgaggcaccgcagctgccagaagtgtttccttcttatgtgggctcagagctggccctccccttggtgctgaaaatcccattaggtacttgatagcccaggggcagcctggagctcacagagccaggcccaggccggagctttgtgtgttcatcttcagctctttcgggcatttctcaagctcagtagacgagctactctttgccaaccctgagagtgtggttttgacgtagaagttgattcagcatccctttttttgttgtttttgtttttgagacaagttctcatcctgttgcccaagcagaagtg

SEQ ID NO: 34907 - DNA, 1329 bp, Homo sapiens
tttctatgcatcatcatcttttgctttgcagctcatgaggtgctgtccagggccctctcacacttagcctgcctcttccattctgttctgttttgattattatcagctgagtcatttgaataatcatygagttactcttactgtgctgcctgagtgcatactggatttagtaccaggtctttcattatgccctgtcattccaggccgaggctgagatgcaggagcgctactttgagccactggtgaaaaaagaacaaatggaagaaaagatgagaaacatcagagaagtgaagtgccgtgtcgtgacatgcaagacggtgggtgaaggtgggggctgcagcaacccatgggccctgtgtggtgcttttgtgactcggcagcatgtggagaacctgtgggatctggggccctatctcgtgatgtgtcagttaattaggctggaaagcaaagggcgcaggtggcccaggacccggcttcctgcctgacctggctgctgtgctctgctgatggagtgtttgtcgaggggattcttctctcatttgaccacagcccccagtttggatgggtcctaacatctcttgccctggaccactgggtccgcgtggctctgactgctctttctcaggttttggcgtatcctcgctcagcgttctcaggccttgggaccgtggttgaaccccctggcctctcctgttatgatccaccactgctttcctactcctggctcaatctgctctgttgagtctcaagccagagtgtggattagatcatcatctgtgtttgcagaatttttatcataaatctgttagaaaattctaagtcctctattcttcaacactgattaaaaatgggaagaaagggctgggtgtgatggctcatgcctggaatcccagcacttttggatgtcaaggcaggaggatcacttaaggccaggaatttgagaccaacccgggcaacatcgtgagaccccatctcaacaaaaaataaaaaattagccggtgtggtggtgcacacctgtggctccagctacttgggaggctgaggcaggaggatcacttgagcccaggaatccaaagctgcagtgagctatgatcacgccactgcaccctagcctgggcaacacagcgagatcctatctcaaaaagaaaaaagacaagaaagaagaaagctcttgctgaacactgttccttccattaccatttgttcccactatccctgtgtggcaaatcagcctacttaataaacatgcagaagaggtggaagtggcatagcttaccaagtgcacttttctctgtcttattccttttaacactttagctctcctatgca

SEQ ID NO: 34908 - DNA, 584 bp, Homo sapiens
tgcacactgagtattttttttagtcattaattaaaaaaacaaaaacaaaaaccttgtaaacagaggctacctacctcagggcctgwcttggcatccaaccagaaggtcagttatgtgcaaatacagtgcaacctccctggtatcgctggctgaacagcctgcacccctgactcaggatctgagctagcagtggttaagctttcactgctgcccaactaccaaccccagttggcaggctcaccatccactcggtaactgatctagatagacacatgttgttctcaaatttcattttttctttttctttttttttttttttttttagatagggtctcactctgtctgacagacgggaatgtagtggcctgatcatagctcactgcaccctcaaactcctggcctcaaacaatcctcctgcctcagcttcccaaagcactgggattacaggtatgagccaccacacctggccttaaagtttttctgttataccagtctcttccactgctagaacattgcttactaaaagctgtgtgtcactttcaaggaggtttgtggagagctgcgggttcctaaacagcctttct

SEQ ID NO: 34909 - DNA, 620 bp, Homo sapiens
ggtgaggtctcatttctaaaaataataataataataattagctgggcatggtggcgcatgcatgtagtcccagctattccagaggctgaggcaggaggattacttgagcccaggaattcgaggctgcagtgggctatgttggtgccactgcactccagcctgggtgacagagcaagttcccgtatcaaaagaaaaagaaaagatcctgggctgggcgcagtggctcatgcctgtaatcctagcacttagggaggctgaggtgggcggatcacytgaggtcaggagttcgagaccagcctgaccaacatggagcaaccctgtctctactaaaaatacaaaatcagcctggtgtggtggcgtgcgcctgtagtcccagctactcaggaggctgaggcaggagaatagcttgaacccaggaggtggagtttgcagtgagctgagatcgcgccactgcattccagcctgggcaacaaagcaagactccatctcaaaaaaaaaaaaaaaagaaaagaaaagatcctggaatcccatgatgctgcgaatggaaagagcccccattgttaaagcagggagaatgagttgtagttcgataggaaatgaggaacatggttttaggaact

SEQ ID NO: 34910 - DNA, 620 bp, Homo sapiens
ggtgaggtctcatttctaaaaataataataataataattagctgggcatggtggcgcatgcatgtagtcccagctattccagaggctgaggcaggaggattacttgagcccaggaattcgaggctgcagtgggctatgttggtgccactgcactccagcctgggtgacagagcaagttcccgtatcaaaagaaaaagaaaagatcctgggctgggcgcagtggctcatgcctgtaatcctagcacttagggaggctgaggtgggcggatcacttgaggtcrggagttcgagaccagcctgaccaacatggagcaaccctgtctctactaaaaatacaaaatcagcctggtgtggtggcgtgcgcctgtagtcccagctactcaggaggctgaggcaggagaatagcttgaacccaggaggtggagtttgcagtgagctgagatcgcgccactgcattccagcctgggcaacaaagcaagactccatctcaaaaaaaaaaaaaaaagaaaagaaaagatcctggaatcccatgatgctgcgaatggaaagagcccccattgttaaagcagggagaatgagttgtagttcgataggaaatgaggaacatggttttaggaact

SEQ ID NO: 34911 - DNA, 620 bp, Homo sapiens
ggtgaggtctcatttctaaaaataataataataataattagctgggcatggtggcgcatgcatgtagtcccagctattccagaggctgaggcaggaggattacttgagcccaggaattcgaggctgcagtgggctatgttggtgccactgcactccagcctgggtgacagagcaagttcccgtatcaaaagaaaaagaaaagatcctgggctgggcgcagtggctcatgcctgtaatcctagcacttagggaggctgaggtgggcggatcacttgaggtcaggagttcgagaccagcctgaccaacatggagcaaccctgtctctactaaaaatacaaaatcagcctggtgtggtggcgtgcgcctgtagtcccagctactcaggaggctgaggcaggagaatagcttraacccaggaggtggagtttgcagtgagctgagatcgcgccactgcattccagcctgggcaacaaagcaagactccatctcaaaaaaaaaaaaaaaagaaaagaaaagatcctggaatcccatgatgctgcgaatggaaagagcccccattgttaaagcagggagaatgagttgtagttcgataggaaatgaggaacatggttttaggaact

SEQ ID NO: 34912 - DNA, 491 bp, Homo sapiens
gcctcattcctttctggttactaaaaagaggtgtggaaaacatgggcaggttgagtaggaatgaaaataattaaagggttagaagctagggcttcaaaaatgacaaatatggctttaggaaaagatcttaagcggaccaaaatttcgastgatcagaaaagtttacatgtgttccttctgcacttctgatccagtcctcagaatttcactcccaacagtctcacagatgcctccagtcactggaacaaacccccttttcatacctccttgcacaggagacttgcctcacacaagcccacattcacccactgggtcgctcttgtaccatgacacagacaccctttcatgcgttccctcaacagagagacccagacgccggccaacacatgtgtgcacacactcacaccacacacctcgcaccggcactccagcccttgtcccctcacagttgcctggccacccttcccacttctcccagctttcaaccaagc

SEQ ID NO: 34913 - DNA, 1270 bp, Homo sapiens
tcatgcacaatcctgggtgttcaccaggctgtcctgcacctcccatgactaattgacacactgagcttctgtccgaggtaaggcacttcaggctaaatggtgtagctcattgtttggagtcagcttaagaggacagaagaggccatgcgcggtggctcatgcctgtaatctcagcactctaagaggccgaggcaggggggtcacctgagttcaggagttcgaaaccagcctggccatcatggcaaaattctgtctctacaaaaatacaaaaattagcaggcgtggtggcaggcatctgtaattccagctacttgggaggctgaagcaggagtattacctgaacctgggaggtggaggttgcaatgagccaagatcctgccactgcactccagcctgggcgacagagtgagactccatctcaaaaaaaaaaaaaaaaaaaaaaaagaggacagaagctatttgcctggcctaaaatcatgcctgtttcccctggaagtctgccagaagattgcttctcccattttaatcaaaaacagtccagcccccctcccaacctttcagtgcttcttgacattggccaacttttaaatctccagttgtatgaggcctggaggttttcctagcacggttatacttattcaattttttttaaaaaaagaaatttcatctccaagcatttctatctctgttcttcccatcatttgaaaacagtcctgttatttttaccaagcaagtcaccttgctgagtgccctgaagaatacaaagagttcattcacccacaggcacgaggaggaaagactcaagccagagactcgggagatactgtctgagctcagcatcttggaagaagcaggttcaggagtagaaactcaaatgccctcaggggttggcaggtgaagggcatgaggaccctgaagccggggctccacaggccctacagcaggctgtgcaacagacaggctcaccccaatgtgttgaaaatgaaaacttaaaaaaaaaaaaacctctgctggctgaacacagctctttcagaggcttataaataaggaaattaggaccagagggaggaagtagccaaggccacttagcagcacagctgtcccyagacccacatttctcagcacccagtgtcctgtgccttccccatgtgcgatgctgttgctcttatacagaaggtgtgctggaccagtacccgcaaagcacacactgatgtgtgggtcgcctccagaccagaatatagatttccctccctacacctttctgaaatcc

SEQ ID NO: 34914 - DNA, 737 bp, Homo sapiens
aggtttcagagttttagagggtttcacttggttcctcaaatggactgtgctaaaagcaatccagtctcacagtaaggagtactgttctgccctgggattatccagatgtaatgatggagatgcaatggagtagtgatacagagtatagataattaaaaaaattaaaataaagttagaaaaaagtccaagatttgaatatagcttttaattggattgagcttggaatatattcctattataacaggctatcttaaatgtatccctataacagatgcaaagaatataaatttgccttaaaaagactattagaaagaaaaacagcatagctatttttcttaacatcaactacaagaatcaatagaaatagaaaaaatgatcctaaaatttatacagaaccgcaaaagacccagaagagccaaagcaatccagtaattgcttaattgcataaatattatcctggttaaactgtctgtgtatttaaaaagtctaaattatacctcaatagagatggagaaaaattttaaaaatctactatttccatctgtcaatttctgattaaatatactaycatttgtccatttctttttatagatacagattctttgttgattacatacacaagaaaaagtctttcttaaacattttatatgcaactgtacttagtcaaacctagggctactgctagtcttccagtggtgttttgtccagttcaagagctgctggtgttttgtggatcc

SEQ ID NO: 34915 - DNA, 1878 bp, Homo sapiens
tttttctaggctcttatttaacttacatgtgctctttggcaagttcaatgtcaaggaactaattacagtgattatggtactttcttttctttttttagacaggatctcgctctgtcgctggggctggagtgcagtggtgctattggctcactacaacctccgcctcccaggctccagtgattctcctgccccagcctcccaagtagctgggattacaaacgtgcactaccacacccggctaatttttgtgttttttgtagagacagggtttcgccatgttgcccaggctggtcttgaactcctgatgtcaagtgatccatcagccttggactcccaaaggtgcttttttttttttttgagacggagtctctgtcacccaggctggagtgcaatggggcgatcttggctcactgcaagctccgcctcccgggttcacgccattctcctgcctcagcctcccgagtagctgggactacaggcgcccgccaccacgcccggctaattttttgtatttttagtagagatggggtttcaccgtattagccaggatggtctcgatctcctgacctggtgatccgtccgccttggcctcccaaagcgctgggattacaggcgtgagccaccgcgcctggccgctttttaaaaattcattcaaccaacatttccacggatccctcatgtgccacacactgtgctatctactggggaacctattggacagtaagcttcctgagcgttaggagcaaactgtctcgttcaagtctgtaaccggccttgccttcccccaaaatgaaactgtgcaccctccctcgccctcaaatccacggccactgacaagtactgtggtcccatctccaaaacactgctcaaatctgccacttctctccaacttcactgccagaaccctaggccaagccaccgtcaacctttaacccaatgactgtgttagctttctatgttggtctctttgtccccgtgcaatctgttctgcatacgacagccacggtaatcttccctttccttagtaacctttaggaacataaatcagatcatgggggtcccttcattgaaattctttaatgattttccattgcccttagaaaaaatctacaaagcctgcgaggcaatgattcatattctctctctctttccaagctttctactccctcacattttccacaatccaccacgtccaattctacccaccccgacacccataacgatgctccagccgggccagcccgcttccaccttctggaacacactaagctgctttgaggtctcaggctctgtcgaagaaagctccccccaggtccttctcgcccttcggtctccacttactcatctttctgagactttctggaccaccctgagtcgtccactgtcgtgcatttgtttactacctgctcgtgcctttaaactgtaagcgctgtgaaggcagcggaaatgtgatccgagccatgcacaccgtccgcattcaataatcattggcaaatcatgaatacgagaaaccaatgaatgaatgaatgaatgaatgaataaaagaaagcccaggcggcaggcacttggcaagcacttaaaaggctgcgtttaaaaggaagaacccgattccttagtagacggccagcaactcccagcccccggcccggccatgccagcyccgagcggtcccaagctgccgccaaatccagatcgcgcccacccgagctcccgggaccccgcgcctctagcctcggaccccttgcaacccgcgcagagacgtgcgaggcggccccggccccgccgcccgagggtcacacgcacgcccggggcccgcgctcctcacccgatgccgggacgccttcttcgttcacagctgaacccgccaaaattccaacc

SEQ ID NO: 34916 - DNA, 761 bp, Homo sapiens
actggataggttggtattcttattctcagcctttagaggtcaaaaatccttctgcccatctgctttttttccctccttttgttctttagcattatctcagcaatgaggggctgaaacatcatagtttgattatattgctttctaaaatgtccagaattccaacaaaaatgtcttaactaggtttccatgtttatcttatcttattttcctataagatacaaatgtactgtataatatttgatgacaagctcagatgcattttaacacattgagaaggctacaaaagcctcactcttattatctaagaattccttgggaaaagatgctgtgctcgaatccgtttttgctacaaaactgggcttgcaatttagcaatgactctgaagaaaaaagacttcaatatacatgtaacaaaacatgtgtatgatctacatggtgaaaattacaaaatgttgataaaagaaatcaaaggagacctaaataaataaaggccgatattgtgtccatagattggaacactcaacatagtaatgatgttaattcttctgaaattaatgtgcaggtttaatgtaattcctatcaatttttcagcaaggtttcacagacacagatacacaacatctttaatgaatctccagggatttaagctgagtgaaaaaaagtcagtttcaaaagattaccatttcattkatatggcatttttgaaatggcacaatttttagaactggagaacagattatcgattgccagtggttaaggatg

SEQ ID NO: 34917 - DNA, 460 bp, Homo sapiens
atgaaaattagcggtttgtatgtagaaaggaaaagattcagaaaggaaactctattataaaaccatcaacttattgagaaaggtaaaaatcctacaatgtgatgaaaaaatatattacaaatgagtgtaaaccaccacctagatctttgctcctgctgtgtttatgcctgaggcctttttatttgatcacggttttattaatggaygtgaaccaatgtacaagctggtgaaagtggtagtacctgtggtataaagtatattgtctgaagaatgactttccccccatatccaagtgtaataaatcatggatgtcaatttagcacaggtggcattaatatgtggttgagggctgctaaatttttcagaaaagcaaacatagccaaattaatccatataggaaaattttcacaagatagaacagcctttctccaatgtgcatttggttaaattattatgtttg

SEQ ID NO: 34918 - DNA, 460 bp, Homo sapiens
atgaaaattagcggtttgtatgtagaaaggaaaagattcagaaaggaaactctattataaaaccatcaacttattgagaaaggtaaaaatcctacaatgtgatgaaaaaatatattacaaatgagtgtaaaccaccacctagatctttgctcctgctgtgtttatgcctgaggcctttttatttgatcacggttttattaatggatgtgaaccaatgtacaagctggtgaaagtggtagtacctgtggtataaagtatattgtctgaagaatgactttccccccatatccaagtgtaataaatcatggatgtcaatttagcacaggtggcattaatatgtggttgagggctgctaaatttttcagaaaagcaaacatagccaaattaatccatataggaaaattttcacaagatagaacagcctttctccaatgtgcwtttggttaaattattatgtttg

SEQ ID NO: 34919 - DNA, 636 bp, Homo sapiens
catgcttcttgtggaaccaacaatrgtggaattttctttcctttctctggtttgaacactgtatatttgtgatgcaggtggcccagcttcattctctgctgcattttttaattagtgtcgtttctgggtcgtgttgttggtgtcctggtgcttgttcttagatgctgtgctatgtgaacggcctgtgagggctcttgtgtttccttattggaatctgggtatattcttcaaagaaggttgttttttaaggatgttttggctgcatggaattgtttagttcttacttttctccaaaatgcatccataatttgccctgctctacagtgattgaaaacttgggtatataatcttgaactaagataaaatgggaaagaaaaattggacctttcttcattttttttattaaaaagttagcaagaagacaacccagggaaaatttttacatctttaatgtcagctattaggtaggataacagaatggaaatggactggaatgaattcaaattttgctttggtactacctagccaaatgatctcaaacaatcttctcaactgttaaggtaacaatttcttcttctgcaaaatggaggaattacactaataaaccacctgaaaagactttcttggctctaacat

SEQ ID NO: 34920 - DNA, 636 bp, Homo sapiens
catgcttcttgtggaaccaacaatggtggaattttctttcctttctctggtttgaacamtgtatatttgtgatgcaggtggcccagcttcattctctgctgcattttttaattagtgtcgtttctgggtcgtgttgttggtgtcctggtgcttgttcttagatgctgtgctatgtgaacggcctgtgagggctcttgtgtttccttattggaatctgggtatattcttcaaagaaggttgttttttaaggatgttttggctgcatggaattgtttagttcttacttttctccaaaatgcatccataatttgccctgctctacagtgattgaaaacttgggtatataatcttgaactaagataaaatgggaaagaaaaattggacctttcttcattttttttattaaaaagttagcaagaagacaacccagggaaaatttttacatctttaatgtcagctattaggtaggataacagaatggaaatggactggaatgaattcaaattttgctttggtactacctagccaaatgatctcaaacaatcttctcaactgttaaggtaacaatttcttcttctgcaaaatggaggaattacactaataaaccacctgaaaagactttcttggctctaacat

SEQ ID NO: 34921 - DNA, 620 bp, Homo sapiens
ctgaggattgtcctccagcagcactcccagcagctgagaaaataaatccttcattcctgaagggggatcggggtgatatagcacaatgtttacataaggctgtcattggctaagacagcccaatactttggcctctgggatcttcagcaactgagctgaaataacacggagtgccaccactcatgaaggtacaagggcaagattataaacttctcataatagattagagtaagataataaccacgtggacttaaattagaaccagaactgtttagagtactttaggctaaaaacatttttgatgacaattggtgaaggaattacagtctrccactagataaatatcctccagcaggaagtggttaaagctaattagaagtcacctgttttgagagaataagaactaatacagtctcctggatttgcaaggagaatttgtgttgtctcaataatctccctacgtgttatgccttcagggtctgaaagtgaaatgatcacaaactgtaagggcctatgaactagattagtattttattcaactatgagtgaatcctccatttatgtactctcactctgtgatcagcaaggccacaacaaagggaaactatgatttagtgctt

SEQ ID NO: 34922 - DNA, 620 bp, Homo sapiens
ctgaggattgtcctccagcagcactcccagcagctgagaaaataaatccttcattcctgaagggggatcggggtgatatagcacaatgtttacataaggctgtcattggctaagacagcccaatactttggcctctgggatcttcagcaactgagctgaaataacacggagtgccaccactcatgaaggtacaagggcaagattataaacttctcataatagattagagtaagataataaccacgtggacttaaattagaaccagaactgtttagagtactttaggctaaaaacatttttgatgacaattggtgaaggaattacagtctgccactagataaatatcctccagcaggaagtggttaaagctaattagaagtcacctgttttgagagaataagaactaatacagtctcctggatttgcaaggagaatttgtgttgtctcrataatctccctacgtgttatgccttcagggtctgaaagtgaaatgatcacaaactgtaagggcctatgaactagattagtattttattcaactatgagtgaatcctccatttatgtactctcactctgtgatcagcaaggccacaacaaagggaaactatgatttagtgctt

SEQ ID NO: 34923 - DNA, 620 bp, Homo sapiens
ctgaggattgtcctccagcagcactcccagcagctgagaaaataaatccttcattcctgaagggggatcggggtgatatagcacaatgtttacataaggctgtcattggctaagacagcccaatactttggcctctgggatcttcagcaactgagctgaaataacacggagtgccaccactcatgaaggtacaagggcaagattataaacttctcataatagattagagtaagataataaccacgtggacttaaattagaaccagaactgtttagagtactttaggctaaaaacatttttgatgacaattggtgaaggaattacagtctgccactagataaatatcctccagcaggaagtggttaaagctaattagaagtcacctgttttgagagaataagaactaatacagtctcctggatttgcaaggagaatttgtgttgtctcaataatctccctacgtgttatrccttcagggtctgaaagtgaaatgatcacaaactgtaagggcctatgaactagattagtattttattcaactatgagtgaatcctccatttatgtactctcactctgtgatcagcaaggccacaacaaagggaaactatgatttagtgctt

SEQ ID NO: 34924 - DNA, 1346 bp, Homo sapiens
gcatctctctgctttacaattttcaagcttacacacacatccatcttacagaggggagtgctgacaaaaaccctaccacttgtgttttttgtttgtttgttttgttttgagacarggtctcactctgtcacccacgctggagtgcagtgacacaatcttggctcactgcaacctccgccttctggattcaagtgattcccgtgcctcagcctttcaagtagctgggattacaggtgcgcaccaccacgcctggctttttttaaaatttttttgtattttttgtagagacggggtttcaccgtgttggccaggctggtcttgaactcctgacctcaaatgatccacccgcctcagcctcccaaagtgctgagattacaggcctgagccaccatgcctggctcctaccattttttaaagtctcagttcatatatgatctttccccaagaaaatctgacatcagtccccactctcctcccaaggttgaactagatgtccctcctttgtgcactcacaatctcctttaatttactgaccagtttaatccatattctgggtttctttgagagaaaacaatgactgatgcccacagtgaactcaatgttcttcaacaggaggatgcactgaaatgcccagacacttcttcacctaagctgcgtgtttgctgggatccattgtttgttctcaaacctatttctgccagtcgtacttgttagtttaattaagtaatttaactagatgtcacttgagtgaatagcacatgagtgaaagagttgtgttttctatgaaaacagatggatgctttggaaagataagatgctagaaatcgtacttttgaatgagccataggcaaaactacagacaggataggggaggggtatgtagtaatcttgaaagaatctcctttcagatttttttaagtgcccttaatttctaacttcactttataaaattccaacctggaaattgttgaagatgcctaatgaaagtagtttatgaagttcctatcagtagactcatgtcacaattagaagcctttggccccatatcaaaagattagtgacgtgtatgtgttaagtcaaaataaaatgtctaaggcatgcacgtatcatctttacctgttcaaccaattatgtattgaagtgatggggaaccagtgggcggcaggaagggagtcgggtatctttctctttcaatagattgtgagtttcttgaagacagggaccacatcttgctcatctaagtagtacctgtgcctgagaaaagtgttcagatcctcaaagattttcactaagtgctcttcacccagtggaatgctgcacttatttttgtttagggggtttcaggt

SEQ ID NO: 34925 - DNA, 1346 bp, Homo sapiens
gcatctctctgctttacaattttcaagcttacacacacatccatcttacagaggggagtgctgacaaaaaccctaccacttgtgttttttgtttgtttgttttgttttgagacagggtctcactctgtcacccacgctggagtgcagtgacacaatcttggctcactgcaacctccgccttctggattcaagtgattcccgtgcctcagcctttcaagtagctgggattacaggtgcgcaccaccacgcctggcttttttwaaaatttttttgtattttttgtagagacggggtttcaccgtgttggccaggctggtcttgaactcctgacctcaaatgatccacccgcctcagcctcccaaagtgctgagattacaggcctgagccaccatgcctggctcctaccattttttaaagtctcagttcatatatgatctttccccaagaaaatctgacatcagtccccactctcctcccaaggttgaactagatgtccctcctttgtgcactcacaatctcctttaatttactgaccagtttaatccatattctgggtttctttgagagaaaacaatgactgatgcccacagtgaactcaatgttcttcaacaggaggatgcactgaaatgcccagacacttcttcacctaagctgcgtgtttgctgggatccattgtttgttctcaaacctatttctgccagtcgtacttgttagtttaattaagtaatttaactagatgtcacttgagtgaatagcacatgagtgaaagagttgtgttttctatgaaaacagatggatgctttggaaagataagatgctagaaatcgtacttttgaatgagccataggcaaaactacagacaggataggggaggggtatgtagtaatcttgaaagaatctcctttcagatttttttaagtgcccttaatttctaacttcactttataaaattccaacctggaaattgttgaagatgcctaatgaaagtagtttatgaagttcctatcagtagactcatgtcacaattagaagcctttggccccatatcaaaagattagtgacgtgtatgtgttaagtcaaaataaaatgtctaaggcatgcacgtatcatctttacctgttcaaccaattatgtattgaagtgatggggaaccagtgggcggcaggaagggagtcgggtatctttctctttcaatagattgtgagtttcttgaagacagggaccacatcttgctcatctaagtagtacctgtgcctgagaaaagtgttcagatcctcaaagattttcactaagtgctcttcacccagtggaatgctgcacttatttttgtttagggggtttcaggt

SEQ ID NO: 34926 - DNA, 1346 bp, Homo sapiens
gcatctctctgctttacaattttcaagcttacacacacatccatcttacagaggggagtgctgacaaaaaccctaccacttgtgttttttgtttgtttgttttgttttgagacagggtctcactctgtcacccacgctggagtgcagtgacacaatcttggctcactgcaacctccgccttctggattcaagtgattcccgtgcctcagcctttcaagtagctgggattacaggtgcgcaccaccacgcctggctttttttaaaatttttttgtattttttgtagagacggggtttcaccgtgttggccaggctggtcttgaactcctgacctcaaatgatccacccgcctcagcctcccaaagtgctgagattacaggcctgagccaccaygcctggctcctaccattttttaaagtctcagttcatatatgatctttccccaagaaaatctgacatcagtccccactctcctcccaaggttgaactagatgtccctcctttgtgcactcacaatctcctttaatttactgaccagtttaatccatattctgggtttctttgagagaaaacaatgactgatgcccacagtgaactcaatgttcttcaacaggaggatgcactgaaatgcccagacacttcttcacctaagctgcgtgtttgctgggatccattgtttgttctcaaacctatttctgccagtcgtacttgttagtttaattaagtaatttaactagatgtcacttgagtgaatagcacatgagtgaaagagttgtgttttctatgaaaacagatggatgctttggaaagataagatgctagaaatcgtacttttgaatgagccataggcaaaactacagacaggataggggaggggtatgtagtaatcttgaaagaatctcctttcagatttttttaagtgcccttaatttctaacttcactttataaaattccaacctggaaattgttgaagatgcctaatgaaagtagtttatgaagttcctatcagtagactcatgtcacaattagaagcctttggccccatatcaaaagattagtgacgtgtatgtgttaagtcaaaataaaatgtctaaggcatgcacgtatcatctttacctgttcaaccaattatgtattgaagtgatggggaaccagtgggcggcaggaagggagtcgggtatctttctctttcaatagattgtgagtttcttgaagacagggaccacatcttgctcatctaagtagtacctgtgcctgagaaaagtgttcagatcctcaaagattttcactaagtgctcttcacccagtggaatgctgcacttatttttgtttagggggtttcaggt

SEQ ID NO: 34927 - DNA, 1346 bp, Homo sapiens
gcatctctctgctttacaattttcaagcttacacacacatccatcttacagaggggagtgctgacaaaaaccctaccacttgtgttttttgtttgtttgttttgttttgagacagggtctcactctgtcacccacgctggagtgcagtgacacaatcttggctcactgcaacctccgccttctggattcaagtgattcccgtgcctcagcctttcaagtagctgggattacaggtgcgcaccaccacgcctggctttttttaaaatttttttgtattttttgtagagacggggtttcaccgtgttggccaggctggtcttgaactcctgacctcaaatgatccacccgcctcagcctcccaaagtgctgagattacaggcctgagccaccatgcctggctcctaccattttttaaagtctcagttcatatatgatctttccccaagaaaatctgacatcagtccccactctcctcccaaggttgaactagatgtccctcctttgtgcactcacaatctcctttaatttactgaccagtttaatccatattctgggtttctttgagagaaaacaatgactgatgcccacagtgaactcaatgttcttcaacaggaggatgcactgaaatgcccagacacttcttcacctaagctgcgtgtttgctgggatccattgtttgttctcaaacctatttctgccagtcgtacttgttagtttaattaagtaatttaactagatgtcacttgagtgaatagcacatgagtgaaagagttgtgttttctatgaaaacagatggatgctttggaaagataagatgctagaaatcgtacttttgaatgagccataggcaaaactacagacaggataggggaggggtatgtagtaatcttgaaagaatctcctttcagatttttttaagtgcccttaatttctaacttcactttataaaattccaacctggaaattgttgaagatgcctaatgaaagtagtttatgaagttcctatcagtagactcatgtcacaattagaagcctttggccccatatcaaaagattagtgacgtgtatgtgttaagtcaaaataaaatgtctaaggcatgcacgtatcatctttacctgttcaaccaattatgtattgaagtgatggggaaccagtgggcggcaggaagggagtcgggtatctttctctttcaatagattgtgagtttcttgaagacagggaccacatcttgctcatctaagtagtacctgtgyctgagaaaagtgttcagatcctcaaagattttcactaagtgctcttcacccagtggaatgctgcacttatttttgtttagggggtttcaggt

SEQ ID NO: 34928 - DNA, 1346 bp, Homo sapiens
gcatctctctgctttacaattttcaagcttacacacacatccatcttacagaggggagtgctgacaaaaaccctaccacttgtgttttttgtttgtttgttttgttttgagacagggtctcactctgtcacccacgctggagtgcagtgacacaatcttggctcactgcaacctccgccttctggattcaagtgattcccgtgcctcagcctttcaagtagctgggattacaggtgcgcaccaccacgcctggctttttttaaaatttttttgtattttttgtagagacggggtttcaccgtgttggccaggctggtcttgaactcctgacctcaaatgatccacccgcctcagcctcccaaagtgctgagattacaggcctgagccaccatgcctggctcctaccattttttaaagtctcagttcatatatgatctttccccaagaaaatctgacatcagtccccactctcctcccaaggttgaactagatgtccctcctttgtgcactcacaatctcctttaatttactgaccagtttaatccatattctgggtttctttgagagaaaacaatgactgatgcccacagtgaactcaatgttcttcaacaggaggatgcactgaaatgcccagacacttcttcacctaagctgcgtgtttgctgggatccattgtttgttctcaaacctatttctgccagtcgtacttgttagtttaattaagtaatttaactagatgtcacttgagtgaatagcacatgagtgaaagagttgtgttttctatgaaaacagatggatgctttggaaagataagatgctagaaatcgtacttttgaatgagccataggcaaaactacagacaggataggggaggggtatgtagtaatcttgaaagaatctcctttcagatttttttaagtgcccttaatttctaacttcactttataaaattccaacctggaaattgttgaagatgcctaatgaaagtagtttatgaagttcctatcagtagactcatgtcacaattagaagcctttggccccatatcaaaagattagtgacgtgtatgtgttaagtcaaaataaaatgtctaaggcatgcacgtatcatctttacctgttcaaccaattatgtattgaagtgatggggaaccagtgggcggcaggaagggagtcgggtatctttctctttcaatagattgtgagtttcttgaagacagggaccacatcttgctcatctaagtagtacctgtgcctgagaaaagygttcagatcctcaaagattttcactaagtgctcttcacccagtggaatgctgcacttatttttgtttagggggtttcaggt

SEQ ID NO: 34929 - DNA, 1346 bp, Homo sapiens
gcatctctctgctttacaattttcaagcttacacacacatccatcttacagaggggagtgctgacaaaaaccctaccacttgtgttttttgtttgtttgttttgttttgagacagggtctcactctgtcacccacgctggagtgcagtgacacaatcttggctcactgcaacctccgccttctggattcaagtgattcccgtgcctcagcctttcaagtagctgggattacaggtgcgcaccaccacgcctggctttttttaaaatttttttgtattttttgtagagacggggtttcaccgtgttggccaggctggtcttgaactcctgacctcaaatgatccacccgcctcagcctcccaaagtgctgagattacaggcctgagccaccatgcctggctcctaccattttttaaagtctcagttcatatatgatctttccccaagaaaatctgacatcagtccccactctcctcccaaggttgaactagatgtccctcctttgtgcactcacaatctcctttaatttactgaccagtttaatccatattctgggtttctttgagagaaaacaatgactgatgcccacagtgaactcaatgttcttcaacaggaggatgcactgaaatgcccagacacttcttcacctaagctgcgtgtttgctgggatccattgtttgttctcaaacctatttctgccagtcgtacttgttagtttaattaagtaatttaactagatgtcacttgagtgaatagcacatgagtgaaagagttgtgttttctatgaaaacagatggatgctttggaaagataagatgctagaaatcgtacttttgaatgagccataggcaaaactacagacaggataggggaggggtatgtagtaatcttgaaagaatctcctttcagatttttttaagtgcccttaatttctaacttcactttataaaattccaacctggaaattgttgaagatgcctaatgaaagtagtttatgaagttcctatcagtagactcatgtcacaattagaagcctttggccccatatcaaaagattagtgacgtgtatgtgttaagtcaaaataaaatgtctaaggcatgcacgtatcatctttacctgttcaaccaattatgtattgaagtgatggggaaccagtgggcggcaggaagggagtcgggtatctttctctttcaatagattgtgagtttcttgaagacagggaccacatcttgctcatctaagtagtacctgtgcctgagaaaagtgttcagatcctcaaagattttcactaagtgctcttcacccagtrgaatgctgcacttatttttgtttagggggtttcaggt

SEQ ID NO: 34930 - DNA, 558 bp, Homo sapiens
tagattccatatgttgaattctctctcaccttgtaagtagaaactttgctgatttttagtttgctttctaaagttttccgtgcctgacagaaacagtacttattaatgtatgatgcaatttcattgcgtagcatctctacaacacatttaatcttcaatctctatttctttagccttttctagctattctcatgcgttacagccattataaatggggaataattttaccccaagagtttcctgaycaatatgtgcttatttcagctgtgcggattagtaagatgttagtgttcctttttcacacttaacattttcaataatttgaaactgtcatttatgtcagtgatttacaaatacatataaatttttttctctttcagatatggagtttggacctccaacagttaatgataaactaatgagattttttgatcactgtgagaagtttttaactgaagtagaaaaaaatgctacagctctttatcacgtggaagccttcaaaactggaccagaaatgcagaacattttaaaaaaagttgcagctactttgcaagtgcc

SEQ ID NO: 34931 - DNA, 555 bp, Homo sapiens
tgcaacctctgcctcttgcgttcaagcagtcctcctgcctcagcctccccagtagctgggattacaggcatgtgccatcatgcccggctaatgtttgtatttttagtagagacggggtttcaccatgttggccaggctggtctcgaactcctgaactcaagtgatccgcccgcctcaccctcccaaagtgctgggtttacaggtgtgagccaccgcacctggccaagaatgttttttacaattaaaaattaatagacatttatgaaattctgagataattagatatcctggactttgtgtaccttcagcaagcattttttgagtttccgttctgtgacaagcacttgcttggaactaaagacactaacataagatagatattgtcctcraagaatgccacaaggaatgaaagacatgtaactaaaccattgcaagacaataggatgtctatacagtgatagaagtatactcagatgctccttaagttatggtggggttgcatccagataaacccatggtagattgaatatcttaagttggaagtacatttacgac

SEQ ID NO: 34932 - DNA, 574 bp, Homo sapiens
aaagactgatgaggattttaaaagatgcttattttgctgaattaagattaaaccttaaaataggaaaggagaataaagtacggtttgagacttctgtcaggtttctctcctaaaaacagattgactagtgctgtgagaagcacttctaaagaaaatcaatatatgctcagcaaggagcaagtaagttgttttttgtttgtttgtttttaactaatggacttttaaaagtaattttaggttcacagcaaaattgagtagaaagtacagagagttcctacttactgcttttytccacacattgacagtcaggcaccagtgtggtagaataataagcttttaatagaatgtttatctttgtgtttttcctgatctcttctatcaaaacattagccttttttttttttgtacatgacttaaaatcctttttttaaatttggaattagagtttataagtgagtattttgacatccatattttctgacaaaatgactttcactttcccaagttcccaggctatttttgctttctccatcccacccctaccccttgttagaatgttagtatgtatacagat

SEQ ID NO: 34933 - DNA, 574 bp, Homo sapiens
aaagactgatgaggattttaaaagatgcttattttgctgaattaagattaaaccttaaaataggaaaggagaataaagtacggtttgagacttctgtcaggtttctctcctaaaaacagattgactagtgctgtgagaagcacttctaaagaaaatcaatatatgctcagcaaggagcaagtaagttgttttttgtttgtttgtttttaactaatggacttttaaaagtaattttaggttcacagcaaaattgagtagaaagtacagagagttcctacttactgcttttctccacacattgacagtcaggcaccagtgtggtagaataataagcttttaatagaatgtttatctttgtgtttttcctgatctcttctaycaaaacattagccttttttttttttgtacatgacttaaaatcctttttttaaatttggaattagagtttataagtgagtattttgacatccatattttctgacaaaatgactttcactttcccaagttcccaggctatttttgctttctccatcccacccctaccccttgttagaatgttagtatgtatacagat

SEQ ID NO: 34934 - DNA, 1320 bp, Homo sapiens
ttatttctcagctgatggcaagactgaagcttgggattagaaactgcgagttgatgtaaattctcaagacttctgtacacaatgggggtagtgtattgattgtgatggggctggttaatgatgatgactagcagagattctcttaaagggaactttttaatagcacttgtgtattacaaacccatgaaagtcatctagaaaacctgctgcaaagtggtaaccagtggaacacaatctgacacagcaaacaaattcaagtgtgtgccaytgtcaaatggcaccattttgagacatataaatgacagggcaattaatgtcttggaacagccgctttgtaagattaagggaagtgattgccttaccctacaaatagataaattcatggaagggtccaggtgttggtatttggaagaaagaatgaaaatatgtttctgtttaactctctaatctttatcaggtggaatcatgggtcgtagcaggggtgtgtttggagtaggggagaatttgaagcctattttagattagacttcacaaaatttccaatatcaaactggtagcacgtatcttttttactctattctcatggagtcgattggctcctagaaagaacagcaggtgtgtgactcaattacaaaaattccctcttcacagggcactgttttatatacattgtgatccaactctgaaaaaaagggattgaagttccatcaagtaattgatgaaaccatctacatttctgcctctttcaaatgatcttttacattctcccttctttctaaagttatgtgaggagtacagccttatcccagaagcacatatatttcttctcaatggctcagtaattatgttgaggaagtatcaatactgcccgacaaaatgtctccatcagatgccattactagagtccacttttagtaattaattcatcactacttacgaggttggctgacctagaaggtaatattttccccatctaggaaagtaaatattgttgaatgacttaaaatctttcaacagcttcccaggtatgtaggaaatggccaagagccttggcccataaagcttccccaacaccatttcccaccacttgttcactttactcccatgatcctgccttttcttttccagtgccctgaatgaatcaacctctccctgccacaggacctttgcacacgcaattctctgccttcttggcttcctttgcatagttaattcttatacatcctttagatcttagttcaaaggacacttttctggagaagtcttctttgatgctatttccctgcccaccgagaccagatgaaattcttccgtgatgca

SEQ ID NO: 34935 - DNA, 909 bp, Homo sapiens
taggaacgggataaatgtccactgaatataagaagaaacatcaatgaagaaataagaacaagacatgccgataaacaaagcagagggtaaaaatcagatggaccatcactgaaaagcaagatggatttaagtaacttagtatctamaacaggccagaaaaaaagatccctttcccaattcaacagacataacccagtctttcttaggaaaccttgagagttttacaaagctatgattcctggccccttcattttttttctggaagcaatttagttcaaagtgaagcaggaaaggaaattcacttctgttcttgcctgtgctaattttggtaaatagtttactgaaggtttgcctgtgaaagtcaacttcaagcaacaaaggatcagatggggccttcccagtgaggtcatgtccgagagccctgttgagaatctcatcctcccaccacctgaaaggattatgaaaatcctttgacttctatcattttcactctgctgggcacctggactccactggacagtcctgaaaactgatgcacggcgatctggctcagggtgcaaagccaagtgcctaccaacagggaaactaacaccaaggcctcctggggtcctcactgctaccggggggcacagtcccaggaccccaacatccctgccttggtgtatttttctccttagcatttaatatgtaacatactagatttatttacttattgattctgtttatagtctgtctccctccattaaaataaaagctccacaatgggaacattgtccagaattgagcctatgaatgctcaataaatatctgttaaattactgttatttagtctatcttgcatatatacacatacacacacatacgtatataaagagcatgtgattttggtggagctgcggtaccctgtaa

SEQ ID NO: 34936 - DNA, 530 bp, Homo sapiens
ttaggaatgtctttctaaagactggaaaaatacttttccactaataaatcttttttttttaaagtatcaacggcaaaaaaaattaaggattaaattccaacttgtactttatatctgcatactctactaaatttacttcatatttattcagggtctttcatatcccagcccctgggtgtttgtttttcttcagtttctctgatgggtcgagcttgactttccatgtagtgagaactagaaagtaatcttctgtagataagatcatgctttaaatcctacagccttgaatggctgttggtttttctaggccctccattgaccctatgtgtagagacttccctctccgtgcctttgaagagggactccaggacccacgttgggrcggttcttgcttattgcttttgttgcattttcgaaaaaaaaaaaaaaaaaaaaaaaaacaaaagaaacagcacaactgggaacaccgtatgttcctcgtgttgtgggaaatggagagtaaaaatgggaaatgtagaataaaagtgctt

SEQ ID NO: 34937 - DNA, 699 bp, Homo sapiens
taattacaggtaatatactattcaacagataagactcaacagactgtttacaaacactttttagaacaacgaatcaggtctggaaaaatggtcaatgtatattttctgatctgtttcctaacactaactaattttcatcactacccaatgaaaacactctggggaataagaaaaagatcggacatgagctgacttctatttctttgctagaaaatcaaaaatctgtattcaaagagaacaggacaaagaagaaaatactgcccaaaatgttaaatatacactaaatgttgttcatyactcttttttaagacgtgggaagccgtagggtctggggaattaagcaacagagaaaatgtcaagagcaatggaattgaaccccaggcagatcttaatagcttagctagtttctccacctataaaaatcaggacactcttactgctgtttctgttaggtaattaacagtcataaagcatgctgaaagtagaaactgctaaataaataatgactgcaaaagaattttaaccataacgcactaagtaataaggataaaacatgggcttttaacttgaccatttttgttttcaaattaataatgcaaacaagagtccaatcttgttaagatggctcagcatagtgttagatagcaagttaaatttagtcattacaaaatacagaaggaatcttgcttctccaagagc

SEQ ID NO: 34938 - DNA, 1159 bp, Homo sapiens
tacggttctctcaaagaggggacatgctgtgctgcggaaggagaaaaaagaggtgggtgctgccctctaaggccaggctggtttgtccatggggaatgaagacagcaggctgagagggattgtctgagaagagtaagtttccagaagaactgaaagggacttgtctccaccttccagagttgcccgggtggcaaggggtggggagagaactcaaactcagccaaggtgatttttgcttttttttttttttaatgatgctgagtatttattttctgccatcttctctctccagatctatggacataatttacacaggacccccgagggtaattaagccagcaattcttttgccagtaaaatgagaaaaaccagctctcagtaaattctgaattccactatggatgttgcagaaacagaactaaaaacagctgcagtttatctgtgctgccgaattgactgtaatttgctgctaccctcacccttaccacatagcaatcagtgtacagaagtgcagaattttaagatgatgaatgttttatttcttaaaataaacagtagcaatttagcaacatagttatgtattttacattttttatatagtaaaagtatattggaaacttcctcagtgtcaaaaatccttacatgcacttgtcaaaaatatcaagatgacaagctaatatggaattcagatttaaataatagacttctcagatacatcccatgaaccttctggttgttttgtttgcactgaccaagagatgcctattgcctacccctagtctggtattttaagattgtcagaaatagtcacgcagtccaaaagttaggactagggttttttcttttgtttgtttgttttttcaacaagttaactttttctcagcctagcaaacgccagtcaccaaatgagtttctttgcttggaatcatttcctcagtccagtatctgctttccatggttgtagtacactgacatagtctcacccsagctggttattactaccgtctcttatcaaatctaagattggtggattttaaacgcaccattatttcatttatgactaagcaagaaaaacgttgccaattaagtgacatcatccatcattaagatgtttccctgtttcggagatgttcaatgcgaaaaataatgtgcatcttag

SEQ ID NO: 34939 - DNA, 717 bp, Homo sapiens
aggaactcttagttggtgtcaaaggaaatcaaacagtgaagacttatttataatatctcaagagataaggacacccagtttattattatcgcttatctgggtagtttctttaaaatatgttttattaagattcatcaaatactgactactgatccacaatataggtgggctagcaattaaccaaataattttttctaatacatttgtaaaataactagcaaaagagaatcaatataggtaggcattatgagaactacagcagcatcttatttatttgaggagcctctgccgtaatgccaagtacaagacatgagaagctgagaatgttcagtaatcggttgccaaacttaggaaatgattctgagcttcaagctgcttataatctatttgaagagacaaatttaatatataaaaccaatgaaaaaagaattcagtgtcaaagtagtcttcsttatctctaagggtaagcaggagttgagaatatgagaaggaaaacctgcaccagaatagtaaagacctatgctgatttacaaaaacaatttttattatatatttaaaagaatttaagaacttttgataatactcctatgggaaaaagggagaagctgatggaggcatttgcacactaaatccattttattactcctagtcacatccaaatcacagaataggagaggccagtgattctctgcaagcatcgaggaggccagtgtttca

SEQ ID NO: 34940 - DNA, 1362 bp, Homo sapiens
ctatgcatttgctgaagatttaacataagtcattatttcaatgtctaagtccttataaagtctaattgagaaatagaagtcccaaagcaatgaagatttatatcattcgccctaggtcaaaaactgatctttataaaaatggaattcaaaatcttcattcttctattagaaaatgaagtgaaactctgaaaacttctaatacctttcccccaaatgtatcaccctacatttttmatctttttattaagctgtacagagatatttaataggactattcttgtttgctttgtatacaaagcatattccacttgaacatgcttattccacttgagcaatccttagagttggcaaattcctaacactatgacttttgttctcattgactgttatttgtgtggctctaacacacctttccatagttagaaagataacagaaccatagaagctgacacacagacttggaatgatccttatctctggtgtggtaatacgatgctgctgtgtgaccaaggctctgggaaacttacctcaaacccacatatcaacaagatactggatcttgaataacaaattaggggcctgggagtgaaaagcagagaaagcattctcttcaataatacaaaatcactcctagagagaggcttgtcctctgtgagcacaaaggtctccctttgggtgcccctatagacaatcccctttgaattttgtgaaaagttttagctatttctcccagaagtcaagttcatttcaggaagagagtttataatcttctcttatttttctggctacagctttctcccagccaagctattggggaaaatggtgtctagaaatatatgggctgctattccagggtctccaagccttccactgtgtccatctgaacttagtgagtctgtattctttcttttcagtgattctgctctgttccctgaagctgttctgtgaacttccgtttccttcctattttgagatgttatgatttaggaggttaaaaatatagaaaaagtactttatgcaaaggttaataatattttgttaagtttcccaggctggtcaattcataagaggcaggaatttgtgcgtggaactgtatgctgaagttaaaccaaacctaaacccatccagcagggggaaaatactcctctatggtttctagcttgagaggatataactaatatggtcaagtctctatgtgagcaaattagttctttaattaaatactgatatacataagccctttaaaagaaaagtgaccatagaacagattaaagcattaagacttcttgaattttcttaattgatgacttttcaagcagatgccatgtttctgtggtaatctagcaatgtatggtcaattag

SEQ ID NO: 34941 - DNA, 1374 bp, Homo sapiens
atccagctatgtacttatgatatgtgcccatttctgtgtgtatattgtatttcaataaaaggttttaaaaggaggaaatgataggagcttttagattatgtcaaataaagcagggaatggccctcttttttttttttttttttttttttttttctgagatggagtttcactcttgttgcccaggctggaatgcaatgggtcgatctcagctcactgcaacctccacctcccggattccagtgattctcttgtctcagcctcccgagtagctgggattacaggggcctgccaccatgcccagctaattttttgtatttttagtagagatggggtttcaccatgttagccaggctggtcttaaactcctcacctcaagtgatcagcccacctcgtcctcccaaattgctaggattacaggcgtgagctaccgcacccagcctcctcagttttactaacactctccttctgtcacattctaagctaggagattctaaagtgtcatatccccttctatgcctttcctacctttctttctatttttctctttaattttctttttttttaagtctttttattaaggtaaaatatacacatataatgtatcatctctgttgtcaaaaaaaatctaaaaagagggaaagctatttttagtttcttgcactaaataataatttgaatatccagcctcacttttatttagggaaaagtgttacaaataaaagataagaaagataacattttctgaaccatcaataattaaagaagttaacagtgactaaatcgctttttcccaagcatgaagactggtgtataaatgtgtctccacctcctgtaagacactcttcccttcctaagtactgctacagccagtaccagaagggggtgggaggggaggtgctgttagagattgggcttttttcagagttcgaaagaaaaagagaaatccagaattcacaattgaaagctttgaaaaagtgtaaaaactatgatatctgatttcacggctctcaaactctcagaayattggttttgaacaggacatatctttctccaaactgccatatgggcctttgagcctgagatatctaataatgagaaaaataagggagaaaatacaccacattcccagagattgtttctaatggaaacccagttttgacaaccctaccacctgctttatatcattaaactgaaagagactatgaataggcaaggggtgaggagagacattgctaataaaatatttaagaacatcaggaagagccacgtcaggcttttagtttacccagaaaaagcatcttcctaaagtatcacttgaccaagatttactgtattaataaaatcaccttcagattataaagatagaaaaatgca

SEQ ID NO: 34942 - DNA, 688 bp, Homo sapiens
ctcatctctagaatcatctggctctttcttcggaaacagaactcctgggctatacggggaaaaattagattaaaacacaagtcccatataaaacaagaaaaataatgtgaacctagatgctcttacctggacatatcccacttcttcccacccttcccaaaaatgtcaagctaggttacacgtatcaggttacaatttaccgtattttgaacatacatataaagttatgccaaatctataaaagtcctgcaccatacctaattctatacccactatttaataaaattaatccatagtcatttatttagtaaacaattacttaaactcctaatatgtatctggcactgtattagccaatgagtacacagcaatgaacagtctgcatggaatacacacttcagcctcataatactggcaaaagacctccaagtcttaaaaaaaaagacctcaaaggcctaaatctgttcaaagcttcaraggtattcggcaaggatctcctaaactcttttttgtccttggtggtatgaaccttgattcctttgattaacatatccttaaatgataacatacatacatatatgtgtgtgtgtgtgtgtgtgtgtgtgtgtgtgtgtgtgtgtttcttgcctttttcagacacagggtcttgctatgctgcccaggctggaatcaaactcctaggctcaag

SEQ ID NO: 34943 - DNA, 675 bp, Homo sapiens
tgttccaacctctgtgttaccctgttccaaagtcacttctgcattttcaggtatagcagtaccccactcttggtaccaattttctgtatttccattctcacactgctataaagaattacttgagactaggtaatttatgaagaaaagagatttaattgactcatagttccacaggcttaacaggaagcatgaatgggaggtctcaggaaacttaaaatcatggcagaaggcaaagaggaagcaagcaccttcttcacacggtggcaggagagagagagagaggaaagggggaattgccacacacttttaarccatcagatctcatgataactcaatcactatcatgagaatagcaaggaggatatctgcccccatgatccaatcacctcccaccaggcccctcctccaattcgacattagatttggacagggacacaaatccaaaccatatcacttattatatatgtaaaagagtttattttaggaagttgattctgacgggttagttttttgcaagtaatacagtgagaaaaatagatcaccgttcaattcttgcttcaaccactgactatgaaatatgtaaccaatcattttgcctatatctttactgcctttatttcatctagtagaagagatcaaatactttaatttatggttcttttaaggatcaatgca

SEQ ID NO: 34944 - DNA, 610 bp, Homo sapiens
ttcctctcatctgcagaaactacacttgatccctgctagcagggaagtctggaaaatgcagttttcaggcttccaagctcatggcccaggggaaagcttagaagagtggggtcatgttgagttctagcacagtccacttgggatactcagcatccatccaaatgcttttaccttgtggcttaacttctaaactacargaagaatatcatgcttccactgaatatgatgcactataattcatataaataaagacacactgtctccataaaaataaagaatactcaaagtccaatcagtatctatgattattttggggtgatgttcattttacttcagtctcaatccacatgcgtggatatactataacattaaaacttaattataggccaggtgtggtggctcacgactgtgatcccaacgatttaggaggctgaagtgggaggattgcttgagctcaggagttcgagaccagccttggcaacatagcaagaccctgtctctacaaaacaaaattttttttaattagctgggcctgatggtgtgcacctgcagctctagctacatgggaggctgaggtgggaggattgcttgagcccaggaggtcaaggct

SEQ ID NO: 34945 - DNA, 610 bp, Homo sapiens
ttcctctcatctgcagaaactacacttgatccctgctagcagggaagtctggaaaatgcagttttcaggcttccaagctcatggcccaggggaaagcttagaagagtggggtcatgttgagttctagcacagtccacttgggatactcagcatccatccaaatgcttttaccttgtggcttaacttctaaactacaagaagaatatcatgcttccactgaatatgatgcactataattcatataaataaagacacactgtctccataaaaataaagaatactcaaagtccaatcagtatctatgattattttggggtgatgttcattttacttcagtctcaatccacatgcgtggatatactataacattaaaacttaattataggccaggtgtggtggctcacgactgtratcccaacgatttaggaggctgaagtgggaggattgcttgagctcaggagttcgagaccagccttggcaacatagcaagaccctgtctctacaaaacaaaattttttttaattagctgggcctgatggtgtgcacctgcagctctagctacatgggaggctgaggtgggaggattgcttgagcccaggaggtcaaggct

SEQ ID NO: 34946 - DNA, 533 bp, Homo sapiens
tgaggtgggaggattgcttgaggccagaagtttgagaccaacctgagcaacatagtaagaccctgtctctccaatttttttttaattagctgggtggtacatgcctgtagtcctagctacttgggaggctgaggtgggaggatcacttgagcctaggaatttgaggctgcactgagctgtgactgcaccactgcaccccaccccagcatgggcaacaagagcaagacccacgctctaaaaaataataatgccagcaaagaatggtttgttaattttagaaaggcatttgagagtgagattctgtctyttaaaaaattaaatgagttgaaggaacaaatgtggtatatgttgattccagaatctaaagaggcaactccaagcacttggccttttcttccatcaatagccctcactcctcaggttgaaagccagtatggagagtctgctatcccagattatctattctgactatacattcaagaattagggaaataaccactgaggagattcagaaacatacatgtagccattga

SEQ ID NO: 34947 - DNA, 587 bp, Homo sapiens
atcacacacggtactctatggaaaggattgtcaactatggaagagaaccccgatagagagagaagtctggaaggattgcactgttgaagatgccatcattgtttttgtttgttttgatttttgtcatttttagtttatgtggcaagtgacaggcacggacatgccatcattgttatagaaaaagctgtgaaagccatcaagtctggccgggcactgtggctcacgcctgtgatcccagcactttgggaggccgaggcgggcggatcacgaggtcaggagatcgagaccaccctggctaacaccgtgaaacccgtctctagtaaaaatacaaaaaaaaattagccggacgtggcggtgggcgccygggtagtcccagctactcgggaggctgaggcgggagaatggcgtgaacccgggaggcggaacttgccgtgagccgagatcgcgccactgccctccagcctgggcgacagacagagcgcgactccgtctctctgtctcaaaaaaaaaaaaaaaaaaaaaaaagatatgaatcttggagaaattcaagagcaaatagacaccacatccagaggaggaattaccat

SEQ ID NO: 34948 - DNA, 587 bp, Homo sapiens
atcacacacggtactctatggaaaggattgtcaactatggaagagaaccccgatagagagagaagtctggaaggattgcactgttgaagatgccatcattgtttttgtttgttttgatttttgtcatttttagtttatgtggcaagtgacaggcacggacatgccatcattgttatagaaaaagctgtgaaagccatcaagtctggccgggcactgtggctcacgcctgtgatcccagcactttgggaggccgaggcgggcggatcacgaggtcaggagatcgagaccaccctggctaacaccgtgaaacccgtctctagtaaaaatacaaaaaaaaattagccggacgtggcggtgggcgcctgggtagtcccagctactcgggaggctgaggcgggagaatggcgtgaacccgggaggcggaacttgccgtgagccgagatcgcgccactgccctccagcctgggcgayagacagagcgcgactccgtctctctgtctcaaaaaaaaaaaaaaaaaaaaaaaagatatgaatcttggagaaattcaagagcaaatagacaccacatccagaggaggaattaccat

SEQ ID NO: 34949 - DNA, 556 bp, Homo sapiens
cgaactgtaaaccaccacgttgcagaatatggtttgtgacaaactggagcccagggtgggtgtttgtaagattataggacaagtcaaggctattcaggcacaaaactgggcaatgcgccctttggcaaattgttgcaagccagtgacttaaaaggaaatacaaaagcaataggccaggtatgaaaactccaaatggagccaaatggttcaccacttttcttatcatggatactctttgtgaagctggtttaggagtaaaaacaatactgctgcttggaacttttatttggtagagggagaaacctttacttagaggagaaacagacatgctggcatggctaggagaagaaatgtgacctcaggatttgatcaagggtaaaayaaaggcccatggtttaaatataaaaataccaatacgattgagattctgccttcccatacaaatcaagaaagaaacaaataggggatctaaatgagagacagagagaaagagagagagagaacataagtcttgtggtattaataaaatacaaccaaagtaaaatggacagattgt

SEQ ID NO: 34950 - DNA, 1186 bp, Homo sapiens
cattatctcatttcactctcactgtgacactgggcttgttaactgggtgttgttaactctgatttaccgaggcctaaaaagcctcctcattttccccttgatctgagcatcagaacgagcattaggatcaggtccatctaattctttttttttttttttttttttttttttttgagatggagtctcgctctgtagctcaggctggagtgcagtggcgcaatcttggctcactgctacctctgcctcccgagtcccrgttcaagcaattctcctgactcagcctccggagtagctgggattacaggcatgcaccaccatgcccagctaatttttgtatttttagtagagatggggtttcaccgtgttggccaggctggtcttgaactcctgacctcatgatctgcctgcctcggcctcccaaagtgctgggattacaggcgtgagccacagcacccggccaggtccatctaattcttaaccattttgctatactgctaaatacagaaaggccaggcttacaatgtttacatttattatgaattattaatgacttataaactgaatgggatcttgcttgaatgttttaattattattattattttgagacagggtctcatgctgtcacccaggcaggagtgctgtggcacaatcacagctcactgcaaccttgacctactgggcttgggtgatcctcccaccttagcctcccgggtagctgggaccataagtgccaccactaaacccagcaatttttgtgtgttttttctgtagagaaaaggtttcaccatgttgcccaggctggtctcaaatccctgggctcaagtgatctccccgccttgaactcccaaagtgttgggattacaggcatgggccaaggtacccagtccctgttttaattatttgtatgaagacaaaatgcgtgaactgatctccttgactaggaagtagatggtgatcatgtttgtgactgagaatgtcttgtgggagctgcctaatatttgtacaggagaaccagtgtggtgttgtggaaagaggacaaggctggaggaaggcaggcactgtcagcctgatagggtgatgttggggcatttttaaagcctctgtgagtctcagtttactcatcaatgaaatgggaatacttacttccacagtgcctgtatcacagggtttttgtatgataatgca

SEQ ID NO: 34951 - DNA, 1079 bp, Homo sapiens
tacttccgctttgcttcctctgggcaggtccaggttacttggactgaaactcgtgggtcagattcttaggaccttccttttctttactgtcttccattttgcaatccttacttaacgattaacaaagcttttgttttcttaattttttttttttaatacacatggagtcttgtcctgttgcccaggttggtctcgaattcttgggctcaagcgatcctcctgcctcggcctcccaaaatgctggggttcgaggcgtgagccaccgtgcctggccttattttctttctaattttatttcaaacattgcattattctaaaccccacgttgacgaatgtcatccacctgctcagcagctataaatggtggagttaggtatgttttcaatctctctaaggtggaaatgagggctgatcatgagtgtggtttatcaagtgctgcgtttgcagctgaggccactttygcttctgtcacttgtttgtgcacagtctggttcaagtttgcacttaggtgacctttgcttaagtgaatgtctcttcttgtaccaagaggacatccttctttgatactgcgctattgctgctatgtaacattggaaatatcagttatttcaaccaataatacatttgtcttcactcctagtcttgctctgtcgcccaggctggagcacagtggcacgatctcggctcactgcaagctctgcctcccaggttcacgccattctcctgcctcgagtagctgggactataggcgcccgccaccacgcctggctaatattttgtatgttaagtggagataggatttcaccgtgttagccaggatggtctcgatctcctgacctcgtgatctgccctcctcggcctcccaaagtgctgggattacaggcgtgagccaccgcgcccggccttttcttctattttaaagccagaattgctgaattgaacggtcaagttggtacctaagaacgaatcaattctggaaaatattggagcaaccagctacccagagggaaaccgttgaaaaatgacatgtagcccacatgtaaagtgattaagagctttaaggtataagatgtaggatc

SEQ ID NO: 34952 - DNA, 606 bp, Homo sapiens
gagtcagtgcaggtaaagaatgcagcactggctaacacacaactcattctcaataaatgcaactattattattattgttctgtgctgagtttgcatcaacctgccaggctagtcaagcatgagtcagcaatacgtcacttcccacctccacatggacagcctgtggctgataaagtcacacccaggaaatgaccactgatccactgatcccaaaatcccccatatcccagatggagcccctgaagaccaaacaccacccataagacagagcctccagctgggcattgggaaagattccagccccggccccacctccrccttgcagcaagagcttcttcaagagcacagggaggtccaagcctgagccacctcctcggcagggttacctggagatcaagctgagctcacgggtgacaagggttttgggaaatgaagagccagatcttatcttggtaataaaaaaataacaagccccacctacatgctcccactttggtaggaattccacctccttgcactgggctactcagctacaggcgcgggcggggaaggcaggctaaaaggaggaagtctcaagacaagagggtttcggcagctgtgccccct

SEQ ID NO: 34953 - DNA, 534 bp, Homo sapiens
acacagccttgctatagtttttaaaacaggcttagtttgtggtcgggttgaaaaccatcctgaaaacattttgtttccaaatggagaaatctgttagaaatgccttgtcgtaagcctgttctgttccaaagaaagtgagtgatgttatatggatgtaattgtacttcccccaaatactttgttttgaccttgtataaagtcaccagccagatgcttagaayacaaatacgagataggcagtcttttttttttggaggggagacagagtctcgctctgttgccaggctagagtgcagtggcgcgatctcagctcactgcaacctctgcctcccggattcaagcgattctcctgcctcagcctcccgagtagctgggactacaggcatgctccaccacgcctggctaatttttgtatttttagtagagatggggtttcaccatgttggccaggatggtctccatctcttgacttcctgatctgcctgcctcggcctcccaaagtgctgggtgtgagccaccgcgcccaggagatag

SEQ ID NO: 34954 - DNA, 808 bp, Homo sapiens
ttccgttttacacatgatccaacgttaactacctttttttctgtatgctttccaaagtccttttttttcccttaatgttgaattaaaatacttgctcatagttgatttaccattcctacaaaagaggcagaaactttgagcaatctaggttttttttttttttaagttttttctttcttcctctcctgaatacactccccaaaacacccctttccagttacaattagcatcgtgatccaagcagatgccacatggaagaggaatcgccatttactcagaaaaaatgtcccttacaggaaccggcagcagctaggcagtcaccggcccgcctccatccaaaatcacgctcgcgtgcttcggaagcatccgggtcactccttctccgctttttcttgcagatgggcctaggccsgtgtcggttctgtttctccccttggctgcctgtacgcccacagccttctggctgcgacattatagaatcggccgtgtcccccctggtgggggattggggatctgtgtttagccatttatatctactttagctgttaaagaggtccaaatgaaaatcaggtgattgtggaaccatggggacttgggggtggggcagaggtgggaacatttgtatcagttgagtcagcttggtggctccctgtggagccagggctgagccttgtcacgcgcactcgccaattaagagatggaccagccagcagtcaagtgcattctccagtccttgcaagaaggatcagccctttctgtgccagcctcgatcgccttgtgctttggtctctttttctcccccccgcct

SEQ ID NO: 34955 - DNA, 1055 bp, Homo sapiens
taagctagatttaccttggccactagaaccccaagagatccaggaactgtagcatcctcagaccttctgcacggcactgccagctgcctccatctccagctcctccaacgtgccagcagatggctgcagctgcggccgtggctgcccctggttaggcactgccctgggtcctcggcctcttgctctgggttagagccccagcagccctcccgatggactctgcagttctgcagcagcccctccttggaggccctggggatgctggttacaggcccagcctcagtcctgctgctggctgtgagggaactgggcccaccgggaccactcctgtgctagttcctgcttctcatctacctagatgcttcaccagccctgagccaggcctcatggggcaagaccagacaaggcagtcttcccccaggaacccctgcaacttcccagtgcagacacagccctcttgacctgcgatagcatcagcaggcccacggcatgcagcccaagaggtgccacacacctagggcctgctcctgttctggggacctgggctccctgtggccattccacccaagggtgattcaccaccaggcagtgagggcgagagggtcacagtctgtttgccacaatcccctactggctggctctcctgtggttgaccttctgggggcccctctcacagatagtttgttgtgaagcatagctaacatttcactgtgggctatctttgctaggagctgtggtaggtgtttcaggctcatgggctcacatcctcaggaccctttgaagcaggcatytgttgtccccattaaacagaagcatgggggaggccagaagccctgcgacccaagtacacacaatagctgcctctacctggaaggccctccctgccctcagtcctcacagagctgcccaggaggccttagctacctcaaactctccctacccaccctgggggcatattaaagggctccctccagcctctgctgggtcctcgactgtctgtccatctgtcgtagcaggctctgagagcaggtaacatggtttattcttccagagct

SEQ ID NO: 34956 - DNA, 1055 bp, Homo sapiens
taagctagatttaccttggccactagaaccccaagagatccaggaactgtagcatcctcagaccttctgcacggcactgccagctgcctccatctccagctcctccaacgtgccagcagatggctgcagctgcggccgtggctgcccctggttaggcactgccctgggtcctcggcctcttgctctgggttagagccccagcagccctcccgatggactctgcagttctgcagcagcccctccttggaggccctggggatgctggttacaggcccagcctcagtcctgctgctggctgtgagggaactgggcccaccgggaccactcctgtgctagttcctgcttctcatctacctagatgcttcaccagccctgagccaggcctcatggggcaagaccagacaaggcagtcttcccccaggaacccctgcaacttcccagtgcagacacagccctcttgacctgcgatagcatcagcaggcccacggcatgcagcccaagaggtgccacacacctagggcctgctcctgttctggggacctgggctccctgtggccattccacccaagggtgattcaccaccaggcagtgagggcgagagggtcacagtctgtttgccacaatcccctactggctggctctcctgtggttgaccttctgggggcccctctcacagatagtttgttgtgaagcatagctaacatttcactgtgggctatctttgctaggagctgtggtaggtgtttcaggctcatgggctcacatcctcaggaccctttgaagcaggcatttgttgtccccattaaacagaagcatgggggaggccagaagccctgcgacccargtacacacaatagctgcctctacctggaaggccctccctgccctcagtcctcacagagctgcccaggaggccttagctacctcaaactctccctacccaccctgggggcatattaaagggctccctccagcctctgctgggtcctcgactgtctgtccatctgtcgtagcaggctctgagagcaggtaacatggtttattcttccagagct

SEQ ID NO: 34957 - DNA, 1055 bp, Homo sapiens
taagctagatttaccttggccactagaaccccaagagatccaggaactgtagcatcctcagaccttctgcacggcactgccagctgcctccatctccagctcctccaacgtgccagcagatggctgcagctgcggccgtggctgcccctggttaggcactgccctgggtcctcggcctcttgctctgggttagagccccagcagccctcccgatggactctgcagttctgcagcagcccctccttggaggccctggggatgctggttacaggcccagcctcagtcctgctgctggctgtgagggaactgggcccaccgggaccactcctgtgctagttcctgcttctcatctacctagatgcttcaccagccctgagccaggcctcatggggcaagaccagacaaggcagtcttcccccaggaacccctgcaacttcccagtgcagacacagccctcttgacctgcgatagcatcagcaggcccacggcatgcagcccaagaggtgccacacacctagggcctgctcctgttctggggacctgggctccctgtggccattccacccaagggtgattcaccaccaggcagtgagggcgagagggtcacagtctgtttgccacaatcccctactggctggctctcctgtggttgaccttctgggggcccctctcacagatagtttgttgtgaagcatagctaacatttcactgtgggctatctttgctaggagctgtggtaggtgtttcaggctcatgggctcacatcctcaggaccctttgaagcaggcatttgttgtccccattaaacagaagcatgggggaggccagaagccctgcgacccaagtacacacaatagctgcctctacctggaaggccctycctgccctcagtcctcacagagctgcccaggaggccttagctacctcaaactctccctacccaccctgggggcatattaaagggctccctccagcctctgctgggtcctcgactgtctgtccatctgtcgtagcaggctctgagagcaggtaacatggtttattcttccagagct

SEQ ID NO: 34958 - DNA, 1620 bp, Homo sapiens
atgtgtgtgtatccttttcttcttctcttcctcctccaatactagcatacagttagataaatttgaaggggctttatggtgagaaagggaaggacgtggagtctattttaaggttaagggaaaaaggcttctgcaggttccttcraggttacatctcgagactaaagagaaaagttgtaaaatgtgctcaaagttaagctgcttggttacaattacaaacttttcagttcagtggagatgcccctggaagcccattgggttatcttttttgaggaaggacaaggaggtcatttagtcatttgctccactagaattgctgaacacctactatgtccggggcgcttttgctcttttcttctctcctcctactactgtcttcttatataaacggtagtatgtgccacccagtattccataccttgcctctttcacttcatagttatactggagagaagttctttgtatcagtacgtaaaaagcagccttacccctttgtacagctgtgtattttacatagggttgtactgtaatataaacatttgttttcagcctttgctctaatatgcacccaggtgtacccagcataggaggtggagatgaggtactgagtgaagcctgttcggtcagccaggctggctaaatttgcaagttgcagtaaaaaattccctccctggaggttttaagcactcaacataactctcaaggatgtctctgttttagttgctcttggaggcagggggttggtcagcaagacccaaaatgcccctctggttggattgaaagtggcaaaataaagcaggcaggaagcactcagcgtgcagaggctctgatgagactcatcccaaagggctcacccaccctcatgcacaagcggccagaggcagctggagggagaagacgggttgactggggaggggtcgctgaggcccagtccaggctctggggtctggaggaaggcagcctggaagctctgacgttccccaccctggggcagccctgccttgtgccagggctctacagagcacagtgaggaaggctcctcacccagcctcgtggacagagatgaaagtgactcagacccagagcacgtcctgctcgcctccaggggcttcttattcaccactgaatccccagcacctgcaaaacagctccagacatagtaggtactcaacaagttattgtggagcaaatgactaaatcacctccttgtcctccccctaagaagataataacccagccgggcacggtggctcaggcctgtaatcccagcactttgggaggccaaggcaggtggatcacctgaggtccggagtttgagatcagcctggtcaacatggtgaaacccgtctactaaaaatacaaaaattagccaggtgtggtggctcacgcctgtaatcccagctactcaggaggctgaggcaggagaatcgcttgagctggggagatggagtttgcagcgagccgagataatgccactgtactccagcctggccgacagagcaagattctatctcaaaaaaaaataaatgaataaaataaagataataacccaatgagcttccaggggtgtctccactgaaccgaggggttagtgattgtaactgagcagcttaacttcaa

SEQ ID NO: 34959 - DNA, 1620 bp, Homo sapiens
atgtgtgtgtatccttttcttcttctcttcctcctccaatactagcatacagttagataaatttgaaggggctttatggtgagaaagggaaggacgtggagtctattttaaggttaagggaaaaaggcttctgcaggttccttcaaggttacatctcgagactaaagagaaaagttgtaaaatgtgctcaaagttaagctgcttggttacaattacaaacttttcagttcagtggagatgcccctggaagcccattgggttatcttttttgaggaaggacaaggaggtcatttagtcatttgctccactagaattgctgaacacctactatgtccggggcgcttttgctcttttcttctctcctcctactactgtcttcttatataaacggtagtatgtgccacccagtattccataccttgcctctttcacttcatagttatactggagagaagttctttgtatcagtacgtaaaaagcagccttacccctttgtacagctgtgtattttacatagggttgtactgtaatataaacatttgttttcagcctttgctctaatatgcacccaggtgtacccagcataggaggtggagatgaggtactgagtgaagcctgttcggtcagccaggctggctaaatttgcaagttgcagtaaaaaattccctccctggaggttttaagcactcaacataactctcaaggatgtctctgttttagttgctcttggaggcagggggttggtcagcaagacccaaaatgcccctctggttggattgaaagtggcaaaataaagcaggcaggaagcactcagcgtgcagaggctctgatgagactcatcccaaagggctcacccaccctcatgcacaagcggccagaggcagctggagggagaagacgggttgactggggaggggtcgctgaggcccagtccaggctctggggtctggaggaaggcagcctggaagctctgacgttccccaccctggggcagccctgccttgtgccagggctctacagagcacagtgaggaaggctcctcacccagcctcgtggacagagatgaaagtgactcagacccagagcacgtcctgctcgcctccaggggcttcttattcaccactgaatccccagcacctgcaaaacagctccagacatagtaggtactcaacaagttattgtggagcaaatgactaaatcacctccttgtcctccccctaagaagataataacccagccgggcacggtggctcaggcctgtaatcccagcactttgggaggccaaggcaggtggatcacctgaggtccggagtttgagatcagcctggtcaacatggtgaaacccgtctactaaaaatacaaaaattagccaggtgtggtggctcacgcctgtaatcccagctactcaggaggctgaggcaggagaatcgcttgagctggggagatggagtttgcagcgagccgagataatgccactgtactccagcctggccgacagagcaagattctatctcaaaaaaaaataaatgaataaaataaagataataacccaatgrgcttccaggggtgtctccactgaaccgaggggttagtgattgtaactgagcagcttaacttcaa

SEQ ID NO: 34960 - DNA, 1306 bp, Homo sapiens
aggtgcttgaacctgggaggtggaggttgcagtgagcggagatcatgccattgcactccagcctgggcgacagagcgagactccctctcaaaaaaaaaaaaaaaaaaaaaaaaagratgtcaaaaccacgatccttcggattaatgtatcgtttcctctcagctaccaacatatggctgctgccactgcttttgtccactgctttagccccatgtccccatttcaggaaaggagaaagaggaagtaataggagggagaggaagcacccaggtgagacatccagagcagactgtgaatatctcattggtgactgccacccctcactgcaaggaagagatgaagagctgggcacttgcttttctaaagaaaaccagagttacattccgtctgccaaagatgactttttcctttctctgaccatacctctttcttttgtttgcttcctgttcgagacagagtaggctcagctagcatagttagaggggcgttacaaatcccacccaataattctcacccaccagtttctgagaatgcctaaaatttcagcatcagtgaattaagctaccacccactatatgttaaaatgcgtatatctctgggaggaaagttagcaccttgcttcatttccatacttaacaccttagataaccaataaatgcattgattaaattcccttaaagagaaaattaattgagactaggtttttagcgaggaaggatggagagttcagttctgcgtgacaggcgctagccaggcaggcaggagtaggaacgcgtgaaaggaaataaagagcaggaagggcagcgtgaagctgcagacaggcagtagaggctgttagcaaatattagataagcacctcagaaacaaacaccacctttcacagtgtgtcctgggagtagatctgattgctcctttctctttagtcctcatcgtgtctgatcacatgcaaaactctatattaatacacatcgaacactccaaaccacaaaatagataactagcccaacctgtgcctgatattctgttaaacctcacttcaagcttcacattttgtgaagcccaatgtggttacactcaggagccactatccagagaaatgggaattgttggctatgcaggctacttctcaggtgagagtcttctgacttgatgttaagatagcggaaagagatgttcatcctcaacatttgataagacagacagtgtagcattattgttcagctcatgatttctagagacaaactgtggcttcaaatccacagtgactatgggagaggtatttaacttctctgtgcctcagtttctt

SEQ ID NO: 34961 - DNA, 1306 bp, Homo sapiens
aggtgcttgaacctgggaggtggaggttgcagtgagcggagatcatgccattgcactccagcctgggcgacagagcgagactccctctcaaaaaaaaaaaaaaaaaaaaaaaaaggatgtcaaaaccacgatccttcggattaatgtatcgtttcctctcagctaccaacatatggctgctgccactgcttttgtccactgctttagccccatgtccccatttcaggaaaggagaaagaggaagtaataggagggagaggaagcacccaggtgagacatccagagcagactgtgaatatctcattggtgactgccacccctcactgcaaggaagagatgaagagctgggcacttgcttttctaaagaaaaccagagttacattccgtctgccaaagatgactttttcctttctctgaccatacctctttcttttgtttgcttcctgttcgagacagagtaggctcagctagcatagttagaggggcgttacaaatcccacccaataattctcacccaccagtttctgagaatgcctaaaatttcagcatcagtgaattaagctaccacccactatatgttaaaatgcgtrtatctctgggaggaaagttagcaccttgcttcatttccatacttaacaccttagataaccaataaatgcattgattaaattcccttaaagagaaaattaattgagactaggtttttagcgaggaaggatggagagttcagttctgcgtgacaggcgctagccaggcaggcaggagtaggaacgcgtgaaaggaaataaagagcaggaagggcagcgtgaagctgcagacaggcagtagaggctgttagcaaatattagataagcacctcagaaacaaacaccacctttcacagtgtgtcctgggagtagatctgattgctcctttctctttagtcctcatcgtgtctgatcacatgcaaaactctatattaatacacatcgaacactccaaaccacaaaatagataactagcccaacctgtgcctgatattctgttaaacctcacttcaagcttcacattttgtgaagcccaatgtggttacactcaggagccactatccagagaaatgggaattgttggctatgcaggctacttctcaggtgagagtcttctgacttgatgttaagatagcggaaagagatgttcatcctcaacatttgataagacagacagtgtagcattattgttcagctcatgatttctagagacaaactgtggcttcaaatccacagtgactatgggagaggtatttaacttctctgtgcctcagtttctt

SEQ ID NO: 34962 - DNA, 1235 bp, Homo sapiens
catcattacgcttcctaacacaaatccatctgggttataccacggttagaatttacccccacagtyctggtggaaagagctcctccttaggccaggctggcatggcaacattttcttacattgggatggggcaggactggaggaatgtgattagagcctactgctgctattctctctgttcactcaaaagtcataatctttgccttaatatttttatatttttttcttaagcattgagggagttgaataaatgtactttaataaacaagactggggacaaattgggtgatccataataggggacattcaaaaatggcagatctgagtgtcatttgcttgtaattgcttttcaaattagtttgttgtttttgtttcattttttttgttatcatccacattccaacagctgcctaaactactggcattgcaggatgtatcaagacatttgccatctaaagagccattaggagaataataagggtaggactttgttggccatttccatcatgtgattttttttcccctagttacttgcatccttcttcctgcccccttgacttgtatgagcagttgctgcagagatggcaggatgtcaatgcccccaaaattgaacctgtgatttgtttttctttgatttatgtgcttgtagtcaataaactttataaaggaaagtatcagactgaacaatcaatcaaagataaacagattcctgtcctttaaaagcatttcagcccagtaggtgagtctcattcatcttttgcaggcatgctttcggcctttccattgagacacaaccgactgctcactacaggcagcttttctaccaaagggctgctgcagttgagctgagatttatcaatttcatggcaccagtggtcctgacatggtatcattttcaggatctaaatggttaagcatgctgtttgtatgctgagacctgggctttccatagacctgaaaagagagaaaggtgactagttttaaacactttatactgtataattctataaaaattcatattgtccattttttttctattctaaaaagccaaatcccttccctgcgaaggagaattccctcttcgttctattagtggtttctgaatctgccttcgaataaggcaaatgtcatcctgcgtgttttgcttctctgcagcacagatggtgtgcatatgcagattggtgattttctaatcaatacagtggcacttgggaatatctgtaagtattgtaata

SEQ ID NO: 34963 - DNA, 1235 bp, Homo sapiens
catcattacgcttcctaacacaaatccatctgggttataccacggttagaatttacccccacagttctggtggaaagagctcctccttaggccaggctggcatggcaacattttcttacattgggatggggcaggactggaggaatgtgattagagcctactgctgctattctctctgttcactcaaaagtcataatctttgccttaatatttttatatttttttcttaagcattgagggagttgaataaatgtactttaataaayaagactggggacaaattgggtgatccataataggggacattcaaaaatggcagatctgagtgtcatttgcttgtaattgcttttcaaattagtttgttgtttttgtttcattttttttgttatcatccacattccaacagctgcctaaactactggcattgcaggatgtatcaagacatttgccatctaaagagccattaggagaataataagggtaggactttgttggccatttccatcatgtgattttttttcccctagttacttgcatccttcttcctgcccccttgacttgtatgagcagttgctgcagagatggcaggatgtcaatgcccccaaaattgaacctgtgatttgtttttctttgatttatgtgcttgtagtcaataaactttataaaggaaagtatcagactgaacaatcaatcaaagataaacagattcctgtcctttaaaagcatttcagcccagtaggtgagtctcattcatcttttgcaggcatgctttcggcctttccattgagacacaaccgactgctcactacaggcagcttttctaccaaagggctgctgcagttgagctgagatttatcaatttcatggcaccagtggtcctgacatggtatcattttcaggatctaaatggttaagcatgctgtttgtatgctgagacctgggctttccatagacctgaaaagagagaaaggtgactagttttaaacactttatactgtataattctataaaaattcatattgtccattttttttctattctaaaaagccaaatcccttccctgcgaaggagaattccctcttcgttctattagtggtttctgaatctgccttcgaataaggcaaatgtcatcctgcgtgttttgcttctctgcagcacagatggtgtgcatatgcagattggtgattttctaatcaatacagtggcacttgggaatatctgtaagtattgtaata

SEQ ID NO: 34964 - DNA, 1235 bp, Homo sapiens
catcattacgcttcctaacacaaatccatctgggttataccacggttagaatttacccccacagttctggtggaaagagctcctccttaggccaggctggcatggcaacattttcttacattgggatggggcaggactggaggaatgtgattagagcctactgctgctattctctctgttcactcaaaagtcataatctttgccttaatatttttatatttttttcttaagcattgagggagttgaataaatgtactttaataaacaagactggggacaaattgggtgatccataataggggacattcaaaaatggcagatctgagtgtcatttgcttgtaattgcttttcaaattagtttgttgtttttgtttcattttttttgttatcatccacattccaacagctgcctaaactactggcattgcaggatgtatcaagacatttgccatctaaagagccatkaggagaataataagggtaggactttgttggccatttccatcatgtgattttttttcccctagttacttgcatccttcttcctgcccccttgacttgtatgagcagttgctgcagagatggcaggatgtcaatgcccccaaaattgaacctgtgatttgtttttctttgatttatgtgcttgtagtcaataaactttataaaggaaagtatcagactgaacaatcaatcaaagataaacagattcctgtcctttaaaagcatttcagcccagtaggtgagtctcattcatcttttgcaggcatgctttcggcctttccattgagacacaaccgactgctcactacaggcagcttttctaccaaagggctgctgcagttgagctgagatttatcaatttcatggcaccagtggtcctgacatggtatcattttcaggatctaaatggttaagcatgctgtttgtatgctgagacctgggctttccatagacctgaaaagagagaaaggtgactagttttaaacactttatactgtataattctataaaaattcatattgtccattttttttctattctaaaaagccaaatcccttccctgcgaaggagaattccctcttcgttctattagtggtttctgaatctgccttcgaataaggcaaatgtcatcctgcgtgttttgcttctctgcagcacagatggtgtgcatatgcagattggtgattttctaatcaatacagtggcacttgggaatatctgtaagtattgtaata

SEQ ID NO: 34965 - DNA, 1225 bp, Homo sapiens
agctctaatccccagcacctctgaacgttacagtttgggagacagggtctttaagaagtaatttagttaaatgaggtcattggggtgggccttaatacaacaagactgatattctcataagaagaggagatgaggacacagacacacacagaggaagatcatgtgtttaagacacagagagaaaatggccctgtataagccaaggagagagacttcagtagaaactaaccctgctgacaccttgatcttggacttcagcctccttaactgcaaggaagtaaatatctgtagtttcagccacccagcctgcagttctttgttatggaagccctaggaaaggaatataggacccagtaagcagcaaatgtggaacttcttaaagaggaagaggccacagagaaatgggtggtaagaatcaggtcacaggggagggaggagcatgggggaacagaggacaaagtgaggagcacccttagggaggatggtggctgaacactcccaggatacaccacaccactgccctactcaagtgagcactattacagacttcacatcctcagtttggtgaagagagagggctgggcctagagccacataaccctgttagggtgtctctgagcttactctgtggacttgggcatgtcacttggccctagggcctcaggactggtgaggatttagataatgattcttctctgctttttcaattgaaatattatcaaaatgtaagtaattgttgttgtggtggttgaatcgtcctgtggttcaatgcctctggtagccagctgcagatccacagagaaagtgctcagctccctgattttctgctctcagtcaaagcctaatccttggcctttcttggcagcacttgtcattgtccggaatccctgaaagtccagggacaggccatggctcagtgggcaggaaaaaagattttaaccgaaggcagtgctcacctgtgagtcyccccagcagtagcgtcatcagcaggaaaggactaggaaggtggggccaggaggctggcacgggcattctggagaccttaggagcctgctctgtccaaacgtctgtgctgggaagatcgcagactctgctctgaggagagaagacaagccctgcctcccttagttcaagaggaagtggctgcgatggagtgaagcagtaacctgcttctggattgtgaaacagaaatcaggaacagcaagcagctacaatgcaagcagtt

SEQ ID NO: 34966 - DNA, 1969 bp, Homo sapiens
ggggaagttgtgggaccctgagatgtgggagtggacatttgggtcaaagcactcaaagatcttcggttgacttargagttgctgggtacaattgcagcagcatagctacttatctgtataaaatatcctccccaaatcaaataaaaaatgaaaacaaagtaagttctgcacaaccctggctctcagtattacttgaagagagaaagccaaactgcaaaatgaccgtgagtcaaaacagaacactcacctaaccctagtgcacagtctcttacccggctcccacgccactggtgcagcacttatgtaaccacaaggcatcttgcattttacctgccagcctagacaacttaaaatgcatttccagccttagtacctgagcaaagatgctacatctggcaaaccgaaagcacccaaaaatgccagccctggtcctggtccaagccagtgggtggatgaataactgaaaagcaaatgcaatccagtcttgatggtgcagttttacctccctgagaagtaaaactatgaaccctagaaacatcacaaggatcaggaataggagaaattccaaggtgggagaggaagaagggagactgactaggggcctcaggactgagggacagccctgcagccaggcacctgggacccatcccccaacaccagccccagccataaacggaggcaaaggaatgacatagaaaagagcaaaagcctcaagtcaattaaatcaccacttcaagaaactagaaaaagtagagcaaaataaactcaaagcaagcaggagacaggaattaataaaaagaagagtgcaaaaaatgaataaactggaaacacaaaaacaatttaaaaactcacggaaacaaagtggtcctttgaaaagaccaataaaatggaaaaaaactatagcaaggctgatgaagaagaaaacagaaatggcatattttagatatgaggttgaaacaggggatatcgccataacccttcagacaccaaaaagataataaggagatattatgaacaactctacacacaaaaatatgacaacttagataaaatggacacaaaattcttcaaaaggcacgagttaccggaactcacccaatatgaaatgaataatatgagtaaccctaaactactgaggaaattgaatttatacttttaaaacacccccaaaaattcttgaggcccaagtgtttcaaagaaaaatactgcaaagcatttaaatatgaattaaaaccaaatttagtgcacagaaagatagtcataaaagaaatttgaggaaaatttgaatgtatactccattttagatgatataagggaattgttttaataattttatgaaatttagtgattaaaaatttgaaattgtattaactgtaataatgatactggttttgttatgctgtctttagtcataagatcacccaactatggattccatttggaactgcgtgtacatgcatgactgagttagctgtggacatgatcacacgccttccatacatctctgattatagaagatattttttgccctccatttcctatatttactcttccagcagacagggacatggaaaaatccgtgacctagcactgacccagcagataagactaaccaccataaggtatgtgggaggaacctgggcctttgaaaagtctcctggagttgagactcctcctggtattacacaagagggaagtaagacatattttggtcatacggagtggaacacaggccaacttcaggtccatgggacaatgcccagcagaagaggactgtttctctaactagcacaaatttgcattttaggctgatactgaccttgtcctcagggacccagatttactttaattagtttgaaccaataacccgatctaaaggcaagaggtcttcaacaacatcccccatgacttcccaagtcctagtttccccttctttaaaactccagacttactgggtggttgaagcaaa

SEQ ID NO: 34967 - DNA, 1167 bp, Homo sapiens
agtcaaatcctcccctggggagcagctaggtgctagtgtggttctgaccattggcatgcacccgagagtcagactgagaccacatgactagtttgggccaataggtaatgaatggacgtactgtgtctcgttgaggctaaggcagctaagaaccattggtgcctcttgagccactctggtgactttggtggccacatagtccaggtgccatacccaggaaatggaggagtgtggcccagtctgcatcagactttccatgaatgagaataaacctattcctcacttgaggtactgagagttggggggagttgaggaaaccagcaatgaatatagtcaaaatcacccttaaaaacattcacggctgggagcgctggctcgtgcctataatcccagcactttgggaggccaaggtgggtggatcacctgaggtcaggagttcgagaccagcctggccaacatggtgaaactccgtctctactaaaaatacaaaaaattagccgggcgtggtggcgggtgcctgtgatcctagctacttgggaggctgaggcaggagaattgcttgaacccaggaggcggaggttgcagtgagccaagatggctcactgtgctccagcctgggcgacagagcgagactccatctcaaaaaaaaaaaaaaaaattcaaatttctgtttgggaggctgagagaggagcatggcttgagcccaggagtctgaggctgcaataagctctgatcatgccactgcactccagcccaggcaagacagtgagatctggtctcttaaaaaacaaattccaattgaccttgaactcgactatataatagatttgtgcctctgcactatcactcaatatctaacactaccattatgttcctttctgcattggagctgattgctactgctgcttctcaaagtcaactggtgtgtgtttggaggcagtgctggataaaaatagatatttaatttatgtgcatgttggggagaaggtttgctgagtacatgtccacagatttgtgtaagttaatgtggaagtgttatgccaccagaaacatttattattagcaaaaataytaatgaaaattctctctatagatggtaagattaaaatgcatctttattttttctcctctaagctattatctcccaacttgccaatattgactaca

SEQ ID NO: 34968 - DNA, 595 bp, Homo sapiens
atgtggccggagaagggcggctgtgacagtgaggaaagagccacgtggactctgctaccgcacaccatggcacgtgcccagccctctctgtgaatcagctcagctcaccctcctgacaacccacgttgctgttgattctcctctcacaggtgaggtcactcaggcacgatgggtcacggagcttgkccaggatcgtggcagagccagcatccaacaaggccctagagcccaagctctcagcctctctcagaggccaggctagtcctctgtggggagggccgcctgcacctgctgaggggtgaacccatggagatgcatgtgatcacagaggaaaggagcacacgggtgggcaaaggcttgtgaccagaacctgggtgacagctatgctaggaggtggaggaagaagaacagccagccctccatgaagtcctcgtcagtgggacctgtgctgtgaaggtgaaggaaattctgggaggacagtgagggaggggaaccgggggcggtaatatgcatgagtcagtgtggaggaaaggccggtggggcctgcccagaggacgggaaggcagcaggaagcgggcaggagggagaaggtctt

SEQ ID NO: 34969 - DNA, 814 bp, Homo sapiens
catttttaataatggtaatgggtaatagaaaataatgttattttaggaaacaattctaaagcttcattttcaggagactgagattttagaagctacttctttaattcttatgacatagagtcggattagacacaaaataaatgttatgaaaatgctactactgttctttgaaggctgtttatagtttgtagatgctgagaatatggtgaaatggtaaactatgcatagccttaacttacggagtgctagagttttgggctgaggagctggtcaccattgggcatctgacaactgattgtttgggcttctgggactgtttctggaggggcctggatctcagcacactgtgtcaggtaggagaggaaaaaaacgttatctgyttgctcctaagctcattggttgaagattcgccccacaggcttcaatttctctgcacttacttttttctctgacttattgtgggtttctcaagcataggggccaggggtcctgtgaggtgggtgccatttgggatgccacatggagctggcagtgtccacagacagctggtttctgcagtggcagcagggtggagtaagcgtccaacggtgtccaaagatttggagtggtacttaagaggtgtttacacgagcaacaaggtaagtagagataactgggccttcaatacagaggttgatggaaacacatctgcaagtgtacctgattcaaatcatcacacagtaacccctccaggggaatgtcaaattctgtactgtttttaatgctcagctgacacattgctctagtccagtggttctagaactttttgagctta

SEQ ID NO: 34970 - DNA, 814 bp, Homo sapiens
catttttaataatggtaatgggtaatagaaaataatgttattttaggaaacaattctaaagcttcattttcaggagactgagattttagaagctacttctttaattcttatgacatagagtcggattagacacaaaataaatgttatgaaaatgctactactgttctttgaaggctgtttatagtttgtagatgctgagaatatggtgaaatggtaaactatgcatagccttaacttacggagtgctagagttttgggctgaggagctggtcaccattgggcatctgacaactgattgtttgggcttctgggactgtttctggaggggcctggatctcagcacactgtgtcaggtaggagaggaaaaaaacgttatctgcttgctcctaagctcattggttgaagattcgccccacaggcttcaatttctctgcacttacttttttctctgacttattgtgggtttctcaagcataggggccaggggtcctgtgaggtgggtgccatttgggatgccacatggagctggcagtgtccacagacagctggtttctgcagtggcagcagggtggagtaagcgtccaacggtgtccaaagatttggagtggtacttaagaggtgtttacacgagcaacaaggtaagtagagataactgggccttcaatacagaggttgatggaaacacatctgcaagtgtacctgattcaaatcatcacacagtaacccctccaggggaatgtcaaattctgtactgtttttaatgctcagctgacacattgctctagtccagtggttctagaamtttttgagctta

SEQ ID NO: 34971 - DNA, 602 bp, Homo sapiens
ttatagtacaatgctataaaattgcacatctaaattgcaagaagtggagaatgacgtaaaggcatactacactgccactaaaaatcatatttttaaggaatatttaatgatctgagaaagtgcacaaaatgtataaattatgatctcccttttctaaaattacacacaatgtacacagaaaaaaaaaataaataaataaaaggaaagtgaagctcagcrtggtgcctcatacctgtaatcccagcactttgggagcctgaggtgcaggataacttgagcccaggagtttgagaccagcccagggaacatagggagatcttatctctactaacaatttaaaaaataattgggtgtggggtgtgtacctgtagtcccagctactcaggaggctgaggtgggaggatggcttgagcccaggagttcaagactgcggtgagctatagtcgcaccactgtgctccagcctggatgatagagtgagactctgtctcaaaaaaacatataaataaataaacaaataaaaggaaatcaaccaaatgctaacaataattatggatagttagatgcaagttgagtatgccttatccaaaatgcttgggacca

SEQ ID NO: 34972 - DNA, 602 bp, Homo sapiens
ttatagtacaatgctataaaattgcacatctaaattgcaagaagtggagaatgacgtaaaggcatactacactgccactaaaaatcatatttttaaggaatatttaatgatctgagaaagtgcacaaaatgtataaattatgatctcccttttctaaaattacacacaatgtacacagaaaaaaaaaataaataaataaaaggaaagtgaagctcagcatggtgcctcatacctgtaatcccagcactttgggagcctgaggtgsaggataacttgagcccaggagtttgagaccagcccagggaacatagggagatcttatctctactaacaatttaaaaaataattgggtgtggggtgtgtacctgtagtcccagctactcaggaggctgaggtgggaggatggcttgagcccaggagttcaagactgcggtgagctatagtcgcaccactgtgctccagcctggatgatagagtgagactctgtctcaaaaaaacatataaataaataaacaaataaaaggaaatcaaccaaatgctaacaataattatggatagttagatgcaagttgagtatgccttatccaaaatgcttgggacca

SEQ ID NO: 34973 - DNA, 602 bp, Homo sapiens
ttatagtacaatgctataaaattgcacatctaaattgcaagaagtggagaatgacgtaaaggcatactacactgccactaaaaatcatatttttaaggaatatttaatgatctgagaaagtgcacaaaatgtataaattatgatctcccttttctaaaattacacacaatgtacacagaaaaaaaaaataaataaataaaaggaaagtgaagctcagcatggtgcctcatacctgtaatcccagcactttgggagcctgaggtgcaggataacttgagcccaggagtttgagaccagcccagggaacatagggagatcttatctctactaacaatttaaaaaataattgggygtggggtgtgtacctgtagtcccagctactcaggaggctgaggtgggaggatggcttgagcccaggagttcaagactgcggtgagctatagtcgcaccactgtgctccagcctggatgatagagtgagactctgtctcaaaaaaacatataaataaataaacaaataaaaggaaatcaaccaaatgctaacaataattatggatagttagatgcaagttgagtatgccttatccaaaatgcttgggacca

SEQ ID NO: 34974 - DNA, 1312 bp, Homo sapiens
caacttctcttcctgccccatccttcttcctttccccttccagaggtggtgatcccaagaccactccctagcaaacctcctgtccaccactctccatctccaagtctgcttcctgagtaggccacagcctstgacaattgccacttggtgccttcacttttttttttttttttttttttgagacaggctctcaatctgttgcccaggctgaagtgcattggtgtgatcatagctcactgcagcctcggcctcccgggttaagtgatcctcctccctcaacctgctgagtagatggcactacaggtgtgtaccaccacacctggctaattttttaaatttttgtagagacagggtcttgctatgttgcccaggctggtctcaaacacctggcctcaagcgatcctcctgcctcagtctccctaaacactaggaatacaggcatgagtcactgtacctggcagtgctttcactttctgctgtggacttgtctaatggtatacgaaacaagagcagtcaactgagttcctactcttgttaaaccagaggatgcccagggataacccacctcacttttcccagccttatctagacacactacgtggtagacaacgatgtgatgtccagctacctcttcaaaggaggacttgaggaggctgaggcaggaggattgcctgagcctgggaggttgaggctgcagtgagctatcatcatgtcactgcactgcacataccccactgtgggtggtacagagacagcctctggccaagactttgtcatgcccatatcactgctggacatctttcactgcccaatcctgcttcttctctcttccacaggtgttggtgccaaataaacctcgggccctaaacttctaggcatctgcctccggagaatccaacctgcaacacaacttaactaacaccttcctttccaggacagcttatggggtgctcccttatcaaagaaagggtgctagcagctacaggcagcacactctttttatctgggataatggtgagagaagatttggtgctgtggtccctgctggccccttgatgtaccagccaactgtagtgacttcaatttgagatgcctgaagatagcaggatgccattcagtgctgtcagtggaaaacaccggacattttagtctaggtatatatacaatatttatggaaaatagaggtcaagaattcctgccacatagcatatgaagaaagagtctaaatgctcttgcaacagcggttttaacattaatggtatgctgtataaatcgacaactattaaataatattatttggtaactttcatgc

SEQ ID NO: 34975 - DNA, 1312 bp, Homo sapiens
caacttctcttcctgccccatccttcttcctttccccttccagaggtggtgatcccaagaccactccctagcaaacctcctgtccaccactctccatctccaagtctgcttcctgagtaggccacagcctctgacaattgccacttggtgccttcacttttttttttttttttttttttgagacaggctctcaatctgttgcccaggctgaagtgcattggtgtgatcatagctcactgcagcctcggcctcccgggttaagtgatcctcctccctcaacctgctgagtagatggcactacaggtgtgtaccaccacacctggctaattttttaaatttttgtagagacagggtcttgctatgttgcccaggctggtctcaaacacctggcctcaagcgatcctcctgcctcagtctccctaaacactaggaatacaggcatgagtcactgtacctggcagtgctttcactttctgctgtggacttgtctaatggtataygaaacaagagcagtcaactgagttcctactcttgttaaaccagaggatgcccagggataacccacctcacttttcccagccttatctagacacactacgtggtagacaacgatgtgatgtccagctacctcttcaaaggaggacttgaggaggctgaggcaggaggattgcctgagcctgggaggttgaggctgcagtgagctatcatcatgtcactgcactgcacataccccactgtgggtggtacagagacagcctctggccaagactttgtcatgcccatatcactgctggacatctttcactgcccaatcctgcttcttctctcttccacaggtgttggtgccaaataaacctcgggccctaaacttctaggcatctgcctccggagaatccaacctgcaacacaacttaactaacaccttcctttccaggacagcttatggggtgctcccttatcaaagaaagggtgctagcagctacaggcagcacactctttttatctgggataatggtgagagaagatttggtgctgtggtccctgctggccccttgatgtaccagccaactgtagtgacttcaatttgagatgcctgaagatagcaggatgccattcagtgctgtcagtggaaaacaccggacattttagtctaggtatatatacaatatttatggaaaatagaggtcaagaattcctgccacatagcatatgaagaaagagtctaaatgctcttgcaacagcggttttaacattaatggtatgctgtataaatcgacaactattaaataatattatttggtaactttcatgc

SEQ ID NO: 34976 - DNA, 1312 bp, Homo sapiens
caacttctcttcctgccccatccttcttcctttccccttccagaggtggtgatcccaagaccactccctagcaaacctcctgtccaccactctccatctccaagtctgcttcctgagtaggccacagcctctgacaattgccacttggtgccttcacttttttttttttttttttttttgagacaggctctcaatctgttgcccaggctgaagtgcattggtgtgatcatagctcactgcagcctcggcctcccgggttaagtgatcctcctccctcaacctgctgagtagatggcactacaggtgtgtaccaccacacctggctaattttttaaatttttgtagagacagggtcttgctatgttgcccaggctggtctcaaacacctggcctcaagcgatcctcctgcctcagtctccctaaacactaggaatacaggcatgagtcactgtacctggcagtgctttcactttctgctgtggacttgtctaatggtatacgaaacaagagcagtcaactgagttcctactcttgttaaaccagaggatgcccagggataacccacctcacttttcccagccttatctagacacrctacgtggtagacaacgatgtgatgtccagctacctcttcaaaggaggacttgaggaggctgaggcaggaggattgcctgagcctgggaggttgaggctgcagtgagctatcatcatgtcactgcactgcacataccccactgtgggtggtacagagacagcctctggccaagactttgtcatgcccatatcactgctggacatctttcactgcccaatcctgcttcttctctcttccacaggtgttggtgccaaataaacctcgggccctaaacttctaggcatctgcctccggagaatccaacctgcaacacaacttaactaacaccttcctttccaggacagcttatggggtgctcccttatcaaagaaagggtgctagcagctacaggcagcacactctttttatctgggataatggtgagagaagatttggtgctgtggtccctgctggccccttgatgtaccagccaactgtagtgacttcaatttgagatgcctgaagatagcaggatgccattcagtgctgtcagtggaaaacaccggacattttagtctaggtatatatacaatatttatggaaaatagaggtcaagaattcctgccacatagcatatgaagaaagagtctaaatgctcttgcaacagcggttttaacattaatggtatgctgtataaatcgacaactattaaataatattatttggtaactttcatgc

SEQ ID NO: 34977 - DNA, 1312 bp, Homo sapiens
caacttctcttcctgccccatccttcttcctttccccttccagaggtggtgatcccaagaccactccctagcaaacctcctgtccaccactctccatctccaagtctgcttcctgagtaggccacagcctctgacaattgccacttggtgccttcacttttttttttttttttttttttgagacaggctctcaatctgttgcccaggctgaagtgcattggtgtgatcatagctcactgcagcctcggcctcccgggttaagtgatcctcctccctcaacctgctgagtagatggcactacaggtgtgtaccaccacacctggctaattttttaaatttttgtagagacagggtcttgctatgttgcccaggctggtctcaaacacctggcctcaagcgatcctcctgcctcagtctccctaaacactaggaatacaggcatgagtcactgtacctggcagtgctttcactttctgctgtggacttgtctaatggtatacgaaacaagagcagtcaactgagttcctactcttgttaaaccagaggatgcccagggataacccacctcacttttcccagccttatctagacacactacgtggtagacaacgatgtgatgtccagctacctcttcaaaggaggacttgaggaggctgaggcaggaggattgcctgagcctgggaggttgaggctgcagtgagctatcatcatgtcactgcactgcacataccccactgtgggtggtacagagacagcctctggccaagactttgtcatgcccatatcactgctggacatctttcactgcccaatcctgcttcttctctcttccacaggtgttggtgccaaataaacctcgggccctaaacttctaggcatctgcctccggagaatccaacctgcaacacaacttaactaacaccttcctttccaggacagcttatggggtgctcccttatcaaagaaagggtgctagcagctacaggcagcacactctttttatctgggataatggtgagagaagatttggtgctgtggyccctgctggccccttgatgtaccagccaactgtagtgacttcaatttgagatgcctgaagatagcaggatgccattcagtgctgtcagtggaaaacaccggacattttagtctaggtatatatacaatatttatggaaaatagaggtcaagaattcctgccacatagcatatgaagaaagagtctaaatgctcttgcaacagcggttttaacattaatggtatgctgtataaatcgacaactattaaataatattatttggtaactttcatgc

SEQ ID NO: 34978 - DNA, 1312 bp, Homo sapiens
caacttctcttcctgccccatccttcttcctttccccttccagaggtggtgatcccaagaccactccctagcaaacctcctgtccaccactctccatctccaagtctgcttcctgagtaggccacagcctctgacaattgccacttggtgccttcacttttttttttttttttttttttgagacaggctctcaatctgttgcccaggctgaagtgcattggtgtgatcatagctcactgcagcctcggcctcccgggttaagtgatcctcctccctcaacctgctgagtagatggcactacaggtgtgtaccaccacacctggctaattttttaaatttttgtagagacagggtcttgctatgttgcccaggctggtctcaaacacctggcctcaagcgatcctcctgcctcagtctccctaaacactaggaatacaggcatgagtcactgtacctggcagtgctttcactttctgctgtggacttgtctaatggtatacgaaacaagagcagtcaactgagttcctactcttgttaaaccagaggatgcccagggataacccacctcacttttcccagccttatctagacacactacgtggtagacaacgatgtgatgtccagctacctcttcaaaggaggacttgaggaggctgaggcaggaggattgcctgagcctgggaggttgaggctgcagtgagctatcatcatgtcactgcactgcacataccccactgtgggtggtacagagacagcctctggccaagactttgtcatgcccatatcactgctggacatctttcactgcccaatcctgcttcttctctcttccacaggtgttggtgccaaataaacctcgggccctaaacttctaggcatctgcctccggagaatccaacctgcaacacaacttaactaacaccttcctttccaggacagcttatggggtgctcccttatcaaagaaagggtgctagcagctacaggcagcacactctttttatctgggataatggtgagagaagatttggtgctgtggtccctgctggccccttgatgtaccagccaactgtagtgacttcaatttgagatgcctgaagatagcaggatgccattcagtgctgtcagtggaaaacacmggacattttagtctaggtatatatacaatatttatggaaaatagaggtcaagaattcctgccacatagcatatgaagaaagagtctaaatgctcttgcaacagcggttttaacattaatggtatgctgtataaatcgacaactattaaataatattatttggtaactttcatgc

SEQ ID NO: 34979 - DNA, 640 bp, Homo sapiens
ttttttaacattcaatgtggtaggagagggatctagaaatcctgtagctcctcattcaagtttctaattcatcctcctgttttcaactctaggcttcaaaggtaccaggtgcctctgattcctcaacttaaccaacttctctgtcttactgcttctttcagatgagtactggctttccctgctccactaaatcagttaccactgaccatctagttccagatttaaaattttggcttatatctttgctgcagtctactagtctgttcttttgctcttgttggcttatggctttttaaaaaaattcctgtatttttagtggtatatggggagagagtgataaaacataagcaaatgaaatgcttttgatatgcaaygtttaaccagaaaaccttaatattttcaaatacaagttttaccagaattgtattatttgatcctaacaacaattgcaaaggtaggcaggcaaacaaagtattatgtgataaatgaatgagcaatatcatcctcaccttacagataaggaaatgggatcagagacacagttttagtaacttgtcaagagctaaatagcttattagtagcaaaataaagaccagggcttacattttctcgtatctaataatcttctgcaggatgcatt

SEQ ID NO: 34980 - DNA, 640 bp, Homo sapiens
ttttttaacattcaatgtggtaggagagggatctagaaatcctgtagctcctcattcaagtttctaattcatcctcctgttttcaactctaggcttcaaaggtaccaggtgcctctgattcctcaacttaaccaacttctctgtcttactgcttctttcagatgagtactggctttccctgctccactaaatcagttaccactgaccatctagttccagatttaaaattttggcttatatctttgctgcagtctactagtctgttcttttgctcttgttggcttatggctttttaaaaaaattcctgtatttttagtggtatatggggagagagtgataaaacataagcaaatgaaatgcttttgatatgcaatgtttaaccagaaaaccttaatattttcaaatacaagttttaccagaattgtattatttgatcctaacaacaattgcaaaggtaggcaggcaaacaaagtattatgtgataaatgaatgagcaatatcatcctcaccttacagataaggaaatgggatcagagrcacagttttagtaacttgtcaagagctaaatagcttattagtagcaaaataaagaccagggcttacattttctcgtatctaataatcttctgcaggatgcatt

SEQ ID NO: 34981 - DNA, 1373 bp, Homo sapiens
atcagtaggaatttattatcagtgtgagaggccatttctgttttcttatgctttcctttatttaaaaatcccaataaatatgtaatttttaacacagagagatataaaagagcgaaacaccacacatgaagctaagaactgttagggaggaagaaaagacgggaagagagcaacatacatcatcctattacggaggcaaggaaaggggagaagagataaagaccaggagggaaaygcggacgggagctgatgaggcatcaccatgcaagaacattgctccagatggccgaagggaaggtgctggcatcgctgcactcaggattattatcctataactagcaaagcatatttactaaggagaggctggtttttcttccgtactaagaaggataatttcagctaattaatttgttctgctgaactgacagccaccgaggatgtgtctgcatgccttataagcatattcttggttcatttactgagatcccacagagaagttcaatatctagagttaagcaaataaaaaataagttgttcttgtttcaaggaccaagctcgggacatgaaaagcatcaaagtgctctaagcaggaggacaatgacatgcaacatctgaggcattgttaaggcctggcctactcaatgcatattgtcacacgccaaccattttccagatacctaggttcatgctaaaggtacagatatcagcacagctccaccctgaaataaatcacagtataatgaggcagacacacccagaaacaactctgacacagggcaaaaagaaatgagttgctaaacacaaaattaagctacatgacatgggaatacaaggaaggaatgcaaacaggagaagggtgttcaacactttgtgtttgtgcacatcttatcactgtgctatgcaaatctctacattcatacagagctgcatacaaacgagggtaggttggtgatatgataaacaaaataccatcctagagattgaaagtatggaacttcctacaaacattggccaagtggtatgtggtaaatgaggacaacactgcaaatagcgccactgcctgtggccacccgatgcagtgctcacccaggagggctgctctgctggggagctgcaggatggcaccaatagctctgcttcgagcccaggtcaataataagaagaggggttgccatttccagcaagaggttgcaaacatcatttctctgggctccaattgtctgatggtgccctgttctacagaagggtcaactatacaacagacaggtgtgtgtaaagctggatgcttaagaaatgtgacaaggttagagggaaaacatgctccaaagcaaagtttcagtgtggtaattgaagatgaacatggggtcatttta

SEQ ID NO: 34982 - DNA, 1373 bp, Homo sapiens
atcagtaggaatttattatcagtgtgagaggccatttctgttttcttatgctttcctttatttaaaaatcccaataaatatgtaatttttaacacagagagatataaaagagcgaaacaccacacatgaagctaagaactgttagggaggaagaaaagacgggaagagagcaacatacatcatcctattacggaggcaaggaaaggggagaagagataaagaccaggagggaaacgcggacgggagctgatgaggcatcaccatgcaagaacattgctccagatggccgaagggaaggtgctggcatcgctgcactcaggattattatcctataactagcaaagcatatttactaaggagaggctggtttttcttccgtactaagraggataatttcagctaattaatttgttctgctgaactgacagccaccgaggatgtgtctgcatgccttataagcatattcttggttcatttactgagatcccacagagaagttcaatatctagagttaagcaaataaaaaataagttgttcttgtttcaaggaccaagctcgggacatgaaaagcatcaaagtgctctaagcaggaggacaatgacatgcaacatctgaggcattgttaaggcctggcctactcaatgcatattgtcacacgccaaccattttccagatacctaggttcatgctaaaggtacagatatcagcacagctccaccctgaaataaatcacagtataatgaggcagacacacccagaaacaactctgacacagggcaaaaagaaatgagttgctaaacacaaaattaagctacatgacatgggaatacaaggaaggaatgcaaacaggagaagggtgttcaacactttgtgtttgtgcacatcttatcactgtgctatgcaaatctctacattcatacagagctgcatacaaacgagggtaggttggtgatatgataaacaaaataccatcctagagattgaaagtatggaacttcctacaaacattggccaagtggtatgtggtaaatgaggacaacactgcaaatagcgccactgcctgtggccacccgatgcagtgctcacccaggagggctgctctgctggggagctgcaggatggcaccaatagctctgcttcgagcccaggtcaataataagaagaggggttgccatttccagcaagaggttgcaaacatcatttctctgggctccaattgtctgatggtgccctgttctacagaagggtcaactatacaacagacaggtgtgtgtaaagctggatgcttaagaaatgtgacaaggttagagggaaaacatgctccaaagcaaagtttcagtgtggtaattgaagatgaacatggggtcatttta

SEQ ID NO: 34983 - DNA, 1373 bp, Homo sapiens
atcagtaggaatttattatcagtgtgagaggccatttctgttttcttatgctttcctttatttaaaaatcccaataaatatgtaatttttaacacagagagatataaaagagcgaaacaccacacatgaagctaagaactgttagggaggaagaaaagacgggaagagagcaacatacatcatcctattacggaggcaaggaaaggggagaagagataaagaccaggagggaaacgcggacgggagctgatgaggcatcaccatgcaagaacattgctccagatggccgaagggaaggtgctggcatcgctgcactcaggattattatcctataactagcaaagcatatttactaaggagaggctggtttttcttccgtactaagaaggataatttcagctaattaatttgttctgctgaactgacagccaccgaggatgtgtctgcatgccttataagcatattcttggttcatttactgagatcccacasagaagttcaatatctagagttaagcaaataaaaaataagttgttcttgtttcaaggaccaagctcgggacatgaaaagcatcaaagtgctctaagcaggaggacaatgacatgcaacatctgaggcattgttaaggcctggcctactcaatgcatattgtcacacgccaaccattttccagatacctaggttcatgctaaaggtacagatatcagcacagctccaccctgaaataaatcacagtataatgaggcagacacacccagaaacaactctgacacagggcaaaaagaaatgagttgctaaacacaaaattaagctacatgacatgggaatacaaggaaggaatgcaaacaggagaagggtgttcaacactttgtgtttgtgcacatcttatcactgtgctatgcaaatctctacattcatacagagctgcatacaaacgagggtaggttggtgatatgataaacaaaataccatcctagagattgaaagtatggaacttcctacaaacattggccaagtggtatgtggtaaatgaggacaacactgcaaatagcgccactgcctgtggccacccgatgcagtgctcacccaggagggctgctctgctggggagctgcaggatggcaccaatagctctgcttcgagcccaggtcaataataagaagaggggttgccatttccagcaagaggttgcaaacatcatttctctgggctccaattgtctgatggtgccctgttctacagaagggtcaactatacaacagacaggtgtgtgtaaagctggatgcttaagaaatgtgacaaggttagagggaaaacatgctccaaagcaaagtttcagtgtggtaattgaagatgaacatggggtcatttta

SEQ ID NO: 34984 - DNA, 1373 bp, Homo sapiens
atcagtaggaatttattatcagtgtgagaggccatttctgttttcttatgctttcctttatttaaaaatcccaataaatatgtaatttttaacacagagagatataaaagagcgaaacaccacacatgaagctaagaactgttagggaggaagaaaagacgggaagagagcaacatacatcatcctattacggaggcaaggaaaggggagaagagataaagaccaggagggaaacgcggacgggagctgatgaggcatcaccatgcaagaacattgctccagatggccgaagggaaggtgctggcatcgctgcactcaggattattatcctataactagcaaagcatatttactaaggagaggctggtttttcttccgtactaagaaggataatttcagctaattaatttgttctgctgaactgacagccaccgaggatgtgtctgcatgccttataagcatattcttggttcatttactgagatcccacagagaagttcaatatctagagttaagcaaataaaaaataagttgttcttgtttcaaggaccaagctcgggacatgaaaagcatcaaagtgctctaagcaggaggacaatgacatgcaacatctgaggcattgttaaggcctggcctactcaatgcatattgtcacacgccaaccattttccagatacctaggttcatgctaaaggtacagatatcagcacagctccaccctgaaataaatcacagtataatgaggcagacacacccagaaacaactctgacacagggcaaaaagaaatgagttgctaaacacaaaattaagctacatgacatgggaatacaaggaaggaatgcaaacargagaagggtgttcaacactttgtgtttgtgcacatcttatcactgtgctatgcaaatctctacattcatacagagctgcatacaaacgagggtaggttggtgatatgataaacaaaataccatcctagagattgaaagtatggaacttcctacaaacattggccaagtggtatgtggtaaatgaggacaacactgcaaatagcgccactgcctgtggccacccgatgcagtgctcacccaggagggctgctctgctggggagctgcaggatggcaccaatagctctgcttcgagcccaggtcaataataagaagaggggttgccatttccagcaagaggttgcaaacatcatttctctgggctccaattgtctgatggtgccctgttctacagaagggtcaactatacaacagacaggtgtgtgtaaagctggatgcttaagaaatgtgacaaggttagagggaaaacatgctccaaagcaaagtttcagtgtggtaattgaagatgaacatggggtcatttta

SEQ ID NO: 34985 - DNA, 528 bp, Homo sapiens
gttgaagttccctgcatttcacaggcactcacatgggtgccacaacacaggagagaggtcagccctggaagcggtgttgaggtgaatggaggggagcaaaccagggaaggagagcagacaaaagagaacagaactagggagaggacctgggtacaggcagggttgcagcatggagcccaagaggagccagagtgaatatttagaaaagtaggaggagagttagcctcacagaggtcaagggaagaggaaaatcaaagaagaaagggttaatgcttgcatgcggaaagtaggatagagtaagttaagccatcrcgggtaggagcctggttggtgagcttaggagagcagctctattcaggtttgagggcagcctctggactgcgaagggtgaggattaaggggtaggaaagtgcaggcgcagcacaatgaatgtccaagatgtttgctcagcatccattcatggttctgattctttcattctacctaggcttcctagaaattcctctctcaagcccattttctccattc

SEQ ID NO: 34986 - DNA, 528 bp, Homo sapiens
gttgaagttccctgcatttcacaggcactcacatgggtgccacaacacaggagagaggtcagccctggaagcggtgttgaggtgaatggaggggagcaaaccagggaaggagagcagacaaaagagaacagaactagggagaggacctgggtacaggcagggttgcagcatggagcccaagaggagccagagtgaatatttagaaaagtaggaggagagttagcctcacagaggtcaagggaagaggaaaatcaaagaagaaagggttaatgcttgcatgcggaaagtaggatagagtaagttaagccatcacgggtaggagcctggttggtgagcttaggagagcagctctattcaggtttgagggcagcctctggactgygaagggtgaggattaaggggtaggaaagtgcaggcgcagcacaatgaatgtccaagatgtttgctcagcatccattcatggttctgattctttcattctacctaggcttcctagaaattcctctctcaagcccattttctccattc

SEQ ID NO: 34987 - DNA, 528 bp, Homo sapiens
gttgaagttccctgcatttcacaggcactcacatgggtgccacaacacaggagagaggtcagccctggaagcggtgttgaggtgaatggaggggagcaaaccagggaaggagagcagacaaaagagaacagaactagggagaggacctgggtacaggcagggttgcagcatggagcccaagaggagccagagtgaatatttagaaaagtaggaggagagttagcctcacagaggtcaagggaagaggaaaatcaaagaagaaagggttaatgcttgcatgcggaaagtaggatagagtaagttaagccatcacgggtaggagcctggttggtgagcttaggagagcagctctattcaggtttgagggcagcctctggactgcgaagggtgaggattaaggggtaggaaagtgyaggcgcagcacaatgaatgtccaagatgtttgctcagcatccattcatggttctgattctttcattctacctaggcttcctagaaattcctctctcaagcccattttctccattc

SEQ ID NO: 34988 - DNA, 1265 bp, Homo sapiens
tacatacatatgtatatacacacacacatatatgttttcataatcacactaatatctgccctgctacactgatggtcaaatattttgggagagaacatctggcagcctacctctagtcatcttttcctctataaaactcttccaataccctgttctagctatgcttaaccttccaagcttatcaaacaagtcaggttctctctccactccacacatygctcaaattgcttccactgcctcagatatcctgctctgcccccattcttaacctggctacctactcttagagtttcagtgatctcttccaggaagccttcaaacatgcacacacaaatacttgactagcatctcatgcacagatacttgcatacttgactggtacctcatgcttacttctatcagatgatagcgttggctaccccgtataggacgatctgtttacttatctgtcccccgccacaccagacataggccatcaggtccaccaggactggtgtctttattgttgcatgtttccattcttcacacagcacctggaaaataggtaaataaatattaagtgagtgaatgaatgaatgaatgaatgggatgaaggaatgaattcttgctactgactggtgcatagttgctacgcacatccacctccaattcagctccctgctggagtctgaaattgaaggctggtggagagaggatttggtcttcctaggcaaaatgcagttacctgacttaaccattcacactccatgtggatgggataaaaacacctaagtgagtttttcttgtcctggtgatttttgtagcagtttgtggctcatttttatcaagtctagatacaattttctttcatgtgctatgaagtcttggttcctgtaacacaaacctctttaatcattagtctttctggtagaatttgataggggccatataaaatgcttctcttcatctgctaagagccatttatggacacttactatgagcaatatacattgcaaaagaccagaaaactcaccctctgcttatgattcagcactgtaacatgatagcctggaaactagtctgatagtttaatcagtgctatgtgatccttatttgtggttggctgcctcatcaattttcatttgggaattgaaatggactctgaggcagatatggcattaattatgggggaaattggttgcaatatgccttgaggtaaaacccttctgatgggaatctaagattgaaagaaagccaaattataaaaggatgatttactgaaaaag

SEQ ID NO: 34989 - DNA, 1265 bp, Homo sapiens
tacatacatatgtatatacacacacacatatatgttttcataatcacactaatatctgccctgctacactgatggtcaaatattttgggagagaacatctggcagcctacctctagtcatcttttcctctataaaactcttccaataccctgttctagctatgcttaaccttccaagcttatcaaacaagtcaggttctctctccactccacacattgctcaaattgcttccactgcctcagatatcctgctctgcccccattcttaacctggctacctactcttagagtttcagtgatctcttccaggaagccttcaaacatgcacacacaaatacttgactagcatctcatgcacagatacttgcatacttgactggtacctcatgcttacttctatcagatgatagcgttggctaccccgtataggacgatctgtttacttatctgtcccccgccacaccagacayaggccatcaggtccaccaggactggtgtctttattgttgcatgtttccattcttcacacagcacctggaaaataggtaaataaatattaagtgagtgaatgaatgaatgaatgaatgggatgaaggaatgaattcttgctactgactggtgcatagttgctacgcacatccacctccaattcagctccctgctggagtctgaaattgaaggctggtggagagaggatttggtcttcctaggcaaaatgcagttacctgacttaaccattcacactccatgtggatgggataaaaacacctaagtgagtttttcttgtcctggtgatttttgtagcagtttgtggctcatttttatcaagtctagatacaattttctttcatgtgctatgaagtcttggttcctgtaacacaaacctctttaatcattagtctttctggtagaatttgataggggccatataaaatgcttctcttcatctgctaagagccatttatggacacttactatgagcaatatacattgcaaaagaccagaaaactcaccctctgcttatgattcagcactgtaacatgatagcctggaaactagtctgatagtttaatcagtgctatgtgatccttatttgtggttggctgcctcatcaattttcatttgggaattgaaatggactctgaggcagatatggcattaattatgggggaaattggttgcaatatgccttgaggtaaaacccttctgatgggaatctaagattgaaagaaagccaaattataaaaggatgatttactgaaaaag

SEQ ID NO: 34990 - DNA, 1151 bp, Homo sapiens
  misc_feature (1)...(1151): n = A,T,C or G
ccnnnnnnnnnnnnnnnnnnnnnnnnnnnnnnnnnnnnnnnnnnnnnnnnnnnnnnnnnnnnnnnnnnnnnnnnnnnnnnnnnnnnnnnnnnnnnnnnnnnnaactccttgtctgcaccactcatttgctaccttagaatatgctactggaaatgttatcttctgataaatgtggcctgtctttccaaataggatccccataatttantcagcgtctttgaaactggaaactacagttgttagctcttatatcataactacttagagtactgaaacaaaacatttggaggaaaaagcaacatttattccccgtaggtatgaatgacacattcccatgtctaaccccactgcaggctgaacaaggacctgacaggaaaccacaaggcagcagcccttgctaagcatgacaatgaatcagaaacctatcgacatcctctttcccatcaacaggacagaattacaaatctatttccagggacagctccatcaaacccaccatctgtcaatgggtatttcataatttatttggtttgattactaaagattcaggcatttttaaaattaggaagtgggagaaaaggattaggaggtcttcctggactctttgtgctatattaaagtatcctcctgatataacgccgcggccttcaggctttggagaagagtcaagtagcaaatatccatgttttgatcccgttccacaacatcatccattccactccaaagttcaagagccaaaggggttatagaaacaatctgtttaacttatgactcaaagcaaccgagacaggccagatctacaggctagttgagttttttccaaagccactacccacaaagatgagaagtccttcctggacttcccagtgatggtccaagccctccccamccccacttcatgacgcaacactcttggggatattctgtcacgccacttatcacagtgtatttaaactttgtgtgcctctttactccaaatggaatataatgtcctcaagattagggcttctgtatccttataacttcagtcctcagaagagtatccagcaaagagtatacctgtaatgtttatggtgaacaaaacctgacagcttattgtgattttcaacatttagattatcctaacaccatttcagaaaatgtagctgtat

SEQ ID NO: 34991 - DNA, 1151 bp, Homo sapiens
  misc_feature (1)...(1151): n = A,T,C or G
ccnnnnnnnnnnnnnnnnnnnnnnnnnnnnnnnnnnnnnnnnnnnnnnnnnnnnnnnnnnnnnnnnnnnnnnnnnnnnnnnnnnnnnnnnnnnnnnnnnnnnaactccttgtctgcaccactcatttgctaccttagaatatgctactggaaatgttatcttctgataaatgtggcctgtctttccaaataggatccccataatttantcagcgtctttgaaactggaaactacagttgttagctcttatatcataactacttagagtactgaaacaaaacatttggaggaaaaagcaacatttattccccgtaggtatgaatgacacattcccatgtctaaccccactgcaggctgaacaaggacctgacaggaaaccacaaggcagcagcccttgctaagcatgacaatgaatcagaaacctatcgacatcctctttcccatcaacaggacagaattacaaatctatttccagggacagctccatcaaacccaccatctgtcaatgggtatttcataatttatttggtttgattactaaagattcaggcatttttaaaattaggaagtgggagaaaaggattaggaggtcttcctggactctttgtgctatattaaagtatcctcctgatataacgccgcggccttcaggctttggagaagagtcaagtagcaaatatccatgttttgatcccgttccacaacatcatccattccactccaaagttcaagagccaaaggggttatagaaacaatctgtttaacttatgactcaaagcaaccgagacaggccagatctacaggctagttgagttttttccaaagccactacccacaaagatgagaagtccttcctggacttcccagtgatggtccaagccctccccacccccacttcatgacgcaacactcttggggatattctgtcacrccacttatcacagtgtatttaaactttgtgtgcctctttactccaaatggaatataatgtcctcaagattagggcttctgtatccttataacttcagtcctcagaagagtatccagcaaagagtatacctgtaatgtttatggtgaacaaaacctgacagcttattgtgattttcaacatttagattatcctaacaccatttcagaaaatgtagctgtat

SEQ ID NO: 34992 - DNA, 1188 bp, Homo sapiens
aacttgctgttcccaaagtcgagcagtccaagaagaaattttctttgtaaaagggaaaaagaaatttgattagctatgcatgcatagaaccctagcagaataatcaatgcatcacattaccctttggtggctgttcgtttagatattccaggaagactacacactcaaattccgtgttcagcaatccccctgggagggttgaaaaatgaacgtattaatatgtatatgtaaaactatttttttaaagagcaaaccatattaaggcaaaatgccaaaatagtgggactattctcattagaggaataaaatttagaatttgcagtttgaaacatggaagcatctttgttgcagagtcatctcaagagaaaaatgagtggattgaataactgtggctgaaatatggtatttttctcttgaaaataatgtagcggaatcccagtatgagcctgatctgtgcccactctgagatttattcacatttggcaatggtggagaaacagggggggccctaataggatatatttgttttggtttgcatattagtccattttcatgctgctgataaagacatacccaagactgggtaatttataaagaaaaagaggtttaatggactcacagttccacgtggccggggaggcttcacaatcatggcagaaggcgaaagccacgtctcacatgtcagcaggaaagagacaatgagaaccaagcaaagaggaaaccccttataccaccatcaaatctcttgagacttattcaccaccatgagaacagcatgggacaaactgtccccacgattcaattatctcccaccagctccctttcataacacatggggaattacgggagctacaattcaagatgagatttgggtggggacacagccaaaccatatctgtttggtttgggcttttttatttttgaaatttatattttttaaattggcaaataataattgtgtatatttacagggtaccatgttgtattttgatctctatatacattgtaacaaggggatatattttaataagggggagaaattagagtatcttgctaggggacaactcaccctgaagagagggagcrcctttgtacatgtctggccagagatcaacgtgctcacatcagtggtagggtggggatggctcatgcggtgggtcagacagcctttagtctccctgcacatgg

SEQ ID NO: 34993 - DNA, 1388 bp, Homo sapiens
  misc_feature (1)...(1388): n = A,T,C or G
tctactacatacttaatgaaaataatgtgttttagaatattggggtttttttcttcatagtagataggcttatatttattaagttaaaacaaagtttgaatatttatttcagttgtgttacatgattgtagacctcttttacagtayacattttcaagatgatttttttttttttttttttgtgagacggagtctcactctgttgcccaggctggagtgcagtggcacagtctcggctcactgcaggctccgcctcccaggttcacgccattcttctgcctcagcctcccgagtaggggggactacaggtgcccgccaccacgcccggctaattttttgtatttttagtagggacggggtttcaccgtgttaaccaggatggtcttgatcttctgaccttatgatccacccgcctccgcctttcaaagtgacgggatttcnnnnnnnnnnnnnnnnnnnnnnnnnnnnnnnnnnnnnnnnnnnnnnnnnnnnnnnnnnnnnnnnnnnnnnnnnnnnnnnnnnnnnnnnnnnnnnnnnnnntaccctcaaaagatcattttatgaattataagtcacaatacgagcaggagatttgggtgttgatggtgtattagtgctccacaatcagctttattattctttggacctgtggatgttaggtcaggtactagtctgccttgagtctccatttggccatgcctgtcattattccatcttgaataggcagcagagttttgacagctatgcattcgtgcatccttctcctgctgttaggtgagagcttgtaatactgccagtattcaaggttagctgttggcatctagcgctgggggaaggtacaaccagtgataatggaaactgtggaggtcagtggctggtagtcagttgagccaaacaaggtattggctgcaatttttgccagaatgattcagagctggattgttacatcaagaaatataaacaagtgattctagaaaccttggttttgccatcttcaaatttttcttaaaatttggtagttatagccgggcacagtggctcacgcctgtaatcccagcactttgtgaggctgaggtgggcagatcacgaggtcaggagatcgagaccatcctggctaacatggtgaaaccccgtctctactaaaaatacaaaaaattagccgggcgtggtggcgggccctgtagtcccagctactcaggaggctgaggcaggagaatggcatgaacccgggaggcagagcttgcagtgagctgagattgcaccactgcactccaacctgggcgacagagcaagactccatctcaaaaaaaaaaaaaaacaaaacaaaactggtagttataaacctacctacttcttttaataagagtcagtaatggctaatgtttatt

SEQ ID NO: 34994 - DNA, 504 bp, Homo sapiens
ggccatgggaaacgccagagtctcctcagctgccccttcataaaacaggtatcaagtctgcaccggattgtgtctracatttgtgagttctcggtctcaccgacttcaagaatgaagccacacaccctagcagtattacagttcttaagggcagcatgtctagagtttgttctttctgatgttctgatatgtttggagttttttccttctggtgggttcagtggtctcactggctcaggagtgaagctgcatgtttttgcggtgagctttacagctcctaaggcggcctgtctggagttatctgttcctcccggtgggttcgtggtctaggatggcttcagaagtaaaactacagatcttcgcaatgactgttacagttcacaaaggcagtgtggacccaaacaataaacaataacaagatttatagcaaaaagcaaaagaacacaagcttccatagtatagaaccagcccctagcccgttaccactgctggctcgggcagcct

SEQ ID NO: 34995 - DNA, 504 bp, Homo sapiens
ggccatgggaaacgccagagtctcctcagctgccccttcataaaacaggtatcaagtctgcaccggattgtgtctgacatttgtgagttctcggtctcaccgacttcaagaatgaagccacacaccctagcagtattacagttcttaagggcagcatgtctagagtttgttctttctgatgttctgatatgttyggagttttttccttctggtgggttcagtggtctcactggctcaggagtgaagctgcatgtttttgcggtgagctttacagctcctaaggcggcctgtctggagttatctgttcctcccggtgggttcgtggtctaggatggcttcagaagtaaaactacagatcttcgcaatgactgttacagttcacaaaggcagtgtggacccaaacaataaacaataacaagatttatagcaaaaagcaaaagaacacaagcttccatagtatagaaccagcccctagcccgttaccactgctggctcgggcagcct

SEQ ID NO: 34996 - DNA, 611 bp, Homo sapiens
gaatttttaaatatgttccataagatattggaaaaatgggctgggtgtggtggcacacgcctgtaatcccagcactgggaggcccaggtgggtggatcacctgacatcaggagttygagagcagcctggccaacatggtgaagccccatgtctactaaaaatacaaaaaattaggcaggtgtagtggcagatgcctgtaatccatgctaattgggaggctgaggcaggagaatcgcttgaacccagcctggacaatagagcaagaccctgtctcaacaaagagaaaaaaaagatattggaaaaatggtttatataatacttggaactttctagctaatctttaaaaaccagaatattccttgtttgtctacctatcatctatttataattataaaagtaatccaagcttattataacaaatttaaaccacaaaaaaagacaattgtgtttgcacctcaaaggattaccactcactgttaagtcagtacatatctttccacattcttcactgctttttcaaacataaaaaataaactttgaatgttttaattctttaatgtttgctttattataattaatttatttttcctatattccttgattatgtttca

SEQ ID NO: 34997 - DNA, 611 bp, Homo sapiens
gaatttttaaatatgttccataagatattggaaaaatgggctgggtgtggtggcacacgcctgtaatcccagcactgggaggcccaggtgggtggatcacctgacatcaggagttcgagagcagcctggccaacatggtgaagccccatgtctactaaaaatacaaaaaattaggcaggtgtagtggcagatgcctgtaatccatrctaattgggaggctgaggcaggagaatcgcttgaacccagcctggacaatagagcaagaccctgtctcaacaaagagaaaaaaaagatattggaaaaatggtttatataatacttggaactttctagctaatctttaaaaaccagaatattccttgtttgtctacctatcatctatttataattataaaagtaatccaagcttattataacaaatttaaaccacaaaaaaagacaattgtgtttgcacctcaaaggattaccactcactgttaagtcagtacatatctttccacattcttcactgctttttcaaacataaaaaataaactttgaatgttttaattctttaatgtttgctttattataattaatttatttttcctatattccttgattatgtttca

SEQ ID NO: 34998 - DNA, 1074 bp, Homo sapiens
ctggcttaaggratacagggctggtaaagtaatcgttgagcctcaagtccagattttcaatacatatggtgaggcatgctgaaagactgatgtcaagtatgaggcaagctgacagattctaagaattatgggtggatttatttctcaatacaaaattatcactatattatgggtatataatatatccattttaggatgttctcagtttttttcttttaggagtttacttatacatttattatgctatttatagttatatgtttataaggtatatatggtatttataaaatcacttatgttctgggatgtttacattaacaaagatctgcgagcaggattttctcagtaaagaggacttgatttacaaaactgaattctagaattttctgacagtaaatccaattgcaaatggctttatctgatatctatctcaaaggagacatcattcatcaaggaagctgatggcatgctggataaattctctaattcaacccgaaggagtcagctgtcttttctaagtctgacacatgagcaaggagcaaatcaaagtagaaaaggaattcattttaacatccagaatttatcacagtatttaaacaaataagaatttactttatttcagaaataagtttacagttgaaaaatgattatttactaaagccacattattcatacagacaaaacttttatagcaaaaccttggtacatgagcattaataatttgaatactatatggatatagaagatatttaaaaaatggaaacaatgtattccaaaggctgtaagaggcacaatatatatgcttgtactgggcctgcaagcattatactataattcattaaatatgatccaagaagttgcagatttttcagcactatgtactgaaaagataaaaaggaatatcatagctactcttacgctgaagaagcatctactatcaagactacaaaataggagcagcaagccaaaccaacagataatgccttaggttttaggagaaataatacatgtatggctttttcatgttcattttcgagcttggttagcaagtctggcaggtggaaaagaggaaat

SEQ ID NO: 34999 - DNA, 1074 bp, Homo sapiens
ctggcttaagggatacagggctggtaaagtaatcgttgagcctcaagtccagattttcaatacatatggtgaggcatgctgaaagactgatgtcaagtatgaggcaagctgacagattctaagaattatgggtggatttatttctcaatacaaaattatcactatattatgggtatataatatatccattttaggatgttctcagtttttttcttttaggagtttacttatacatttattatgctatttatagttatatgtttataaggtatatatggtatttataaaatcacttatgttctgggatgtttacattaacaaagatctgcgagcaggattttctcagtaaagaggacttgatttacaaaactgaattctagaattttctgacagtaaatccaattgcaaatggctttatctgatatctatctcaaaggagacatcattcatcaaggaagctgatggcatgctggataaattctctaattcaacccgaaggagtcagctgtcttttctaagtctgacacatgagcaaggagcaaatcaaagtagaaaaggaattcattttaacatccagaattyatcacagtatttaaacaaataagaatttactttatttcagaaataagtttacagttgaaaaatgattatttactaaagccacattattcatacagacaaaacttttatagcaaaaccttggtacatgagcattaataatttgaatactatatggatatagaagatatttaaaaaatggaaacaatgtattccaaaggctgtaagaggcacaatatatatgcttgtactgggcctgcaagcattatactataattcattaaatatgatccaagaagttgcagatttttcagcactatgtactgaaaagataaaaaggaatatcatagctactcttacgctgaagaagcatctactatcaagactacaaaataggagcagcaagccaaaccaacagataatgccttaggttttaggagaaataatacatgtatggctttttcatgttcattttcgagcttggttagcaagtctggcaggtggaaaagaggaaat

SEQ ID NO: 35000 - DNA, 1262 bp, Homo sapiens
agtgtgcagccaactaatgaatatgggagacagaggaagctctagtgtatttcccttgtataagggaacttgacaacatgagttccagaaaatgctggattcatggcaggggcatgggattagctgaattatttgagatccaggaaggaagtagtggatcaatactaggcaatgacaaataacgacatacaaaattgctgcagagagaaaccagacgttttggagagaaaattaagttgaaaaccaaagcttaacctagttgtctacagtaagtataacagaacagatcaggtggctaagaagaatctcattttgtattttgttcttatttcagcttactggttcagctgagaagataccaactcttaccctatcagggaggtatcatctggcttctgacagcgatgaattttataatcacctataatttcactttgtgagattctgcacataaaagctgaggagcagagggtctcacttgtgctttacttaaacccagagggacttcacyagtaatccctagggacaaaaattggagaaaactgctgaaaccaatcgaattcatcagctttataaaatctatgacaatgtatagtgatcagaaattagttctttgaaatagcaagaaaaaaattcttctgaactgcaattcatttttcattctgtcaacatttgatgtgcattgactatatgccaaataccacgctgataggttttcatctgttgtctctactttcaaatgataaatctcagtttaaactaccaaatccaccatttgaagttcccagcccagtcaactgaatttgctgggtcactgtctctctcctcttaagtggcccatggtagagggatggccagatcttttctctgagattcatttatgtagaacgtggctgaaatgatgtaaatctacagtttccacctcaaactcagcagatgcaaagaatttcaacaactcccctgtgagtgttaagatatcccacagggtagatgagccattattgtaccgagccactgatacttagctccagtgatccttaatcggaaactgctttctcttttaagggtaacatcatcttcctaagattccattgtttgttattctcaggagcaaacagctgggagtggcggctcacacctgtattctcagcactttgggaggctgaggtgggcagatggcttgaacccaggagtttgagaccagcctgggcaatagagtgagactgcatctttacaaaaaaagaaagaaagaaaaaaaaaca

SEQ ID NO: 35001 - DNA, 585 bp, Homo sapiens
gctttatattttttccctgctgtttggaaagggggccctgcatttttattttgtactgagtcctgcagattatgtagctggccttgtgatggcataagttagctagtgtgacatggaagttcagaattagaggaagctrctatgtattgtatctgtggaaggtgagaaggaggagggagagactggaggcaggaaagaccatctggcaatgtggttgcatggggagaagaggggctttgtatatcattgagaaaatatcaattttcaggatcaaattatggagaaaaactaatgagattctagaagagttaaattcctgccaaaagccactcctgatgctacagcttcatgctagaacattagaccacacccaaggataaagggggttgtggaagaaaaacaacccaaccgatttgcattatagaaagattacttcatgtggagaacagattaaagcatgagaactattgggatcctggtaaacaggctttccagtaaaccccaaaacaaagcaaaacttctaatttgtagcatttgctgatttcaggtgtgaataccaacgccaatggccaatttcaagctact

SEQ ID NO: 35002 - DNA, 1174 bp, Homo sapiens
gcattaggcccactgaaaaaaacaacagccattggtgagtctacattttgtaagaatgagatacgatcaaagcaacttacacttcttcgctggaaattagtgccctcctgtaaagacagcagtggattcaaaatcaagaaccaggcattaaaagaccaacaagccgcagctgtttgaattttcccttcctctccttgtgttctttacagctctatccactattgtgttgctgctcaaaaagctacacaaaggctgggcgcagtggctcacacctgtaatcctagcacttcgggaggccaaggtgggcggatcacgaggtcaagagatcgagaccatcctggccaacatggygaaaccccatctctactaaaaatataaaaattagctgggcgtggtggcacatgcctgtagtcccagctactcgggaggctgaggcaggagaatcacttgaacccgggaggcagaggttgcagtgagccaagattgtgccactgcactccagcctggtgacagagtgagactctgtctcaaaaaacaaacaaacaaaaaacaaaaaaacaaaaatcaaaaaaacaaagctacacaaaaactactcataaactactgtttgttattatccagtgacctctgtgtttgattctattgcacaatccctatttttccttctttttttttttttttagagttggggtcttgctctatcgcccaagctggagggcagtggcatgagcatggctcactgtaccctcaaacacctgggctcaagtgatcctccccgcccagcctccatagtagctgggactataggcatgtgccaacatggacagctcacaatccctatttttaaacttcacctctggctcttaaatgtcatcatcctgatctccaatcacaaccttctagctctctagttttcctcgtccatctaccttttatctccactgagatcatcttctcctctttggtcctttcatttctgccctctctagtctagatctcactgtgagtcactttgatcactctctgaaatggcaggctctattattaccccattttcctttgttttccactattagccatcctgcaaattcctataccaaaatcatctttattcacattattaagtgaagctggaaaaaaaaaaagcactccgctgaagatctgatgtcacccc

SEQ ID NO: 35003 - DNA, 547 bp, Homo sapiens
ttttttttttgagatggaatcttgctctgtcgcccaggctggagtgcagtggcgtgatctcagtgcaaactccgcctctcgggttcaagcgattctcctgcctcagcctccrgagtagctgggattataggcgagcgccaccacgcccagctaattttttgtatttttaatagagacggggtttcaccatgttggccaggctggtctccaaatcctggcctcaggtgatccgcccgcctcggcctcccaaggtgctgggattacaggggtgagccacagcgccaggcgagaaatatttttttaaagaggaattaaagaacctaattggttttgagagttctccaagagccagtaaatgttttccccacaatattccattctaccccattactgtagagtcgttatagaagaaaacaaaatcacataacgcaacttgggccaaaaaacattacacgttccaattacggaaataacgaactgaatcgtgtcacccttgaactatgtaaaagttgaaaagatgttcagtgttaaatgtagtaacagttcc

SEQ ID NO: 35004 - DNA, 547 bp, Homo sapiens
ttttttttttgagatggaatcttgctctgtcgcccaggctggagtgcagtggcgtgatctcagtgcaaactccgcctctcgggttcaagcgattctcctgcctcagcctccggagtagctgggattataggcgagcgccaccacgcccrgctaattttttgtatttttaatagagacggggtttcaccatgttggccaggctggtctccaaatcctggcctcaggtgatccgcccgcctcggcctcccaaggtgctgggattacaggggtgagccacagcgccaggcgagaaatatttttttaaagaggaattaaagaacctaattggttttgagagttctccaagagccagtaaatgttttccccacaatattccattctaccccattactgtagagtcgttatagaagaaaacaaaatcacataacgcaacttgggccaaaaaacattacacgttccaattacggaaataacgaactgaatcgtgtcacccttgaactatgtaaaagttgaaaagatgttcagtgttaaatgtagtaacagttcc

SEQ ID NO: 35005 - DNA, 828 bp, Homo sapiens
gcttatccatttggatttatccaatggataagcaaattggatacataaaggcttatctaatggcaaatccattagatttgtaacatcattaatagtacatgttggctttggatgttttaattttctatgtgtgcatatggatagaaataatttttcctaataaccatttatatttcttttcagaataaatgcagtaaatactggctgagtgcttatgagaagttaggcactgtttcaggtgcaggggatatagcaataaacaaaattagacaaagcccatgctcctggaaagctgacagatcagtggggtctccatttggacaatgaataagtaaatacaaaaaatacattgtacattagatggtgatatgtactaatgagaagcacaaattaaaataacattaaaatcactgattgttcacaagcactgtggaaacaacactgaaatcacccaattcyttttttttttttttttttttgagacagagtgtcactctgtcacccaggctggagtgcagtggcacaatctcggctcactgcaacctccatctcctgggttcaagtgattctcttgcctcggcctcctgagtagccaggactacaggcatgtgccaccatgcctggctaatattttgtatttttagtagagatggggtttcactgtgttggccaggctggtctcaaaatcctggcctctggtgatctgcctgtctcacttcccaaagtgctgggattacaggcgtgagccaccgcacccggccgaaatcatcaaaaattttaaaatgctagcaaatttgatcagctttatatagacatcagaaatgtttt

SEQ ID NO: 35006 - DNA, 677 bp, Homo sapiens
tgattgctggggttacaggtcctttgtgtagtataggaaatataattaatttactatttagaacttttctatttctgtaaagagattaaaagaccagaaacaatccttccaatatgtctttaatatgattctaaaattcaacmattagaaattgagtttatcctcatttttctatgatgttaactttttctcagtgaggaatattaaatgaatgttccattgcttagaaactatttctaaaatgccctgcacacgtatgttggtagaagagcaaaacccatgagggaaacagggctgaaatatatattttataaaaaataaaggtgtgtttcccttgctttcaataataattaaaagatgattctgtttctgatcaaaaaggggaaaggccaaacctaccatttttaaaaacaataaaacattcttaacttcgattaattcataaatatcagttttatgttggtttaaattaataaatcacctataaaagactgggaaaatactcaagatttttaaaacaaaataaagctggaatccagtcaccaatttaagtatactggcttgaatttcacactttggtccaaaaaacaatttctcaaaaatgacagttgtatcaagacctgtagtatagccaaatagaaccttccagttaggccattgtgatttatttatatgcg

SEQ ID NO: 35007 - DNA, 1335 bp, Homo sapiens
tttagacaattatcacaatgactgttaacatcacaaaaagagacatttttgggggaagacttaaacaaaactaagtctctggatctggctaaggtagctgttagccatgtgtgggtatttaaacttaaatcaagtaaaattaaataaaattaaaaattaaagttcctcagtctctttaagcacatttcaagtgttcacctggcacatgtggctagtggctaccatataggtctagaatattttcatcattgtagaaagtgtcattggatagctctgctctaaatctaactgccaattactaagaaacacagaggaaaaaggaaaatgttaaacgacaccagggggatgtgaatagcaaagtttggactatgggaaactctataggacaaatgatcaaattaattcatcaaataaattgcaaggagaaacctacagatcaaaagatatttaaaaaacatataaccaactgcaatacatatatatcacttgaattctgatccaaactaaaaaaaccttttaaataattaagaaatctgaataactagatttttgaatattacattttcaaagaagtaataacagtattgtggttattttttttttaaatgacatatcatttgtagctccaaactgaagctatggatcaaataatatgacaattgagattttgctgctacataaatttgcctcagtatagtggggaaagtaaaaggagatttaaatgaaacacaactggtcatgacttaataatattgaagctgaatatgggggtttattacacttttctctctacctttgtatatacttaaaattttctattataaaaagacaaaaggaagagtgaaagaaaagaaaaatcgattgaaaaagacaataatgaaagataagaaagaatgraaaagagaaagaggaagaaaaaacgaaagatatgacattggtagcagactaggaaaaagcacagggaaggctatgctctctcactcatttcttcttcctgcaattccatctcccctcaacaacaacaaaaacaaacaaaaaaggcaaaaaacctacaagtacttgaaacaggttagaacaatggaaagaatatagaactgagagttggaaatacactctgaataccactgggcaaactacttggcctcataggaggtagttatatcctggtggctaagggtatggacttcgtaatcagacacatttgagtttgagtccctgttcctcaactaattggcttgggaccttggtaagttatttaagtcttctatatttcaatttctttacctataatatacaaataatgacaatacctttttcaagggctgggtgtaagaa

SEQ ID NO: 35008 - DNA, 522 bp, Homo sapiens
ctgcctaccacaaaatgatttccatagaagtcaaaatagtggtcacttctggaagggagggaataaggaaatttaattggatagggaaataagaggggcttctaaggttctggaacatcctaattttaacctgggttggggggggggacatggtagtataytttcttatttttccttaaatggtatacatatgctttttacattcttttgtgtgtgtaatatatctcacaaaaagaaaaaaattcaatgcaagacaaaatggcttatgactacgaatgtggcatgtatttgattctaggatttttagagctagtgtatgtataaggcaggcatgttcctttgtgaaagaggtggttaggattgcccaagtgtttttgctaacactgggcaggctcttcttgcacaccaagaacatctgtggaatgagagctcatcatatgtgccacctaccatctccggtattcaaattaaatgggaaagggaaaactggaatgtgattaagaaactatagtgtatcagaaa

SEQ ID NO: 35009 - DNA, 522 bp, Homo sapiens
ctgcctaccacaaaatgatttccatagaagtcaaaatagtggtcacttctggaagggagggaataaggaaatttaattggatagggaaataagaggggcttctaaggttctggaacatcctaattttaacctgggttggggggggggacatggtagtatactttcttatttttccttaaatggtatacatatgctttttacattcttttgtgtgtgtaatatatctcacaaaaagaaaaaaattcaatgcaagacaaaatggcttatgactacgaatgtggcatgtatttgattctaggatttttagagctagtgtatgtataaggcaggcatgttcmtttgtgaaagaggtggttaggattgcccaagtgtttttgctaacactgggcaggctcttcttgcacaccaagaacatctgtggaatgagagctcatcatatgtgccacctaccatctccggtattcaaattaaatgggaaagggaaaactggaatgtgattaagaaactatagtgtatcagaaa

SEQ ID NO: 35010 - DNA, 522 bp, Homo sapiens
ctgcctaccacaaaatgatttccatagaagtcaaaatagtggtcacttctggaagggagggaataaggaaatttaattggatagggaaataagaggggcttctaaggttctggaacatcctaattttaacctgggttggggggggggacatggtagtatactttcttatttttccttaaatggtatacatatgctttttacattcttttgtgtgtgtaatatatctcacaaaaagaaaaaaattcaatgcaagacaaaatggcttatgactacgaatgtggcatgtatttgattctaggatttttagagctagtgtatgtataaggcaggcatgttcctttgtgaaagaggtggttaggattgcccaagtgtttttgctaacactgggcaggctcttcttgcacaccaagaacatctgtggaatgagagctcatcatatgtgccacctaccatctccggtattcraattaaatgggaaagggaaaactggaatgtgattaagaaactatagtgtatcagaaa

SEQ ID NO: 35011 - DNA, 818 bp, Homo sapiens
ccaggtgaattgccttcagccatgaaaagactcatccactcaccccagggtgcctacacatcccatggttttctacgtgctccatggcaagacacaggttgggaagcactgtgctagggaggtgggcagggtcatgaagttctgtcccatggtgtcttcagtgcctcctttcaagagtagaatcttggctttacatttttgtaacagaaaggtacccgagggtgtttttcccraaacagaggaaccatctgctcacaaaggtgaattcagacttgaacagtggagaaacagaaaagtcattccttgtgtatccagcagcattctgcttccatcccctcaagacacactccccctgggttctaggtttcaacattttaattgggtccaatcacagctaaagtgctctattacatgagtatttcaattttctggtagtcattcttcacatgtatcttctttagggagcatgctcttctgagatttgtgggtgaaagcaaccaagaggcaaagagctatgaggacatctgttcccccaaacatcactaggcaaagcatttctgaaatatcaagtccctcacagcagcctttacatccttgttcctcaggctgtagatgatggggttgagcatgggggtcaccaccccatagaaaagggaaatgagtttgtctgcaaggtcttgcttgtctgcccccagcgggtccttagacttgggcttcccatacatgaagaggatggtcccatagaagatgaccacgactgtgaggtgggcagagcaggtggagaaggcctttttcctcccctcagctgaggggatcct

SEQ ID NO: 35012 - DNA, 1906 bp, Homo sapiens
ggttgctattctgaccttgctgtctattacagtaattaatcttcttgcccctaatagttaagtgctgccatcaggcctctactattctggaaaattatcatctccattaacactagggaccccacttccaaaacagcacctcctacagtcagcctcagctgacagaggataaacactgctgaggttctcaataatgcacctcactagtgcattttcttattaacttagtgaagagagtgtcctctagccttcctagggaacatagccatctggtaggtctaatttggaagtccattgagcataccaaattctttgaaccttttggctccttcctctacactctgccaaggcagtttgatgtttccaggagccaccccaaccgtcctgaaggatctcttggttgccagacaccctctctaaaacagcrgccagcagaacagcagcctgttcctctgtgggggctgtgatggcctgatgacttttaaagaagtccctttcaatgagcaatttgaaaaaattgtgattcctggcatacacccactctcaactccttagaaatagcataggtttaatatgaatttaggcccaaaaaatagagaagccttatttcacaagacatgaggcatttctgtgactctgataccagataacataaactctagttccaggcatattcagaaggaaataatgccaatgttgtttgtacaaaagtgagtcggcaccttttatgcatcattatcggtctgaaatgactggcatgtttgaagacagaagggaataaaggcagccaatgatgatataaatggagcaactgaccatctgagcaattgaatataattggaagcaattggcatgggtcaagacaggaaccaggggaggtgtcagtagaaaaatggagttctaaaggccgggcacggtggttcatgcttgtaatccccgcactttgggaggccaaggcgggcagatcacctgaggttgggagttcgagacccgcctggccaacatagtgaaacaccgtctctactaaaaatacaaaaaattagttgggtgtggcggcgggcacctgtaatcccagctacttgggaggctgaggcaggagaatcacttgaacccaggaggcggaggttgcagtgagcagagatcatgccattgcacgccagcccacgtgacagtatgagactctgtctcaaaagagaaaaaagaaaaatggagttcttgctgggcgtggtgctcatgcctgtaatcccagcactttgggagggtgaggcaggaggttctcttcaggccaagagtttgagaccagcatgggcaacagagtgagaccccccactccatctctacaaaaacatttttaaaagttaaccaggtgtagtggtgcacacatgtagtcccagatactcgggactgaggcagagggatcgcttgagcccagaagttcaaggctgtggtaagctgattgtgccactgcattccagcctgggtgacaaagccagaccccagaaagaaaatggaggtttcatggctctcctcatccccaaggtattcacttctggaaaaattaatggttaggattacccaagtatacataaattctaaacaaatatatcctacgtacatagggctcttcttagcacagggtgctggaagaaagctggcttacaagttttcaactttacaatggtgaaaaagtgatacacattcagtagaaactgtacttcaagtacccatacaaccatttttttcaccttcaatatagtagtcaataaattacatgagatattcaacactttcttataaaattactttgtgctagatgattttgcccaactgtagactgctgtaagtgttttgagcacatttaaggtaggctaggctaagctatgatgttcagcaagttaagggtatt

SEQ ID NO: 35013 - DNA, 1080 bp, Homo sapiens
tcaaagactctagggaggcctgtcgatagaactccagagtgttctatcttcagttctctgtcccacaaattctagtcactttgccctcctggatgtctaatctcagtcacctcgactcggtgagatccattccccctccctgtactgcatccaggaactgtctgtaggcagtaaactggtacactcgtagggctcactttgtgtcccttttcttagcgatcacaggcctgtgttgcctgtcagccaatgtatgaaaaccatttctttctatatttagtccaatttttttagttgcttaaggcaggagagtaaatctggtccctgtttctttaacttctaaatagaagtttcaaacttattttttagagaacttacatattgactactagtagattcctttctttaaagaaattctgtcatttaaaatatggcttgtgaatagttaaaaagtagatctgcatttaaagtaacaaaattctacrtgataaattaaaaacaggatttaggagatttagatcttccccaccttgctatctagcatacaattagagagtaattcattgctattagaatggcagagggttgaaaaggaatttcaaaataaggctaaggcagaccagagtgtgatttactgcagatccatggttgtacagagctgtaaccagttactgaatcttggctataaaccctttaactgccctactgtctatttaaattctttgtcagtgggcttcagtgtttaaatgtttgctttgataaacatcccaatattcaaacaaggaataaaacattcagaaccattgagataaagatcaaaacaatagtgagaacatctgacaaatgctaactttttaaactgtagaagcctccactaactacagactgtctgaccccagaattaggattttgctccctgtccttgctggccacactgaaaataagtgaggctaattacaataatctatcctggggcaggttatttggggcaataaatcaacctcaactgttaacctttcttgtgtgtgtgtgtgtgtgtgtgtgtgtgtgtgtgtgtgtgtgacagagagagagaatacatat

SEQ ID NO: 35014 - DNA, 1264 bp, Homo sapiens
tcagcttgcaaagcctctacctcaaatttttgtgaaaactcttcaaggattctgaccgcagctcttatcagttacggggcaggaagccgccttccacaagccactctctccccataccagagggttccttggctgtgaacagcacttagattgtgtcagaggaaggccatgggctttaacaggccacatccattttcatttaccttctgaaagaagattaaggagaaaattcaattttgcctaatgcctcccccaaatggctaatttatatgctaattagcaagatagggatcgatgaaactggtaatcaatatgatatccaaggcaatggtaatgaaattcattctgagatgcactggcagtggaaatgaagcaattatgcagaataaatggggcagctcagggaataagggccccagattgcacttgactgcattatttccccttttacccctcccctcacccttccccaccccgttaaaatcaactgtccattcaggtcctttgaggtaccacgtgccagcttctccctctccaaatacctgatcctgcattaaccctgtggatytgtggcccaccatggggaaatggagctatagaaaacagcaggctctgagaagactagggatacaaaccctggaggagaagcaggggctgaatagaggctcttaagccatagactgagtggtgaattcgtactttactgtcacacctactgaggttggcttaaggttttttaattctaaagcattatagataccatattgcccaaaatttccacgactgtcctaatttcaaatattttgtcccatgaggccatatgttaaatgacgtgtcctacataagtccagtgataagtaggccacagtgtttttgtatgatttagtctaatactaggaagtcttgtttcaatctggacatttattccaatgtttcagatattttggaggagaggggagaggtgtgattgccatcatctctggagatttagggaccctatagtattcatttcacacttttcaactaagataattgaaatttgtcttttaccccaatgtctgctcattggaatcgcctgggtaatttgtccccaaattttcttatgaaaagttctgaacataccaaaaagttgaaataagtatacagtgaatgtcacatgtatcctatccagattctacaattaacattttaccatacttgccttatcacatatctgtccaactgtccatcccccatccatcatcagttcatcttttcttaatgc

SEQ ID NO: 35015 - DNA, 591 bp, Homo sapiens
cttcctaggaargtagggttttcagagtattcgaggttgctctgggcgccagttatcagtgataactaacaaagatccagggaaaatgatggctgctaatgagcttcttttcaagtttatggcctccctgagtgtctgtctgtggaactctcatgcttttgtaagggggtacaggatagaggggacaagggaagggatcagatggcctgctatctgaagcatgtgcctggcttcaatagtccccttttgggttggtttattctgtaatgtgtcccctgagaagacagactaagcagcctgggttaccctgcaatttctccaaactatttgcatgaaatactgcaggcaaaaagcccagcccctgattggctgttgctaggtaacaacataatcatcaggaaattaggctgtccttttttttttcccaacacggagtatgtgtgtgattgcagtgttgtgcaggaagagagagggagtggaacaaagacagataaatgggatgatcttgaaggcggggacaccacagccacaaacctgcatcccacggtaggacaatctgctttgggttgggctctttactcagtcaaacca

SEQ ID NO: 35016 - DNA, 591 bp, Homo sapiens
cttcctaggaaggtagggttttcagagtattcgaggttgctctgggcgccagttatcagtgataactaacaaagatccagggaaaatgatggctgctaatgagcttcttttcaagtttatggcctccctgagtgtctgtctgtggaactctcatgcttttgtaaggggstacaggatagaggggacaagggaagggatcagatggcctgctatctgaagcatgtgcctggcttcaatagtccccttttgggttggtttattctgtaatgtgtcccctgagaagacagactaagcagcctgggttaccctgcaatttctccaaactatttgcatgaaatactgcaggcaaaaagcccagcccctgattggctgttgctaggtaacaacataatcatcaggaaattaggctgtccttttttttttcccaacacggagtatgtgtgtgattgcagtgttgtgcaggaagagagagggagtggaacaaagacagataaatgggatgatcttgaaggcggggacaccacagccacaaacctgcatcccacggtaggacaatctgctttgggttgggctctttactcagtcaaacca

SEQ ID NO: 35017 - DNA, 620 bp, Homo sapiens
aaggtggctatgggtcctccgcaggctggatgcacgggtcatcacggcgcacatcacatcctgcttctgtccttcctsctggaccctgcaggaagttttggtttccctagcacttagttttggtttccctagcacttgggcatggacatggtccattgtagcttcattagctctctctacattataaatctaagactcttcagtcttagatccttttggtaagtggctcattatttgtttctttaattcagaatctacaagagagaacctaattggtctaagctcaccattttatgcagcacgaatctgaatgaaggaggcatgcatacctgaacaaaatcaggcttctgtggagtaaaaagaaagtaagcggtggaggatagttgctgggaaggcaatcaacagtgaccactacattacacaaatcattattgaatcacaaattgtgataaacacttggaagaggtacagggtgctaaaagagtgggtaacaggaggacctaaattatattgggtgtcagggaggaggttttataaggcctatagattgccttccttccaaccaatactctgttacttagagtatgggccaagctgctataacaaaaatgtccccaaaa

SEQ ID NO: 35018 - DNA, 620 bp, Homo sapiens
aaggtggctatgggtcctccgcaggctggatgcacgggtcatcacggcgcacatcacatcctgcttctgtccttcctgctggrccctgcaggaagttttggtttccctagcacttagttttggtttccctagcacttgggcatggacatggtccattgtagcttcattagctctctctacattataaatctaagactcttcagtcttagatccttttggtaagtggctcattatttgtttctttaattcagaatctacaagagagaacctaattggtctaagctcaccattttatgcagcacgaatctgaatgaaggaggcatgcatacctgaacaaaatcaggcttctgtggagtaaaaagaaagtaagcggtggaggatagttgctgggaaggcaatcaacagtgaccactacattacacaaatcattattgaatcacaaattgtgataaacacttggaagaggtacagggtgctaaaagagtgggtaacaggaggacctaaattatattgggtgtcagggaggaggttttataaggcctatagattgccttccttccaaccaatactctgttacttagagtatgggccaagctgctataacaaaaatgtccccaaaa

SEQ ID NO: 35019 - DNA, 503 bp, Homo sapiens
cagatgggaagatggtagatttgaactaaagtaataagaataataaaaggtaacagagaagatgggatttgaagtgagctttgaagactgggtaagattcaaattgttaacgatcttccaggcaatgaaaaccatctggagttatgcatggattcatgattcagcaaggaaatgagcaaaactcaaatgcagtagacaaggagtaatgggacagaaggttagatgggcagaggccagattatgaagcaccttaaaaagggggtaaggggtttaaatttgattaatatctaacacttattgaarcttaaaatctgccaggcaatgttttaaacacttttaaaacattgacttaattctcatagctctctaaggaaggtggtattcttatctctatttttatataaggaaacttgcctccagtcacacagctaacaaattatggaacttgcctccagtcacacagttaacaaatggcagagccagaaactgaacctatgccgttt

SEQ ID NO: 35020 - DNA, 526 bp, Homo sapiens
tggcagagaatcattgaaatttgctttgaactaaaaaatgaataggtgaatcaaatttttgttgtaaaatttactctagaagaggcttgataytgttttcagtagtttcagtaaaacaaaattgaaaagggagggaaaaaatagaaactttgtgccatgtagaaaatcgctctgggtatccagtcagcttgatgtttttattgttccagaaaatgctgggttcttgcccccacttaactgaggtagacttgaatctctcttttttttttttttttttttttgagacagagttttgctcttgttgcccaggctggagttcaatggcgtgatctcggctcaccacaacctctgccttctgggttcaagcaattctcctgcctcagcctcccaagtagctgagactacaggcatgcgccactgtacccggctaattttgaatttttagtagagacagggtttctccatgttggtcagggtggtctcaaactcccgacctcaggtgatccacctgccttggcctcccaaa

SEQ ID NO: 35021 - DNA, 1626 bp, Homo sapiens
acaccaagagcattttggaaggattatctccatgtacattgaaatcagccaaaaatccatatattctaaaatttctgcaattagcatgttactgtaattaaaagtaaactttatgttttcaaattttagtaacataaacattatatcattataagtcgatcaaactgttatttcccagtttgttcaataacacgtaccctttcacagctaaatggaaaatgctaatatataactccaccctatcatgcttatttgctttttttagtttcccacagcattttgtaaaaatgacctctaattttaagacaaatggaggtatgtttttaattcatatttctaatataataaatattagtttttatcaaaactgaatttcctcatgccagcttctttaataagagaacatttatgtctctgacacagtactgggcttacagtaataattcaataaatataaattcatttatcttaaaggggacagataatactacaaacccaaataatttactttggtgcttgtttctagaatagattcctaaattttcacataatgaatcaccttcagtctttaaaagttctagggccggacgcggtggctcacacctgtaatcccagcaatttgggaggccgaggaaggtggatcacaaggtcaggagttcaagaccagcctggccaatatggtaaaacctcatctctactaaaaatacaaaaattagctgggcatggtggcacatgcctgtagtcccagctactcrggaggctaaggcatgagaatcactggaacccaggaggcggaagttgcagtgagccgagaacgcgccactgcactccagcctgggcgacagagtgagactcggtctcaaaaaaagaagaaaaaaaagttctaaatgtaaaattccaggattgattaaatcctgactataaagtttcagagttggctaggaaactagcaattctataacacccccaacatcctctcccaactcagatttcaacaaaatgaggtaacaagtaaggttatgagactaatgacggaacccaattagctcttatctttccactattttttcatggcctagtcaatcatacaccaagaagagactatattttgaatacgttacttactgtggtgtgatgggatatattgccaacaatattaaggtttttgagcagttggggagaaccactatattgtccggagatctgcttcctaacttcggctgccaccgttctacaatgaagaaagcaaaaacatacgcattattgaaaaaaaaaaaaactaaactagtttaaaatggagggaagctaaatacattaaagattcatttaaagaaaaacaaaatctcagcataacaataaggctagaaattcgtaaaatattttaggaaatgcttttctagtttataattacattacaacgtcttatgttgatgtagggtacaagactgacagacaacccatatgaggttttttcttatatggcattttagggaacacactttggcctacaatagagctgcaactatagagctggctctgtagttgggagctataaaaagatgtgtatattaaaatgtatatactttaaagtatacacttaaaatgtatattaaattaaaatatata

SEQ ID NO: 35022 - DNA, 572 bp, Homo sapiens
cttccctacttcttctcctgagatgaccattatcctgaatttggcatttggcattcccatgcattttgcaattttgtttgtttttttgagacagagtctcgctcagtcacccaggctggagtgcagtggcacaatatcggcttactgcaacctctgcttcccaggttcaagtgacaatcctgccctagcccactgagtatctgggactacaggcatgcaccaccacacctggctaatttttgtgtttttagtagggactgggttttgccatgttggccaggctggtctcaaactcctggcctyaagtgatccacccacctccgcctcccagagttctgggattacgggcatgagccaccatgcccggattccatgcatgtttttggactctaactgcatatatatgaatccacacttagtgttcttttgcatgttttcaaactttaaataaatgacatatttaaatatttggtcattccactcaacaaaatgtttctaagattaggcaaagcgatccacataactctatttattttaacccattattatgtgctattgtatttgtgtagcac

SEQ ID NO: 35023 - DNA, 513 bp, Homo sapiens
aaaaaaaatcactcattaataaacatacatccctagaacattatgtctttatatcaatggtacattttaagttcattttggttattgagtctctaataataaaataatggccaacttttttgaagtaagtaaatattagaaagtagattaaacagcagatactattttatgatgtgtcctcacacacataatttatggagcagtaaatcggtctataattattttatttctatctctgcttagtatggttattgagcatcattctcaaatttatctttataaaattttctccaatgttttcatgtatttgtttttccaaagctgaataccaaccagacaacagacacacactraatacttactgtgagctaagtaccacattagaatattttggtcactatcaaattaacccaacaggttacagaagttacttttctccatttgtggatatgtttcaatatttgaagtggcacctggtgatcctaccccatttggccaaacttaataacaaca

SEQ ID NO: 35024 - DNA, 1293 bp, Homo sapiens
cacccaacgtttctcagtatctattcttgagaatcaatgattaccacagagactgtgaaatgattttctaattctgccatttcttctatacttattaattggtattcttttataaagaagagctttccatccccatcctgaacctcactctctttagtatcaggatgagcttatggccttttaaaaatggacatacactccctatattctttattttgaagctcaaattgtcccatattggccaacggaagtgccttcaagctggctcctatgtacttttgatatgtcattattattttttgagtacttccttactttcagtactgttttcaccctgtttctgaattctgccatttcttcaargagccctccttcctcttaggcagaatggtatttagaaatcaagccctgggcaccaggagtgttttttgctacgggggtgtcactgtagacacttcagaggacagagagaggaaatataattctttctaaaaaatcatgagttcacactcatactgatatatttctatttccaaaccaacaccataggattatttccgccctttccctataccacatatgtaaccccctcccactgatactttaagcctaaaaattttaaacatgagaaaacacaaaataaaatgcttgctacaaggtaaaattcatactactgttgtgactatccattctaaacaattgaggaaagtctaaggatattcatttccaatatttaaaaatcccatgctacagcatgaatcatcattttctacttttaggaactggaggaacaatgtttatgtttatgttctcgggaatgctctcctaccttctaaattggaagtagatttcagagctagaataagcttatgatagtaacaaggcatgaaattacagaagtgcaaagtccaagtcatgctcttctgaccaaatgttggcctccttgtcccaagagggtaaggttgagaggagaaattttccacatggaaaaacactgccatagggcgtgcattaatggctgatgggcagtttggtgaactctcagaggtgtgctttttttttttttaattaaagataaaagttgtatttttaggtagaaaataagttgagctattatgtaatgactcataataggtcgcgagcttttattctacatgtccaaaagtattgaagaatctggggtacaaaaggaccatggcagctcgtaaaatggtaaaaagcattataagcaccagttagtgtatggaaaacatcttcagtgtgaatgaagcctgggaggcagagggcagatag

SEQ ID NO: 35025 - DNA, 1118 bp, Homo sapiens
atgagaacaaggtgggcttgggggagacccattattaggagataatgagttatagggaatctctaaccagtcatgggactgcacctattaaaccataggttaaagttctgatgagaaacttcgaaaattaaaccagcctcattattaaatgagaccattcttggagggatttttcttttcaaacactcaragagatgaaggtctctccaaacctcacctccaccactgctttccgtctctgcgctctataaggttctgcagcatcttgctagtttagctcaggtaaagccagggggagagctgggagggaaggctggagtggcagtccctgacacgctctgggaaagcctgtgttcctcagtgacatagcttagaagtggggagaatccacctgcctgttcctgcagggactttttgcaactaacttgatcaggagatttgaaaggaagactggtgctaactgaacagggaggtgcctcggggaatcctgggactggaaaatcccttgctataccctctagtataactcccagcccttggaaattagtgccatttcaagagaatcaagtcactggcctgtgactgcgatgctgggctacttaggaaaaccatctcaattggtgttactaagtttgaagaaagctcttctaaggagaggaatctagaaacaagagttgagagagccctcttgaatttccctcctacccatcatctcccctcctccccttactgagcattttggctgaacttactgttcctttgtttttccctctttgctgagaaaactttaagaaccttctactcggcttagatttaaccacaacctttactgaatctggcttatgaaaaccagacttctctaagagacgggtcttctggcagcaattagtctgacttttctttaacaaaattctttgtaatgccattcaaaaaacaggtcggttggtaggagtttgtggcacagagtgcgtatgtgtgtgggtgagtacaggagggagtagttggggtgggaggatgatgttacagagggccaatttgtatgatttggtggaaaaaaagttcccatgttaacacattaactttgggagctgtgaaatatttaattagtgcacgggttg

SEQ ID NO: 35026 - DNA, 1118 bp, Homo sapiens
atgagaacaaggtgggcttgggggagacccattattaggagataatgagttatagggaatctctaaccagtcatgggactgcacctattaaaccataggttaaagttctgatgagaaacttcgaaaattaaaccagcctcattattaaatgagaccattcttggagggatttttcttttcaaacactcaaagagatgaaggtctctccaaacctcacctccaccactgctttccgtctctgcgctctataaggttctgcagcatcttgctagtttagctcaggtaaagccagggggagagctgggagggaaggctggagtggcagtccctgacacgctctgggaaagcctgtgttcctcagtgacatagcttagaagtggggagaatccacctgcctgttcctgcagggactttttgcaactaacttgatcaggagatttgaaaggaagactggtgctaactgaacagggaggtgcctcggggaatcctgggactggaaaatcccttgctataccctctagtataactcccagcccttggaaattagtgccatttcaagagaatcaagtcactggcctgtgactgcgatgctgggctacttaggaaaaccatctcaattggtgttactaagtttgaagaaagctcttctaaggagaggaatctagaaacaagagttgagagagccctcttgaatttccctcctacccatcatctcccctcctccccttactgagcattttggctgaacttactgttyctttgtttttccctctttgctgagaaaactttaagaaccttctactcggcttagatttaaccacaacctttactgaatctggcttatgaaaaccagacttctctaagagacgggtcttctggcagcaattagtctgacttttctttaacaaaattctttgtaatgccattcaaaaaacaggtcggttggtaggagtttgtggcacagagtgcgtatgtgtgtgggtgagtacaggagggagtagttggggtgggaggatgatgttacagagggccaatttgtatgatttggtggaaaaaaagttcccatgttaacacattaactttgggagctgtgaaatatttaattagtgcacgggttg

SEQ ID NO: 35027 - DNA, 1118 bp, Homo sapiens
atgagaacaaggtgggcttgggggagacccattattaggagataatgagttatagggaatctctaaccagtcatgggactgcacctattaaaccataggttaaagttctgatgagaaacttcgaaaattaaaccagcctcattattaaatgagaccattcttggagggatttttcttttcaaacactcaaagagatgaaggtctctccaaacctcacctccaccactgctttccgtctctgcgctctataaggttctgcagcatcttgctagtttagctcaggtaaagccagggggagagctgggagggaaggctggagtggcagtccctgacacgctctgggaaagcctgtgttcctcagtgacatagcttagaagtggggagaatccacctgcctgttcctgcagggactttttgcaactaacttgatcaggagatttgaaaggaagactggtgctaactgaacagggaggtgcctcggggaatcctgggactggaaaatcccttgctataccctctagtataactcccagcccttggaaattagtgccatttcaagagaatcaagtcactggcctgtgactgcgatgctgggctacttaggaaaaccatctcaattggtgttactaagtttgaagaaagctcttctaaggagaggaatctagaaacaagagttgagagagccctcttgaatttccctcctacccatcatctcccctcctccccttactgagcattttggctgaacttactgttcctttgtttttccctctttgctgagaaaactttaagaaccttctastcggcttagatttaaccacaacctttactgaatctggcttatgaaaaccagacttctctaagagacgggtcttctggcagcaattagtctgacttttctttaacaaaattctttgtaatgccattcaaaaaacaggtcggttggtaggagtttgtggcacagagtgcgtatgtgtgtgggtgagtacaggagggagtagttggggtgggaggatgatgttacagagggccaatttgtatgatttggtggaaaaaaagttcccatgttaacacattaactttgggagctgtgaaatatttaattagtgcacgggttg

SEQ ID NO: 35028 - DNA, 1118 bp, Homo sapiens
atgagaacaaggtgggcttgggggagacccattattaggagataatgagttatagggaatctctaaccagtcatgggactgcacctattaaaccataggttaaagttctgatgagaaacttcgaaaattaaaccagcctcattattaaatgagaccattcttggagggatttttcttttcaaacactcaaagagatgaaggtctctccaaacctcacctccaccactgctttccgtctctgcgctctataaggttctgcagcatcttgctagtttagctcaggtaaagccagggggagagctgggagggaaggctggagtggcagtccctgacacgctctgggaaagcctgtgttcctcagtgacatagcttagaagtggggagaatccacctgcctgttcctgcagggactttttgcaactaacttgatcaggagatttgaaaggaagactggtgctaactgaacagggaggtgcctcggggaatcctgggactggaaaatcccttgctataccctctagtataactcccagcccttggaaattagtgccatttcaagagaatcaagtcactggcctgtgactgcgatgctgggctacttaggaaaaccatctcaattggtgttactaagtttgaagaaagctcttctaaggagaggaatctagaaacaagagttgagagagccctcttgaatttccctcctacccatcatctcccctcctccccttactgagcattttggctgaacttactgttcctttgtttttccctctttgctgagaaaactttaagaaccttctactcggcttagatttaaccacaacctttactgaatctggcttatgaaaaccagacttctctaagagacgggtcttctggcagcaattagtctgacttttctttaacaaaattctttgtaatgccattcaraaaacaggtcggttggtaggagtttgtggcacagagtgcgtatgtgtgtgggtgagtacaggagggagtagttggggtgggaggatgatgttacagagggccaatttgtatgatttggtggaaaaaaagttcccatgttaacacattaactttgggagctgtgaaatatttaattagtgcacgggttg

SEQ ID NO: 35029 - DNA, 572 bp, Homo sapiens
aagaatccaataatggtgaatgtgaacctcagaagagagcacggtaggagagcctgacacaggagtgaaaaagccgaaggaagctcagctctgcaggatactgaatcagcaagagcagggccaaggatgaaggtttacaattctcagtagccttcttctttcatgccactggtgtttaagttcagaatcaaggaacattctagcgtatacattatcgggaataagtcaagtaagttgttaaaccaaaatgaaagcttaattagatagcaattcagtaatcaggacgcatatttcatcgttactatagccaacagtttgcaaacataggacatcacacagcacgggacagtgaactccgaaagaggggaaactaatgatrtgagccccgcgattgccccagcttactgagtacagagttattctgccacagggcaggcagaggagtccagggggagcctggccatctccttgaatggagcagacagatttgagagtttgaggaggtcaagactgctgaggttcctagggtggagttactgtgaaggagatagtccagagagagaactccagac

SEQ ID NO: 35030 - DNA, 1242 bp, Homo sapiens
ctggggaacccaagtagctaacctggaagttcgttccttatctatgataaacatctgagccccttgcatgttccatggaacacaggctgtacatcaaggccctgagttttgggttaaatgaaggttgccaggtggaggttgtcacggggagggtgttaagtggaaatgctatggaaactgcatgctgtttgcaggtggctgcagttttcctgcccaacccactgccactgggctatgtggttatgttgtccakcctgccaccgctggactctctcccctgtatgtaattccctaataaaaccctgtgtctcatttgctggctcttggtctcttctttggcctcttgaacctggtaccttccctattgagattaataggagtttggcacaacaccttatccccaagaatattgtgatagtgagaatcagcaaattctacctaccttaactgatccctacctcagacagaaccattctttactgaatccaacagcagtctcagcacaaggcatctggaacactggataattctcttaccaaatgctgtttccagtatataatgaagaccacgacccaccagtgggtatttacactatggaagagctatttgccttcacggatatgagcagactaggaaaagaaaaatgatttccccttttaacttatttaacaagaatgttaactgacaaagcagaatagcaaaattgtctctgctgcataatcccacatttgcaataaacatgacctggaagaaatttaccaaaatatgaacagggctcatagttatctttggatagagagattatggtgatttttatgttttcctttatacttttctattttctgaatgttctgcctagtacagatattacttttaataagaaaaaaacacactattctttaaaaattgtgtgtgtgtgtgtgtgtgtgtgtgtgtgcaggaggtgggttaaaaaaatttaaggtgctcaagcttggggaatgactatcagaggcatttgtaaatctgctggcacttagacaaggaggagcaggtttgcccgacagtttgaaaactcagcaggtccattagtgctttcataagcaggtggagattttgcaagcctggtgtggagcttgccagcgtcagcaaagttggtatcagccaggtgaccaataaagatgaggttccagtttaacttttgtctgtccacttggtgcctgacacatacgaacgcatctgaacactcttgatgtcagactg

SEQ ID NO: 35031 - DNA, 1242 bp, Homo sapiens
ctggggaacccaagtagctaacctggaagttcgttccttatctatgataaacatctgagccccttgcatgttccatggaacacaggctgtacatcaaggccctgagttttgggttaaatgaaggttgccaggtggaggttgtcacggggagggtgttaagtggaaatgctatggaaactgcatgctgtttgcaggtggctgcagttttcctgcccaacccactgccactgggctatgtggttatgttgtccatcctgccaccgctggactctctcccctgtatgtaattccctaataaaacccygtgtctcatttgctggctcttggtctcttctttggcctcttgaacctggtaccttccctattgagattaataggagtttggcacaacaccttatccccaagaatattgtgatagtgagaatcagcaaattctacctaccttaactgatccctacctcagacagaaccattctttactgaatccaacagcagtctcagcacaaggcatctggaacactggataattctcttaccaaatgctgtttccagtatataatgaagaccacgacccaccagtgggtatttacactatggaagagctatttgccttcacggatatgagcagactaggaaaagaaaaatgatttccccttttaacttatttaacaagaatgttaactgacaaagcagaatagcaaaattgtctctgctgcataatcccacatttgcaataaacatgacctggaagaaatttaccaaaatatgaacagggctcatagttatctttggatagagagattatggtgatttttatgttttcctttatacttttctattttctgaatgttctgcctagtacagatattacttttaataagaaaaaaacacactattctttaaaaattgtgtgtgtgtgtgtgtgtgtgtgtgtgtgcaggaggtgggttaaaaaaatttaaggtgctcaagcttggggaatgactatcagaggcatttgtaaatctgctggcacttagacaaggaggagcaggtttgcccgacagtttgaaaactcagcaggtccattagtgctttcataagcaggtggagattttgcaagcctggtgtggagcttgccagcgtcagcaaagttggtatcagccaggtgaccaataaagatgaggttccagtttaacttttgtctgtccacttggtgcctgacacatacgaacgcatctgaacactcttgatgtcagactg

SEQ ID NO: 35032 - DNA, 1242 bp, Homo sapiens
ctggggaacccaagtagctaacctggaagttcgttccttatctatgataaacatctgagccccttgcatgttccatggaacacaggctgtacatcaaggccctgagttttgggttaaatgaaggttgccaggtggaggttgtcacggggagggtgttaagtggaaatgctatggaaactgcatgctgtttgcaggtggctgcagttttcctgcccaacccactgccactgggctatgtggttatgttgtccatcctgccaccgctggactctctcccctgtatgtaattccctaataaaaccctgtgtctcatttgctggctcttggtctcttctttggcstcttgaacctggtaccttccctattgagattaataggagtttggcacaacaccttatccccaagaatattgtgatagtgagaatcagcaaattctacctaccttaactgatccctacctcagacagaaccattctttactgaatccaacagcagtctcagcacaaggcatctggaacactggataattctcttaccaaatgctgtttccagtatataatgaagaccacgacccaccagtgggtatttacactatggaagagctatttgccttcacggatatgagcagactaggaaaagaaaaatgatttccccttttaacttatttaacaagaatgttaactgacaaagcagaatagcaaaattgtctctgctgcataatcccacatttgcaataaacatgacctggaagaaatttaccaaaatatgaacagggctcatagttatctttggatagagagattatggtgatttttatgttttcctttatacttttctattttctgaatgttctgcctagtacagatattacttttaataagaaaaaaacacactattctttaaaaattgtgtgtgtgtgtgtgtgtgtgtgtgtgtgcaggaggtgggttaaaaaaatttaaggtgctcaagcttggggaatgactatcagaggcatttgtaaatctgctggcacttagacaaggaggagcaggtttgcccgacagtttgaaaactcagcaggtccattagtgctttcataagcaggtggagattttgcaagcctggtgtggagcttgccagcgtcagcaaagttggtatcagccaggtgaccaataaagatgaggttccagtttaacttttgtctgtccacttggtgcctgacacatacgaacgcatctgaacactcttgatgtcagactg

SEQ ID NO: 35033 - DNA, 1242 bp, Homo sapiens
ctggggaacccaagtagctaacctggaagttcgttccttatctatgataaacatctgagccccttgcatgttccatggaacacaggctgtacatcaaggccctgagttttgggttaaatgaaggttgccaggtggaggttgtcacggggagggtgttaagtggaaatgctatggaaactgcatgctgtttgcaggtggctgcagttttcctgcccaacccactgccactgggctatgtggttatgttgtccatcctgccaccgctggactctctcccctgtatgtaattccctaataaaaccctgtgtctcatttgctggctcttggtctcttctttggcctcttgaacctggtaccttccctattgagattaataggagtttggcacaacaccttatccccaagaatattgtgatagtgagaatcagcaaattctacctaccttaactgatccctacctcagacagaaccattctttactgaatccaacagcagtctcagcacaaggcatctggaacactggataattctcttaccaaatgctgtttccagtatataatgaagaccacgacccaccagtgggwatttacactatggaagagctatttgccttcacggatatgagcagactaggaaaagaaaaatgatttccccttttaacttatttaacaagaatgttaactgacaaagcagaatagcaaaattgtctctgctgcataatcccacatttgcaataaacatgacctggaagaaatttaccaaaatatgaacagggctcatagttatctttggatagagagattatggtgatttttatgttttcctttatacttttctattttctgaatgttctgcctagtacagatattacttttaataagaaaaaaacacactattctttaaaaattgtgtgtgtgtgtgtgtgtgtgtgtgtgtgcaggaggtgggttaaaaaaatttaaggtgctcaagcttggggaatgactatcagaggcatttgtaaatctgctggcacttagacaaggaggagcaggtttgcccgacagtttgaaaactcagcaggtccattagtgctttcataagcaggtggagattttgcaagcctggtgtggagcttgccagcgtcagcaaagttggtatcagccaggtgaccaataaagatgaggttccagtttaacttttgtctgtccacttggtgcctgacacatacgaacgcatctgaacactcttgatgtcagactg

SEQ ID NO: 35034 - DNA, 1242 bp, Homo sapiens
ctggggaacccaagtagctaacctggaagttcgttccttatctatgataaacatctgagccccttgcatgttccatggaacacaggctgtacatcaaggccctgagttttgggttaaatgaaggttgccaggtggaggttgtcacggggagggtgttaagtggaaatgctatggaaactgcatgctgtttgcaggtggctgcagttttcctgcccaacccactgccactgggctatgtggttatgttgtccatcctgccaccgctggactctctcccctgtatgtaattccctaataaaaccctgtgtctcatttgctggctcttggtctcttctttggcctcttgaacctggtaccttccctattgagattaataggagtttggcacaacaccttatccccaagaatattgtgatagtgagaatcagcaaattctacctaccttaactgatccctacctcagacagaaccattctttactgaatccaacagcagtctcagcacaaggcatctggaacactggataattctcttaccaaatgctgtttccagtatataatgaagaccacgacccaccagtgggtatttacactatggaagagctatttgccttcayggatatgagcagactaggaaaagaaaaatgatttccccttttaacttatttaacaagaatgttaactgacaaagcagaatagcaaaattgtctctgctgcataatcccacatttgcaataaacatgacctggaagaaatttaccaaaatatgaacagggctcatagttatctttggatagagagattatggtgatttttatgttttcctttatacttttctattttctgaatgttctgcctagtacagatattacttttaataagaaaaaaacacactattctttaaaaattgtgtgtgtgtgtgtgtgtgtgtgtgtgtgcaggaggtgggttaaaaaaatttaaggtgctcaagcttggggaatgactatcagaggcatttgtaaatctgctggcacttagacaaggaggagcaggtttgcccgacagtttgaaaactcagcaggtccattagtgctttcataagcaggtggagattttgcaagcctggtgtggagcttgccagcgtcagcaaagttggtatcagccaggtgaccaataaagatgaggttccagtttaacttttgtctgtccacttggtgcctgacacatacgaacgcatctgaacactcttgatgtcagactg

SEQ ID NO: 35035 - DNA, 518 bp, Homo sapiens
cctggaatcccagcactttgggaggccaaggcaggagaatcacttaaggccaggagtttgagggccagcctgggcaccatagtaagaccccatctctacaaaaaacttgaaggctagccaggtrtggtggctcaagcctgtagtctcagctactggggaggctgaggcagaaggatcactggagccccgattgagccatagcactccagcctggacaacagagcgagactgtcaccaaaagaaaaaaaaaaattaaaatgtaagacaggcaaggcaaggaaaggatggatggaagagatggaaactctagttagagggtgcattccaccttcttagggtggctctggggagccagtatgaaccagttccaggacaataccagataggatcaataccacatgttatttaaattctgaagttctatgacattgtatatgtgaaatccgtttcagccctaaaatgccacaattctatggttgcaacactgggtgattctttaaattgccaggatacacccc

SEQ ID NO: 35036 - DNA, 518 bp, Homo sapiens
cctggaatcccagcactttgggaggccaaggcaggagaatcacttaaggccaggagtttgagggccagcctgggcaccatagtaagaccccatctctacaaaaaacttgaaggctagccaggtatggtggctcaagcctgtagtctcagctactggggaggctgaggcagaaggatcactggagccccgattgagccatagcactccagcctggacaacagagcgagactgtcaccaaaagaaaaaaaaaaattaaartgtaagacaggcaaggcaaggaaaggatggatggaagagatggaaactctagttagagggtgcattccaccttcttagggtggctctggggagccagtatgaaccagttccaggacaataccagataggatcaataccacatgttatttaaattctgaagttctatgacattgtatatgtgaaatccgtttcagccctaaaatgccacaattctatggttgcaacactgggtgattctttaaattgccaggatacacccc

SEQ ID NO: 35037 - DNA, 526 bp, Homo sapiens
gagagtactatcagaaactttcttcctttgatatttccttatgctttgtgtgtcagaaaactacttatgaaagaaattacttgtatatgtgtgtgtatacaataatgtatattatacttacagttggaaaaataaagcaaaaaaagagcaggaataaaacaactaaaatagttaaaaatatctgaaaatgcttgtctatattgtccacaatccttatagaaatatgtcccttgctgatgccacatgtgaagcataatttttcttcacttctccataatatgagaaccttacattgttaaaaatgaccacaagccatatgacatctgagaaaatagcctctaatatgaggtcctattagtaagaatttacttttaagagctaaaactaaagaacagagtcttcaattgcatgsttgcgtcactttgaaagtggtccacagactctcagaaatgaaagaacaagatttatttccaaggaccctttaatacaattccctacttatgagcatctatacccttgataagtc

SEQ ID NO: 35038 - DNA, 638 bp, Homo sapiens
tgactacagggctttgttgtggactccaggcctctaatccctttcagtctttttatttctctgccctcaaagcccagcagcctggaggggagaaggcagtgcccttgactgcagcctgatgtttcctcctggcttctggtggcctayggtctcctttactgtaggtttctggagcaaaaatccagcagtcaggttaccaggatcagtgacaactatgcaataattaggggcaggcaccaggaggcagagaaacagagctgggtggcagaaactctatgataccccaaaggaaacatcaactcttctcagaggtggtcaagaacatgccagaagctttgcctgcctggttggcagcagaaatggcactagccagtgatcactcgtaaccttgctgccttctttacagatggctgctgtcaggctgtttaatttggaggaaattccaatgtcatcagcagagacatggcattggggagggctgccaagcacaaagacagaacttggcttccccagctgatacccatggatacagaaacaggctagtcttaacaatcttttagacctgaccttagtagcaaactggataactgccagtcataaaagtgtttctaaagtggcctgattttctcccctcctgt

SEQ ID NO: 35039 - DNA, 638 bp, Homo sapiens
tgactacagggctttgttgtggactccaggcctctaatccctttcagtctttttatttctctgccctcaaagcccagcagcctggaggggagaaggcagtgcccttgactgcagcctgatgtttcctcctggcttctggtggcctacggtctcctttactgtaggtttctggagcaaaaatccagcagtcaggttaccaggatcagtgacaactatgcaataattaggggcaggcaccaggaggcagagaaacagagctgggtggcagaaactctmtgataccccaaaggaaacatcaactcttctcagaggtggtcaagaacatgccagaagctttgcctgcctggttggcagcagaaatggcactagccagtgatcactcgtaaccttgctgccttctttacagatggctgctgtcaggctgtttaatttggaggaaattccaatgtcatcagcagagacatggcattggggagggctgccaagcacaaagacagaacttggcttccccagctgatacccatggatacagaaacaggctagtcttaacaatcttttagacctgaccttagtagcaaactggataactgccagtcataaaagtgtttctaaagtggcctgattttctcccctcctgt

SEQ ID NO: 35040 - DNA, 682 bp, Homo sapiens
caacccgtgcactaattaaatatttcacagctcccaaagttaatgtgttaacatgggaactttttttccaccaaatcatacaaattggccctctgtaacatcatcctcccaccccaactactccctcctgtactcacccacacacatacgcactctgtgccacaaactcctaccaaccgacctgttttytgaatggcattacaaagaattttgttaaagaaaagtcagactaattgctgccagaagacccgtctcttagagaagtctggttttcataagccagattcagtaaaggttgtggttaaatctaagccgagtagaaggttcttaaagttttctcagcaaagagggaaaaacaaaggaacagtaagttcagccaaaatgctcagtaaggggaggaggggagatgatgggtaggagggaaattcaagagggctctctcaactcttgtttctagattcctctccttagaagagctttcttcaaacttagtaacaccaattgagatggttttcctaagtagcccagcatcgcagtcacaggccagtgacttgattctcttgaaatggcactaatttccaagggctgggagttatactagagggtatagcaagggattttccagtcccaggattccccgaggcacctccctgttcagttagcaccagccttcctttcaaat

SEQ ID NO: 35041 - DNA, 682 bp, Homo sapiens
caacccgtgcactaattaaatatttcacagctcccaaagttaatgtgttaacatgggaactttttttccaccaaatcatacaaattggccctctgtaacatcatcctcccaccccaactactccctcctgtactcacccacacacatacgcactctgtgccacaaactcctaccaaccgacctgttttttgaatggcattacaaagaattttgttaaagaaaagtcagactaattgctgccagaagacccgtctcttagagaagtctggttttcataagccagattcagtaaaggttgtggttaaatctaagccgastagaaggttcttaaagttttctcagcaaagagggaaaaacaaaggaacagtaagttcagccaaaatgctcagtaaggggaggaggggagatgatgggtaggagggaaattcaagagggctctctcaactcttgtttctagattcctctccttagaagagctttcttcaaacttagtaacaccaattgagatggttttcctaagtagcccagcatcgcagtcacaggccagtgacttgattctcttgaaatggcactaatttccaagggctgggagttatactagagggtatagcaagggattttccagtcccaggattccccgaggcacctccctgttcagttagcaccagccttcctttcaaat

SEQ ID NO: 35042 - DNA, 1899 bp, Homo sapiens
gaatttttaattatatattgtatccactctcaatcccatttactaaataccagtgacttacccaaattcacacaataagcactggcaaaattaatagtgatattagttcactaaaattccccctgttcctttgcctaatcaagtacactccttgaatcagctgtacttccagctgtgagactgatttatcatcttaagttttcctgtagggcaagaagcgacatttcatatttatctacaagattacttttcaaaatgtgctgttggtgtcatttgtacatatatactgttttgcgaatcactttattttcacagtatggtccaaggtatagggaacagctggcctagagctgctttcgtagttttggaaggctgtcaccagcaaaagtttcaaaggagtggggaaacatatatctggcaaaatcatattttcttaattaccttctcagaataagagaatgtagaaagctgcccaggagaagaaaaaaggagggcttaaagatgctttttagactagctgtgcattcattgttgactggctttgaaactcttggcaagaattaccactggagagacactgaatgtgctggctgtaatatcataattctgctcttccctctcaattttgaatgtgtctctttgtcaacatctctatgttaacaacagtgtgaacttattggtattatctgttcacattcctctggtattctggttattgcctaaagataattggtttctttaccttttctttgtcaaaactaagcatttatttgagtctctcctgtgataaagatttcttactaagtcctgggaagagtttctacttctcttcactttattcaagaagataacagacatgttctttccctcaggggactcacagcctggttggtaaagcagaatttatttttgtgtgttacacactcacacatgtaattgacaaacctaagatggaccaaggagagataataagtactcaccaggttgaatttgaagcaagcagcattttgaattggggaggtttatgtatttggagacaaaacatcaataagtcaagttgtatttcagtatttgtgcaagctgaatatatgcagagaacctaaataattcactcatatactacatgaggaactctatcccaaaagcggttcagaaaaaaaaattttaattgtcttttctgccacatctatttaaattgttaatccaataagaattcttaattcaatagattctgaaattgtgatttaatggaaagtactcatttaataacctagatgctatacagttcctcactagactaacatgtttccttcaccaatatgatcatagaatgagaatrcataagttacacacctctgctaaaagaaaatcattgcctttctaatattaggttttggtagaactcaatttctctaatgtgaaaatgtcaaagtttggtgtctattcttgttattactattagcaagaggcctatgcttttttttctcgaacttgaagcagaaaaattacctctgtgatttgtaaaatcaggcatttcaccatttctgtatttgcaaaggtaattcaagtctaggtagagtagacttagattttgggttttttaaagtgtgttcttaaaataatgtagttaatgttcccattattcatttctatcacagggcatacagtctgggcattcctaataatttttctgtctttcttgataaatgagttagttttagctatacactattttatcacttctctgtatggatttttctgacgcctgcttggtgttacatttagtagagctgtctacagtgtgtgcttttattgcacaccatgaaggtgtgtataggaaatgactgatcttcattcagactctcattagtcagtgaggtgatgaatgaggcacaaccc

SEQ ID NO: 35043 - DNA, 515 bp, Homo sapiens
acagtggcacgatcttggttcactgcaacctccgcctcccaggttcaaatgattctcctgcctcagcctccctagtagctgggatcacaggcgcccaccaccacatctggctaatttttgtatttttagtagagatggggtttcaccatgttggccaggctgatctcraactcctgcctcaggtgatccacccgcctcagcctcccaaagtgctgggactacaggcatgagctactgcccccagcctgctttttttttgtttgtttttttcttacacttaacattatatcttagaggtctttccaaattgttatattgatttattttttttaaaaaagctatgtggcgttcaactgtatgaatgtatattatttgctcacctacatagaaaccttatagacatggcatagcatgttaactttttacaaaggtgtatcaatttttattgtacacaatgttttctacaggatactgtatgtggatgcatttttaaatttctacttacatacacattt

SEQ ID NO: 35044 - DNA, 515 bp, Homo sapiens
acagtggcacgatcttggttcactgcaacctccgcctcccaggttcaaatgattctcctgcctcagcctccctagtagctgggatcacaggcgcccaccaccacatctggctaatttttgtatttttagtagagatggggtttcaccatgttggccaggctgatctcaaactcctgcctcaggtgatccacccgyctcagcctcccaaagtgctgggactacaggcatgagctactgcccccagcctgctttttttttgtttgtttttttcttacacttaacattatatcttagaggtctttccaaattgttatattgatttattttttttaaaaaagctatgtggcgttcaactgtatgaatgtatattatttgctcacctacatagaaaccttatagacatggcatagcatgttaactttttacaaaggtgtatcaatttttattgtacacaatgttttctacaggatactgtatgtggatgcatttttaaatttctacttacatacacattt

SEQ ID NO: 35045 - DNA, 515 bp, Homo sapiens
acagtggcacgatcttggttcactgcaacctccgcctcccaggttcaaatgattctcctgcctcagcctccctagtagctgggatcacaggcgcccaccaccacatctggctaatttttgtatttttagtagagatggggtttcaccatgttggccaggctgatctcaaactcctgcctcaggtgatccacccgcctcagcctcccaaagtgctgggactacaggcatgagctactgcmcccagcctgctttttttttgtttgtttttttcttacacttaacattatatcttagaggtctttccaaattgttatattgatttattttttttaaaaaagctatgtggcgttcaactgtatgaatgtatattatttgctcacctacatagaaaccttatagacatggcatagcatgttaactttttacaaaggtgtatcaatttttattgtacacaatgttttctacaggatactgtatgtggatgcatttttaaatttctacttacatacacattt

SEQ ID NO: 35046 - DNA, 512 bp, Homo sapiens
gaaactctatctctactaaaaatacaaaatttagctgggcatggtggcacgcgcctgtactctcagctactcgggaggctgaggcaggagaattgcttgaaccagggagtcggaggttgcagtgagcccagattgcaccactacactccagcttggcgacagagcgagactgcgtctcaaaaaaaaaaaaaaaaaaaaaaaaagaactggatggtagagccaactgatgtggctaactagtgttagtttttgcagccatataaggcaattattcagagcttcacagtggcaggccttccggcaatctggcaagatttctccttggatggccagaataccattgcccctgacctgtgcatasctcctatcagaaaccaaggacgcttgcaaattccccctccccacgcatcaccccagtttgatgttctctataaacatgtgatgaaagtgtatcctttgagctctgtagtaaattgtggtttttaagatttttgtgtccaggtacccaattc

SEQ ID NO: 35047 - DNA, 562 bp, Homo sapiens
acctctagctgtgtgatcttcagccaaagctcagcctgtctggatttgggcctggtatcagagcttgagcagatgagctctgagcacctttctgccccagagctgtggcagctggccaagctcctgggaaaggccatccagctccctgccacacaccagggaggaatcatttcacttgtccacccttctcttttgttacaggtaaggtcttctggggtcagctggactcataaggcaggagggacctcatctttcagagaaggaatgcctagattatcaacagaactgtgccccaagacccagagagacctccctgccccagtgcctattagaatgacaaaaggggtggacccaagcccagatgacsagggctctgcctggaagtgccaggccaggaccctgggtctgtagagcctctgccattgcaaaggatgagccagatggaaaaattcagcatggagctgtatccctgagccaagagggcacccccttccccgttgggggagcgatggcttgggaacaagccccccgccccgtgctccagtgcatctagctgcctttg

SEQ ID NO: 35048 - DNA, 1479 bp, Homo sapiens
caggaaacttacaaacatggcagaaagggaagcaaacacgtccttcttcacatggcggcaggaaagagaatgagagtgagggaagggggaagccccttataaaaccatcacatcttgtgagaactcactatcacaagaacagcatgggggaaactgcccccatgatccaattatctccacctggtcccgcccttgacatgtggggattattacaattcaagatgagattttgagtgagtcacagccaaatcactcccctcacctcctcttgtccttctccttccctcasttcttgaggccagcagcaattcagtggctcagtcactaccaggatctggccaaaggggcttcctgtctagatcctggcccacctcctggctcatggccctggatgagccccatgcttaccctggggtgctggcccttgcttctgagagtcctcagatgggctgatggctatgctgggctagaggcctgtaggtgaagagcctcagagccctgcccattggttactgggtcattagtaatgggggtagggagggatctgtagatgttggtatttgttttaatgctttctagagcacagcccatcccaagcatataattttcattatatgatatcaacatttagcttcagcaatggaaatgtcaacattaattattttcaaggagtcttgatggctctgggaataaatcaatataaataatgtttccataaactctgaatcacgctcctaatagtgttatagctataattttaatattcaaaacaatttttctttgcatcttagcaattaattgctgctaagtgctcattttttgggatccttattgctgtcagctcagagccagaggctggggtccctggccctgaaaccattcctagctctccttgcccaaagagtcaggcttggtagaacatctcttccccccaaaaacatgctttttgctctcagcccatttagagtttactcaccctttggcctactcactccaagatccctgttctggctgccacacctggcagcgtggcactcaccagcttcatccaggactcctcgggtagacagtggggcaggtggggcagtccagggagttgggcttacccactcaccagctgtgtgactctggacaactgacaagtggcagagcctagggtcatctaccaggcagagttcttatttgcaggttacagagaatgactcaggtggatatgaggagaaacagaatttattaaaggatagcacatagcaaaggcaattgaccaggaatagcatctgaaattccactgagaagctggttccagaggatgccactggcaccccggaaaggtcctggtccctgtggtttgcacagcagatagggccagatgttggggagctgctggtttctgttcttacaaagctgcctttgaaaaccagacatggtcatggccacctccatcaccagaatggggggttttcccttccccagcatgct

SEQ ID NO: 35049 - DNA, 1479 bp, Homo sapiens
caggaaacttacaaacatggcagaaagggaagcaaacacgtccttcttcacatggcggcaggaaagagaatgagagtgagggaagggggaagccccttataaaaccatcacatcttgtgagaactcactatcacaagaacagcatgggggaaactgcccccatgatccaattatctccacctggtcccgcccttgacatgtggggattattacaattcaagatgagattttgagtgagtcacagccaaatcactcccctcacctcctcttgtccttctccttccctcagttcttgaggccagcagcaattcagtggctcagtcactaccaggatctggccaaaggggcttcctgtctagaycctggcccacctcctggctcatggccctggatgagccccatgcttaccctggggtgctggcccttgcttctgagagtcctcagatgggctgatggctatgctgggctagaggcctgtaggtgaagagcctcagagccctgcccattggttactgggtcattagtaatgggggtagggagggatctgtagatgttggtatttgttttaatgctttctagagcacagcccatcccaagcatataattttcattatatgatatcaacatttagcttcagcaatggaaatgtcaacattaattattttcaaggagtcttgatggctctgggaataaatcaatataaataatgtttccataaactctgaatcacgctcctaatagtgttatagctataattttaatattcaaaacaatttttctttgcatcttagcaattaattgctgctaagtgctcattttttgggatccttattgctgtcagctcagagccagaggctggggtccctggccctgaaaccattcctagctctccttgcccaaagagtcaggcttggtagaacatctcttccccccaaaaacatgctttttgctctcagcccatttagagtttactcaccctttggcctactcactccaagatccctgttctggctgccacacctggcagcgtggcactcaccagcttcatccaggactcctcgggtagacagtggggcaggtggggcagtccagggagttgggcttacccactcaccagctgtgtgactctggacaactgacaagtggcagagcctagggtcatctaccaggcagagttcttatttgcaggttacagagaatgactcaggtggatatgaggagaaacagaatttattaaaggatagcacatagcaaaggcaattgaccaggaatagcatctgaaattccactgagaagctggttccagaggatgccactggcaccccggaaaggtcctggtccctgtggtttgcacagcagatagggccagatgttggggagctgctggtttctgttcttacaaagctgcctttgaaaaccagacatggtcatggccacctccatcaccagaatggggggttttcccttccccagcatgct

SEQ ID NO: 35050 - DNA, 1479 bp, Homo sapiens
caggaaacttacaaacatggcagaaagggaagcaaacacgtccttcttcacatggcggcaggaaagagaatgagagtgagggaagggggaagccccttataaaaccatcacatcttgtgagaactcactatcacaagaacagcatgggggaaactgcccccatgatccaattatctccacctggtcccgcccttgacatgtggggattattacaattcaagatgagattttgagtgagtcacagccaaatcactcccctcacctcctcttgtccttctccttccctcagttcttgaggccagcagcaattcagtggctcagtcactaccaggatctggccaaaggggcttcctgtctagatcctggcccacctcctggctcatggccctggatgagccccatgcttaccctggggtgctggcccttgcttctgagagtcctcagatgggctgatggctatgctgggctagaggcctgtaggtgaagagcctcagagccctgcccattggttactgggtcattagtaatgggggtagggagggatctgtagatgttrgtatttgttttaatgctttctagagcacagcccatcccaagcatataattttcattatatgatatcaacatttagcttcagcaatggaaatgtcaacattaattattttcaaggagtcttgatggctctgggaataaatcaatataaataatgtttccataaactctgaatcacgctcctaatagtgttatagctataattttaatattcaaaacaatttttctttgcatcttagcaattaattgctgctaagtgctcattttttgggatccttattgctgtcagctcagagccagaggctggggtccctggccctgaaaccattcctagctctccttgcccaaagagtcaggcttggtagaacatctcttccccccaaaaacatgctttttgctctcagcccatttagagtttactcaccctttggcctactcactccaagatccctgttctggctgccacacctggcagcgtggcactcaccagcttcatccaggactcctcgggtagacagtggggcaggtggggcagtccagggagttgggcttacccactcaccagctgtgtgactctggacaactgacaagtggcagagcctagggtcatctaccaggcagagttcttatttgcaggttacagagaatgactcaggtggatatgaggagaaacagaatttattaaaggatagcacatagcaaaggcaattgaccaggaatagcatctgaaattccactgagaagctggttccagaggatgccactggcaccccggaaaggtcctggtccctgtggtttgcacagcagatagggccagatgttggggagctgctggtttctgttcttacaaagctgcctttgaaaaccagacatggtcatggccacctccatcaccagaatggggggttttcccttccccagcatgct

SEQ ID NO: 35051 - DNA, 1243 bp, Homo sapiens
tgttcaagggatctaggtcacatgctccttatgagactctaatgcctgatgatatgtcattgtctcctatctcttcacgatgggaccatctagttgcagaaaaacaagctcaggactcccattgattctacattatgatgacttgtgtaattatttcattatgtattacaatgtagtaataatagaaataaagtgcacaatagatgtaaaaaaaaaaaaaggaattggaaggagcagacagacctgcttagcattgttagggtttgttcatcatggcaggtcttttccaaataggccaycacgttgctgattttcattcctctgggaagttctccagagtccaaattcttgcgtcaattacttcaaaactcagttttatacctgttacttcacttatgtcaaaccactcaaggaatagtggcgttgttggggccaggaggtgttgcggagcaagagagaggaaggagaagcagtttttggggactggctgggtggggttggacacccaagagttcagaatttgggcatttggggagcaaggggaggccatcccctaagatcctggtggtggcatccacgcccctgaaaaatcacttttgaaatctgtgctctagcttaacaaagaattctcctctcaagtatcaagtgacccaaggggtactctgggttaaataaaagggaacagccagcagaaactgtcctaagaagaacctggggttcttggggcagattaggaaattaataccaaagagaggcttagggcagctgctgcccagcctagtaaccagaagtggtcttctgggtcttgaggtcttcagaccggtaagtcagcgtccggtgaacagcctcaattagagaccatagctctcaggccttctgctgaggatgcctgaggtctttgctgacacctgttcttgaaaagcatggagatcaggacagtttgagcttcaggtagatgagcagagagcagaacagggctctgagctgggtggcctcctccttcctctgaggaatcatggggagaggatgattaaaaagaaaggatgtctgtgggggtagggagtgggcttgggaatattcgggatcagtgaccctcgggtcctctaccttggcctgatgtggagttgcatttgctttccctgagtttcaggcttgtacacagggaggggtatgtgaacaagcaagccctgatgtgctgaggacacgatggcggtagcaggcctggggactcgccataaatagc

SEQ ID NO: 35052 - DNA, 1243 bp, Homo sapiens
tgttcaagggatctaggtcacatgctccttatgagactctaatgcctgatgatatgtcattgtctcctatctcttcacgatgggaccatctagttgcagaaaaacaagctcaggactcccattgattctacattatgatgacttgtgtaattatttcattatgtattacaatgtagtaataatagaaataaagtgcacaatagatgtaaaaaaaaaaaaaggaattggaaggagcagacagacctgcttagcattgttagggtttgttcatcatggcaggtcttttccaaataggccaccacgttgctgattttcattcctctgggaagttctccagagtccaaattcttgcgtcaattacttcaaaactcagttttatacctgttacttcacttatgtcaaaccactcaaggaatagtggcgttgttggggccaggaggtgttgcggagcaagagagaggaaggagaagcagtttttggggactggctgggtggggttggacacccaagagttcagaatttgggcatttggggagcaaggggaggccatcccctaagatcctggtggtggcatccacgcccctgaaaaatcacttttgaaatctgtgctctagcttaacaaagaattctcctctcaagtatcaagtgacccaaggggtactctgggttaaataaaagggaacagccagcagaaactgtcctaagaagaacctggggttcttggggcagattaggaaattaataccaaagagaggcttagggcagctgctgcccagcctagtaaccagaagtggtcttctgggtcttgaggtcttcagaccggtaagtcagcgtcyggtgaacagcctcaattagagaccatagctctcaggccttctgctgaggatgcctgaggtctttgctgacacctgttcttgaaaagcatggagatcaggacagtttgagcttcaggtagatgagcagagagcagaacagggctctgagctgggtggcctcctccttcctctgaggaatcatggggagaggatgattaaaaagaaaggatgtctgtgggggtagggagtgggcttgggaatattcgggatcagtgaccctcgggtcctctaccttggcctgatgtggagttgcatttgctttccctgagtttcaggcttgtacacagggaggggtatgtgaacaagcaagccctgatgtgctgaggacacgatggcggtagcaggcctggggactcgccataaatagc

SEQ ID NO: 35053 - DNA, 574 bp, Homo sapiens
agaacacaccctgcaactacagaacctcatggtacggaaccaccaggggatcctcgcccacggccctgggtggaattgatgttgggaagatagattagtagtgaggcgcatcaccccactgtgactcaccttcttctgcccccacgcctgtccttcagaccatctccctgctgcggcagagccactgagttcagggagcaactgtgggcagatgaaattgggctgtggtgggtgtgggaatccctgtggacttccaaaagcacttcggtttctgccctgcttggsgtggttccagaacccagggtggtggcgaggtgggagctggcagagcgcagggaagaagttccaggatcagagctcacctttctgttcttcaccctgatctgttcttccctgatcagtcctcccagactgcactggagagtgaggcctttgcctgttcggatttgctgcctcgtgtgtttcaagctgcccacacttcacaggctgcttcgaagccctccctacccaccccgtgagaaacgcccctggggagaggcagagatgggtcttttagtcttgcagcccttgtttg

SEQ ID NO: 35054 - DNA, 600 bp, Homo sapiens
cccatgagctggtgggagaggaggccaattatgccagatgaaatggacaggaagggtgggcgggccttccatagattgggaagatcctccagataattctgataaatggcaattttgaaagaggacgctagcttaaggaaggggggtagtggagggaaggtttaaatctaatgggaggtaggctgtcggggagggaggtgagggcagaaggaacttaacataaatctggggagagggatacttggctgcagggccagcctggggtragcagaaaggctggcatgtcccaaagcccagggaaaggcataaccctacaaaagggcaaggagcacattggaggtaatgggagacatggacagatgacgtgaggctggagggctaggggggagttcacaattgatggccgaggtgtttatcagtgaactaagagtggatgttgtcaactgatagggacgagagtttgagggtaatgataaactctgggaattgggggaaaagggccagcatgaattagcaaaactgactggtaggcagcagcagagggggccctgccctgctgagctgtgaactatacatttgtgatggaagaaactggtagtt

SEQ ID NO: 35055 - DNA, 1736 bp, Homo sapiens
ggatccacaggtaatgctgggttcaaggtttggctgtggggatggkttgcagaagtggagatgagcaacaagtccccttgggggttgatacaattgtttaggctgagccgtatggggcagagataaaactggtgagtctgaggccagagctctccattcattcattcattcaacaaatatttattgagcatctactatgtgctaggcattcttctaataagctcctgtggggatgtaaatgtggaagtacatcgggttgttgatagatgaagatgggaaggagatggtcatgtggcatgagagggctccaagaggaagaggaagcatcaccaagaggaattagaatggtcaggagcgggaggaaagaagccagtaaggcacagtcctggaggccttgcctgagggaagatagaaaagagaagagccttactgtaaatttcagaagacttggaagaggagccaccctcagggaaagacaggttttggataaggggaagagacgccaggaagcgagtgtctgcggcttcctcatgcaacgtggcctgccttcccaatcccctctgggctcacaggctgctacccagccaaggggaagggcagggtaaagagcaggggacatctgtcctcagatatcacaaggctctatccccaggattatggcactctcctttgtgaccagctctggattttggccctcgcccactgaatgcaagtacagagaaacaagaaggctaaagaggaacgggtggagcagatacagtgccaagagacagggttccgtgaggagccagacatggtgaacacagaggagcagaagccccaggacatttctgagggaagaggtagatgaacacagtggcagggctggaagacagtcataccccgaggaaaatgtgacccccaaagaagtcagggctactgcagggcaatcactagacacatctggttccaccaagtcttaggggatcccgttagacggcagcagtccctctgatggcttcttcctgtcgttgggccactctgaggcatgagaaagaagaggtccggggggcaatggtgggtcagtggtgcagaagagcctgggtggaggtgggcggtgatggcctgggctcgctctgtggctctcagggaggctgcctttccttccacctcgacacaccggccctctcccacattttacttttcagatggaggctccactttttagtgtcagctgctttttcaccggtcccgttccctctaccaccaaccttgtcatttgacttgagtatcctggtcttcgtcatttggcttgactattctggtcttcattccctgtcccttgaggtgtgggtgtggcaggtcccctatgcactcatgtccatcagcatgacaattgcaatcaagttctgctttttaggttccaaaggaagctggagatgacctagagcctttggcttctccgcctaacatccgcttgggcaggtgggctgctctgagtctggaatggtctttttggaatggctagaggcaggagccatttgtgggggtgtggaaagtcactggtggaaatattttcctccttttgtcctggaaagcctttgggatgccctcagggctgggtgaaagccagccagaaggtgatggggtgttgccctttcttctcccagcagggaaggggagagaaggagaacacgaagtgaggcatgggaatgagacaatggtgggaaaagaggacgctggaaggaagatctact

SEQ ID NO: 35056 - DNA, 1736 bp, Homo sapiens
ggatccacaggtaatgctgggttcaaggtttggctgtggggatgggttgcagaagtggagatgagcaacaagtccccttgggggttgatacaattgtttaggctgagccgtatggggcagagataaaactggtgagtctgaggccagagctctccattcattcattcattcaacaaatatttattgagcatctactatgtgctaggcattcttctaataagctcctgtggggatgtaaatgtggaagtacatcgggttgttgatagatgaagatgggaaggagatggtcatgtggcatgagagggctccaagaggaagaggaagcatcaccaagaggrattagaatggtcaggagcgggaggaaagaagccagtaaggcacagtcctggaggccttgcctgagggaagatagaaaagagaagagccttactgtaaatttcagaagacttggaagaggagccaccctcagggaaagacaggttttggataaggggaagagacgccaggaagcgagtgtctgcggcttcctcatgcaacgtggcctgccttcccaatcccctctgggctcacaggctgctacccagccaaggggaagggcagggtaaagagcaggggacatctgtcctcagatatcacaaggctctatccccaggattatggcactctcctttgtgaccagctctggattttggccctcgcccactgaatgcaagtacagagaaacaagaaggctaaagaggaacgggtggagcagatacagtgccaagagacagggttccgtgaggagccagacatggtgaacacagaggagcagaagccccaggacatttctgagggaagaggtagatgaacacagtggcagggctggaagacagtcataccccgaggaaaatgtgacccccaaagaagtcagggctactgcagggcaatcactagacacatctggttccaccaagtcttaggggatcccgttagacggcagcagtccctctgatggcttcttcctgtcgttgggccactctgaggcatgagaaagaagaggtccggggggcaatggtgggtcagtggtgcagaagagcctgggtggaggtgggcggtgatggcctgggctcgctctgtggctctcagggaggctgcctttccttccacctcgacacaccggccctctcccacattttacttttcagatggaggctccactttttagtgtcagctgctttttcaccggtcccgttccctctaccaccaaccttgtcatttgacttgagtatcctggtcttcgtcatttggcttgactattctggtcttcattccctgtcccttgaggtgtgggtgtggcaggtcccctatgcactcatgtccatcagcatgacaattgcaatcaagttctgctttttaggttccaaaggaagctggagatgacctagagcctttggcttctccgcctaacatccgcttgggcaggtgggctgctctgagtctggaatggtctttttggaatggctagaggcaggagccatttgtgggggtgtggaaagtcactggtggaaatattttcctccttttgtcctggaaagcctttgggatgccctcagggctgggtgaaagccagccagaaggtgatggggtgttgccctttcttctcccagcagggaaggggagagaaggagaacacgaagtgaggcatgggaatgagacaatggtgggaaaagaggacgctggaaggaagatctact

SEQ ID NO: 35057 - DNA, 1736 bp, Homo sapiens
ggatccacaggtaatgctgggttcaaggtttggctgtggggatgggttgcagaagtggagatgagcaacaagtccccttgggggttgatacaattgtttaggctgagccgtatggggcagagataaaactggtgagtctgaggccagagctctccattcattcattcattcaacaaatatttattgagcatctactatgtgctaggcattcttctaataagctcctgtggggatgtaaatgtggaagtacatcgggttgttgatagatgaagatgggaaggagatggtcatgtggcatgagagggctccaagaggaagaggaagcatcaccaagaggarttagaatggtcaggagcgggaggaaagaagccagtaaggcacagtcctggaggccttgcctgagggaagatagaaaagagaagagccttactgtaaatttcagaagacttggaagaggagccaccctcagggaaagacaggttttggataaggggaagagacgccaggaagcgagtgtctgcggcttcctcatgcaacgtggcctgccttcccaatcccctctgggctcacaggctgctacccagccaaggggaagggcagggtaaagagcaggggacatctgtcctcagatatcacaaggctctatccccaggattatggcactctcctttgtgaccagctctggattttggccctcgcccactgaatgcaagtacagagaaacaagaaggctaaagaggaacgggtggagcagatacagtgccaagagacagggttccgtgaggagccagacatggtgaacacagaggagcagaagccccaggacatttctgagggaagaggtagatgaacacagtggcagggctggaagacagtcataccccgaggaaaatgtgacccccaaagaagtcagggctactgcagggcaatcactagacacatctggttccaccaagtcttaggggatcccgttagacggcagcagtccctctgatggcttcttcctgtcgttgggccactctgaggcatgagaaagaagaggtccggggggcaatggtgggtcagtggtgcagaagagcctgggtggaggtgggcggtgatggcctgggctcgctctgtggctctcagggaggctgcctttccttccacctcgacacaccggccctctcccacattttacttttcagatggaggctccactttttagtgtcagctgctttttcaccggtcccgttccctctaccaccaaccttgtcatttgacttgagtatcctggtcttcgtcatttggcttgactattctggtcttcattccctgtcccttgaggtgtgggtgtggcaggtcccctatgcactcatgtccatcagcatgacaattgcaatcaagttctgctttttaggttccaaaggaagctggagatgacctagagcctttggcttctccgcctaacatccgcttgggcaggtgggctgctctgagtctggaatggtctttttggaatggctagaggcaggagccatttgtgggggtgtggaaagtcactggtggaaatattttcctccttttgtcctggaaagcctttgggatgccctcagggctgggtgaaagccagccagaaggtgatggggtgttgccctttcttctcccagcagggaaggggagagaaggagaacacgaagtgaggcatgggaatgagacaatggtgggaaaagaggacgctggaaggaagatctact

SEQ ID NO: 35058 - DNA, 1736 bp, Homo sapiens
ggatccacaggtaatgctgggttcaaggtttggctgtggggatgggttgcagaagtggagatgagcaacaagtccccttgggggttgatacaattgtttaggctgagccgtatggggcagagataaaactggtgagtctgaggccagagctctccattcattcattcattcaacaaatatttattgagcatctactatgtgctaggcattcttctaataagctcctgtggggatgtaaatgtggaagtacatcgggttgttgatagatgaagatgggaaggagatggtcatgtggcatgagagggctccaagaggaagaggaagcatcaccaagaggaattagaatggtcaggagcgggaggaaagaagccagtaaggcacagtcctggaggccttgcctgagggaagatagaaaagagaagagccttactgtaaatttcagaagacttggaagaggagccaccctcagggaaagacaggttttggataaggggaagagacgccaggaagcgagtgtctgcggcttcctcatgcaacgtggcctgccttcccaatcccctctgggctcacaggctgctacccagccaaggggaagggcagggtaaagagcaggggacatctgtcctcagatatcacaaggctctatccccaggattatggcactctcctttgtgaccagctctggattttggccctcgcccactgaatgcaagtacagagaaacaagaaggctaaagaggaacgggtggagcagatacagtgccaagagacagggttccgtgaggagccagacatggtgaacacagaggagcagaagccccaggacatttctgagggaagaggtagatgaacacmgtggcagggctggaagacagtcataccccgaggaaaatgtgacccccaaagaagtcagggctactgcagggcaatcactagacacatctggttccaccaagtcttaggggatcccgttagacggcagcagtccctctgatggcttcttcctgtcgttgggccactctgaggcatgagaaagaagaggtccggggggcaatggtgggtcagtggtgcagaagagcctgggtggaggtgggcggtgatggcctgggctcgctctgtggctctcagggaggctgcctttccttccacctcgacacaccggccctctcccacattttacttttcagatggaggctccactttttagtgtcagctgctttttcaccggtcccgttccctctaccaccaaccttgtcatttgacttgagtatcctggtcttcgtcatttggcttgactattctggtcttcattccctgtcccttgaggtgtgggtgtggcaggtcccctatgcactcatgtccatcagcatgacaattgcaatcaagttctgctttttaggttccaaaggaagctggagatgacctagagcctttggcttctccgcctaacatccgcttgggcaggtgggctgctctgagtctggaatggtctttttggaatggctagaggcaggagccatttgtgggggtgtggaaagtcactggtggaaatattttcctccttttgtcctggaaagcctttgggatgccctcagggctgggtgaaagccagccagaaggtgatggggtgttgccctttcttctcccagcagggaaggggagagaaggagaacacgaagtgaggcatgggaatgagacaatggtgggaaaagaggacgctggaaggaagatctact

SEQ ID NO: 35059 - DNA, 1736 bp, Homo sapiens
ggatccacaggtaatgctgggttcaaggtttggctgtggggatgggttgcagaagtggagatgagcaacaagtccccttgggggttgatacaattgtttaggctgagccgtatggggcagagataaaactggtgagtctgaggccagagctctccattcattcattcattcaacaaatatttattgagcatctactatgtgctaggcattcttctaataagctcctgtggggatgtaaatgtggaagtacatcgggttgttgatagatgaagatgggaaggagatggtcatgtggcatgagagggctccaagaggaagaggaagcatcaccaagaggaattagaatggtcaggagcgggaggaaagaagccagtaaggcacagtcctggaggccttgcctgagggaagatagaaaagagaagagccttactgtaaatttcagaagacttggaagaggagccaccctcagggaaagacaggttttggataaggggaagagacgccaggaagcgagtgtctgcggcttcctcatgcaacgtggcctgccttcccaatcccctctgggctcacaggctgctacccagccaaggggaagggcagggtaaagagcaggggacatctgtcctcagatatcacaaggctctatccccaggattatggcactctcctttgtgaccagctctggattttggccctcgcccactgaatgcaagtacagagaaacaagaaggctaaagaggaacgggtggagcagatacagtgccaagagacagggttccgtgaggagccagacatggtgaacacagaggagcagaagccccaggacatttctgagggaagaggtagatgaacacagtggcagggctggaagacagtcataccccgaggaaaatgtgacscccaaagaagtcagggctactgcagggcaatcactagacacatctggttccaccaagtcttaggggatcccgttagacggcagcagtccctctgatggcttcttcctgtcgttgggccactctgaggcatgagaaagaagaggtccggggggcaatggtgggtcagtggtgcagaagagcctgggtggaggtgggcggtgatggcctgggctcgctctgtggctctcagggaggctgcctttccttccacctcgacacaccggccctctcccacattttacttttcagatggaggctccactttttagtgtcagctgctttttcaccggtcccgttccctctaccaccaaccttgtcatttgacttgagtatcctggtcttcgtcatttggcttgactattctggtcttcattccctgtcccttgaggtgtgggtgtggcaggtcccctatgcactcatgtccatcagcatgacaattgcaatcaagttctgctttttaggttccaaaggaagctggagatgacctagagcctttggcttctccgcctaacatccgcttgggcaggtgggctgctctgagtctggaatggtctttttggaatggctagaggcaggagccatttgtgggggtgtggaaagtcactggtggaaatattttcctccttttgtcctggaaagcctttgggatgccctcagggctgggtgaaagccagccagaaggtgatggggtgttgccctttcttctcccagcagggaaggggagagaaggagaacacgaagtgaggcatgggaatgagacaatggtgggaaaagaggacgctggaaggaagatctact

SEQ ID NO: 35060 - DNA, 1736 bp, Homo sapiens
ggatccacaggtaatgctgggttcaaggtttggctgtggggatgggttgcagaagtggagatgagcaacaagtccccttgggggttgatacaattgtttaggctgagccgtatggggcagagataaaactggtgagtctgaggccagagctctccattcattcattcattcaacaaatatttattgagcatctactatgtgctaggcattcttctaataagctcctgtggggatgtaaatgtggaagtacatcgggttgttgatagatgaagatgggaaggagatggtcatgtggcatgagagggctccaagaggaagaggaagcatcaccaagaggaattagaatggtcaggagcgggaggaaagaagccagtaaggcacagtcctggaggccttgcctgagggaagatagaaaagagaagagccttactgtaaatttcagaagacttggaagaggagccaccctcagggaaagacaggttttggataaggggaagagacgccaggaagcgagtgtctgcggcttcctcatgcaacgtggcctgccttcccaatcccctctgggctcacaggctgctacccagccaaggggaagggcagggtaaagagcaggggacatctgtcctcagatatcacaaggctctatccccaggattatggcactctcctttgtgaccagctctggattttggccctcgcccactgaatgcaagtacagagaaacaagaaggctaaagaggaacgggtggagcagatacagtgccaagagacagggttccgtgaggagccagacatggtgaacacagaggagcagaagccccaggacatttctgagggaagaggtagatgaacacagtggcagggctggaagacagtcataccccgaggaaaatgtgacccccaaagaagycagggctactgcagggcaatcactagacacatctggttccaccaagtcttaggggatcccgttagacggcagcagtccctctgatggcttcttcctgtcgttgggccactctgaggcatgagaaagaagaggtccggggggcaatggtgggtcagtggtgcagaagagcctgggtggaggtgggcggtgatggcctgggctcgctctgtggctctcagggaggctgcctttccttccacctcgacacaccggccctctcccacattttacttttcagatggaggctccactttttagtgtcagctgctttttcaccggtcccgttccctctaccaccaaccttgtcatttgacttgagtatcctggtcttcgtcatttggcttgactattctggtcttcattccctgtcccttgaggtgtgggtgtggcaggtcccctatgcactcatgtccatcagcatgacaattgcaatcaagttctgctttttaggttccaaaggaagctggagatgacctagagcctttggcttctccgcctaacatccgcttgggcaggtgggctgctctgagtctggaatggtctttttggaatggctagaggcaggagccatttgtgggggtgtggaaagtcactggtggaaatattttcctccttttgtcctggaaagcctttgggatgccctcagggctgggtgaaagccagccagaaggtgatggggtgttgccctttcttctcccagcagggaaggggagagaaggagaacacgaagtgaggcatgggaatgagacaatggtgggaaaagaggacgctggaaggaagatctact

SEQ ID NO: 35061 - DNA, 1736 bp, Homo sapiens
ggatccacaggtaatgctgggttcaaggtttggctgtggggatgggttgcagaagtggagatgagcaacaagtccccttgggggttgatacaattgtttaggctgagccgtatggggcagagataaaactggtgagtctgaggccagagctctccattcattcattcattcaacaaatatttattgagcatctactatgtgctaggcattcttctaataagctcctgtggggatgtaaatgtggaagtacatcgggttgttgatagatgaagatgggaaggagatggtcatgtggcatgagagggctccaagaggaagaggaagcatcaccaagaggaattagaatggtcaggagcgggaggaaagaagccagtaaggcacagtcctggaggccttgcctgagggaagatagaaaagagaagagccttactgtaaatttcagaagacttggaagaggagccaccctcagggaaagacaggttttggataaggggaagagacgccaggaagcgagtgtctgcggcttcctcatgcaacgtggcctgccttcccaatcccctctgggctcacaggctgctacccagccaaggggaagggcagggtaaagagcaggggacatctgtcctcagatatcacaaggctctatccccaggattatggcactctcctttgtgaccagctctggattttggccctcgcccactgaatgcaagtacagagaaacaagaaggctaaagaggaacgggtggagcagatacagtgccaagagacagggttccgtgaggagccagacatggtgaacacagaggagcagaagccccaggacatttctgagggaagaggtagatgaacacagtggcagggctggaagacagtcataccccgaggaaaatgtgacccccaaagaagtcagggctactgcagggcaatcactagacacatctggttccaccaagtcttaggggatcccgttagacggcagcagtccctctgatggcttcttcctgtcgttgggccactctgaggcatgagaaagaagaggtccggggggcaatggtgggtcagtggtgcagaagagcctgggtggaggtgggcggtgatggcctgggctcgctctgtggctctcagggaggctgcctttccttccacctcgacacaccggccctctcccacattttacttttcagatggaggctccactttttagtgtcagctgcyttttcaccggtcccgttccctctaccaccaaccttgtcatttgacttgagtatcctggtcttcgtcatttggcttgactattctggtcttcattccctgtcccttgaggtgtgggtgtggcaggtcccctatgcactcatgtccatcagcatgacaattgcaatcaagttctgctttttaggttccaaaggaagctggagatgacctagagcctttggcttctccgcctaacatccgcttgggcaggtgggctgctctgagtctggaatggtctttttggaatggctagaggcaggagccatttgtgggggtgtggaaagtcactggtggaaatattttcctccttttgtcctggaaagcctttgggatgccctcagggctgggtgaaagccagccagaaggtgatggggtgttgccctttcttctcccagcagggaaggggagagaaggagaacacgaagtgaggcatgggaatgagacaatggtgggaaaagaggacgctggaaggaagatctact

SEQ ID NO: 35062 - DNA, 646 bp, Homo sapiens
ccgaagtctcactgttttatattccctggggaagtgacatttgagctgagacctaacagatgaggaggagccagtcatgcaatgaatgggggagagtttcccggggcagacagggagcaacagctggtgtgaaggcctgacgccaggaaagggggaaagctttgttggctagaggagctgactctgtttgaagaaattggtaagattttttttttttttttttttttttgagacagagtttcactcttgtgcccaagctggagtacagtggtgagatctcggctcactacaacctccacttcctgggttcaagtgattctctttcctcagcctccygagtagctgggattataggcacctgccaccatgcccagctaattttttgtatttttactagagacagggtttcaccatgtaggccaggctggtcttgaactcctgacctcaagggatccacctacctcggcctcccaaagtgctgggattacaggcatgagtcaccatgccctgccctataagattttttatattgagccacctgcaagaatatgaaaatgagtctgtggaagagaatgaggtccccagggaagggcagtctgagcactgggctgtgtgctgatgaacatgagagactaggaatgtgtgt

SEQ ID NO: 35063 - DNA, 646 bp, Homo sapiens
ccgaagtctcactgttttatattccctggggaagtgacatttgagctgagacctaacagatgaggaggagccagtcatgcaatgaatgggggagagtttcccggggcagacagggagcaacagctggtgtgaaggcctgacgccaggaaagggggaaagctttgttggctagaggagctgactctgtttgaagaaattggtaagattttttttttttttttttttttttgagacagagtttcactcttgtgcccaagctggagtacagtggtgagatctcggctcactacaacctccacttcctgggttcaagtgattctctttcctcagcctcccgagtagctgggattataggcacctgccaccatgcccagctaattttttgtatttttactagagacagggtttcaccatgtaggccaggctggtcttgaactcctgacctcaagggatccacctacctcggcctcccaaagtgctgkgattacaggcatgagtcaccatgccctgccctataagattttttatattgagccacctgcaagaatatgaaaatgagtctgtggaagagaatgaggtccccagggaagggcagtctgagcactgggctgtgtgctgatgaacatgagagactaggaatgtgtgt

SEQ ID NO: 35064 - DNA, 646 bp, Homo sapiens
ccgaagtctcactgttttatattccctggggaagtgacatttgagctgagacctaacagatgaggaggagccagtcatgcaatgaatgggggagagtttcccggggcagacagggagcaacagctggtgtgaaggcctgacgccaggaaagggggaaagctttgttggctagaggagctgactctgtttgaagaaattggtaagattttttttttttttttttttttttgagacagagtttcactcttgtgcccaagctggagtacagtggtgagatctcggctcactacaacctccacttcctgggttcaagtgattctctttcctcagcctcccgagtagctgggattataggcacctgccaccatgcccagctaattttttgtatttttactagagacagggtttcaccatgtaggccaggctggtcttgaactcctgacctcaagggatccacctacctcggcctcccaaagtgctgggattacaggcatgagtcaccatgccctrccctataagattttttatattgagccacctgcaagaatatgaaaatgagtctgtggaagagaatgaggtccccagggaagggcagtctgagcactgggctgtgtgctgatgaacatgagagactaggaatgtgtgt

SEQ ID NO: 35065 - DNA, 968 bp, Homo sapiens
ggtgagaagctctatcagtgacrgtccaagcaggaaaacggagctttcgccaggcagttcaatcagggaatataatatgcaaaaaaattccagaggtgctgggggagctgagcaggagatggggaaagaaagatccgaagattgctaatggcaggaatctgctccaccctaggttggaggaatagggacagcctgggagctgggctgcccagtgggagctgggatgcagagaaggggctacccaggggcctcccaggctggaactggaactggaattgtggagggacaaactctggaagccaataaacagccactggcagagacaccacagatcagaggagtgggaagaaatacccaggcttctcctcttctccctcctaccagcctccagccagtgactgctattggtctaacctgacaggaagccagcaggcagggagcctgggaaatgtagtttgtgggggcagcacactgtgatccattgcagagcaggggaagggggcaggcgcacaggatcctcacagatgccaccaaaaatcactctgagtttgacaagtcttcctccaggagtatctgtattatttttatttttattttttattttcatttttgagacagagtttagctctgtcaaccaggctggagtgcactggcacaatctcggctcactgcaacctccggcccctgggttcaagtgattctcctgcctcagcctcccgagtagctgggattacaggtgtgtgctaccacgcccggctagtttttgtatttttagtggagatggggtttcaccatgttggccaggctggttttgaactcctgacctcaggtgatccgcctgcctcagcctcccaaagtgctgggattacaggcatgagccaccgtgcctggcccaggagtatctgtatttctaacaagccctattcaaaaggataaatctataatgaggagattcgggtatcagggac

SEQ ID NO: 35066 - DNA, 968 bp, Homo sapiens
ggtgagaagctctatcagtgacggtccaagcaggaaaacggagctttcgccaggcagttcaatcagggaatataatatgcaaaaaaattccagaggtgctgggggagctgagcaggagatggggaaagaaagatccgaagattgctaatggcaggaatctgctccaccctaggttggaggaatagggacagcctgggagctgggctgcccagtgggagctgggatgcagagaaggggctacccaggggcctcccaggctggaactggaactggaattgtggagggacaaactctggaagccaataaacagccactggcagagacaccacagatcagaggagtgggaagaaatacccaggcttctcctcttctccctcctaccagcctccagccagtgactgctattggtctaacctgacaggaagccagcaggcagggagcctgggaaatgtagtttgtgrgggcagcacactgtgatccattgcagagcaggggaagggggcaggcgcacaggatcctcacagatgccaccaaaaatcactctgagtttgacaagtcttcctccaggagtatctgtattatttttatttttattttttattttcatttttgagacagagtttagctctgtcaaccaggctggagtgcactggcacaatctcggctcactgcaacctccggcccctgggttcaagtgattctcctgcctcagcctcccgagtagctgggattacaggtgtgtgctaccacgcccggctagtttttgtatttttagtggagatggggtttcaccatgttggccaggctggttttgaactcctgacctcaggtgatccgcctgcctcagcctcccaaagtgctgggattacaggcatgagccaccgtgcctggcccaggagtatctgtatttctaacaagccctattcaaaaggataaatctataatgaggagattcgggtatcagggac

SEQ ID NO: 35067 - DNA, 968 bp, Homo sapiens
ggtgagaagctctatcagtgacggtccaagcaggaaaacggagctttcgccaggcagttcaatcagggaatataatatgcaaaaaaattccagaggtgctgggggagctgagcaggagatggggaaagaaagatccgaagattgctaatggcaggaatctgctccaccctaggttggaggaatagggacagcctgggagctgggctgcccagtgggagctgggatgcagagaaggggctacccaggggcctcccaggctggaactggaactggaattgtggagggacaaactctggaagccaataaacagccactggcagagacaccacagatcagaggagtgggaagaaatacccaggcttctcctcttctccctcctaccagcctccagccagtgactgctattggtctaacctgacaggaagccagcaggcagggagcctgggaaatgtagtttgtgggggcagcacactgtgatccattgcagagcaggggaagggggcaggcrcacaggatcctcacagatgccaccaaaaatcactctgagtttgacaagtcttcctccaggagtatctgtattatttttatttttattttttattttcatttttgagacagagtttagctctgtcaaccaggctggagtgcactggcacaatctcggctcactgcaacctccggcccctgggttcaagtgattctcctgcctcagcctcccgagtagctgggattacaggtgtgtgctaccacgcccggctagtttttgtatttttagtggagatggggtttcaccatgttggccaggctggttttgaactcctgacctcaggtgatccgcctgcctcagcctcccaaagtgctgggattacaggcatgagccaccgtgcctggcccaggagtatctgtatttctaacaagccctattcaaaaggataaatctataatgaggagattcgggtatcagggac

SEQ ID NO: 35068 - DNA, 968 bp, Homo sapiens
ggtgagaagctctatcagtgacggtccaagcaggaaaacggagctttcgccaggcagttcaatcagggaatataatatgcaaaaaaattccagaggtgctgggggagctgagcaggagatggggaaagaaagatccgaagattgctaatggcaggaatctgctccaccctaggttggaggaatagggacagcctgggagctgggctgcccagtgggagctgggatgcagagaaggggctacccaggggcctcccaggctggaactggaactggaattgtggagggacaaactctggaagccaataaacagccactggcagagacaccacagatcagaggagtgggaagaaatacccaggcttctcctcttctccctcctaccagcctccagccagtgactgctattggtctaacctgacaggaagccagcaggcagggagcctgggaaatgtagtttgtgggggcagcacactgtgatccattgcagagcaggggaagggggcaggcgcacaggatcctcacagatgccaccaaaaatcactctgagtttgacaagtcttcctccaggagtatctgtattatttttatttttattttttattttcatttttgagacagagtttagctctgtcaaccaggctggagtgcactggcacaatctcggctcactgcaacctccggcccctgggttcaagtgattctcctgcctcagcctccygagtagctgggattacaggtgtgtgctaccacgcccggctagtttttgtatttttagtggagatggggtttcaccatgttggccaggctggttttgaactcctgacctcaggtgatccgcctgcctcagcctcccaaagtgctgggattacaggcatgagccaccgtgcctggcccaggagtatctgtatttctaacaagccctattcaaaaggataaatctataatgaggagattcgggtatcagggac

SEQ ID NO: 35069 - DNA, 646 bp, Homo sapiens
actgacagctgttcctggtctctgcctgccatgtcttcactgtgggcactttcaggtcaattccttcctcctcaaccccttccttccaagctgggacacggcctaattcccttaatttgcaaagtctggcaaagaccaggctctggggtttaaacaagctttacttagggcttagccagtgtaaagaaaagttggctggcaggtgccctgatcctgcctccacgggcacctctccaacccttctcccactgggtggctctcactttaggttggaccgataccaagcggccacttacacctttagtgaaagcgcctttggccctaaccctgtgacccatggtccagatccccaacctctgctgagctgagagacagagagagagaggccacattgcctccaaaatcatgtgcttctcatcaaatccactctctccagtccagaagaggagtttagctgcacttttacacaaaaaaatctgctaaattatttttctcagaacagaagagctgtctttccacaacacgaatcagagaagtgctgacagctttgatatagaagtttgttcccrtttctggccaatgaggttgcaaaaatattggggcttggcttggctggagccccttttcatgtagatcatggggtcaa

SEQ ID NO: 35070 - DNA, 538 bp, Homo sapiens
accagccccttgccctgtggcccagaagcgttggcatcacctggagactgggtagaaacgcagaatctttgaatcagcttcagtattttaaggatacaccccaggacattcatgggcacatgagagtttgtgctggagtcttttcttcagggtggggagtccctattctgctagtcttgcctgcaggaggaagacatatacccttcagccatcccaggtgtttgtgcagggtgakggaccaggctgggtggagccgtgtgctcacagccatgggcagcaaccccctctcctggcgctcttctgcatcaggaaaagcatgtcagagtcctccacccaggctgcctggctcagagtggggctgcagtgggcaggtgcttggctgatttcctctgggtctcctgattcctggccatgccctgagagataaaggcttggaaatcagaacctggcattcatgggcagggcctgtccacctgtttcctgagtgtaggtaggacacatgggtggctctggcccagaggcagaggcaggatactga

SEQ ID NO: 35071 - DNA, 538 bp, Homo sapiens
accagccccttgccctgtggcccagaagcgttggcatcacctggagactgggtagaaacgcagaatctttgaatcagcttcagtattttaaggatacaccccaggacattcatgggcacatgagagtttgtgctggagtcttttcttcagggtggggagtccctattctgctagtcttgcctgcaggaggaagacatatacccttcagccatcccaggtgtttgtgcagggtgagggaccaggctgggtggagccgtgtgctcacagccatgggcagcaaccccctctcctggygctcttctgcatcaggaaaagcatgtcagagtcctccacccaggctgcctggctcagagtggggctgcagtgggcaggtgcttggctgatttcctctgggtctcctgattcctggccatgccctgagagataaaggcttggaaatcagaacctggcattcatgggcagggcctgtccacctgtttcctgagtgtaggtaggacacatgggtggctctggcccagaggcagaggcaggatactga

SEQ ID NO: 35072 - DNA, 806 bp, Homo sapiens
tgtcattctgccacccacagagcctgctgaatgatagtcacaagcccgcaccgctgtcttgtcagcccagagcaaatcagactcagcccctatcccgctgctctgattcacgaaggacttcagtcagagggggtgtcctcaccgcttcgcccatgacttagcacccctgtgttcagaggtgacttagggcatcaggagaggcgagagagagggtgctggcgggagcctcaccctctggcttcctgcgagggaatctgaagcctgcaatgtggagcygtccacaccagcataaggcgatgggatggagtgggacggacagacggggagcagggtgcagaaagactcaagagaggagacttcaactgcagcaggagggacgtgagtgaggcctacagcaggagggggtcgggcgcctcatcctttggagactatagtggccacctaggtgctgcccacgtacctcccttcaggaccccagtgcccactctccagccacggggggacgtgaatggctgactgcgccaagctgagctcctcttcctcgtggttatccttggtctcttcctttgaggttgcagcattttcgggggacagccagcatccagcggctggtaaatgcaccagtgtgaaggcagatccccttgccccatgtgggacaggctgcagggcctcctcccctcctctgtcctccccggggtggctgaggcctttgctgtgaccacagggcagcccagcccctctgtctgtccagtcctgcctgcgtcactctccacaggtgttcttctcagcaaacttcctgcacataa

SEQ ID NO: 35073 - DNA, 792 bp, Homo sapiens
tgggtagctctaggaagctcccccaggagtgtcctcctggccaggcccagctccctgcccacccatagagctggggaraaggcagcaggtacaccagggggcaggaccatggcaggggcagggatgccgatagagcccaggcaggtgggctcaggaacttttaacaggcaatacagctgctgggggccccaagcatggcggggggcagtgcaggcccccatacctatgtgcagagcagagcagagcagacagagcatatttgaacttcatacaaagcctgggcctggccagcgtgtaggtctgtctatgactgcatgtataggtgtatgtgcataaatgcatgtgtgtgtgtgcatgtgtgtgcatgcatgatggtaagagaaggcccatgtgtccttatgcctcgtatgtcagcttgtgtttttgagtgcacggtgttttttttttgtttttttttttttaaattttttttttttattgatcattcttgggtgtttctcgcagagggggtttggcagggtcataggacaatagtggagggaaggtcagcagataaacaagtgaacaaaggtctctggttttcctaggcagaggaccctgtggccttccgcagtgtttgtgtccctgggtccttgagattagggagtggtgatgactcttaacgagcatgctgccttcaagcatctgtttaacaaagcacatcttgcaccgcccttaatccatttaaccctgagtggacacagcacatgtttcagagagcacagggttgggggtaaggtcccagatcaacag

SEQ ID NO: 35074 - DNA, 792 bp, Homo sapiens
tgggtagctctaggaagctcccccaggagtgtcctcctggccaggcccagctccctgcccacccatagagctggggagaaggcascaggtacaccagggggcaggaccatggcaggggcagggatgccgatagagcccaggcaggtgggctcaggaacttttaacaggcaatacagctgctgggggccccaagcatggcggggggcagtgcaggcccccatacctatgtgcagagcagagcagagcagacagagcatatttgaacttcatacaaagcctgggcctggccagcgtgtaggtctgtctatgactgcatgtataggtgtatgtgcataaatgcatgtgtgtgtgtgcatgtgtgtgcatgcatgatggtaagagaaggcccatgtgtccttatgcctcgtatgtcagcttgtgtttttgagtgcacggtgttttttttttgtttttttttttttaaattttttttttttattgatcattcttgggtgtttctcgcagagggggtttggcagggtcataggacaatagtggagggaaggtcagcagataaacaagtgaacaaaggtctctggttttcctaggcagaggaccctgtggccttccgcagtgtttgtgtccctgggtccttgagattagggagtggtgatgactcttaacgagcatgctgccttcaagcatctgtttaacaaagcacatcttgcaccgcccttaatccatttaaccctgagtggacacagcacatgtttcagagagcacagggttgggggtaaggtcccagatcaacag

SEQ ID NO: 35075 - DNA, 792 bp, Homo sapiens
tgggtagctctaggaagctcccccaggagtgtcctcctggccaggcccagctccctgcccacccatagagctggggagaaggcagcaggtacaccagggggcaggaccatggcaggggcagggatgccgatagagcccaggcaggtgggctcaggaacttttaacaggcaatacagctgctgggggccccaagcatggcggggggcagtgcaggcccccatacctatgtgcagagcagagcagagcagacagagcatatttgaacttcatacaaagcctgggcctggccagcgtgtaggtctgtctatgactgcatgtataggtgtatgtgcataaatgcatgtgtgtgtgtgcatgtgtgtgcatgcatgatggtaagagaaggcccatgtgtccttatgcctcgtatgtcagcttgtgtttttgagtgcacggtkttttttttttgtttttttttttttaaattttttttttttattgatcattcttgggtgtttctcgcagagggggtttggcagggtcataggacaatagtggagggaaggtcagcagataaacaagtgaacaaaggtctctggttttcctaggcagaggaccctgtggccttccgcagtgtttgtgtccctgggtccttgagattagggagtggtgatgactcttaacgagcatgctgccttcaagcatctgtttaacaaagcacatcttgcaccgcccttaatccatttaaccctgagtggacacagcacatgtttcagagagcacagggttgggggtaaggtcccagatcaacag

SEQ ID NO: 35076 - DNA, 1872 bp, Homo sapiens
tgtcgtggggcggagaaaaccttgggatggttggaaatgaaggatgggagggagaaccagagaaagggagaggaaggaagcagggagggccagagaacaaagagaaacctccgccaggaaaacgggaagaggatgacacaggmacagccctacactccaccaactctcagtctcctgctctctgccttgtaaggaacgcaggccccaccccctccagcctcacagtgtttggggtcacccattctagcggggtgaggcgtcgccttgtgggtgcggttggcatttccctgaggtctgtggacactgagcaccttttcctgggctcactgccatttgcattcttcttctgatgccagtgggcaaggggaggtccctaaacgccggttggaccgcgaccccagccggtgcggggctcttggcagcgcttggggaagtgaattcgaagaccagtaggaaaatagaggaaggacggagatttattgtaaaaggaaaagtacacactcaagtaaagggagtgcaggggaactcaagagagaggcaggtgcaagggggtttggtgctgccacctttcctggtttcttcaaccaaggggtggaatattcatgaaaattcctggaagaaggacagggattctcagaactctggtgcctcgaatttttacaccaaatatgggtattctcagaactgctagggagctggctagtgtgtgtttagtgtgtttatcagcatgtaatgaggtcccaggtgaaacctaggtcaaatccagggccatgttggatccactcattcttagtcagcttggtccacatgctgtttctcagcaacttatcagcccagagccactgcagatatttcaacagatttcttttgctagtcacctgaaactgctgcccaaaattttctattcttttgagaccaccgtgtagtatacctgtctcactttggagaaatgtctattcaaattccttgcatatatttaaattgggttatttccctttgtaatattgagttggaagagttctttatatattcagaataacagtccattaccagatatatgattttcaatgattttctctcgttctggaagtttttttttaatcttctaattggagttcttttggaagcacaaaagttttacatttgcatgaaatgaaattaaactaccttttattacgccatttgtgctactggctacagggaacgaggggtgggcaggaagccccctggagtccctgactccctccacagcaagtcaaccagaaaatcaattcaacattcatacatgcatgttatctcacacacacacacacatgcacacacacagagacatgcaggcacaatctctcacacacactcacaccacacaggcacacacattcacagagacacacatacacaaatgcatgcagaaatacagacacagccatgcacatacacgggcacacaaaaagacacacagaaacacatgggagaaactgcgtgtcatcttgagagttgtcatgtcgagcccatcctgcccacacacctttcaccttgggggctgtctcccagctcatgaaggagttctgaagccatcaagcaggcagtcactgtgtgatctgaaacactcagacagctcctcactctgatctatcttcctggtccccttgggatgaagcagcgtcctgttggttttcactgcagcagaagagaatcctcccccagggcagaactgctgggccaccagagtacccctctgctctttgccctcagggcatcttgatctgcagggtgggaggaactgccccagtcctcagaaatgaactctttatggattcctcttccaccatgatgtcaatgtctcttttgtcttctctagcccttggctgt

SEQ ID NO: 35077 - DNA, 392 bp, Homo sapiens
gcagccatcctcaaaagggacgcccgagtgcatcctcctctgagtcaccatgaaaccatctagatctgcgggtagaagccagagggaggtggagggcccagtggctcttggccgcaagggagggcttagcctgcagtaaggactgggcagagcccctgagtcccactttgcccccagccactcagcccrttccccaatgaatgagaaaaataggcacagacctcccactccacacagtcttcatgtggggagaccttcacctggtgaccatcaatcaccagggtcctgaggctgtgggaaaggggaggaggcctggaccaagcccagggcctgactatgcttcaggacagggacatgggatggcagccatctctgtgactgagcagggacac

SEQ ID NO: 35078 - DNA, 212 bp, Homo sapiens
caatgttaatccctttatatgaaatgaaaayagtgcctcacctgatgggttagaacacagcagatacatagtaagtgcccaggaagtgttagcaattattattatcatttatctcagaaaatctctatgacaattgtgtgaagtacaattatgattacatatgagataattgcaccacagacatgttatataacttgcaaaaagccacaaac

SEQ ID NO: 35079 - DNA, 601 bp, Homo sapiens
tcctgtctcccagtattccccatccaagtaaaccatacaatctcccaaatcatgcctgtgagaagcytgggacttttcctttttcctccaccctattcggccattgccactgctgccacaaccatttccacatcctgtcaatttactttgctttcacatccatctacttcctttgccagtcttattcttctcccttctctctaaacctcagagcaatcttacactcttccctttgccttacacacttcttttttctaagcctatcctcgtttgacacctgtcattccatttggaacatgactaactctcacttggattatcacaaccatcttcctactggtcgtcttgcttcatgtctgtctaccacctccatcctaagcccttgttgccagagtgatctatcaaaatacagatgcaaccatgacactcacctaatctagcagatccagccattccctattgattgttttaccccttagtcttgccttcaacaataagctgaatccttttcctacttccatgcttccacaccccatcctcaactcatcttgttctccagattctctccccaattgcaccaactgaacacactgtaaatctc

SEQ ID NO: 35080 - DNA, 1063 bp, Homo sapiens
gagctgagcaatcttcaggcttgtgtgcaacacagacccaccacgttcaagttctggagcatgagagggcagtgggacaactcttctacccccatgacaacgggtctagactgagggcctctggctggtttaccttgatacataacccatgtcgcagatggctgccactgttttatttctccaaatgccctgcccaccggttggctctgtggggtgaggcccatatctttctttccccctgctgcactgtcggtgtttaagaagcatgtgcttaagaagtacctgattttcaatggctaattgaatgaatcacccaagagtcccatggcagagaaatagaagacttaaaatcactgttccacctactcagagtcacttatcttaaacaagtccaaagaactttataaaaacaagtcattgcaggaaaaaaggaaaagcatgtcacctttgaaggatgtgaggaactgactccttctgaaaacgggtcggtaactaagtaagtaccattatgggtcagtaacggtaacagtaaaaggacagaacggaacatctcgctggcccttcccataggaacaagaacttggtaaccaagtagttgatgagggacacttttactttttagcatatttccagcaattaatgcaggaatgagagcattagcatactaccactttgtcacctcaaatgaaagactagcccaagacaatgaccatcagaggctgtcaaaatcaccaacaagagagcagcaggcatcctgtgcttactgaaggaggcactcacgtgctcttgccaaaactccccacgcccgtggagctcatggtctggargggaaatggtcatgtttctcctccagaccaccaaagcctctagctcaaaacctaacaatattcaagaaaaagaggacaatgggacgcatgaaaagagaccacagcacatcagcaaagcccagactgcggacgactctgcaggacagactgatttccgcaacaaatgaattgcacggcagaagtaagaaggaggacggactaagagagtaaaagagatctgaaaaagtaaatgcaag

SEQ ID NO: 35081 - DNA, 569 bp, Homo sapiens
tttttttwaaatttaaaattatccaggcataatggtgtgcacctgcagtcctagctactcaggaggctgagttgggaggtttgcttgagcccaaaagatcgagactacggtgagctatgatcgagccactgcactccagctggggcaacatcgcaagattctgtctcaaaataataataaaattaaaagcaactgttgaaaagatttaagaaactgtaaactgcgtatacagtacctagcacatggtaggtactaaatgcatgctaattcccttcctgaggctgccagttccttctcccaaacagaggtcccagaaattctctaaacctcgaatctatatggacacaaacacgtgtcccccaactttcttctttttaagaaacatccttctttaatccacatttcctcgtatctgcgctgccttcaacactcagctcctttcccacgacctccagaaaagcttcccagattgtggctgactctgtcctccaagagcatccagcacacttctgtgattgtgctgccgtctataccacaggctctgagtcacattcgtgatcttgtcttta

SEQ ID NO: 35082 - DNA, 569 bp, Homo sapiens
tttttttaaaatttaaaattatccaggcataatggtgtgcacctgcagtcctagctactcaggaggctgagttgggaggtttgcttgagcccaaaagatcgagactacggtgagctatgatcgagccactgcactccagctggggcaacatcgcaagattctgtctcaaaataataataaaattaaaagcaactgttgaaaagatttaagaaactgtaaactgcgtatacagtacctagcacatggtaggtactaaatgcatgctaattcccttcctgaggctgccagttccttctcccaaacagaggtcccagaaattctctaaacctcgaatctatatggacacaaacacrtgtcccccaactttcttctttttaagaaacatccttctttaatccacatttcctcgtatctgcgctgccttcaacactcagctcctttcccacgacctccagaaaagcttcccagattgtggctgactctgtcctccaagagcatccagcacacttctgtgattgtgctgccgtctataccacaggctctgagtcacattcgtgatcttgtcttta

SEQ ID NO: 35083 - DNA, 1261 bp, Homo sapiens
tgtcatgagaaagtaaaaccctaattagcactctgtcttccaagctccttccatctgtaccattttcatctgtgttaattacctcttacagggaccactaactgcaacagcttcccagcctcctctctcagcccagtcactgcagagcaaccagagaatccttataaaacatacgtggactctgacccttccctgccccaaactctccccattgcttctgctataaaactccccacagtgcatcttgggcctgtgcgcctggtcctgatgcctggccagcctcatctcctgccctgccacctgagctgtcttataggatcaagtactccaagctcttytccacttcaggcctttgcacgtgatgctctgtccctgaaagtacatatctcaacatacttacttatgcaaatgattattttattatctacactcttctcagttgaccaggaaggcaagaaattgttgtggcttgatcagagatgtatcaataaatagaaaacataggagatggtaagagattccacataaagagacagtgaagaaatgaaaggatgctttcttcttggaattgaacaccaataaggaaatttacctctcctgaagttaccaatgatttctctagtagaatggaaataatccattaatttctccttttgccttggttgctagggggctcagaattcaatttcaatataaatactgttcctatcaaaggcaccacacacacatacacacacacacacacgcacacacacgtacacacacacacgcacacacgcgtgcacacacacacacacacacactttccaagatcacttctgattcctctacctttttaatgaagtgcttttcaggttaactcactccattacttttgacttaagtaagaatcttaattataaatgtattagtaaataagcaaatgagatatgtaaagtttaaagcgggggttaaactacaccattcacatggtagatgctcaataaaaccactgctgagtgaataaacactaaaatctaagcacatttctagaattagataccttttctatgcagctggagatggagatcctttttacagatgcttgggcaatcattctgctttctcctcctacctctctccctccactctatagaaaggctctgcagctactgagtttggtctaagaacacatgtcatttgtaaacattctcttaaacaaaagtccaaaaattgttattcttatattattttggaatgatgacataactgggcaatggtg

SEQ ID NO: 35084 - DNA, 565 bp, Homo sapiens
tcccagtggtggtgatattttttagtgcgctaagtactgtaaacatcttgtgcgtgttatctgttttgtaccttctacactgccaggaagagcagcatctggtaggaaaacagatcccaacacaggagtttgaacatggtaaatgatcatcaaatgttcagaccaatagatgcacccagtgctttaacacattgtctgcataatcatcagtatccccattttagagatgaggaaacctgaacagagaaggtaagtaacttgtctgctactttactattattcccatyacaatttcactgaagaggaatctgagaatcagagacgttaggaagctggttcaaggccccacagctagaaagtggcagagccagtcttggaaacccagggcttcggagctcaggctcgagcactgtggggcatcccttctctctgctgttggggcaaagacgcaacccctcaagtcaacaaaacctaggtgtaaatcctggctctgtcactttccacctttgggatgactggcaagtgacaaactcttggcaattttggaaaacaaagtgatgaaaat

SEQ ID NO: 35085 - DNA, 626 bp, Homo sapiens
cagataggagcaattacgtttttaaagaaactctgtctatgtggggatattgactacattcagtaaatgactctgcaattcaaacagctacagtggatcacatgggccctgagtccagtattttcttccaatgccacctaaaaaaatccaaccaaccaaccaaacaaacaaacaaaaaaactaagcaggcataacagaagactttcaaagacaagcgaaggcagtccataccatttttcattacaatgcttgcagcaggacctccactgccatattttccagatttctgatgttcaacagcaacaatgacatgtttgtgaggactatgggccaggtttggtggtaggatatctgagtaacagaaaggcaaagggacctgcccaaggtcacagccaagttacacygtcagatgaacccaggtccatctccaaaacccatctctaacctcttgggtacataccacccttcctcagattttccagtacgtcagttgaccttacacaagtggaatcttgctgcaagatagttaaggatggggacaggaaaggttcacctctctggtcaagcctttatggggataaacagtgttggggatggaggaatcctaaaggaagacagtgtttccc

SEQ ID NO: 35086 - DNA, 594 bp, Homo sapiens
cgggaaaagaggagagataccggtatttatcttggcctaagtgtaatctcctgagtctgtctcatcattatggagaatcgtattatgtttgtgcaagaaagggagttagagcacagagttgatctccaggttcaaatcccatctctgctattcacaacctttgtgaccttgggcaaatcacggagggcttttttgtacctgaattcccttacctctaaaacaaggacagttgtgctgtcatcagtgttattgcaaatattgattttgctcttatatggaaagtgtttttcaatatgacttgyacataccaggtgctcctacaatgcttgacacacttctcaaagctcttaccacacaagagcacctcaagggcgaagccacagctcctttatctctctgtgcccagtgttcagcccaaggatgagcccacagtagatcctcagcaagtatttgctgaatggttccttagactcctccctctcccattcttgtattacatatgggacgctcaggggccagagaaggttgctgtcttgcccatagccctgccggtagccagtggtgcctgtcccaggccttttcctccaggaaaat

SEQ ID NO: 35087 - DNA, 594 bp, Homo sapiens
cgggaaaagaggagagataccggtatttatcttggcctaagtgtaatctcctgagtctgtctcatcattatggagaatcgtattatgtttgtgcaagaaagggagttagagcacagagttgatctccaggttcaaatcccatctctgctattcacaacctttgtgaccttgggcaaatcacggagggcttttttgtacctgaattcccttacctctaaaacaaggacagttgtgctgtcatcagtgttattgcaaatattgattttgctcttatatggaaagtgtttttcaatatgacttgcacataccaggtgctcctacaatgcttgacacacttctcaaagctcttaccacacaagagcacctcaagggcgaagccacagctcctttatctctctgtgcccagtgttcagcccaaggatgagcccacagtagatcctcagcaagtatttgctgaatggttccttagactcctccctctcccattcttgtattacatatgggacgctcaggggccagagaasgttgctgtcttgcccatagccctgccggtagccagtggtgcctgtcccaggccttttcctccaggaaaat

SEQ ID NO: 35088 - DNA, 566 bp, Homo sapiens
ttcctttcattcattcagatggtacttaggtccctctgctctgccagactacattctggggattcagcaggagcaagaccgccatggtccctgccctcctggagctgatggtcaggagctgtctcattgtgtgcatcaaatgtgatgatgggtgactggatgcaagccctgtgaggtgtgaggtaagggtcccaggcaaggcttcycagctggcatcctcttatctgagcctcagcctccaacccatttcagcatcagagcactatggtcagtactgcagatggacttggttaaataatccctgcttattaaccttggaggaatcgaataatctccctgagcctcagttttttcatctattaaaaaaaaaaaagagcttggccgggtgtgctggctcacgcccgtaatcccagcacttcgggaagccaaggcgggtggatcacctgagattgggagttcgagaccagcctgaccaacatggagaaacctcgtctctactaaaaatacaaaaattagccgggtatagtggcacgtgcctgtaatcccagctactcaggaggccgagg

SEQ ID NO: 35089 - DNA, 542 bp, Homo sapiens
ctttgtctctgggtttcaaatagcagctaatggtcctagctgcctttcagccagttggtgatttttgcttttgactttgaccatcttcaaagacactcgacacacatttttattacatttacagggcccggcacgcccaactacttggcaaattgtgtcaaagaatctataactgttacggaagaatgctttctgtctgcattcttcttcattctttggaaatatgatattctcattgaccttctatgaaggtcacagtaaatgacgtttcaacatcctaaaattrtagtctttttttcaaagccatgtggaaccttaaagatctattcatctttttcattcgacaaacagtttatcaagtgcctactgtgtgccaggcactgtgtgtgggctgaaaaactgaactctagtcattgttcttatggctctcatctaattggtagtaacatataaagaataatactggctgtgtgctgtaataaagtgtattagtaacctgttgctatgtaacaaattgttactcacttgattgcctaaacaat

SEQ ID NO: 35090 - DNA, 916 bp, Homo sapiens
gcattcacttcctcaggctcaacattcatagtcctggtgtcagcaggaggcacagagaggggtcagagcctcagaggtatctacagcaaagacaaggggagcctctgccacattcaggtggagccactgccccctgccccaggaattcaacctgcagctgatcctgggggaagctggggttggactcagatgacagtacatggtaggaccaatgccgtgggatcctgccctgctctggcgcatcaggggctttgcacattcagctgtgcaggaagctcttatcaggcagccatgactttccagggaagctcagggagggtgtgactttttcccagaaagggtattagagaactacaaaggacctactgtgcgccaggccccgtgctgggtgttttacttatattatctcatttgatcctcccaatgaccctgtgaggcaggcactaggactgtcccttgtcacatcgattacacctgaagttcagagagggaagagacttgtccaaggtcatctgaccgttctacagaaggtaaggtttctaacccaggtctgggtcaccccaacgcccatactacactgtcccaaccccagaaatgaacagggccttgatgtcataggaacctgaggcccccatgagcaaccctcttggaaatgagagagaaggcagccatagctggccctgtcctcagcctcattccctgctactaactgcatcctggggacatggcaggtggaggtggagggttgggagggtgaggggtagacgagggatgaatatccagccctgtcrgggaggcctgaagtggagcaaatggcagacgggtcggagcccagccctctgagcccagccctgccagactccatctgctgaatccagacgctcaggagtcccaagtccccgagccatgttcctta

SEQ ID NO: 35091 - DNA, 825 bp, Homo sapiens
cacttccaygcatgcaatcaatggcagagtccatctctgtgacagtatgactgagggcccacctttttcctggcggttggctggaagcctctctctatttcaagaagttactcacgtttcaccatgtggtccacccacgttagttgacacctcgaaaaccacaagggggtctctctatctgctaagataatgccttgtacaacatattgtaatcatacgaacaacatcccattgttctcattgaccttctatgaaggtcacagtaaatgatgtttcaacatcctaaaagtatagtctttttttcaaagccaggtggaaccttaaagatctattcacctttttcattcaacagtatatcaagtgcctactatgtgccaggcactgcgtgtgggctgaaagagctgaactctactcagtctactttatgtggcaaagatgcataaagtaacctaagcaagggagggccatcccatcacctttactatattctatgggttagaagcctgtctgtctacactgaatgggaggagaatacacatgcgtgtgactcactgggcggggggggtccccttagggtgtgtccatcacacagaaaatgtcaaagtataacaagtgaccagaggaagaagcaacagattcttccaggagaggtcaaaaagactttctgaaagagggaacacttgaaggatgacacctgagtgagtaaagggtcaccaggtgggcaaagtgggaaggacactctaggcagaggaacagcgtgagtgatgacacagaagcaagaaagaatgcagtatgttcaggaaacgaaggaagtccggcataact

SEQ ID NO: 35092 - DNA, 518 bp, Homo sapiens
agatcagtggaacagaatagagtccagaaataaacccacacaaatatacccaagtgatttttggcaaaagagcaaaggcaattcactggagawagggtagtcctttcagcagatggtgctagaacaattggctgtctataatgcaaacaaatgaacctcaatctcacactttatatgagaactcaaaataaatcatagactaaaatgtaaaatgcaaaactataatactgttagaggaatatataatacaaaatctatgtgaccttgggttagacaaaatatggctaataaaagattgacaaaatagactttattaaaatgaaaaattcttgctctgcaaaagatacttttgtttgtttgtttgttttgagacagggtctcactcccgttgcccaggctggagtgcagcagctagatctcggctcactgcagcctctacttccaaagctcaggtgatccacttcagcctcccaagtagccgggactataggcatgcaccaccatgcctgaaaagatga

SEQ ID NO: 35093 - DNA, 518 bp, Homo sapiens
agatcagtggaacagaatagagtccagaaataaacccacacaaatatacccaagtgatttttggcaaaagagcaaaggcaattcactggagatagggtagtcctttcagcagatggtgctagaacaattrgctgtctataatgcaaacaaatgaacctcaatctcacactttatatgagaactcaaaataaatcatagactaaaatgtaaaatgcaaaactataatactgttagaggaatatataatacaaaatctatgtgaccttgggttagacaaaatatggctaataaaagattgacaaaatagactttattaaaatgaaaaattcttgctctgcaaaagatacttttgtttgtttgtttgttttgagacagggtctcactcccgttgcccaggctggagtgcagcagctagatctcggctcactgcagcctctacttccaaagctcaggtgatccacttcagcctcccaagtagccgggactataggcatgcaccaccatgcctgaaaagatga

SEQ ID NO: 35094 - DNA, 518 bp, Homo sapiens
agatcagtggaacagaatagagtccagaaataaacccacacaaatatacccaagtgatttttggcaaaagagcaaaggcaattcactggagatagggtagtcctttcagcagatggtgctagaacaattggctgtctataatgcaaacaaatgaacctcaatctcacactttatatgaraactcaaaataaatcatagactaaaatgtaaaatgcaaaactataatactgttagaggaatatataatacaaaatctatgtgaccttgggttagacaaaatatggctaataaaagattgacaaaatagactttattaaaatgaaaaattcttgctctgcaaaagatacttttgtttgtttgtttgttttgagacagggtctcactcccgttgcccaggctggagtgcagcagctagatctcggctcactgcagcctctacttccaaagctcaggtgatccacttcagcctcccaagtagccgggactataggcatgcaccaccatgcctgaaaagatga

SEQ ID NO: 35095 - DNA, 625 bp, Homo sapiens
tgctctgcaacccaccagttgtgtggcctgggacaagtcagtttaacctatgtctcagtttccccaactggaaaatgtgggtagtaataccctacccctcagggtcacgtgaggagtcaactagatgacatgtgaaaagtagatcacagacgctgggcacacagttagccctctttaaaatgggagccagtaatatttcaataactgctggttgtctggattgaatgccaggcctgaagctgcccagggcacccccaacccagcttatcactttctctcctctatcctctccacgcatcgtaacaaaccctgaggtcagggccaccacaggccatcagcagtgtttgcaaaacagcagcacgacaagttygggctggcctgctgcccacactgcgtaggcggccaccccgctgctgctgtgagctgtgaatttagaggtacagcagccagggagggctccccagctgggaccagtcctcaaggtggagtgctgattgctctgctggaggtctatttaaaatcagcagcaaagagctccatgcacagagttttccctccctcaggccctccctcaccttgagcccgctgccttctgcttcagagcctgggtccacgccagtgatgt

SEQ ID NO: 35096 - DNA, 1264 bp, Homo sapiens
gggatcccctcagggccaacacccgggactactcagacactttgctcatgctcttcacgccacagtggccacgttcacctgaggcttcagtcggggggtgactgttcgcgccccggggtctcaattaggctccatctgccctccttaggatcaaggctcaggccaggtcacggcagccaccaccctgcttccccaggggtctcctgtcacctcaggggtctcccgtcacctcaggggtctgcctccccaggggtctcctatcatctcaggggtctcctgtcacctcagggtctcctgtctccccaagggtctcctgcctccccagagttctcctgtcaccccaggggtctcctgtcacctcaggggtatcctgtcaccccagggatctcttatcacctcaggggtctcctgtcacctaagggtctcctgtcacttcaggagtctcctatttctcckggggtctcctgcctccccaggggtctcctatcacctgggggggtctatttctcctgacgtctgctgtctccccaggggtcttctgctctgccatccatcctgagggaccatgatggtccctggctctacatacatagggtgcacccactaaatgcagtcccggtgctggggcttggagatgagacagacacagtcctgctcctgaggggcccgcagtctagtggtacagacagtcaacaggccttcacggtacagtgtgagcagcgcgtgacaaagtggctcgagggccacatgggtacagagaaggggcaatggtcctgactggcgtgggggggtgcttcctggagaaagtggcatctctgatgagacgggagggtgagcgagagtcagccggcgggggggaagggaaaatggaacattccagaatatgggacggctcaagtcagtgctcaggagagcaagtcccgcccgggaggaggtgagtcgcagtggccacagcaggtgctgggggacagggtggggctcacaaggacacgcaaggggtggctgcgggcagattctagaacggttcctaatccatgagggaagctgcaggaacatgcaggttaagtgtgtctccggtatgaaagagggattcatggaaaagaaagcaggggaccagaatagctgaaacctagcccaaagagacgagaaacacctggccacaagacccagtgacaggtaagggatccaaagagagcacagtgtgactgcccacgggacagggagcggtgggagaaccttcaggcaccaggaaagacacatttca

SEQ ID NO: 35097 - DNA, 686 bp, Homo sapiens
tctacattcatttaatagacttaccttctgactttatgtgcatgaagtatacgacaaggtatgaatataaaatgcaataagatacaggccctgtccccagccctacttgcccatccccgacaaagggacaaagggtgtgtacatgccaggctgagatcacagacctcaaatcaataaatgcaatcaattkttatgggccattggtgaaggtgagcatttgctgattactttggtgactcacaggagagatttttaaggatacaagatgagagataaagagaagaaaagagggagggcttcccagaggaaggaaaagttgagctgatccctggagggaggaattcctgctgcccatgggctgctctcactcctttaactccatctgctctgctcccttcctctatgaaatgtgcctgggccatctcagtcttttcaagactttcagccatgcttgacctacccgccaatcccacatttccctctccagaccccagttattcctcggaattattctagtatttccagtggcatcttagattactcaatgcagattgatcattgtattactctgtttacttcatccaggttaaaggagtgagagcagcctaggggcagtaggtccgatgctgaggaattcctgcagctgggcctagctggggtgagggagaggggcaagggagagttta

SEQ ID NO: 35098 - DNA, 1775 bp, Homo sapiens
actcacacctggacactgctgtgatgatcctagcatgcatcctccctttacctttacctctggagaggaagacccagagagcatgacccagaccagacaattttgctttttctaagcaatacaaaccacctgaataagaatatggacctacttcaagttatatttcatatttttttcaccacattcaggagcaataaggagaatcagcaactgtgaatcaggagtctggctggggagaaaggctccagcctgggcttagcgttgactgtgtaagtggttttcaagccacttagtgccaatggctctttgtgccagcaaggatgtcctgttagatgcttaatttagattttaagaaaagcaatcccttaaggttttaggatgcagtcacttagttatttttttccttttgctccccactgttctttgtcatgcagattcaggaaacctgggctctgcctcaggatacctctatgtttggaagcccccacccctgcccccattctgccattctggtggtagtgaagagtgagaacttctgccctacgctgggcgtttggggagctgtgctaggtcacagtctgtcattccacactttggggcttttcacacttgggcatccttaatcaccaagtcagaaggaaaacgggcctgtgaaacgtccacttgaccaagacccccttccatcacgggtttcccagaggcagaggatgcgatttgcaggcagccccagtggtcagctcacagcctggcctgcagggggaaatcaatgcgtcaaaactgagctatattgccagagcctgtcaggcatttttgagcttgctaacgtgagaccctatgcttatgtttacctttataatttttacatttcttagactttaatggtagctcttatttgtttattcagccattcaacaaacactgagcacaagcaagacagaagagctctcagctcctccacattcaatacaacaagtcaaatgtgagcgtgggtgtgtcttcactgcttcccggcaggaatcctagctgcctgggatccaggaagcctttttccaaaacctcactctccaatcctgagcctgtccaatatgtgcccatctcctgcctgatttgcacccgcctggcttcagagtgcccatcaattgtgtttcaatgcatcacctttcctgttactcctcagctactgccaaggcatgaggtctcagcacacttgactacatcacagcagggtgcttggccatgcactcagmaaatgtgcccaaagggtggttccctagcaagtcaactgtctgtgcatcttgtgaaatatttgctgctggctcctgattcttctggaatccttttctggatgctgtggattacctagcagccaggcttggcatgggttctggagcaggaatccctgaggcagattaattatggacttctgagcaggggatattgatatcgttgatatccaggaacagtttgtgtgtggcttccaaccaagctgcagctagcttatgagaagaagcaagattatcaccgaagagagtcatgagactgtgggtctgcaagttggcgcattgtctggatcactgtccagcttcagtgatagctggactgtggccccagagcagctcaggaaatcaccatgtggaagttgctggaacaaccatagccactctgaaaccttcacacttgacccttagaatacttggaccagcttctgaaaggtacatttggaaggccaaaaggaaggagaaagagaggagaggcatggccggctcccagggatg

SEQ ID NO: 35099 - DNA, 804 bp, Homo sapiens
aaatcacttggcattagaaaggtaattcgttacctggcttccaatgtactggatcttggtgaagagctgcaatcaccagagaaaggaaagggtaccagaaggaaacttgtgcctggcccccacccctgcaaatttctacaccagccctccttgcctggcctccctctgccttttagcattttctcatcattccagaacaagaggctctgcagctcaaaatggggaaaggggtttctcaggacccaagccagctcttaaccaccttctttgtacctctccaaacctcaggcctgcttaattatgattaattgccacatggataatcagatacagtttcaaaaggttggaaatgacactccaaggacaccagggaagatacaacrtatgcctttgttcgcaggaagaaatggcaggtcccttcctcagccccataaccttttcttattttaacaattccaaacagaattaataccatcagtatatcgttcccactccggggaattgaacttcaactgtacaatttctgcagctgtcagggttttccaacctcctgtcaataatgcaatgttggggtgtccctctgctggaatgaaagcagtttcaagtttctgctttatgtctgtgctttctgggtggtgggacatgatgagaaagtacaaaaaaaataataacagcagtaaaaagcttccactcttgacttaactggatcaaatgtaatagacttcagtcttttcttctgatttcctctgcttgttttagaaaacactgtgaaagtacaggagattttgtcttgccaactcttcc

SEQ ID NO: 35100 - DNA, 804 bp, Homo sapiens
aaatcacttggcattagaaaggtaattcgttacctggcttccaatgtactggatcttggtgaagagctgcaatcaccagagaaaggaaagggtaccagaaggaaacttgtgcctggcccccacccctgcaaatttctacaccagccctccttgcctggcctccctctgccttttagcattttctcatcattccagaacaagaggctctgcagctcaaaatggggaaaggggtttctcaggacccaagccagctcttaaccaccttctttgtacctctccaaacctcaggcctgcttaattatgattaattgccacatggataatcagatacagtttcaaaaggttggaaatgacactccaaggacaccagggaagatacaacgtatgcctttgttcrcaggaagaaatggcaggtcccttcctcagccccataaccttttcttattttaacaattccaaacagaattaataccatcagtatatcgttcccactccggggaattgaacttcaactgtacaatttctgcagctgtcagggttttccaacctcctgtcaataatgcaatgttggggtgtccctctgctggaatgaaagcagtttcaagtttctgctttatgtctgtgctttctgggtggtgggacatgatgagaaagtacaaaaaaaataataacagcagtaaaaagcttccactcttgacttaactggatcaaatgtaatagacttcagtcttttcttctgatttcctctgcttgttttagaaaacactgtgaaagtacaggagattttgtcttgccaactcttcc

SEQ ID NO: 35101 - DNA, 665 bp, Homo sapiens
aagggcagtcatttcatttatttatttattttttaaaatcctaaatagcataaaagtattttatgctagactgtgaacagttcatacattctgcatggttaatacatgtactcacatgggaaacagccatcagaaatagataaactaatttgaaccagtttcaagcacatagcatttaattaaatcacatcttcagaatggattttaaaggttgggattttcagagcacaggggccgcacacagcatcttggccgtggtcctggaacgctctgccaagatggccacaactcacgggcctgcgattgggaccaacatttcatgcagttttgcacaggatttcatgcccaaacccaggggacgtgagcttctgaccctcccagcgcagccaagtgcttctccggagggcagtggcagaggtctcttagtacgtgggtctttccagtggagcctgtgaagggagggctcacccccctttcctcaccaaagcaccaggagccatacctgggcccaaggtggctgaggctgtagaccttcctttctcccaccctaaggaccatcattatccagggcttcagcacaaacactgctgggaagtgggaagtggggtgctggcgaagggctcagaaagcccaygagcccaacgtctactgaggatgctgcccta

SEQ ID NO: 35102 - DNA, 635 bp, Homo sapiens
ttctccaaagaccatgttctgttgccatttgggcgcggccgcacccagaaagacaatagccactattacactgccaagacaggtctcagaagttccattttcctaaaaatggcatttctggctctgaaagggattgcccaaaatttgttttttgataaaaacatgttttaataagaacatttttcttggggttcaaaaacatgtctttttggcctaaggcagcccagaaacagcaggggggcatgcagtggggagggaaagacaagttccatccagtaggcggaaggcagagggcagaggcccctgcagtggagatgggctcttgcccgccctccccaccctttcaagaaccatctcccaagggcggatcttgaccaaggctgtggttcctgctgtctgctctgaccttgcccaccaaaactttggccccgtctgcaaatacaaacagaacggatgacttatctgtgttgcctaatgaaggcaggttgcccttcacatgcccaggttcctgcccaggctgagstgctggcccacacacgtgcccagggagattctttttctggcggctatttcctcctgtcaagaattctcctggattcaggaagttccgtttaagagtttcctcactgccatca

SEQ ID NO: 35103 - DNA, 635 bp, Homo sapiens
ttctccaaagaccatgttctgttgccatttgggcgcggccgcacccagaaagacaatagccactattacactgccaagacaggtctcagaagttccattttcctaaaaatggcatttctggctctgaaagggattgcccaaaatttgttttttgataaaaacatgttttaataagaacatttttcttggggttcaaaaacatgtctttttggcctaaggcagcccagaaacagcaggggggcatgcagtggggagggaaagacaagttccatccagtaggcggaaggcagagggcagaggcccctgcagtggagatgggctcttgcccgccctccccaccctttcaagaaccatctcccaagggcggatcttgaccaaggctgtggttcctgctgtctgctctgaccttgcccaccaaaactttggccccgtctgcaaatacaaacagaacggatgacttatctgtgttgcctaatgaaggcaggttgcccttcacatgcccaggttcctgcccaggctgagctgctggcccacacacgtgcccagggagattctttttctggcggctatttcctcctgtcaagaattctcctggattcagraagttccgtttaagagtttcctcactgccatca

SEQ ID NO: 35104 - DNA, 661 bp, Homo sapiens
atgaagaattattttgccctcttagaaacacttcaaacatttgtgttttcttagaacaacttttaatgcaatgtaagctagaatgacttcttcattctgtaattccacttattaaattagatgacttcttgctcatatgtcatattgcatgctagcgtcagatcttaattgcttagcctgttcaattgctgactctaacctggcctgttcctctttggagctcgtaaacacttcttcccgggagaggaaggacaacagaaagtcaatgaaaattagagttaattttgttatttttagtagattttggaaacggactgatgaaagatgaagctcaaaccgattatggaattatgtctgtgtatcaattatccctgctctcctgacatagttgcttgaaaatgggcacatggaaaaaccccattgagaataattattcccccagcataacacacggtttacaaggatggcccatctgctckgcctgggggtgtcagagagaggagcagcctgtatcctgtggccaggtctgcctctcacctgcacggcctcgactttcctctttgtcactcgtgacagttctggctaaaggcttccaaagaagactgaagaatgacatgaagatgtgcaaaatgacgacgtctgtgtagtatgcgtcccgtgg

SEQ ID NO: 35105 - DNA, 539 bp, Homo sapiens
ctcctaaccaaaggtgctccgcctgcctcagccttccaaactgtgggattacaggcctgagccaccatgccggctggtcacttgtatctttggattacaggtgatggtttggtaacgactgctggtataccagacataagcttttctaaacactaacatcatatctttgaaattaaggttagaatttctttttaaaatattttaattaaacattttttgcttacctcacagtaaacaaagatcaaatgttaacatttctatcagtgttaccccatgttactcattatgaacctaacccggagcaaagggcatgcagcagaatgttctgcatctctttacctaaaagattcaaagttttaagaagtaaagacaggactgacccaagtataaaactctgagaaatcacaagaaaaagtcagcaaaatataccgggggagagcccaggccacaaggacaaaattctacaaggaccatgaaggggggactaagaatattttattwaaaaaaaaaaagtgcctggaagccaggagaaatgcaca

SEQ ID NO: 35106 - DNA, 1030 bp, Homo sapiens
tgctgggattacaggtgtgagctaccgcgcccagcccaaaaatccattttcaccgagccagttggtgagcagcttcccaggtcctggaagcctgagattctcacatcctcaacctacccgagcccctctagggtgtggggctggagtgagtgctgggcacctggtgtgtatcccaagcaccttctctgtagtcagtctggccttgtgccctgagtcccaaggcagggccagccatgctgtgggctgtccgctgcctaatcctgggggacgaagccaccytccacagtgaacccggatctgccttccctgggaggggaggagaggagagcaaaagcagagagtgccggtggggaagggatcagggcctcagggtcagaaaagaggcttgtggccctcggcagggagaatctgtctacccctccctcgggagatgcccaaaagaaagagatggcctgggggagcaggtcatggcgatgagggcaggggcagggatgggcagtgactgcaaatgggccatgatttcttttcaggagaggaaaacattctaaaatggactgtggggatgtaaatacactaaatgccattgaatgtatactttacatgggtgaactgtatgctatgtgacttgtatcccgataaagctgttatagtaaaaaaatccaaaagcacaaggcatcgcctggtggtccttggaggcgggagagagctggagcccgcagtggaggctcctgcagggctgggtgctgttggaagaggcgtttgctaatgactcaggtccctaggaactatgtagataggaaatgagaagcaaaaatagccgctttcttgggcaagggtgagttggagaaagcgttaagtttgtccctattagttagaaaggtagaagaaggcggacagcagaaaagtaaattcccttctcacaaattttttttgtttgtttttttgagacagtctctcactctgtctcccagcttggagtgcagtggtgtgatcttggctcactgcaacctccgcctcctggttcatgcaa

SEQ ID NO: 35107 - DNA, 1030 bp, Homo sapiens
tgctgggattacaggtgtgagctaccgcgcccagcccaaaaatccattttcaccgagccagttggtgagcagcttcccaggtcctggaagcctgagattctcacatcctcaacctacccgagcccctctagggtgtggggctggagtgagtgctgggcacctggtgtgtatcccaagcaccttctctgtagtcagtctggccttgtgccctgagtcccaaggcagggccagccatgctgtgggctgtccgctgcctaatcctgggggacgaagccaccttccacagtgaacccggatctgccttccctgggaggggaggagaggagagcaaaagcagagagtgccggtggggaagggatcagggcctcagggtcagaaaagaggcttgtggccctcggcagggagaatctgtctacccctccctcgggagatgcccaaaagaaagagatggcctgggggagcaggtcatggcgatgagggcaggggcagggatgggcagtgactgcaaatgggccatgatttcttttcaggagaggaaaacattctaaaatggactgtggggatgtaaatacactaaatgccattgaatgtrtactttacatgggtgaactgtatgctatgtgacttgtatcccgataaagctgttatagtaaaaaaatccaaaagcacaaggcatcgcctggtggtccttggaggcgggagagagctggagcccgcagtggaggctcctgcagggctgggtgctgttggaagaggcgtttgctaatgactcaggtccctaggaactatgtagataggaaatgagaagcaaaaatagccgctttcttgggcaagggtgagttggagaaagcgttaagtttgtccctattagttagaaaggtagaagaaggcggacagcagaaaagtaaattcccttctcacaaattttttttgtttgtttttttgagacagtctctcactctgtctcccagcttggagtgcagtggtgtgatcttggctcactgcaacctccgcctcctggttcatgcaa

SEQ ID NO: 35108 - DNA, 1030 bp, Homo sapiens
tgctgggattacaggtgtgagctaccgcgcccagcccaaaaatccattttcaccgagccagttggtgagcagcttcccaggtcctggaagcctgagattctcacatcctcaacctacccgagcccctctagggtgtggggctggagtgagtgctgggcacctggtgtgtatcccaagcaccttctctgtagtcagtctggccttgtgccctgagtcccaaggcagggccagccatgctgtgggctgtccgctgcctaatcctgggggacgaagccaccttccacagtgaacccggatctgccttccctgggaggggaggagaggagagcaaaagcagagagtgccggtggggaagggatcagggcctcagggtcagaaaagaggcttgtggccctcggcagggagaatctgtctacccctccctcgggagatgcccaaaagaaagagatggcctgggggagcaggtcatggcgatgagggcaggggcagggatgggcagtgactgcaaatgggccatgatttcttttcaggagaggaaaacattctaaaatggactgtggggatgtaaatacactaaatgccattgaatgtatactttacatgggtgaactgtatgctatgtgacttgtatcccgataaagctgttatagtaaaaaaatccaaaagcacaaggcatcgcctggtggtccttggaggcgggagagagctggagcccgcagtggaggctcctgcagggctgggtgctgttggaagaggcgtttgctaatgactcaggtccctaggaactatgtagataggaaatgagaagcaaaaatagccgctttcttgggcaagggtgagttggagaaagcgttaagtttgtccctattagttagaaaggtagaagaaggcggacagcagaaaagtaaattcycttctcacaaattttttttgtttgtttttttgagacagtctctcactctgtctcccagcttggagtgcagtggtgtgatcttggctcactgcaacctccgcctcctggttcatgcaa

SEQ ID NO: 35109 - DNA, 1030 bp, Homo sapiens
tgctgggattacaggtgtgagctaccgcgcccagcccaaaaatccattttcaccgagccagttggtgagcagcttcccaggtcctggaagcctgagattctcacatcctcaacctacccgagcccctctagggtgtggggctggagtgagtgctgggcacctggtgtgtatcccaagcaccttctctgtagtcagtctggccttgtgccctgagtcccaaggcagggccagccatgctgtgggctgtccgctgcctaatcctgggggacgaagccaccttccacagtgaacccggatctgccttccctgggaggggaggagaggagagcaaaagcagagagtgccggtggggaagggatcagggcctcagggtcagaaaagaggcttgtggccctcggcagggagaatctgtctacccctccctcgggagatgcccaaaagaaagagatggcctgggggagcaggtcatggcgatgagggcaggggcagggatgggcagtgactgcaaatgggccatgatttcttttcaggagaggaaaacattctaaaatggactgtggggatgtaaatacactaaatgccattgaatgtatactttacatgggtgaactgtatgctatgtgacttgtatcccgataaagctgttatagtaaaaaaatccaaaagcacaaggcatcgcctggtggtccttggaggcgggagagagctggagcccgcagtggaggctcctgcagggctgggtgctgttggaagaggcgtttgctaatgactcaggtccctaggaactatgtagataggaaatgagaagcaaaaatagccgctttcttgggcaagggtgagttggagaaagcgttaagtttgtccctattagttagaaaggtagaagaaggcggacagcagaaaagtaaattcccttctcacaaattttttttgtttrtttttttgagacagtctctcactctgtctcccagcttggagtgcagtggtgtgatcttggctcactgcaacctccgcctcctggttcatgcaa

SEQ ID NO: 35110 - DNA, 536 bp, Homo sapiens
cccttgagagcatttaatttacatttctaatgtggaagagaagagattaaagtttaccgaacctccactaagatgatttcctaggtgctttgacatggtgttttatttataacaacaactctgagagatagtaacagcaataatttactgcattctttctttcttttctcttttttttttttttttttgagatggagtttcactcttgttgcccaggctggagtgcaatgacacgatctcagctcactgcaacctctgctgygctggttcaagtgattctcctgcctcagcctcctgagtagctgggattacaggtgcctgccaccactcccgaccagtttttttaaaaaattatatttatttattattattattattttttgagacggagtctcgctctgtcacccaggctggagttcagtggcacgatctcggctcactgcaagctccgcctcccgggttcacgccattctcctgcctcagccttcccagtagctgggactacaggaggctgccaccatgcccggctaattttt

SEQ ID NO: 35111 - DNA, 536 bp, Homo sapiens
cccttgagagcatttaatttacatttctaatgtggaagagaagagattaaagtttaccgaacctccactaagatgatttcctaggtgctttgacatggtgttttatttataacaacaactctgagagatagtaacagcaataatttactgcattctttctttcttttctcttttttttttttttttttgagatggagtttcactcttgttgcccaggctggagtgcaatgacacgatctcagctcactgcaacctctgctgtgctggttcaagtgattctcctgcctcagcctcctgagtagctgggattacaggtgcctgccaccactcccgaccagtttttttaaaaaattatatttatttattattattattwttttttgagacggagtctcgctctgtcacccaggctggagttcagtggcacgatctcggctcactgcaagctccgcctcccgggttcacgccattctcctgcctcagccttcccagtagctgggactacaggaggctgccaccatgcccggctaattttt

SEQ ID NO: 35112 - DNA, 1152 bp, Homo sapiens
tctccctcctgcctcacccacccaccatccagcaggcacctagcactattttctagtgctccatctcttagcagggactctgttcagatctttgttttctgtgggtggcaatgaggaaatgagctcacctgagccatgagggaaactaagaggcccaagggtctaggccaccagacatgccacagcagctcatggtactagagttaggtcatctctgcataaaagctgggactcaaataagaagcagaggctgcaagaagctgaggacccctcaggaggaaagaaacacccacataccatgatggaagaatggccaggttcgcaataagaggtggatgagggagtaaggaagtctccaattaggacctcaggccacgcatagtcaagggaggtcattgtgtccatccctgtttccaggtagagccacaccagagagtttgtcagtagcccctgtgctgcatctccctctgctgaccccatgggttgggaacaaggtggcccagaccatttgcaccaatggtctcctcagccctattaccccacagccccacatcctcctgagagagcccaggttagtcctgcaggaagactcatgaccatcccaggacaaactgtggcagggaccgtacatagtgtccaaggtgttcagaaaagtcagttgtgggagagatcatgtctaaacctttaagatccagagagctccatggaacaagcatcttgggaagagctttgagmagcacagtagtatttcaacaggcgggagtgagggtgaggaacagggagaaggaactttcatgtcaggcagagggatgcaagtgagcaaagaagtggatgacctagggtttggggccagcatggctactggggtattaagggtcagaataagaagaggttggagagggctgagtcagaccttctcaacagcttcacccatcagagcccaagtagccctcatcaagtgggtgtggaaggatatcacacttctgttcttacagccaagtgccttatactaggccaaggaaagagctgaggctgtgttcctaagacagcctccaactgtggcctcttagggtcattctctgagacactgaggctaggaaggttttgagatgataaaaatttctctttccactctacaggaagttgagtttg

SEQ ID NO: 35113 - DNA, 1031 bp, Homo sapiens
gcatctctgatcctgatattcaaggcatttctcagtctggccccagccaggtctcctctcctcaaatcatctgtatggtgaaaagcctaggctttggagcctgcagccagggttcaaattcaggttctactttttttttttttttttaagagatgggggtatcactatgttgcccaggctggactcaaactcctgaactcaagtgattctcctgccttggcctcccaaagtgctgggattacaggtgtgagccactgtgcccagctccaggctctacttttcatgagctgtgtgatgttgggccagttacttatcctctctgtcccttagttttctcatctgtaaaaagggaagatgaaatacttttgtcactgggttgttgtgaggattaaatgagataattcatgagaacacccagaacggtacctggcacacagtgggtacacaatgaatattagctatgattagttagttcatgtgtttgtctattttatttggattctctccatcccctgaatatattcagggcttttacactctcacacatgctgttgccttggcccaggactgatcacctctctccactaccaaccagttaaatccatgttcatccttcaaagcccagagccagcttaagtcatttcttctcccagagtctcatggtgcagggacggggctggggccrgagaagctggggctaagctgagctggagggtcctcctacctgggctccatcatccaggctgtggccccatgacccagctctggggtcatagtgttcagagtggcaggatggaggcagggctcagctgagttggagagaaggcctagttgctgctggctccagcatctggctgcttgtgcagctacagacaggactggatgtcagagtttccatgggagcaggcagaggcaagcaagcagctgggggagagagtgacgcggcctgcaggcctccctgccaggtgggctggctgggcatcccctccccatctaccccggagtcatgtctgggtctggactttagctct

SEQ ID NO: 35114 - DNA, 1243 bp, Homo sapiens
gacaagggcaggaatgccaggtgggaccacggttaggtttgttgttactgttactactttcatcccactttaaacaatataaacaatattattttctaaatatatctcaaacttactgcagacacctgttcttaaagcccaaaaggcatgtgtataagcagttaaaagcayaaagacagtgaacatcagggaaggtatagtagaaaatgttatctttgaacattatacatattttaatatcacttagaagaatattataatgtacaatttcatacttcgttgtccttgtcaaacttaatagattaccccaaaataacacattttctttttacatttctattatttaatgacatagttatgaaaagaagtattctgtaaaatattagtgagtatgaaatgtaaatttaaataatagtcaaccttttattttacaaaaagcaaatttgaatcaattcatacttgtgaagatctgaaatactgggacttctttctttttttttttttttgcagtaatcccttctttccttgttccttcttatatactttcagagttatttcttatttccattcatcaagtgataactttgtttttggagccccaaagtatgtctacaaagtaacaagctagatggccaggaggtctttcctaaatgcattgcccataaactcagaaacactcagtgattgattccctgtcctcttggcagcaggcaacactgggactgctttttagatgctcccatctcctggggagacccctcacccccagcagaaggccaccttgctccctctagtgagtgcctatgtgccacattgagctggggaaagtcctctccgtgtcctcagcatctctcacacttgtttacatgatggaattcaggtcgcatacttctgaaagattaattctatagcaaggcctataacaagctgggcttattcagcaccaactcctcagcacaactcctgcctatttatctaacttaacctcccgttcctctctaccttgtatttgtttctccagccacacgggtcttctcgcatctctgtgaataccccaagcttgttcctgactcagtacctttgtgcatgccacccttcacctcatctgttcctctcccggatcttcacgtcattaacttctgctcaaatggcacctcttcagagggcctttcctctcaacacctcacactgtcactctgcagccgtcatcgcttagatcactaccagttgttgtacgatgtaa

SEQ ID NO: 35115 - DNA, 1243 bp, Homo sapiens
gacaagggcaggaatgccaggtgggaccacggttaggtttgttgttactgttactactttcatcccactttaaacaatataaacaatattattttctaaatatatctcaaacttactgcagacacctgttcttaaagcccaaaaggcatgtgtataagcagttaaaagcacaaagacagtgaacatmagggaaggtatagtagaaaatgttatctttgaacattatacatattttaatatcacttagaagaatattataatgtacaatttcatacttcgttgtccttgtcaaacttaatagattaccccaaaataacacattttctttttacatttctattatttaatgacatagttatgaaaagaagtattctgtaaaatattagtgagtatgaaatgtaaatttaaataatagtcaaccttttattttacaaaaagcaaatttgaatcaattcatacttgtgaagatctgaaatactgggacttctttctttttttttttttttgcagtaatcccttctttccttgttccttcttatatactttcagagttatttcttatttccattcatcaagtgataactttgtttttggagccccaaagtatgtctacaaagtaacaagctagatggccaggaggtctttcctaaatgcattgcccataaactcagaaacactcagtgattgattccctgtcctcttggcagcaggcaacactgggactgctttttagatgctcccatctcctggggagacccctcacccccagcagaaggccaccttgctccctctagtgagtgcctatgtgccacattgagctggggaaagtcctctccgtgtcctcagcatctctcacacttgtttacatgatggaattcaggtcgcatacttctgaaagattaattctatagcaaggcctataacaagctgggcttattcagcaccaactcctcagcacaactcctgcctatttatctaacttaacctcccgttcctctctaccttgtatttgtttctccagccacacgggtcttctcgcatctctgtgaataccccaagcttgttcctgactcagtacctttgtgcatgccacccttcacctcatctgttcctctcccggatcttcacgtcattaacttctgctcaaatggcacctcttcagagggcctttcctctcaacacctcacactgtcactctgcagccgtcatcgcttagatcactaccagttgttgtacgatgtaa

SEQ ID NO: 35116 - DNA, 509 bp, Homo sapiens
tatgttggtcatttgatgtctcaaaagatattttttcaagatatgataatagattgtcttcttctacatgatcttgcagcaaatcttgaacaactctatggaattaacagaacatctatgttcactccaccatgcataacacactcaggttatcttttatgtcaaatatatataccttttatgtaatgytccacaatgtggacagaatgatgagaaggctaacaatcctattataaaagaacttcttgtctagtggaagaaacactaatataaacatttagtcacaatacgaggtgcttggtattttattaaatacaacaataacagccttgcctctgggggtggagaacacttcctagagtaggggacatttgagatgttcttagagaattattagaaatttattaggtgaaaaataaaaacatggagaaggacatttggatctgaagtcatgaaaaataccaaaaggaaatggtcatacaaaagagaatgaattggagtgaacagaa

SEQ ID NO: 35117 - DNA, 599 bp, Homo sapiens
taaattatagtctctgcccttgagacagttaaataattggggaaagagaacataagccaaaacaattttagatgtttacataaaatttttaattgcatggcaatcgcttagtgagtcactgattcatctgataaaattcagaaaatgtttaacattcgccagatctgagagttttactctcagatgacaagcaggattccttttttcatggaacttgtggcctaatgagagagaaaaataataaaataagaaattacaataaaacacaaaacactgcacaatagggwaagtatctcctagtatctgctaacaggacctgtagaaggttcaactaatcaagtctgtaggtccaagggaaaaccctgttcagttaagattatgtttgctgcaagtaacagagatctaaaataatagtaatgtaaacaatgtaaaaacgcattgctggcttatgcaaacatctgtaggcaggcagttgtgcagcaaggctctgaatccactcgggagctgggctgtcttatcttgctgctacacccttcttagcaagctatctcaagagccaagatgactgctaaggttacagcaaacatttccacactcca

SEQ ID NO: 35118 - DNA, 1063 bp, Homo sapiens
ccagcagtggaagctcactgtaacctcaaactcctgggctcaagcaatcctcctgcctcagccacccgagtagcacttccagagcttctcaggaaggtggaaggaagactaaaatgacttcagggtcatccactcatttccttttatgaccatagagccacttgcctgataagtcttcatagaaaatagcctatcgaacagatgcaggaggtaaatcatcttaactggtcctagtcatataggaggggagtagctgtttttgttatgtctttyttcttatatttttgatacttgcattgggtgactatggggactacatatataggcaaatgtactctgcattttggttatgtttcttccacatagttgcataattctagaagtattcctttaaacacttattgcctggattatctcaactgaaagatgaggataatataatggagtcattttacaggattaattttaagaggtcaaacaaaagtcattctttaggtgagggacattctcgggttggagcagctttgctgttagttctgccctcttttattactaagatgctgtttcctctatcttcttgtccttaaaacatttattcaatatatcagcgaggattaagtgagcctgcatatgacataaaccccccatatgacagaatattaaatcagacaggatttaatttatctgtcatgtaagtgaagtgtcaaagtaggcattgaggatccacaggcatccggaacacaggcgtcttctatctttctatcccactcttctagtccatgattttcattctcaagatcaccttagaatccaggatggctgctgggggactgggcatcacatctgtgatgcaggccagaaacaagaggaaagacagaagggcaaaaaaggattctaccctactgagacaattcccacaaagcaggattcccagatgtcccaaatgattcttccactttgtttcactgggcagaacttagacatgtgaccatgctcagcagctagaggtcctgggaatgtggcttttagctgtctattttgccatcccaaaaataatactaag

SEQ ID NO: 35119 - DNA, 1063 bp, Homo sapiens
ccagcagtggaagctcactgtaacctcaaactcctgggctcaagcaatcctcctgcctcagccacccgagtagcacttccagagcttctcaggaaggtggaaggaagactaaaatgacttcagggtcatccactcatttccttttatgaccatagagccacttgcctgataagtcttcatagaaaatagcctatcgaacagatgcaggaggtaaatcatcttaactggtcctagtcatataggaggggagtagctgtttttgttatgtcttttttcttatatttttgatacttgcattgggtgactatggggactacatatataggcaaatgtactctgcattttggttatgtttcttccacatagttgcataattctagaagtattcctttaaacacttattgcctggattatctcaactgaaagatgaggataatataatggagtcattttacaggattaattttaaraggtcaaacaaaagtcattctttaggtgagggacattctcgggttggagcagctttgctgttagttctgccctcttttattactaagatgctgtttcctctatcttcttgtccttaaaacatttattcaatatatcagcgaggattaagtgagcctgcatatgacataaaccccccatatgacagaatattaaatcagacaggatttaatttatctgtcatgtaagtgaagtgtcaaagtaggcattgaggatccacaggcatccggaacacaggcgtcttctatctttctatcccactcttctagtccatgattttcattctcaagatcaccttagaatccaggatggctgctgggggactgggcatcacatctgtgatgcaggccagaaacaagaggaaagacagaagggcaaaaaaggattctaccctactgagacaattcccacaaagcaggattcccagatgtcccaaatgattcttccactttgtttcactgggcagaacttagacatgtgaccatgctcagcagctagaggtcctgggaatgtggcttttagctgtctattttgccatcccaaaaataatactaag

SEQ ID NO: 35120 - DNA, 1771 bp, Homo sapiens
atgcggggtttgagtggaggtgcaggggccagtaaatgggaagaagtctttataatctgtttgtttaatcttcatctctcccagtcctctctgtttactccataaaattaaaagaaatgctgccatctgtttctagcactgtgctctgtgcctcaggatgcttagagaagcttaaaaacagttcaggtggcaaggcgcagtggctcacacctgtaatcccagcactttgggaggccaaggcaggtggatcacgaggtcaggaaatcaagaccatcctggccaacatggtgaaaccctgtttctattaagaaacacacaaattagctgggcttggtggtgcgtgcctgtagtcccagctactcgggaggctgaggcaggaaaatcgcttgaacccaggaggcgaaggttgcagtgagccgagattgcaccactgccttccagcctggtgacagagcgagactccrtctcaaaaaaacaaaaataaaaacaaaaacaaaacaaaaacccagcacaggcactgtttacagtgtgcttttcacttacctcaagagacagaggtatcctctctttcaggttatttgggggatctaagtgcctttggtataatcttccttgtgctggttgaaagagaaagtggaggatcaggttaggtgagaatatattctccagggtttagtagaaaatacattctgtagggtgtaggtcctgaaagatatgctccattcctaacctctacgccacatgcctgtgaatgtgaccttatttggaaatagtctttgcagatataattaaggtaaggatcttgagatgagatcatcctggatttagggtgagtcctaaatccaatgacattgtcattatgacagaaaagaagacaaagggacctagggaaggaggtcatctgaaggtggaggcagaaagtagagtagtgcagccacaagccaaggaaccccaggagccatcagaagctggaagaagcaaggaaggactcttccctggaacctctggagggagagtagtcctgatgaaactttaattttggacatctggactctagaatttgaaaagaataaatttctactatgtttgtggtaataattaggaaactagtacattttcctcagtcagcaacgaagagacaataccagtgctcagccaatctgatgctttgcaagacaaacattcagtcagaagcagcatcatcacgttttctactgatccagagtccagcccaaatccttttgagcttcttttacctacttcttctagctttcttacccctttttttctacttttatggtagagtcaaaggcaccaaaatgcattcagagggttgtgtcaatgagtcgatcttattggagtgacaatttctatctgatttgatgctgtataaacaaatttccttcctactgtgacagcttaggaagctggaatctggggggagatccatgcgatgtcaagtcaagagttggagatggaaataattcatataagagaaaagtcagtgtatgtgtgtgtgcacctgtgtgtgtgtgcacctgtgtgtatgtgtgtgtgtctaggaaagaggcagggtggtggcttaagaacctaagctgtgctaagctgtctctgactccactaggttatgggggtattcaaggacagtgttggtatctggcatttaatctgattttgtgaatcctacagaatttttaatgttagaaaagagaattttgttcccagaaaaacatgtagttgagaattcatacaaacttttctgttttctggg

SEQ ID NO: 35121 - DNA, 1558 bp, Homo sapiens
gacatttaggttgcttccatatcttggttatggtaaatagtactgccataaacatgggagtgcagacatctcttcgaaatactgatttcctttctttgggcgtacacccagcagtgggattgttggatcatatagtagttctgtttttagttatttgaggaacctccatactgttctccatagtggctgtactaattgacattcccaccaacagtgtacaagcattccccttgctatacatccttgctagccttctcaagaaatcttttgacaacttccaaggtccaattactttgacactcaatttttagacagcaatttcttggatagagtttggttattgaagagaatgaggaagctcttcccagtcaaaaagatgttgtgccccatcctttatttcaaggaaacctttcctgacaaccttggtcagtttcctactgtaagatcccatagtcccctatacttcatcactacattcatcacctttgaaattaagtgattactatctgagaacaaagactatgtccatgttattcagtgccatgccaccaatacctagcatagctcctggcacatagaaggtgctcaacaaatattggttaaatgacagaatgagtgaaaaacagtaaacacagataagacagtttccagcaacatttaactacaagrtcgttaagatcttgaagtttgtacagtgaccaccacttgggcaaagaaacttgagaacatatttctaaattattgatatatgatgctacctacaattattgaaatatggtgttacttttgtgaaaggaaaataaatcttggggccccaaaatcactaacctaaatggaaaagtcaagcgaggaactgcttaaggcaaacctgcctcccattctattcaaagtcacccctcttctcactgagataaatgcatatctgagtgcctccttcggagaggctaatcaaaaattcaacagaatgcaaccatttgtctcttatctacctatgacctggaagcccccctcctcacttcgagttgccccaccgttgcttcaagttgtcctgccttttccagaccaaaccaatgttcatcttacatacattgactaatgtctcatctctccctaaaatgtataaaatcaaactgtattctgaccaccttgggcacaggtcatcatgacctgaggctgtgtcatgggcatgtgtcctcaaccttggaaaaataaagtttctaaattaactgagacatgtctcagatattcaaggatcacactttcattctatacccatagcaattaatgcaaatattgaagtacattaagtcaccttatctgaaactatctaaatatggtaaaactcatgaatttcctctgttctattggtcattgatatggtttggctgagtccccacccaaatctcatcttaaatttttgttcccgtaatcctcatgtgtcatgggagagaccagacggagataattgaatcgtgggggtggttaccctcatgctgttctcatgatagtgagttctcacaagatctgatggtttgataaggggctgcccccttcagtt

SEQ ID NO: 35122 - DNA, 533 bp, Homo sapiens
ggcttttaataccttgttgcagacccagagaactccggctcctggcacctagtcaagaggtgaggttacataacatgtggtctttcatcagctgtgttgtgtgtgtaaaatctctttccaatttctcttcatgatgttggttttctgaacttaaatctttcaacttattagatgagtgtaggagaatgtgttaaatctgcatatgtcacagtcttctgctgarcacagatctgatcttcacggtctttggtgaagctgagacatgcaaatatgtaccagaagttgcagggcatctctactgaacataccagactagctgccaggaatgctggctgctgtctctggggtctgaaagacactggggaattcctcataacttgttacacttttctctaagcatgctcctaaaattacaggggaagtaactcagtcatctaagttaaagatattaaaaccagtgtcaaaagaaataggcaatcactctcaccccttctattcaacatagtacagggagtcctagccagaataattag

SEQ ID NO: 35123 - DNA, 529 bp, Homo sapiens
ttctttcacacttggaacctgaaagtcagacccacatactaaggatgggaaggcagaatgatgttgtaaaggggtcatatcagtcttgaaccacctgcatctagacatctcttccaggtgagaaaccttttcaagacatttatctggatattctcttttatgcagaaaaatcgaattttaactgccattagaacctcccacatctcatgattgttctgtggattacagggaactgttcttgtgataattcaacttcaattgcattcactgccactataacaattaaattcctgggagggttgggcacagtgattcacrcctgtaatgccagcactttgggaggtcgagacaggcggatcacctgcggtgtggagtttgagaccagcctggtcaacatggtgaaacctcatctctactaaaaacacaaaaattagccaggcatggtgtcccatgcctgtagtcccagctactcaggaggctgagggaggagaatcacttggactcaggagacagagattgcagtgagcca

SEQ ID NO: 35124 - DNA, 529 bp, Homo sapiens
ttctttcacacttggaacctgaaagtcagacccacatactaaggatgggaaggcagaatgatgttgtaaaggggtcatatcagtcttgaaccacctgcatctagacatctcttccaggtgagaaaccttttcaagacatttatctggatattctcttttatgcagaaaaatcgaattttaactgccattagaacctcccacatctcatgattgttctgtggattacagggaactgttcttgtgataattcaacttcaattgcattcactgccactataacaattaaattcctgggagggttgggcacagtgattcacgcctgtaatgccagcactttgggaggtcgagacaggcggatcacctgcggtgtggagtttgagaccagcctggtcaacatggtgaaacctcrtctctactaaaaacacaaaaattagccaggcatggtgtcccatgcctgtagtcccagctactcaggaggctgagggaggagaatcacttggactcaggagacagagattgcagtgagcca

SEQ ID NO: 35125 - DNA, 632 bp, Homo sapiens
tctgtctgtgtgttctctctttttctgataagaataccagtcactagatttagggcctacctaatgcagtatgatctcctcacagtccttaactgagtacatctacaaaggccctatttccagataaagccacatactgatgttctgggtggacatgaatgagagaaggggaaaatactattctacccactgcaataattagtaaataatcttggaaatttaaaaagttagtccctaaaattcagaaaaaatatttaaaagaacctaattgttgggataaatgctaaaacacaaagtgagagaataattggaagacatttgtttttaacatrccactattaaaaactctttagaccaagttcatacaaaaatgttagtaagaattagaatatccttagagagtcctagaaaatttgaaccaaaatttaataagtttctctaatactttatctaacagttatatgtgtagataaggaaagagagatgataatcatctgcctaggaaataggaaacatttttttttccagtacttatggaacacttacaaaatctaccaaatactagttcacagagaatttttacaaaattctaagaatggttattatatgttctatcttctttgaccataatg

SEQ ID NO: 35126 - DNA, 1257 bp, Homo sapiens
tatcatatagcacaatactgtgttatctgaatttctatcttgaatctatgaaacatatatagtctttaatgtattctatttcttatagcacttaaactttggccccaatttctttgracttcttttctaacaattggtaattgtcatcttactattagaatgcacaaaagtcttccagcacctgtattcttttctctccccctttacaacttctaaaccttgccataggcctttattaatggttcttcagaggggaatctgtctccaatgtcaagctctgagtctcacatacaatgccggtctgtgcttcttgaacacgctaacaggcagaccctttcttcccaatggaatctgtcaaagagacatacgtctcttaagcatcattagggagctatctctaccagctgaagctgcagttgtctaggtttctgtttcttttatagtgatcctattcttatcccaagaggctagatcttttcctgtatcacttgactaattgtacaacaattctaccagctccgaggttacgctgtccatctcagggcttctaggattcccgtaaagaacaactgaggacttcttcctttacatcttggggtaaaataaatactcaggacttatttcatctagaaaatatgcaaaaataaaagatttttcagccttctgacaatctaaattcaagaaaggtattatagcttttgaaatgtacaatttcacaacattgataaatgtcctcggtggagacctatcgctcattttccattccctgcacatttcattattacaacgtaaattggcagttgattattactactttattaccctgtatgatttcctgaagtgcaggagacagaaagtccactataaaaatacccatgaaatttgtatcccaccccttgatgccactcattgatttgtctttcttttatccagccccatttggtttcacctttctgcacagcaaactcaatcacacataagggtacaggcctgtgcacacacagaggcaagttcaaactctggaatagtacccttccagagattaagaaaaatactgtgaagtcccccgtcttcagtcccttctctcttcaagtaaaaaaaaaaaaaaaaaaagaaagaaagagagaaattaaaccaggagaggtggagagattttctaaattttagtcctacagcttatattatctgtctctttttactacaccatccctcaattcttagataaacggaggaagaagtatctatgtactttgaatg

SEQ ID NO: 35127 - DNA, 896 bp, Homo sapiens
gaccttgtggtccactcgcctgggcctcccaaagtgctgggattacaagcttgagccaccgcacccggcccagaaatttgcatttttaaaaagtgttgcttagggtaagtcttgcccacattgaaatttcagaaccactttctgtagcctggtgttcccccctccatctatgcttcccatgagcctagggactgggttggggtgcaaagaagayaatcatggagttagatggtaaaaagcgacaaggggtaacaaaagccatggaataaacaaggaacatcaacctccagggtccatattacttgaacatttgggagaaattttattttatattaaagcacacattgcacataaagagttggtaaaagaaatatctgcataaacttttaaaattaaaccaagactttcaagaaatttggagttgaattgtaaaatgtcagcttccagccagagcatagtgctccgctgcctctgccttacgggtgttttggtgtcatatctacctcaactttctcaattagaaattcctcattgagtcactgtcataacacccatgacctctgctgagttcttcttgcattgtaatggacttaatgttttttctttaaagtaatataaatagcttactctttttacataagctgaccttcaatatggttttatttttattttttgagatagaatctcactctctcccccaggctgtagggcaatggtatgatcatagctcactgtagccttgaactcctgggctcaagtgattctcccatcttagtctcccatgtagcaggtactaaagacacaagcaaccatgtctggctaatttttaaatttctttttatagagacagggtctcactaggttgttaaatctggtctcaaactcctgggctcaag

SEQ ID NO: 35128 - DNA, 588 bp, Homo sapiens
taatggcaggcaagaggggggttgagcaggaagactccacacgtggtgtctctccagtactggcattggagccagctgcagtaagcccaacagacagagctagagaagctgaagctacagcctcctgcaggatttctgtgagctggtaccaaggggccttctgcactgcaggggaataagccacttcatgaggattcttttatctgatcagatgggcaaaaacttttgatgtacccttagaaacataacagccattggctgacagtctagatttatggggtcaggggctccccatcatctttgaaagccatgcttcgtgtcaaagccagagaattttttgttaagaagccctcagacccagagggtattttctggggggtgggggggrgggtgcgcagtgggtagaaggaagtgaagagcgaaggagtccaaaaatctcctccaacatgcggatgctatttgctaatacccatgccaactccatggcagcaactgcttcctaatgcccactgcagttctgacctttttgttatgtctttgaagtggtgatatctggctagaactgggagtctcacaatctggaagaca

SEQ ID NO: 35129 - DNA, 582 bp, Homo sapiens
gcttgcctgtgtttaagtctactacattggtagtggtagccaacagttactgaccacttcctgtgtctgaggcaaacccttgatcagcattatttcattgagtcttcaatgacaactgtagttattattttctctccattatgtagatgacaaaaccaaggcttgaatagacttgttaagcaaattagccaatattacccagttatggaatggcaggccaacattagcctccaggactcttggtctccagaactcctgctcttycctggtctgcttagttcacatgggaaacctaagattttatcagattcgggcaaaagaaaggagtcagcttcctggagccctcccattggatgctttccaggcatttctgaatcagcaactgaaggtgaacccaccactgtccatccttagcccaccctccaccttggcagtgagcagcaggcaatgcctcctattcccctctgaaagcttttatcctggggcaagagcccagagaacttctagaagcaaattattgccttatgctttgttatagatgaggactttgacttcctaggactgatactcaataggagtcat

SEQ ID NO: 35130 - DNA, 1302 bp, Homo sapiens
ctatgtctcttttacacagattcctttaagctttgagattgttattcagtgaagtcaagtggtaaatctgtcctcatctgtggtgtgttaggactattgactggaacgyttttggccgacatgattaaaaaaagggctccaactccaatctattcagctttacattcctttgttttcagtgatgtatgaaatttatttcaggatattacaagatttttccaaatttttcttcccttgtcaacctaaggacacttctttacatcactcttgctaccggggccagatcatgacgtgcagcttcattgaacaaatgcctaaaaacatgtgtctgacatctgtttttaaaacctgcagcagccagctttaaagcttctctctgaagaaggcaggagagagatagagcatatttttttgtcacattaatcttgagtaacttggctttgttagcaataaaaaaatagcattctaaaaaccgtttgttgaatttatgtcaaaattttaacttagctgttactttctaatcacattttgaaaaacagtcccatcaaaacacactttagaaggattagtttttacttataatttcattttatggaatctggaagtcatttttcaagacagaacagagtcaattctttttcacttctgacattttattgatgacatacttattaattaagaggcatttgtgaaatttgaaaaagaaaatgatacaatgtccaatagtaataaaaaagacaattgtccttccagttctacgaggttttctatactttactttttgaaatcatcccttcacagagagctcacagttggaaaattccaaatgcactttatacttgttcttttttttgaagagggaagattttgtcactattgcgaatgtgactttatcctggttttctagagaaaggccatgaccagaacaagatagctgctttgagacctaaagcaaagattctaagctcaaatttgcaaaactaaaggagcctgtacctaaatatgggaatgcttcctagctggtactgaatttcacactatgctatttatgtttccatttattattatgatttttctttttgagataaaagctctgagttgtggctgtcagagcagacagataatgggactatacgaacaggactgggaacatatcttggccagtactccaggctactcatccaaattctatctaaggcgcttgaacagctacagattttgcacaacaggacttgaaatctcagctattctctttccatcccagaagcaatcagactcaggcctaagcgggagccccaaaag

SEQ ID NO: 35131 - DNA, 1302 bp, Homo sapiens
ctatgtctcttttacacagattcctttaagctttgagattgttattcagtgaagtcaagtggtaaatctgtcctcatctgtggtgtgttaggactattgactggaacgtttttggccgacatgattaaaaaaagggctccaactccaatctattcagctttacattcctttgttttcagtgatgtatgaaatttatttcaggatattacaagatttttccaaatttttcttcccttgtcaacctaaggacacttctttacatcactcttgctaccggggccagatcatgacgtgcagcttcattgaacaaatgcctaaaaacatgtgtctgacatctgtttttaaaacctgcagcagccagctttaaagyttctctctgaagaaggcaggagagagatagagcatatttttttgtcacattaatcttgagtaacttggctttgttagcaataaaaaaatagcattctaaaaaccgtttgttgaatttatgtcaaaattttaacttagctgttactttctaatcacattttgaaaaacagtcccatcaaaacacactttagaaggattagtttttacttataatttcattttatggaatctggaagtcatttttcaagacagaacagagtcaattctttttcacttctgacattttattgatgacatacttattaattaagaggcatttgtgaaatttgaaaaagaaaatgatacaatgtccaatagtaataaaaaagacaattgtccttccagttctacgaggttttctatactttactttttgaaatcatcccttcacagagagctcacagttggaaaattccaaatgcactttatacttgttcttttttttgaagagggaagattttgtcactattgcgaatgtgactttatcctggttttctagagaaaggccatgaccagaacaagatagctgctttgagacctaaagcaaagattctaagctcaaatttgcaaaactaaaggagcctgtacctaaatatgggaatgcttcctagctggtactgaatttcacactatgctatttatgtttccatttattattatgatttttctttttgagataaaagctctgagttgtggctgtcagagcagacagataatgggactatacgaacaggactgggaacatatcttggccagtactccaggctactcatccaaattctatctaaggcgcttgaacagctacagattttgcacaacaggacttgaaatctcagctattctctttccatcccagaagcaatcagactcaggcctaagcgggagccccaaaag

SEQ ID NO: 35132 - DNA, 1302 bp, Homo sapiens
ctatgtctcttttacacagattcctttaagctttgagattgttattcagtgaagtcaagtggtaaatctgtcctcatctgtggtgtgttaggactattgactggaacgtttttggccgacatgattaaaaaaagggctccaactccaatctattcagctttacattcctttgttttcagtgatgtatgaaatttatttcaggatattacaagatttttccaaatttttcttcccttgtcaacctaaggacacttctttacatcactcttgctaccggggccagatcatgacgtgcagcttcattgaacaaatgcctaaaaacatgtgtctgacatctgtttttaaaacctgcagcagccagctttaaagcttctctctgaagaaggcaggagagagatagagcatatttttttgtcacattaatcttgagtaacttggctttgttagcaakaaaaaaatagcattctaaaaaccgtttgttgaatttatgtcaaaattttaacttagctgttactttctaatcacattttgaaaaacagtcccatcaaaacacactttagaaggattagtttttacttataatttcattttatggaatctggaagtcatttttcaagacagaacagagtcaattctttttcacttctgacattttattgatgacatacttattaattaagaggcatttgtgaaatttgaaaaagaaaatgatacaatgtccaatagtaataaaaaagacaattgtccttccagttctacgaggttttctatactttactttttgaaatcatcccttcacagagagctcacagttggaaaattccaaatgcactttatacttgttcttttttttgaagagggaagattttgtcactattgcgaatgtgactttatcctggttttctagagaaaggccatgaccagaacaagatagctgctttgagacctaaagcaaagattctaagctcaaatttgcaaaactaaaggagcctgtacctaaatatgggaatgcttcctagctggtactgaatttcacactatgctatttatgtttccatttattattatgatttttctttttgagataaaagctctgagttgtggctgtcagagcagacagataatgggactatacgaacaggactgggaacatatcttggccagtactccaggctactcatccaaattctatctaaggcgcttgaacagctacagattttgcacaacaggacttgaaatctcagctattctctttccatcccagaagcaatcagactcaggcctaagcgggagccccaaaag

SEQ ID NO: 35133 - DNA, 1242 bp, Homo sapiens
tattttctggaaaaatgaattcattgacaaaatttattagataaaagggaatgcttcacctgagcaaaatgtagtgagaattctgataaactatcatatatttggggtgttttaaaggaaggggtgcccaggagaacttttatgattctgctgacatgcagcaaacagtcactccctgctggtgctctgtggcttcatacaaacatagcatgtgtgtgtgtgattgcgtgggtgttggagagagaggagttccccagagcaaggaatgaaaaagatactgctgtaccaggcagcaaaacaacaaacacctacctcaccattcagtgacccctgggcagtcagactctgggcaaagaccaactttaaaggtttctgaaaaggaatagctgaaggatacttgactcaggtaattcttaattcaggtgaggaatttccccagaggtcactaatttgtcttctgcccagaaaagaaaggaatgagaattgctttcattgaggaaaagaatcttcagaggatgcacagctctttggtacagttgtctgcatctcaagaaatacataagcaagtcaccttccacggaagagtgaggggtagtaataagaacactaaaagaaagatgttaacttcaaagtactctgcagatgttaactcattttgcatggctactttctggaaatatagaaaaacaaccagaattttacttatgaaaaaagttcatcaaagcaatagaaaaccctgccaacctataccatatatatatacacacacacacacttatatgtgacgacatatatacagacatatatttattaaaatctatactttcatacttatatatgagtatatatgtatacatatgtatgtgtgtatagctagaaatatagtcagagcctcaaggaagctgagaagttcctcattctggtttcttgtttgtgaaatctatttatgtatgattttgctaatratttggcaattactaggtaaatttgaccaatatgaatggccaacctaataatttatgtcacaaaaaacattctaaagtttgaatgatctgtatttctgcccacatttatttttgaatattgagttttctagacatttattcacttattacagtgtagacagaaatctatgtgcatatttataagctgttttcatcaaagctactgctgccacctaagccacatgcagccaacaacaaatggtcagattactctcatggaaatcatacattaaatgca

SEQ ID NO: 35134 - DNA, 1242 bp, Homo sapiens
tattttctggaaaaatgaattcattgacaaaatttattagataaaagggaatgcttcacctgagcaaaatgtagtgagaattctgataaactatcatatatttggggtgttttaaaggaaggggtgcccaggagaacttttatgattctgctgacatgcagcaaacagtcactccctgctggtgctctgtggcttcatacaaacatagcatgtgtgtgtgtgattgcgtgggtgttggagagagaggagttccccagagcaaggaatgaaaaagatactgctgtaccaggcagcaaaacaacaaacacctacctcaccattcagtgacccctgggcagtcagactctgggcaaagaccaactttaaaggtttctgaaaaggaatagctgaaggatacttgactcaggtaattcttaattcaggtgaggaatttccccagaggtcactaatttgtcttctgcccagaaaagaaaggaatgagaattgctttcattgaggaaaagaatcttcagaggatgcacagctctttggtacagttgtctgcatctcaagaaatacataagcaagtcaccttccacggaagagtgaggggtagtaataagaacactaaaagaaagatgttaacttcaaagtactctgcagatgttaactcattttgcatggctactttctggaaatatagaaaaacaaccagaattttacttatgaaaaaagttcatcaaagcaatagaaaaccctgccaacctataccatatatatatacacacacacacacttatatgtgacgacatatatacagacatatatttattaaaatctatactttcatacttatatatgagtatatatgtatacatatgtatgtgtgtatagctagaaatatagtcagagcctcaaggaagctgagaagttcctcattctggtttcttgtttgtgaaatctatttatgtatgattttgctaatgatttggcaattactaggtaaatttgaccaatatgaatggccaacctaataatttatgtcacaaaaaacattctaaagtttgaatgatctgtatttctgcccacatttatttttgaatattgagttttctagacatttattcacttattacagtgtagacagaaatctatgtgcatatttataagctgttttcatcaaagctactgctgccacstaagccacatgcagccaacaacaaatggtcagattactctcatggaaatcatacattaaatgca

SEQ ID NO: 35135 - DNA, 505 bp, Homo sapiens
actctctgaccttaccaaggttatatcaaacacagcaaaagaacatctaatggccacctctggttctattcctcaaaggtaagctcctttaactgtctcttttagtttggggtgataattaccttcacaactctgaacgatatacttgtacctctatttcttgactaaaaaaatactaaaatacatcttgtcttcataattcggtacatgaggatttatctcatactattctaccttctctcaattagatattttaatatcattactttaaaggttttaaaactactttttaaactatcgatagcattcttcttaacctcctcccgtttttttttccatcaacttctgccaatacttcttgactctctctttgtgagatgaagaaatgagtgcttctgccctttcctccataggttctcttcctcctgaaagtccaacgtgyttactttgatcttgtgaagattactaacatttacctctccagcaaccccaatcaagtcttcat

SEQ ID NO: 35136 - DNA, 579 bp, Homo sapiens
cctatcaggaggccagcttcagaatagctatttcttccaaagtaaacatttcctttttaatttctttgaattgctcttagtttttcttaaatttcacctcttgattcaaggttttgcatttttagtagtcctctccatctatctgcacaaaagttaaagaatttctaagattatagaatttttttctaaattatacttcattagcattagaagatgttcttacaaatttatctttcaatcatataccagattttatttcacagtactttagatttcatttctctttgctgtaaagtccctagtcttgttcgataaaataaccatggggattttattcattttaaagacaattgkatagggctacgttatcacatttaagtaaatgagatttacatttttacattatttcaaatgaaaagaagcgaatgtctttaaattattaaatcttttgtcaaaaatgctttaaaattctgttttatttatcagagatttttaattaaagctatttcttagaaaatgaattccttatgaagaaaacattgaattctccttttatctatacattaaacagcttatgca

SEQ ID NO: 35137 - DNA, 579 bp, Homo sapiens
cctatcaggaggccagcttcagaatagctatttcttccaaagtaaacatttcctttttaatttctttgaattgctcttagtttttcttaaatttcacctcttgattcaaggttttgcatttttagtagtcctctccatctatctgcacaaaagttaaagaatttctaagattatagaatttttttctaaattatacttcattagcattagaagatgttcttacaaatttatctttcaatcatataccagattttatttcacagtactttagatttcatttctctttgctgtaaagtccctagtcttgttcgataaaataaccatggggattttattcattttaaagacaattgtatagggctacrttatcacatttaagtaaatgagatttacatttttacattatttcaaatgaaaagaagcgaatgtctttaaattattaaatcttttgtcaaaaatgctttaaaattctgttttatttatcagagatttttaattaaagctatttcttagaaaatgaattccttatgaagaaaacattgaattctccttttatctatacattaaacagcttatgca

SEQ ID NO: 35138 - DNA, 774 bp, Homo sapiens
agcacctctcttgtgtgtcctcagaccatcctgtatagctctctagtctgatgttttcacactctggtaccaaagttaatattctttcttaggctctgagcatcttgaaaccaaggtctgtctatgttcttaattcctagcacaaagtttggyacatgttgcttagtatgtgtagaatggatagatgaatgactgaatgaatcaactaatgccctgtctactcagaaggatataatgagaatcaagtgacataagggtgtgactccctgcactctattatttgggtgtttgatttggccccataatatggtggtgtggccaagactatgccctctgaacctccacctccatccctgggtacagccagtaaacagaactttgcaaattcctatcttggaatcacaatgacaaacgctccaagatggcaggagcctctgagcaccttgagaggcaatcaagagaagcctgtctcagcagactcacctcactgccaggtggtggctgcacactctctgtggggtatcgcacctcaaaccacagctctgcaatcctacaatatctttcaccatcccacatagtatttgttaattgaatcctgtaatttaattgcattcgcatttctaagcacacttgttttcatagaacgtatactctttagcacctgaagattctgacaagtaaatgtcatccatgcctgtccaggtagatacgaggtagcgttgccctcactcccagacactcccctgtccattacttaaccacgtggagttggag

SEQ ID NO: 35139 - DNA, 774 bp, Homo sapiens
agcacctctcttgtgtgtcctcagaccatcctgtatagctctctagtctgatgttttcacactctggtaccaaagttaatattctttcttaggctctgagcatcttgaaaccaaggtctgtctatgttcttaattcctagcacaaagtttggtacatgttgcttwgtatgtgtagaatggatagatgaatgactgaatgaatcaactaatgccctgtctactcagaaggatataatgagaatcaagtgacataagggtgtgactccctgcactctattatttgggtgtttgatttggccccataatatggtggtgtggccaagactatgccctctgaacctccacctccatccctgggtacagccagtaaacagaactttgcaaattcctatcttggaatcacaatgacaaacgctccaagatggcaggagcctctgagcaccttgagaggcaatcaagagaagcctgtctcagcagactcacctcactgccaggtggtggctgcacactctctgtggggtatcgcacctcaaaccacagctctgcaatcctacaatatctttcaccatcccacatagtatttgttaattgaatcctgtaatttaattgcattcgcatttctaagcacacttgttttcatagaacgtatactctttagcacctgaagattctgacaagtaaatgtcatccatgcctgtccaggtagatacgaggtagcgttgccctcactcccagacactcccctgtccattacttaaccacgtggagttggag

SEQ ID NO: 35140 - DNA, 701 bp, Homo sapiens
gaacaaaatttataaggattgtggcatgaggtatcttcttttgatggaattagtagctttataaaaagagaatcacagacacatttaagccatgctttgtcagccagagtgttcctaaggcagctttaaaggactcatttctcacagctaccatgaagcctgtgctgaaaatccagctctggatttaattataagggcggcagaaatgcaagacatattatgcgcaccatctcaacaaggttcctctgacaaatttagcaccctgagaggaaaagatgggcactttgagacacaggagggtaccgtaagggtcccagttcctctggatcctcctcattggcagaagcagctccatcaccctttccaaaggaaaacaagccctcttgcttcccattgtctggatactttgagaagcttcaggtgagggcgaggcagtcgactggctggttctcctcaagctcaagtccaccaccctcattgccttcaggccgataaccagattcaggtctcagctcagcctgaatggggaagtagagcccttctttagggtgaagtggtccctataaaggagttrgagaatgtgggtaagaagtgcccggaggaaatgaggcagcacatcagaggtggatcttgaaaatgttagtcctgagagggaggagtataggctggataggggagaattctgtgatagaggggcaccc

SEQ ID NO: 35141 - DNA, 515 bp, Homo sapiens
tttttttttttttttttttttgagactgagtcttgctctgttgcctaggctggagtgcaatggcaccatctcagctcactgcaacctccgcctcccaggttcaagcaattctcctgcctcagcctgcctcctgagtagctgggattataggcccacaccaccatgcccagctaatttttgtagttttttagtagagacggggtttcaccatgttggccaggctggtctcaaactcctgaccttgtgatcygccctccactgcctcccaaagtgctgagattacaggcataagccaccgcacccggccgcaatgttttccttctaactagtattcccacctctgacaattgttctgcctggagaaatcacaggtccccctgtaagattcaggtggaatatctcttattcaggaaagtcatcttgagtcctccacaccttggatcaaatgacagtgtccctgtttctgttcacttttatcagagctccctacacaggtagctatgcaccatatctgc

SEQ ID NO: 35142 - DNA, 920 bp, Homo sapiens
aattttctctctcctagaaactaagaagcgtcaatcagggtactatttctacttttctcaatatattgctctggaattctggatcagtcataatcttttaatgtctctcaactgtaaaatggggctaatcacaaggagtggatccagactttgtggaaacaraagcttatatatttggacatgtggtctttaaaacctctccaaatatatacctgtgaaattatatggcttttaattatcttcacagaaaacccatatctactaacactgatcctatctgaagataaagaaaggtgccatatatacagaaggcgcattcacaaaacatcatgtttttactctgttaacctcactcaaatctaaggagaattggtagttacagcacagcttctggactgcaatcctatatatctccagaaacttagaatgcacttaagaaaaggtgggtatcctgctaagagtaagagattaagaaaccaccttctcagaccccagtgtgcattgttcacctcaagagaaagaagtgtgaagtccattttaatagctgacacttttaattagctatgggaattctattcaaaaagcatttattgagagttgaaaatatgcaaaggcacataggtacatatgtgaataagacagctaaacaaaggttgttcataaaagaggtagtattggtactggagacagattggtatgtaaaagttataaaacagtgcttttataataaaagggaaatacaatcgaagaattctttaaaaagataatgggtggaaacaattcagagctaaaaaaaaaaaaagcaacctggtatcttcgagatggaagacatagggaatttaaattcagacatatgtaacatggaaaaaagggactagctagattttacttgagaagcaaatgttttggtccatatgatc

SEQ ID NO: 35143 - DNA, 920 bp, Homo sapiens
aattttctctctcctagaaactaagaagcgtcaatcagggtactatttctacttttctcaatatattgctctggaattctggatcagtcataatcttttaatgtctctcaactgtaaaatggggctaatcacaaggagtggatccagactttgtggaaacagaagcttatatatttggacatgtggtctttaaaacctctccaaatatatacctgtgaaattatatggcttttaattatcttcacagaaaacccatatctactaacactgatcctatctgaagataaagaaaggtgccatatatacagaaggcgcattcacaaaacatcatgtttttactctgttaacctcactcaaatctaaggagaattggtagttacagcacagcttctggactgcaatcctatatatctccagaaacttagaatgcacttaagaaaaggtgggtatcctgctaagagtaagagattaagaaaccaccttctcagaccccagtgtgcattgttcacctcaagagaaagaagtgtgaagtccattttaayagctgacacttttaattagctatgggaattctattcaaaaagcatttattgagagttgaaaatatgcaaaggcacataggtacatatgtgaataagacagctaaacaaaggttgttcataaaagaggtagtattggtactggagacagattggtatgtaaaagttataaaacagtgcttttataataaaagggaaatacaatcgaagaattctttaaaaagataatgggtggaaacaattcagagctaaaaaaaaaaaaagcaacctggtatcttcgagatggaagacatagggaatttaaattcagacatatgtaacatggaaaaaagggactagctagattttacttgagaagcaaatgttttggtccatatgatc

SEQ ID NO: 35144 - DNA, 281 bp, Homo sapiens
gtaaaccattcatttgcttatttcaatattttcatttgtatgctttcagataagctgaacttgttccaatctgctatacataggtttgtttatatctttacagtaaatatctcagttaagaattattttctctttgtaaagacattgtgactcagatactactygtaaagtctataggaacacacagctagtaaatggcataattgaaattcaaatggaaatctgattctaaaatatacttgtagcaacatagctgattcctgttactgtatctgctcctg

SEQ ID NO: 35145 - DNA, 497 bp, Homo sapiens
actattaagctattaaatkttttaaaaattaattattttattattttctgccatgctaattgcttaaagaagaagagcagtgatttgagtggtgaaataaaacaaaatagaacacagacagtttattgtcataatatttctaaattggaagtaagtatagccgaatgcctcttatacaaggagtcagaagatctgcagttgttttcacatttaaaaacctcagcatccttgcacaaatcacgttgcttttctgacttttcaattcttcatctataagaataaatatatattactcttaccttatcttcatagcttttgttaatatcaaatgagtaatggaaatgaataacctatacaattgtaaattaataatgatgtggttgaagacgattcaaggaaattttaacagtctgtgtagtgatccaaatttggctattctaaacaattttctaatatttaaattgtaagccatgcacatttcatgatttaaatatcaa

SEQ ID NO: 35146 - DNA, 497 bp, Homo sapiens
actattaagctattaaattttttwaaaattaattattttattattttctgccatgctaattgcttaaagaagaagagcagtgatttgagtggtgaaataaaacaaaatagaacacagacagtttattgtcataatatttctaaattggaagtaagtatagccgaatgcctcttatacaaggagtcagaagatctgcagttgttttcacatttaaaaacctcagcatccttgcacaaatcacgttgcttttctgacttttcaattcttcatctataagaataaatatatattactcttaccttatcttcatagcttttgttaatatcaaatgagtaatggaaatgaataacctatacaattgtaaattaataatgatgtggttgaagacgattcaaggaaattttaacagtctgtgtagtgatccaaatttggctattctaaacaattttctaatatttaaattgtaagccatgcacatttcatgatttaaatatcaa

SEQ ID NO: 35147 - DNA, 497 bp, Homo sapiens
actattaagctattaaattttttaaaaattaattattttattattttctgccatgctaattgcttaaagaagaagagcagtgattkgagtggtgaaataaaacaaaatagaacacagacagtttattgtcataatatttctaaattggaagtaagtatagccgaatgcctcttatacaaggagtcagaagatctgcagttgttttcacatttaaaaacctcagcatccttgcacaaatcacgttgcttttctgacttttcaattcttcatctataagaataaatatatattactcttaccttatcttcatagcttttgttaatatcaaatgagtaatggaaatgaataacctatacaattgtaaattaataatgatgtggttgaagacgattcaaggaaattttaacagtctgtgtagtgatccaaatttggctattctaaacaattttctaatatttaaattgtaagccatgcacatttcatgatttaaatatcaa

SEQ ID NO: 35148 - DNA, 497 bp, Homo sapiens
actattaagctattaaattttttaaaaattaattattttattattttctgccatgctaattgcttaaagaagaagagcagtgatttgagtggtgaaataaaacaaaataraacacagacagtttattgtcataatatttctaaattggaagtaagtatagccgaatgcctcttatacaaggagtcagaagatctgcagttgttttcacatttaaaaacctcagcatccttgcacaaatcacgttgcttttctgacttttcaattcttcatctataagaataaatatatattactcttaccttatcttcatagcttttgttaatatcaaatgagtaatggaaatgaataacctatacaattgtaaattaataatgatgtggttgaagacgattcaaggaaattttaacagtctgtgtagtgatccaaatttggctattctaaacaattttctaatatttaaattgtaagccatgcacatttcatgatttaaatatcaa

SEQ ID NO: 35149 - DNA, 783 bp, Homo sapiens
ttagtcaaagctaaaaataaaaagcatccttccaaatgattcatcaggttatttcctaatcaatagtacataatcctgacaaaattacattgactaatagtttaataacatctgcagtaacaattttattgttttcaaagaaattacactttccatcttgatttaatttacttcaggtgcaacatttccttattaataacaggaaatattaaatgttaacaaaaaagaaaccggtacatgcatttttgaccccagaaagtaaacattcaccrcagtttaagtcaactctgcattgaataaatttcctctatccctctgatttctgccaatcgatttcatttgagaaaacattaattttctgaaagctcttcgctagtcaaaagtaaacacagcctctgaaaaaaaaagacacattcgaccttgatttgtataaaggtcagattgctcagtttacggtccagcatatacatctgtctttcctactctattctacaatgtttgagagtaggggctctaaataatttcagcattccctgtatctaatatcttgctgaaacagagtaggttacatcaaccatttttggaaagaaaaagtgaaagcatgaatcaatcagaactagaatcaagttcctctgtgtctaaggcttccttctactatgtttatactgtctcctattaacaggtacaaatttatcccagaacaagtgctaacttgaagtttgctacataataggcattaaaagaatacaatcatctctcattatccatgggagagtgtttcta

SEQ ID NO: 35150 - DNA, 783 bp, Homo sapiens
ttagtcaaagctaaaaataaaaagcatccttccaaatgattcatcaggttatttcctaatcaatagtacataatcctgacaaaattacattgactaatagtttaataacatctgcagtaacaattttattgttttcaaagaaattacactttccatcttgatttaatttacttcaggtgcaacatttccttattaataacaggaaatattaaatgttaacaaaaaagaaaccggtacatgcatttttgaccccagaaagtaaacattcaccacagtttaagtcaactctgcattgaataaatttcctctatccctctgatttctgccaatcgatttcatttgagaaaacattaattttctgaaagctcttcgctagtcaaaagtaaacacagsctctgaaaaaaaaagacacattcgaccttgatttgtataaaggtcagattgctcagtttacggtccagcatatacatctgtctttcctactctattctacaatgtttgagagtaggggctctaaataatttcagcattccctgtatctaatatcttgctgaaacagagtaggttacatcaaccatttttggaaagaaaaagtgaaagcatgaatcaatcagaactagaatcaagttcctctgtgtctaaggcttccttctactatgtttatactgtctcctattaacaggtacaaatttatcccagaacaagtgctaacttgaagtttgctacataataggcattaaaagaatacaatcatctctcattatccatgggagagtgtttcta

SEQ ID NO: 35151 - DNA, 783 bp, Homo sapiens
ttagtcaaagctaaaaataaaaagcatccttccaaatgattcatcaggttatttcctaatcaatagtacataatcctgacaaaattacattgactaatagtttaataacatctgcagtaacaattttattgttttcaaagaaattacactttccatcttgatttaatttacttcaggtgcaacatttccttattaataacaggaaatattaaatgttaacaaaaaagaaaccggtacatgcatttttgaccccagaaagtaaacattcaccacagtttaagtcaactctgcattgaataaatttcctctatccctctgatttctgccaatcgatttcatttgagaaaacattaattttctgaaagctcttcgctagtcaaaagtaaacacagcctctgaaaaaaaaagacacattcgaccttgatttgtataaaggtcagattgctcagtttacggtccagcatatacatctgtctttcctactctattctacaatgtttgagagtaggggctctaaataatttcagcattccctgtatctaatatcttgctgaaacagagtaggttacatcaaccatttttggaaagaaaaagtgaaagcatgaatcaatcagaactagaatcaagttcctctgtgtctaaggcttccttctactatgtttatactgtctcctattaacaggtacaaatttatcccagaacaagtgctaacttgaartttgctacataataggcattaaaagaatacaatcatctctcattatccatgggagagtgtttcta

SEQ ID NO: 35152 - DNA, 531 bp, Homo sapiens
taaatgttaaattaacatttaggaagttagaaaaggcccaaaatgaggatcacggaaaacccatatatgatacctactttgacccggtattctaagcacgtaattggtattaactcaagtaatgctcacaagaatctgaggagactttgaagcattattagcccaattttacagctaatgaagttgagtttaagtaatttgcttaaggcattgtacctagcaagcatgggattgatgattcaaatctatacagcctggctctaagcaatggtcttcacagtttcactccattgttgagagaayatttgacttgcatgatttaaggtagaataaaaatcttgatagggccatatagatctcattatgtcctctagtcttacatatggtctattgtctctttagattacctgtcctacatgtagaggcatttgagtttgcagccccatggcaaagtaatgaaaaacctattggttatgaggtcactagtgcagcctaacaaagacatggcccagctgcttatgttgcaagtgt

SEQ ID NO: 35153 - DNA, 749 bp, Homo sapiens
ccatggaacaactatatttactgtattctccaaaatagccaaaagagaagatttgcagtgttcccaccacgtagggatgatgagtgctccaggtgagggatgtcctgaacattcccacttgatcactacacatttgatgcacgtaacagaatgtcatgggtgccccataggtctatatacctatcaatgataaaaaggaaaaagtgccctgggacccaggcagccaatgactcagtgctgggccttgatcacagccaccacctggagggcrttggccacaggggcctgatgggcttggctgatgcaaaggttgtgctctggtccccaaacctccccctgagcagagcaggccggccagggtcaccccacctctcacatgagaaggagttgttgatacggaggcagccccaggcagagggcagacaccgctgggagggccggacccctgccctgaagtgcagcctttgcagggatgagcgggaccctcacagacaggcgaaccagagctgcaggaacagaggcctggacatcaaggagccagaactggacaacagggactcagcaggggcccaggagacagaatgggcaaacagaaggaacaaaggaggggaggagtctgcactaagggtgctggggagagtttgggacagagggagccacaagatcgaagacttcctggaggaggtggcacccatcacagggaggccagaggagcagaaggggcaaaggacagacaggaggctgggaat

SEQ ID NO: 35154 - DNA, 749 bp, Homo sapiens
ccatggaacaactatatttactgtattctccaaaatagccaaaagagaagatttgcagtgttcccaccacgtagggatgatgagtgctccaggtgagggatgtcctgaacattcccacttgatcactacacatttgatgcacgtaacagaatgtcatgggtgccccataggtctatatacctatcaatgataaaaaggaaaaagtgccctgggacccaggcagccaatgactcagtgctgggccttgatcacagccaccacctggagggcgttggccacaggggcctgatgggcttggctgatgcaaaggttgtgctctggtccccaaacctccccctgagcagagcaggccggccagggtcaccccacctctcacatgagaaggagttgttgatayggaggcagccccaggcagagggcagacaccgctgggagggccggacccctgccctgaagtgcagcctttgcagggatgagcgggaccctcacagacaggcgaaccagagctgcaggaacagaggcctggacatcaaggagccagaactggacaacagggactcagcaggggcccaggagacagaatgggcaaacagaaggaacaaaggaggggaggagtctgcactaagggtgctggggagagtttgggacagagggagccacaagatcgaagacttcctggaggaggtggcacccatcacagggaggccagaggagcagaaggggcaaaggacagacaggaggctgggaat

SEQ ID NO: 35155 - DNA, 755 bp, Homo sapiens
tttactggaatgagggcaaggaacacctggcccacccagggcagaaaaccactcaaaggcgttcttaaaccacaaacaatagcatgagtgatctgtgccttaaggacatgctcctgctgcagataactagcccaacccatccctttatttgggcccatcccttcgtttcccataagggatacttttaattaatctaacatctatagaaacaatgctaatgactggcttgctgttaatagatacgtgggtaaatctctgttcaaggctctcagctctgaaggctgtgagacccctgatttcccacttcacacctctatatttctgtgtgtgtgtctttaattcctctagcgctgctgggttagggtctccccagctgagctggtctcggcacattcartgtgtttacagagtgaaatgatacccataactgacattacttttctcgtggctacagatggtattttccctggaaatcttcctccagctttgggagtggtctcaagtgtgggggcatcagaattgcttggggtgcctgggaaaacacagatccaggctgtagattgtattagctcatggatgatttgattcaccacaaggtctgagaagcatttgctctacaatgttattttttaaattatttcactataattgttgatttttgtttttgttgtttgagacagggtctcactgtcacccaggctggagtgcagtggtgcagtcatggctcgcttctgccttgaacctctgggctcaag

SEQ ID NO: 35156 - DNA, 755 bp, Homo sapiens
tttactggaatgagggcaaggaacacctggcccacccagggcagaaaaccactcaaaggcgttcttaaaccacaaacaatagcatgagtgatctgtgccttaaggacatgctcctgctgcagataactagcccaacccatccctttatttgggcccatcccttcgtttcccataagggatacttttaattaatctaacatctatagaaacaatgctaatgactggcttgctgttaatagatacgtgggtaaatctctgttcaaggctctcagctctgaaggctgtgagacccctgatttcccacttcacacctctatatttctgtgtgtgtgtctttaattcctctagcgctgctgggttagggtctccccagctgagctggtctcggcacattcagtgtgtttacagartgaaatgatacccataactgacattacttttctcgtggctacagatggtattttccctggaaatcttcctccagctttgggagtggtctcaagtgtgggggcatcagaattgcttggggtgcctgggaaaacacagatccaggctgtagattgtattagctcatggatgatttgattcaccacaaggtctgagaagcatttgctctacaatgttattttttaaattatttcactataattgttgatttttgtttttgttgtttgagacagggtctcactgtcacccaggctggagtgcagtggtgcagtcatggctcgcttctgccttgaacctctgggctcaag

SEQ ID NO: 35157 - DNA, 1156 bp, Homo sapiens
atcctctctggcctcttaacacattctcacatgttcatttacctggactgaccacactttgtttagtcccttgctctcctttggctgcttctcctgtggtgatttaaacagaaaaaaaaaattcttcacctgatcatagtatcctcagctaccatcctatttctttcccccctttgcagccaactatcttgacaaacgttttgtatctgcgtctcaccaccaactttctactcagctcctgcttcgctcttgcccagacactttctaattacaaagtgtacctctcctttctctgcaatctttcgtgtgaccgtgatgctgcatttggttctgtttcatgttctccctttgggcacctcaaacgactgcaaacccttggcctctattctgagtggtggtccccagcaccccagctccttttctcccattcccttcagtgatgacaaccttcatcatttctttttaagcgccccccccccgccccgcccatgtaccctgtgcctatattctaagcaagtggcttagatcctacttaatctggaaaattgcatcaggtgtgagtgacttccctcaactacactgactttatctgcattcccacccatcctgagtccttagcctctgttccagaggatagttgtcattgcttttgctaaagacctgtgcttcctcacgaactttgcttccctttctttaacttctccatttccttctctcattttctttctctgatctgtaaacatggccaggcctcctcctcctaaaaatctccttgggtactttctaatttgtctcctttttttcatccggatatgttgagagtacagcctacatactaattcttcacttcattgccttctattttctcttccagcygctacttaagctctctggcttccctcaccactattctgctcaagtagcgcttgataaggtcactgagggcatctatattgccaaatccagtaagcagtttccaggccccatcttattggacatctctgttgtgtttggcagtgctcatcactcttccacctcagagcccacactttttgacttctgcaactctgaagtctggatcatcccattcttcccttctcttcctttctcgtatctttgggcttctctaccaccctctgcagtttgtatccttggg

SEQ ID NO: 35158 - DNA, 1033 bp, Homo sapiens
tccacccacataggcctcccaaattggtaggattacaggcatgagccactgcacccggcctccacttctgtttggctgacttgtctaaaggggtgttctttttctgtgattgttctctgcccayttgtgagaactagagcacctgctaggtgtcctttactttgggtaattaaccccacatgttccagattaaaggcatttacctttcgatttacattctctctccaggtacatgacctttaaggtacagagctggaactcgagtcaaaggtttctgatgccttctgtacttttgatttcatgtagcaattcaaggctgtgtgaaatgaactacaggagatccaggtgctgctctgcccaggggatctaatcccaccagaccggttgcactgcaccctgacccatggtcaggatgtttcctggaatacatccacttgacagtgtcctctctatgccacagccttaggcaatatgctgctgatggagctctaggttaattgctacaccacattgggccctctcttgtgtttgtatccaggatcgtctgttttttgtgatggagtttgtgaatgggggtgacttgatgttccacattcagaagtctcgtcgttttgatgaagcacgagctcgcttctatgctgcagaaatcatttcggctctcatgttcctccatgataaaggaatcatctataggtgagttttggttgctgccctgtcttctaattcactgcctcttccctctcctggtatgatccatccttccacttctcatgataatcagttgaaaccttttttggaattaaattcacagaagttttgttttggtttttgtttttgagacagggtctcactccatagcccgggctggagtgcagtggcgcaatcatggctcactgcagccggtccatctggacctcccaagtagatagctgggactacaggcacgcaccactacacatggctaatttttattttttattttttgtagagacaggggtcttgcaatgttgcccaggcttcacaaaggttccaa

SEQ ID NO: 35159 - DNA, 1033 bp, Homo sapiens
tccacccacataggcctcccaaattggtaggattacaggcatgagccactgcacccggcctccacttctgtttggctgacttgtctaaaggggtgttctttttctgtgattgttctctgcccatttgtgagaactagagcacctgctaggtgtcctttactttgggtaattaaccccacatgttccagattaaaggcatttacctttcgatttacattctctctccaggtacatgacctttaaggtacagagctggaactcgagtcaaaggtttctgatgccttctgtacttttgatttcatgtagcaattcaaggctgtgtgaaatgaactacaggagatccaggtgctgctctgcccaggggatctaatcccaccagaccggttgcactgcaccctgacccatggtcaggatgtttcctggaatacatccacttgacagtgtcctctctatgccacagccttaggcaatatgctgctgatggagctctaggttaattgctacaccacattgggccctctcttgtgtttgtatccaggatcgtctgttttttgtgatggagtttgtgaatgggggtgacttgatgttccacattcagaagtctcgtcgttttgatgaagcacgagctcgcttctatgctgcagaaatcatttcggctctcatgttcctccatgataaaggaatcatctataggtgagttttggttgctgccctgtcttctaattcactgcctcttccctctcctggyatgatccatccttccacttctcatgataatcagttgaaaccttttttggaattaaattcacagaagttttgttttggtttttgtttttgagacagggtctcactccatagcccgggctggagtgcagtggcgcaatcatggctcactgcagccggtccatctggacctcccaagtagatagctgggactacaggcacgcaccactacacatggctaatttttattttttattttttgtagagacaggggtcttgcaatgttgcccaggcttcacaaaggttccaa

SEQ ID NO: 35160 - DNA, 1033 bp, Homo sapiens
tccacccacataggcctcccaaattggtaggattacaggcatgagccactgcacccggcctccacttctgtttggctgacttgtctaaaggggtgttctttttctgtgattgttctctgcccatttgtgagaactagagcacctgctaggtgtcctttactttgggtaattaaccccacatgttccagattaaaggcatttacctttcgatttacattctctctccaggtacatgacctttaaggtacagagctggaactcgagtcaaaggtttctgatgccttctgtacttttgatttcatgtagcaattcaaggctgtgtgaaatgaactacaggagatccaggtgctgctctgcccaggggatctaatcccaccagaccggttgcactgcaccctgacccatggtcaggatgtttcctggaatacatccacttgacagtgtcctctctatgccacagccttaggcaatatgctgctgatggagctctaggttaattgctacaccacattgggccctctcttgtgtttgtatccaggatcgtctgttttttgtgatggagtttgtgaatgggggtgacttgatgttccacattcagaagtctcgtcgttttgatgaagcacgagctcgcttctatgctgcagaaatcatttcggctctcatgttcctccatgataaaggaatcatctataggtgagttttggttgctgccctgtcttctaattcactgcctcttccctctcctggtatgatccatccttccacttctcatgataatcagttgaaaccttttttggaattaaattcacagaagttttgttttggtttttgtttttgagacagggtctcactccatagcccgggctggagtgcagtggcgcaatcatggctcactgcagccggtccatctggacctcccaagtagatagctgggactacaggcacgcaccactacacatggctaatttttattttttattttttgtagagacaggggtcttgcaatgttgcccaggcytcacaaaggttccaa

SEQ ID NO: 35161 - DNA, 1657 bp, Homo sapiens
agtttctttaagtacctttattttcccttgaagaaaataaaggaggagaagggacttagccaaataatgatttaaatttattctagtatttctgagggtgccaagtcaggaggttgctgaggtttctttctctttcctttgctgaggtaaatttccagctcaggcatatggactgacgtggaaaagcaatcagttataaagaaaaaatacawttggggtctgtctctgttggaaacataattgaaagcatgagtgttgtgtggtttctctcaaacttcaaaagtgtgctcaggcacatgaaggggagggccatctgttgttgtaggggcatgttttactttcctgcttacactttcaatatagtcaaagagctcagctttttataaagaaaattaattactacttaggtttacattagtggcaaatttactcattttcccttttccattagaagaatgttgttagataatagattagaacaatttggcaattaatcacagtcacccactcttagaaattgctcattggccaaaataattagtacaaacactacttagaaaagaaatgatccatcttttgtaaacctaagaacatgttggcagatttgcaatgcttgataacaatagcttttgtgctgcaatgtacaggaggtgccttgaaatttataggctgttggctaccagcacccatcatccacctcagcacctgcaggagccctgatggtcaataggaaggcatagagggaaaaatactgagcttcggaacttgaacctcagactcaggggcatgtagaaactagtccaaagtaacactattgcttagtggcagaatcgagcctggaatccagttttcctgattcctggctcagtgaccccacggctgcacgtgagggtcctgtggagttagtgtcctcccgtgctaaagtgacacggcttgcgttaatccatagaaacgttccatgctgatcccacagacatgtattgaaggcagactatgttctaggctgtgttagcgaagcctccatatagtcacagtattcatttcctagcttaattgttgtttgactattttcaaggtatgtcaggcctaacctactaattcctcattatctgcaatcttatttaaatacactgtgtcaattgagtgtttgtgatatgagcatcaattttgagataacagggatacaaaagaaggaggatccctgcctctaaagagctcgccaacttattatgtggaaataatggaccgaatgccactgatgcaaatgcaccttccctctaggacgtggctccttttttccttttttagttgttctttcaccacgtcagctcttctttcctggtctgctttgaagtcttcttctctcctcttccctctgctggttcctttagccctgggcttccctggggctcagtccgacgttccctcttctattctctcccagggtcatctcatccagtcgtacggcttctattatcatccatagcagaaattatgaacccagagtccatggataaacttttgggcctgtgagttccttgaaattgtatgcaaatttggtgtatatggtcatagcttctgccagcttggcagaggggacctagactccacagctctactgaagtgggtgatgcccaggactgcatgttcctgagtg

SEQ ID NO: 35162 - DNA, 1657 bp, Homo sapiens
agtttctttaagtacctttattttcccttgaagaaaataaaggaggagaagggacttagccaaataatgatttaaatttattctagtatttctgagggtgccaagtcaggaggttgctgaggtttctttctctttcctttgctgaggtaaatttccagctcaggcatatggactgacgtggaaaagcaatcagttataaagaaaaaatacatttggggtctgtctctgttggaaacataattgaaagcatgagtgttgtgtggtttctctcaaacttcaaaagtgtgctcaggcacatgaaggggagggccatctgttgttgtaggggcatgttttactttcctgcttacactttcaatatagwcaaagagctcagctttttataaagaaaattaattactacttaggtttacattagtggcaaatttactcattttcccttttccattagaagaatgttgttagataatagattagaacaatttggcaattaatcacagtcacccactcttagaaattgctcattggccaaaataattagtacaaacactacttagaaaagaaatgatccatcttttgtaaacctaagaacatgttggcagatttgcaatgcttgataacaatagcttttgtgctgcaatgtacaggaggtgccttgaaatttataggctgttggctaccagcacccatcatccacctcagcacctgcaggagccctgatggtcaataggaaggcatagagggaaaaatactgagcttcggaacttgaacctcagactcaggggcatgtagaaactagtccaaagtaacactattgcttagtggcagaatcgagcctggaatccagttttcctgattcctggctcagtgaccccacggctgcacgtgagggtcctgtggagttagtgtcctcccgtgctaaagtgacacggcttgcgttaatccatagaaacgttccatgctgatcccacagacatgtattgaaggcagactatgttctaggctgtgttagcgaagcctccatatagtcacagtattcatttcctagcttaattgttgtttgactattttcaaggtatgtcaggcctaacctactaattcctcattatctgcaatcttatttaaatacactgtgtcaattgagtgtttgtgatatgagcatcaattttgagataacagggatacaaaagaaggaggatccctgcctctaaagagctcgccaacttattatgtggaaataatggaccgaatgccactgatgcaaatgcaccttccctctaggacgtggctccttttttccttttttagttgttctttcaccacgtcagctcttctttcctggtctgctttgaagtcttcttctctcctcttccctctgctggttcctttagccctgggcttccctggggctcagtccgacgttccctcttctattctctcccagggtcatctcatccagtcgtacggcttctattatcatccatagcagaaattatgaacccagagtccatggataaacttttgggcctgtgagttccttgaaattgtatgcaaatttggtgtatatggtcatagcttctgccagcttggcagaggggacctagactccacagctctactgaagtgggtgatgcccaggactgcatgttcctgagtg

SEQ ID NO: 35163 - DNA, 1836 bp, Homo sapiens
tttgagagtccatggggtcacaaaggagatgaaagagaaagtacaagagccagacataaggttggaaagaaccctgtccccagtgaaaggccaattttttctttcacagcatcatcttggaacaacctgctttctggattcttagctcacargtttgaaaaggagccattccctgatctattttaattgcttatcttcaaaaactatctgaactaaggtaccctgtggctactaccttccaatttaggactcaggtttccaggaaaagaaaagagttacaactactaataaaagtcagtcaaagtaactgctcctctttgaaagtctcagctcttattttagatatgggggttcacatgcaggtgtgttacatgggtgtattacacccagctagtgagtattgtacccctgggtagtttttcaatgcatgcccctcccttctttgccccccgcagtccacagcgcctgttgttcccatgtgcacgtccatgtgtgctcaatgcatagcttggagctcccacctataactgagaacatgcagtgtttaaatcccactaatttctatgaaaaagtatttctgttgataaccctgcaggaagctctttattaatgtcttcatcctttaaacctacttagccctatgctgctttagtcacctgtacttttttaaaaaactatttttttctctcattctgacttacttatccttacatgcattgctatttcttcattcctaaggaagtacgcattcgatttaagcatctgtgctaagacatccttggaaattaaattctagtcttttttaatggggcaaaatggaaatataatctcaggtaatgctttccagttcagcttactgctggtttttgcagatggaattataaacatacttaatcagagggaaattccaataaactttagccacagtatattcgtgcctttgcatgggaagagttgatctctcctcaagctagctgcagcctgcgtcttctgagggaagagctgtcttcacttgcgtgggatgaatttgagagatcactggccttgccgtctgagagtgcggtccctgagctgggaggattctgccgagattaggtcatgcaatcagcctgaggtgccaccatgggggtgagctcaaattatagttttgggaccatgcctgagtttagtcagcaaaagtaattcacaccagagggggaatgtgcaagaggtcaataacagaatgagaaatcaggggcagggaaaatgcaggttgtgaaagacgatgaagtgatgattagaggcaggctagggtggcctaccaatggtgaagtcctgggagtgaagaagacgtttgcttcataaataaagaaagacttctgtgctgcaggagaatcaactgttgagaggggtgaatggatgcagagtagtttccctgttaccacgtccaaacagatgtttatttgctggtaactgccatttcaaaaataccaccggaatactcattatttaaatgtttttgttacaccacaactttggaaaacatctctaagccaggcatataagccaaggttacatagtatgtcaggaaaggtataaccattaaattaattaactgtgttttgtctatgatttttaagaaaaaaatctatattttctgcgagtagtgagcaatacttatcaattggttagtcacttgtgtctgcgagtttcatcaccagcatgatcggaaaggtatctcccctcagcttcatttgcaaggaggcctgagtcgctctcagcctccccatttttgtgctgcagcttctggggagcccctggcccacaaaacccagaacatcccctgccgacagggtg

SEQ ID NO: 35164 - DNA, 745 bp, Homo sapiens
tttttgcccaccctggctcctgcaagttgtgtacaggctgcttcagaaacctgcacagctgtctgctatgggactaggggtgggggatggatagattatactgtgcaaaactttgtaattaaccaaaattaattataaattaccaaccaagtcttcccctggatgtggcaagacttcaatagactctagaactccaaaatagttatattagacagattttaacactgtcattgtttgtttagataagragcaagattcctggtgcttcctatgccttcatcttcccagagatccctcttatgtcaatgacattttgaaaatgtttttctgttaagttctttttaattttgagctttttgagaaacttgatttatttcaggaatttataggagttctttttctcttttaagtgtaacaaaagactgggatcaaacaggatgatttctatcacttagtgacatgagcaaacttgacttttacattttttcctgagagcattgaataaagtccgatattttgtatggctgtgacctaaaccaagtttccatgagcaatcatgtgataaagaataactcaatgaatttcttttttcatttttaatgctgtactattttataaattctcttaaaaataaattatttcagcatacaaagcactggagtacatgaaaggctaattttttccctctacatatattttttctatgtgcagaaatctgttgagaaggaaaaaactgtataatgcc

SEQ ID NO: 35165 - DNA, 837 bp, Homo sapiens
atttaaaaaaataccattagaaataccttcattatggagaataagtatagtaaatatatatgggaaatacgtatgcaaaatgcatgtgtgtgtgtagatacagatatagatggagatgtagatatagatgtactttttgttttttattttgttttattgtaactttaggttgcaggaaaccagtgatgctcacatctgcccctatgtatagcataaacctgtttccttttctaaatccacttttccaagttcaccatgctaaatcatcatccctttgaagctcatgcaaaatcaaaccactatcagcatttgtactcagtcttctggtttttgtttgtttttttcattcttatccattcctttgctttctctttgttgttaatttctttctccctctttttccaatttcaaacttaaacttgtttgtaacctctttgtatcagcaatgatgagggaaaaaccagttattttattagagaaaattcagcacacccctacttgatctgtagaatattctctagctcatatcctcgctaataatttgagtataaaataaggggaagtctttcgagtgtgggcccaacataaagctcttggtccattcttagtagggcacaatgtttttaagataatgcttcccaagccagggtcatagcttgcacctgtaatcccagctactccagaggctaaggcaggaagattgtttgaggccaggagttcaagaccagacagagcatcatagyaaaacctcatttctaaaattattttttaaaattagtcaggcatagtgacatgcacctgtagtcccagccactccaaaggatgtggaagaaggat

SEQ ID NO: 35166 - DNA, 917 bp, Homo sapiens
ctcacaaatggttaaacaccgtctccttaatgctttcctcatgatggtgagttctcgtgatgattctggagctgtaagattgaatagatactgtcctgcttggttttggacttgtactgggcctgtgatcccatttrtgttactttcctgacaaatatcttgcctttggattgagaaaatttacccaatgcctgtaccatcatcgtaccttgaaaaaaagaactcccttttaaattcagggactcataggcaaaagggactgtagacttttctcagatgagatgttgaaccttttacatttgtgttaatgctggaatgagttaaggcttttggcaacttttgaaaaggcaagattgtattttactcgctgagaaggatatgatattcgggggatcagggtcagaataatatggtttggctgtgtgtctctaccaaaacacatgggaaattgtaattccaaatgttgcaggtatggcctggtgggaggtgatttattcctgtacttgagaggggtggagttggaagtaaacagaagtgggtaaggtcagaggagtaggttggctgtagggtggtgtgagggtggtgggtagtaggaagtgggagtagcctgctacagaggcagaggctcatggaaaacctctactagggcagtgcacctgtggctttgcaggctttagcccccatggctgctctcatggactgggctggtgttgagtgcctgtagcttttccatactgagggtgggagctttaggtgggtctatgactctagggtctggaggatggtggtatcctgcgtgggggctccaaacccatattttccttctgcactgccctagtagagattttccaagaggctctgcctctgcctcagacttctgcttggaaacactggggggtggatgtggggtattgggt

SEQ ID NO: 35167 - DNA, 917 bp, Homo sapiens
ctcacaaatggttaaacaccgtctccttaatgctttcctcatgatggtgagttctcgtgatgattctggagctgtaagattgaatagatactgtcctgcttggttttggacttgtactgggcctgtgatcccatttgtgttactttcctgacaaatatcttgcctttggattgagaaaatttacccaatgcctgtaccatcatcgtaccttgaaaaaaagaactcccttttaaattcagggactcataggcaaaagggactgtagacttttctcagatgagatgttgaaccttttacatttgtgttaatgctggaatgagttaaggcttttggcaacttttgaaaaggcaagattgtattttactcgctgagaaggatatgatattygggggatcagggtcagaataatatggtttggctgtgtgtctctaccaaaacacatgggaaattgtaattccaaatgttgcaggtatggcctggtgggaggtgatttattcctgtacttgagaggggtggagttggaagtaaacagaagtgggtaaggtcagaggagtaggttggctgtagggtggtgtgagggtggtgggtagtaggaagtgggagtagcctgctacagaggcagaggctcatggaaaacctctactagggcagtgcacctgtggctttgcaggctttagcccccatggctgctctcatggactgggctggtgttgagtgcctgtagcttttccatactgagggtgggagctttaggtgggtctatgactctagggtctggaggatggtggtatcctgcgtgggggctccaaacccatattttccttctgcactgccctagtagagattttccaagaggctctgcctctgcctcagacttctgcttggaaacactggggggtggatgtggggtattgggt

SEQ ID NO: 35168 - DNA, 640 bp, Homo sapiens
  misc_feature (1)...(640): n = A,T,C or G
ccattnnnnnnnnnnnnnnnnnnnnnnnnnnnnnnnnnnnnnnnnnnnnnnnnnnnnnnnnnnnnnnnnnnnnnnnnnnnnnnnnnnnnnnnnnnnnnnnnnnnntcaagagatcttcctacctcagcctcctgagtagctggtgcacaccaccactccctgctaatttttgtattttttgtagagatgaggtttcgccatgttgcccaggctggtcctgagctctaacgatctgcccaccttggccttccaaagtgctggaattacagacgtgacccactgcgcccggccctggacagtagtttaaatgtgagaatggatacaatcactgaaagaacatstagaatgaaggggaagagaagctaattaaataaatgattagagagataaaatccaaaccgtggaatatagtgttacggaaaccagtgggattgagtatctgtcacaagatggatacacaagggataataatcatcacaacctcaaattcaataggaaagcccaaataagaaagggagaattcagtggtaatagctattgatttggtggtaataatccatggtgtccacaaaacagtgggtacaaaaagcagatcatagaaagggaggcctctatccctatagcttccactaagatgact

SEQ ID NO: 35169 - DNA, 592 bp, Homo sapiens
cagagcttgcggtaagccaagattgcgccactgcactccagccagggcaacagagcaaaactctgtctcaaaaaaaaaaagagagagmgagagagaaagattgtgtgggctttctgttccagaccacaagagcttccacttcctttctcttggagaccttgctcatagaagacagctgcctggtgaaaagtactacggtattatcctgagactgccacactgtgagaaacccaaacaccatggaggaccgcgtaaaaataaagtcagatcaagtaaaaaaggaatatgcaggttatcatacatacaaaagaatagttcacaaaccggaagacttcaaatcaaaagtagtaagaaacttgacatgagagttacagtgcagcttataaagcatcaatgaggaagtgcattgacctctattgtgactggctgttaaaaacttatattcctttttgggcaagtagagctgtataagcttatttgtctgtaacaaattggttcaatttcatcatactaacaagaaaggaaagcttaacttttgttaatggttagaaattgcatttcagggaagtcaggatagcttaaattttggtca

SEQ ID NO: 35170 - DNA, 485 bp, Homo sapiens
aaaaggtggattttacagtgtatgaattatatgtcaacaaaagaaaatttaaccagagattaagtagtataaaagaggtaatgagaggtcagggagagaaaagaagactgtgggcatgaattaatggatacaactctgaggttggggcttgaaatgcacctcaaaaggcacagaggatttggatagatagaggaagtggttaaggcattacttaggaaggggtataaaccaagatattattttgacataagagaagtggcaagatgtaagtggaagaaaagacaaggcgagtctcttgttttcatggggcttctaaactggcatattarctgatctggcctgctaaggataatgctttgcacaattattttcatgggataaattgcatatccttctagtctcaggcaagaagtttttattccagccagagagcaagagcctaaggactctccgccatggtattcttaacgagttactgtaaggat

SEQ ID NO: 35171 - DNA, 1803 bp, Homo sapiens
cctgtaatcccagctactagggaggctgagccaggagaatcacttgaacccaggaggaggaggttgcagtgattcaagattgcataccattgcactccagcctaggcaacaagcaaaactccatctcaaaaaaaaaaaaaattattatttgcaggagtgaacaggacaagaatgagggtatctatctctaagaaggatttatgttgcctgtggctgaggatactaccaaatcatctgatgcaggtttcagaaggctgaaagtacctcaggtcatccagattaaatataacctggtggcaagtccacttgagaactggtttactttttttgtttggttttgttgttgttttttgagacggagtctcactcttgtcacccaggctggagtgcggtggcacgatctcggctcactacaatctctgcctcccgggttcaaaggattcccctgcctcagcctccggaatagctaggattacaggcatgtgccatcaagcacagctaatttttgtatttttaatagagacagggtttcaccatgttggccaggctggtcttgaactcctgacgtcaggtgatctgcctgcctcggcctcccaaagtactgagattacaggagtgagccaccacgcctggccgagaaatggtttacttttgattcacctttatcttaaaggtgtaattctttgggatcccaatttaaggtgtctgtggtgagaattcccaccattagctagccttaggttttgacttttgtccagtcctttgaggctgctgaaagacttctaaaagtgcagctcaggtgtccaagaacttcttccagattggcaaatgccttaaaggaaaaagcagctctgactgttaggcttagctctgctttctcctcacttagactttggttcagttcttccttattagctggttagctttttgatgcctttaagagaatgacgggctgggcatggtggctcacgcctgtaatcccaacactttgggaggctgaggtgggaggatcatttgagaccagcctgggcaacatcagaagaacctgcctttgcaaaaaataaactcaaaaaatcagccaggtgtggtggcacacacctgtggtctcagcttctctggaggctgaggtggaagaatcacaagcctgggaggttgaggctgctgtgagccatgattgtgccatagcactccagcttgggtgacagagcaagactcttgtctcaaaaaactatatatatatatataatttttttttaactgcttttttttttgaggtggagttttgctgttgtcgcccaggctggagtgcagtggcatgatctctgctcactgcaacctccgcctcccrggttcaagtgattctcctgcctcagcttccccaagtagctgggattacaggcacctgccaccacacctggctaatttttgtatttttaatagagacgacatttcaccatgttggccaggctggtctcgaactcctgacctgaggcgatccacccgccttggcctcccaaagtgctgggattacaggtgtgagccatcgcgcccagccattttcattgctttttagttggctttgtcagtaggtttttctatttattttttagagatggtctcgctctgttgcccttgttggagtgtggtggtgcaatcatagctcactgcagctcaagcgactcccccacccttggcctcccaaagtgctgagattacaggtgtgatctcccagattttatttttttaaatttagggtgaccgtcacccatggcatggccctcatgaggtcatgtgccctcaggt

SEQ ID NO: 35172 - DNA, 693 bp, Homo sapiens
ggcttacttcttccaaatggctagccagtgtttttcaccatcatttcttgaattgcctctgtttctgtactgatttgaaatgttacttctctaatgtacctatacttggcactatacgagtgttacagtctcttccatgatctgttcatctaatttcattgctttggtgactaggactttttaagacattttaaatatctgacaagcagttgtgcatactatttttggggaaaaatcaacatttttaatgaacaaagcactttataaaacaacatttaagaagtcaaaaataacagatgctggtgaggttgtgaagaaaaagaaacacttatacacttacacactgttggtgggagtgtaaattagtccaaccatagkggaaagcaaatccttttgggatgatatgaacattctaaaatcggattgaggtgatgggaaaactgtgtgaatttactaaaattattgaattgtacatgtaaaaagtgataaatttgtggtaaataaatttacctcaataaagctggtttataataccaaaaaatatttaaaaatcaaatactgtatacatgaagaaagagagagagggagagagggaggaagagaggaaggaagagaggaagtgagggaggaaggagggaaaagaaagggaagagaaaggaagggagaaagaagggagagaataaaaagggggaa

SEQ ID NO: 35173 - DNA, 549 bp, Homo sapiens
tttaacagaaaaactggtatttgagcccaataaaattgatcttatttaaaatttacttccttcgaaaacaggagaaccatattcaactctggtctacacagtcttaatattaattattattgttgttgctatttgttgaatatcaatttgggacctagtattgctataagtatatgaatcatctttaatcctgaaaacaactttgcaagatatcgttcctatttttagatgtgaaaataagattttagtattagatgttcaagtataacactctcaaaatcaatacaatatgatagaatttaagtaggacaagaagttatgattctgttactgatattctgaaatgcttgatttcaaagactttgaaaatgtgctgataccagattccagtgagattctttccataatgtaaatatgtataactctatcttaatgtactacacagtgctgaaagagtattattaaagatgaaaggaatgactcattaaggctcttwccaaccagtggaaataaaaatagaattggttttataaatatcatagaaaaaat

SEQ ID NO: 35174 - DNA, 1136 bp, Homo sapiens
aaatttcattttgaattttctggtcacagtgttgtagggaggcatggttaagtattaaaatgaagcacttgcttaaaccaaaggggatttcctaatcagaagtgaaagcctcctgatactctgctgcaggcgtgtgatactgcagcccttctctaagtgcatatctcacattcaaagtcatttctccatgcctgtcaagtgaactgaaccccctgattgtctgtctaggacagkgatccatttctaatgtatgaggctacagtttttgaactcataaactgtaaactgtattaaataaactgtctcctgattgatgagtgctgctcttataggctaatttctcatctaaacagtgatatgaaaattcttgctaaagggttggtgacaggactaaacgggggtaatagcagacttaatcaagaaagacaaatgggattcattaacaactggcactcagcagacagtcttcagagacttctcagcacaatctcattggtccaatcgaaaataattgtgtgctgcttttatcactgaatgcagaacaaggccaatgaaaaattctattgctgatattaagtagaattcaaattcggattgaattttgtgccaggcagcccatctctggatgagaggaatggagggggaaaaatcgtggctttcatgctgggattttttttctctgattgatcagttttcccatattgctcattccactccggtatcttaatcaactggatcttgccctaactggcagggatgtctatgccagaggcatctggtctctggctggcttaagaattggcacatggtttattttgtccaagcttgctgagctccacttccagtaatgcctgtcttattgagctgtttagatttggcttgtgcggtagagatgactaactctctaccagagcatgctccccttccgcagtacagagattttcctaggaagttccttctaaatcaggatctatgtttcccagtccccctgcatttacgtgagggaagtgtgactaagttgttgccagtggtttccaggccaaagaaatgcgtgccatttccagacctgtcatgtaatactttcacacttagtctttcaccctctatttttccgatctgtcagccagaattagagg

SEQ ID NO: 35175 - DNA, 1136 bp, Homo sapiens
aaatttcattttgaattttctggtcacagtgttgtagggaggcatggttaagtattaaaatgaagcacttgcttaaaccaaaggggatttcctaatcagaagtgaaagcctcctgatactctgctgcaggcgtgtgatactgcagcccttctctaagtgcatatctcacattcaaagtcatttctccatgcctgtcaagtgaactgaaccccctgattgtctgtctaggacagtgatccatttctaatgtatgaggctacagtttttgaactcataaactgtaaactgtattaaataaactgtctcctgattgatgagtgctgctcttataggctaatttctcatctaaacagtgatatgaaaattcttgctaaagggttggtgacaggactaaacgggggtaatagcagacttaatcaagaaagacaaatgggattcattaacaactggcactcagcagacagtcttcagagacttctcagcacaatctcattggtccaatcgaaaataattgtgtgctgcttttatcactgaatgcagaacaaggccaatgaaaaattctattgctgatattaagtagaattcaaattcggattgaattttgtgccaggcagcccatctctggatgagaggaatggagggggaaaaatcgtggctttcatgctgggattttttttctctgattgatcagttttcccatattgctcattccactccggtatcttaatcaactggatcttgccctaactggcagggatgtctatgccagaggcatctggtctctggctggcttaagaattggcacatggtttattttgtccaagcttgctgagctccacttccagtaatgcctgtcttattgagctgtttagatttggcttgtgckgtagagatgactaactctctaccagagcatgctccccttccgcagtacagagattttcctaggaagttccttctaaatcaggatctatgtttcccagtccccctgcatttacgtgagggaagtgtgactaagttgttgccagtggtttccaggccaaagaaatgcgtgccatttccagacctgtcatgtaatactttcacacttagtctttcaccctctatttttccgatctgtcagccagaattagagg

SEQ ID NO: 35176 - DNA, 537 bp, Homo sapiens
ccaaaactatgcacagattctaacaactgtcttttttcatatttttttgaactttatttctttgcattaaagaaaactgttctctagatttgaatgttttaaagcattgtcctttgaggatgagtcacatattttgtaagtactcaaagtcattataaacaaagctaactaataaagtgggtgatcattttaggagatttcttgcaaaaattagaaaaattrtcataatgaggctgattttccaaggcctatgtaaataaaagatcattctatttataattaaaccatacatatagtcaaaatacataagaaaatatggcatctcccaaaaataattcaagttttaatttattgtacattgtcgtggcagagaaccctaaataattaaagtatatttatattaatgtaaatttccagcttccatgttcagtaaattttgaccagtattctgatttaaagtgtctcttggtggtaacaagtaagagcatcttattaaccttttggaactcattaatgaggtaacataattaagttgtg

SEQ ID NO: 35177 - DNA, 542 bp, Homo sapiens
tatatcatgcctgagataaaagaatataaaataatctattaaaaaatacaaaaaaaattttagactgaaaatttaataaaagtaaactagtaagaaaattcattaaaaagtttctataatcacattgtaatgagttctattcatggcagcaccaaaatgatagtatccttatgtaataggtagaattgaattttaaagatttaggttgtgttraatctactatttaatattgtctatattggagaaaaagctaactttattaaacttagtgtgttattcaaaaaatggaggttaaatttacataacagaaaatgaaccattttgaagtggacagtttaatggcacttactgcatttacagtgttgcgccaccaccacctctgtttagttccaaaatatttttatcacccctaattaaagccctatacttgctgagcagttgctcctcattcctcacttcccccaggccttagcagccaacggtctgctttctgtctgtttcgcctgttcagacatttcttacaaattgaatcatataatatg

SEQ ID NO: 35178 - DNA, 1248 bp, Homo sapiens
ctagattaaacaagaaaacatgtctttggggagtttagtggatgttttaaggtctatataaaatacagttaaaggccaggaaaattcccagtgtgtcatacaagggtttgaaatgtggaaccttgaccagtactgttcaatagaaacataactgaatcagtttcaggaattttagagttcctaatcaccatagtgaaaagacatagttgaaatttaaaataatatattaatacttatttaacccagtactgtttgtcccttggtattcatgggagaaaagacactcttctgatgccaaaatccacagatgctcaaatccctgatataaaatggcatactgtttgtatataacctatgtgtatcctcccatacactttacattctctagattacttaaaattcacaacacaatgcccacacattgtttcattcacatggatttaatgtagtacttagtctgcggcaaattcgagttttgctttttggatctttgtggaaattctttttttcttgaatatttttgatctgcagttaattgaatccatggatgcagaacccacagagaaagagggccgactgtatatccaaaatattatcatttcaatgtgtatcaatagaaaatgattagtaaatgrttagtgaactttttaaagttatttttgtattgcacacttgtagaacaacttaaattgcactagctacatgtagatgctctgtggacacatgggcctggtggtcagtgaaatcaccactagcagttctagcattttgcctctgcagtactgtgaacagaaattttatactgttccaattcataattccatggcttttttttttttttttttgctctgacttgtgctttctgaaatcgagtcctcctttatttttaactacactagagatttaattggaaaggggaggaaggagtttaagtatttgttgattcagtgaatgaatgattaaagttcatagtgaaggatcaagatatagatttcccaataattaagggaataagatcactgatattaaagaggcaataaaaaggagagagtagaagttactgaaaatcaaagtctaattctggaatagattaaatttttaaacctaaagccaaaaaatctacataagtaggaatgctggatgatggattttcagaatgatctgttcctttgtatgttttagtttacttggatgatattactttgaaaaaccatgaaccagtcttctattgcctctctgtaaaaggag

SEQ ID NO: 35179 - DNA, 1248 bp, Homo sapiens
ctagattaaacaagaaaacatgtctttggggagtttagtggatgttttaaggtctatataaaatacagttaaaggccaggaaaattcccagtgtgtcatacaagggtttgaaatgtggaaccttgaccagtactgttcaatagaaacataactgaatcagtttcaggaattttagagttcctaatcaccatagtgaaaagacatagttgaaatttaaaataatatattaatacttatttaacccagtactgtttgtcccttggtattcatgggagaaaagacactcttctgatgccaaaatccacagatgctcaaatccctgatataaaatggcatactgtttgtatataacctatgtgtatcctcccatacactttacattctctagattacttaaaattcacaacacaatgcccacacattgtttcattcacatggatttaatgtagtacttagtctgcggcaaattcgagttttgctttttggatctttgtggaaattctttttttcttgaatatttttgatctgcagttaattgaatccatggatgcagaacccacagagaaagagggccgactgtatatccaaaatattatcatttcaatgtgtatcaatagaaaatgattagtaaatggttagtgaactttttaaagttatttttgtattgcacacttgtagaacaacttaaattgcactagctacatgtagatgctctgtggacacatgggcctggtggtcagtgaaatcaccactagcagttctagcattttgcctctgcagtactgtgaacagaaattttatactgttccaattcataattccatggcttttttttttttttttttgctctgacttgtgctttctgaaatcgagtcctcctttatttttaactacactagagatttaattggaaaggggaggaaggagtttaagtatttgttgattcagtgaatgaatgattaaagttcatagtgaaggatcaagrtatagatttcccaataattaagggaataagatcactgatattaaagaggcaataaaaaggagagagtagaagttactgaaaatcaaagtctaattctggaatagattaaatttttaaacctaaagccaaaaaatctacataagtaggaatgctggatgatggattttcagaatgatctgttcctttgtatgttttagtttacttggatgatattactttgaaaaaccatgaaccagtcttctattgcctctctgtaaaaggag

SEQ ID NO: 35180 - DNA, 1047 bp, Homo sapiens
acaaagtaaatgctgcagtgacaattcatgtagcacttctgagatctggccatatttaactatatacatttattgactgtacttataggaccatacatgccagcaaatcaagycgtttagaagtatgctgtttctggagttcttcaaaaattaccacgtttctctccttctctcttgttcccctaaaacccattctgactgctgcctacagaacaatccggcatagcacttccatctagctcacagaccagaagcttcagggagaggcaaaatggcatgaggaaaagagtgtggactttgggaactgacaaaatgggttcaaattccagctgtttggttgaatagctgttgaactgtcttcacttgtaagtggaggttactatcctttcttcacaaggttaccgtgaagattacttaacataatgtgtataaagtacttaccacactgcctgacacataacctgatttatgaattgcatttgtgctgctgaaatactattgtaagtaatatactcctttaaaattttcaagatagtgacagatagattcctgagcattccaagtggctgtgataaaacagtagggaaacagattatttacagtcacagataaactgttacaatgcagtgctttattgaactgtgcttagaaaagaaatcctctctactcaccttcagaattcctcaaggccacaaatccatcctcggccagctttggagaatccttcagctactgttgcattcacaggctcagctgggaaatagtgaaaatatttcactccatggtcctcatttgtatctcctaagaatctcctttcagagtggtatgtagtaaatagaagaggagtgctggttacaatggacataagttatcgattttattcctgcctgaagcaggttgggagctactgggaatgagaagattggttaaattttatgaattcatcagtgcagagtcagaactcaaattctgttaacaatattaatctattccagctcattacagttgtcttgcagacttgtgcatgtacaaaatataggatttata

SEQ ID NO: 35181 - DNA, 1047 bp, Homo sapiens
acaaagtaaatgctgcagtgacaattcatgtagcacttctgagatctggccatatttaactatatacatttattgactgtacttataggaccatacatgccagcaaatcaagccgtttagaagtatgctgtttctggagttcttcaaaaattaccacgtttctctccttctctcttgttcccctaaaacccattctgactgctgcctacagaacaatccggcatagcacttccatctagctcacagaccagaagcttcagggagaggcaaaatggcatgaggaaaagagtgtggactttgggawctgacaaaatgggttcaaattccagctgtttggttgaatagctgttgaactgtcttcacttgtaagtggaggttactatcctttcttcacaaggttaccgtgaagattacttaacataatgtgtataaagtacttaccacactgcctgacacataacctgatttatgaattgcatttgtgctgctgaaatactattgtaagtaatatactcctttaaaattttcaagatagtgacagatagattcctgagcattccaagtggctgtgataaaacagtagggaaacagattatttacagtcacagataaactgttacaatgcagtgctttattgaactgtgcttagaaaagaaatcctctctactcaccttcagaattcctcaaggccacaaatccatcctcggccagctttggagaatccttcagctactgttgcattcacaggctcagctgggaaatagtgaaaatatttcactccatggtcctcatttgtatctcctaagaatctcctttcagagtggtatgtagtaaatagaagaggagtgctggttacaatggacataagttatcgattttattcctgcctgaagcaggttgggagctactgggaatgagaagattggttaaattttatgaattcatcagtgcagagtcagaactcaaattctgttaacaatattaatctattccagctcattacagttgtcttgcagacttgtgcatgtacaaaatataggatttata

SEQ ID NO: 35182 - DNA, 512 bp, Homo sapiens
tttcctttgggatttcaaagcatccttccactctagattacattgggatgccattaagattcccaatacatttgtcagttacttttctctccccactctttttttttctttctctctgaaatcttgtagaagtgtcttgttccagatgttctgaatttctcaatgacatgcctttatgyggcctgtttttgtcaagttttgcaggatactcagtgggccctatcattctgtaaacgtaagtccttcctttagggaattaaaaacaacaacaacaacaacaacaacaaaaccaccatcaccagaaatctcatggtatccaaattgattcatttactgagttcagatggcaagcaacagtgttaggacatgtcagaggattggggtactgtttcttccaaagatactattgcagaacttactttcctcttccttttggttcctgagttcggagaatgagaatttgaagagcaagggatcccctatttggttgatgctgttcttatctccatttt

SEQ ID NO: 35183 - DNA, 1292 bp, Homo sapiens
tggatacagtgtacactgctcggtgacaggtgcaagaaaatctcagaaattgccactaaagaacttatccatgtaaccaaaaaccacctctttcctgaaaactattgaaataaaaaattataaaaaatattaagtggccgggcatggtggctcacgcctgtaatcccagcagtttgggaggccaaggtgggcagatcacctgaggtcgggagtttgagaccagcctgaccaacatggtgaaaccccgtctctactaaaaatacaaaattagtcaggcatggtgacgcatgcctgtaatcccagctactgggcaggctgaggcaggagaaacgcttgaacccaggagatggaggttgcactgagctgagatcacgccattgtactctagcctgggcaacaagagagaaattccatctcaaaaaataaataaattaattaattaattaatgacctaaatattgcagggcaacaaatagaaaaatttctatattcaaataagtgctatacagtatttcacttttattttttacttgacaartaaacattatgtatatttatgttataaaaaaacaaattacaaaacttctgaaagaataataaatatattaaattttatattttaggatatactgataatcataggataactcatggccttaagcataaataaaattgtatggaagaattaaaataaaacaataaaagtaatttgaaaaataaaaaccaaacaaaagacacacttaaagcccaaagttttacaagcatatgcagcaaacatttaataaacatgtaatcccccaaatacatcaatttttctacaacatcagaagtaagggggtcttttctgtgttaccagtatgacattgatatggtttggctctatcaatggtgtctccacccaaatctcaccttgaattgtaataatccccatgtgtcaatagtggaatcaagtggaggtaattggattttgggggcagttttccctacacttttctcatgaaaataagtaagtatcacgagatctgatggtttcttaagcatctgacatttcgcctgcttgcactcactccttcgagctgccctgtgtgaaaggcccctgcttctcctttgccttccatcatgattctaagtttcctgaggcctccccagcaataggtaactatgagtcaattaaacatctttcctttgtaaattacccagttcttggtatttcctcatagcagtatgaaaatggactaatacagacattgatacgtaaaccattaatgatagcacatgaatgtgagaattac

SEQ ID NO: 35184 - DNA, 1292 bp, Homo sapiens
tggatacagtgtacactgctcggtgacaggtgcaagaaaatctcagaaattgccactaaagaacttatccatgtaaccaaaaaccacctctttcctgaaaactattgaaataaaaaattataaaaaatattaagtggccgggcatggtggctcacgcctgtaatcccagcagtttgggaggccaaggtgggcagatcacctgaggtcgggagtttgagaccagcctgaccaacatggtgaaaccccgtctctactaaaaatacaaaattagtcaggcatggtgacgcatgcctgtaatcccagctactgggcaggctgaggcaggagaaacgcttgaacccaggagatggaggttgcactgagctgagatcacgccattgtactctagcctgggcaacaagagagaaattccatctcaaaaaataaataaattaattaattaattaatgacctaaatattgcagggcaacaaatagaaaaatttctatattcaaataagtgctatacagtatttcacttttattttttacttgacaaataaacattatgtatatttatgttataaaaaaacaaattacaaaacttctgaaagaataataaatatattaaattttatattttaggatatactgataatcataggataactcatggccttaagcataaataaaattgtatggaagaattaaaataaaacaataaaagtaatttgaaaaataaaaaccaaacaaaagacacacttaaagcccaaagttttacaagcatatgcagcaaacatttaataaacatgtaatcccccaaatacatcaatttttctacaacatcagaagtaagggggtcttttctgtgttaccagtatgacattgatatggtttggctctatcaatggtgtctccacccaaatctcaccttgaattgtaataatccccatgtgtcaatagtggaatcaagtggaggtaattggattttgggggcagttttccctacrcttttctcatgaaaataagtaagtatcacgagatctgatggtttcttaagcatctgacatttcgcctgcttgcactcactccttcgagctgccctgtgtgaaaggcccctgcttctcctttgccttccatcatgattctaagtttcctgaggcctccccagcaataggtaactatgagtcaattaaacatctttcctttgtaaattacccagttcttggtatttcctcatagcagtatgaaaatggactaatacagacattgatacgtaaaccattaatgatagcacatgaatgtgagaattac

SEQ ID NO: 35185 - DNA, 495 bp, Homo sapiens
tgcatataagcagcctagaaatttgtatgaaagaatattgttaaggaaattgtggaattgagaataatgtgtcaatrtcttctattctcaatgaggtactacctacttctccaaagtcacatgaaagacatgtatagaatcttttggaaatattaaaaggtgcttaccaagaaagaaaactgtcatcttgctctcagctacatccctgctgcactgcagaaaatgataggtacacttcatgctgcttctggaggcaagcgtgaaagtattcttgtcaattccccaggagtttgggatatagaaacattttcttgactcttgccttaagagcattaaggcatgactcttagaatctctcttctagataaaaggacttctaacagtgttacagaaacaagacaaaattgttttaagatattaagggtatttttccagaacaccctatatttcagctcaatgtatatgagaagtactgtttcagaaagaatcgcaggt

SEQ ID NO: 35186 - DNA, 854 bp, Homo sapiens
catgactgccttggctctatgctcagcttgagcctgaatcaggcgtgctgtgagtggcttctgtatagggcgcaggcgtctagaataggcgaaggttggtggtgcccaaaacctcagagatgccagcaatcgcggagccccaagtggtgttacagctcttgcttggggagtcccaaggtttgggccccaagaaaagttgcagctctttactctcgtagctcagccagtgggagcgtgttatagctgtctttctcctgtagtccggtgagcaggaatgtgttatagctctttcattccagccgcccacagctgagtgagttccaagttcttgtcctgtgaccaagaggaataaggtgtgtggacactggagagtaagtaaggcagagaagaattttattgagcgacagaaggaaagccctcaactgtgaraagggaccctgaaagtgggttgtcatctgtgaggctgagtctgggcttgtctgggtttacaatgggagaatgtgtgctgattggtccataggtgttctttgaaaaaatcaccatccaattggttaaaaagcatcatccggaaggaaccaatcaagagagagaaggtaagctggggatagaacttctaactctgatcatgaactctatctggaactagcagctcggttttcaggctttaaactgtcttcggcttgaaggtcgggtttcaccagggactcatccctgtttgcctaggagtgtgtctgtctcgtgtcactgtcaatattggcattaattatttaaagatgctggcttcaaaaagaactattccatcagcacattcagttccttgcccagcatttgccacaaaatcccataaacctaca

SEQ ID NO: 35187 - DNA, 523 bp, Homo sapiens
tttggtaataaactgcgatttttgtgttggggtggggagaaagcatacttggctagagggaatgtgggtccaagggccagaataggatgggaagcaggctggacaggtgtggctggtgtgatggccgcccagtgcggggcagggaggtggggggccactatgaagatccagtttcacaggcacggtggctgacacctataatcccagcactttgggaggccaaggcaggcgaatcacctgagatcaggagttcaagaccagcctggccaacttggtgaaaccccatctttcaaaatagaaaaaatttgctgggcgtggtggcaggcacctgtaatcctggctactccagagrctgaggcaggagaaccgcttgaagccaggaggcggaggttgcagtgagccaagattgagtcactgcacaccagcctgggcaacaagagcgaaactccatctcaaaaaggaaaaaacaggtccaatttccacactttaatctttggcgggagcgtgttgggagtgtacggca

SEQ ID NO: 35188 - DNA, 386 bp, Homo sapiens
attcttctctataagaagcatatggaataaacaaactgagaataagtatcctttcttaaataagatgtgtcatagaccacataactcttcctagaaataagcagcatagatgccataaagcaagtactggttaatactgagggtcaacttgattggattgaaggatgcaaagacctgttcctgggtgtgtctgtgaggatgttgccaaagaaaattaatagttgagtcagtggactaggggaggcagacccrctctctatctgggtggacaccatctaatcagctgtcagcatggctagaataaagctggcagaagaaagtggaatgaacagacttgctgagtcttctggccttcatctttctcccatgctggatgcttcctgtcc

SEQ ID NO: 35189 - DNA, 500 bp, Homo sapiens
atcatcttccaccaggtccctccctcgacacacagggataacagtttgagttgagatttgagtggggacatagatctaaaccatatcagttaactaggatattttatatgcaaactcataaaatatttcatttctattcaggactagtagtataacaggcacctgaaacacacaattttatggaattgtaaacctaaagtcatgtaactgtgttctatgtgtttcctattcccataggatatgcctttgcacccagctcagagagcccttcctgtcctctctagggagaattaaaccctctgtaacagcartgcctgttgcgtagagatctatgagggcatttattatgcttatgtatttgtttatattctgtcaccctcactaacttgtgagccctggatggcatattccatccattcttttttgctctataacatttcataccaattcatgagacagaggccacctcatatttgttgacttaattaaccaatgagcca

SEQ ID NO: 35190 - DNA, 1230 bp, Homo sapiens
gcaatgaaatgggtattcagcaaccatatactcgagtattttattaactcccaaacgaagacagaataatccacatattcagcagcttgattaagactcataggaggcaggggattttaagtagcaaatcaagcactgccctgtcttcacagacatgcaaacatattctgttttgttttgttttgttttgtttgagttggagttttgcttttgttgcccaggctggagtgcaatggcatgatctcagctcactgcaacttccgcctcccgggttcaagcgattctcctgcctcagcctcctgagtagctggaataacaggcatgcaccaccacgcctggctaattttgtatttttagtagagayggggtttctccatgttggtcaggctggtctcaaactcctgacctcaggtgatctgcccacctcagcttcccaaagtgctgggattacaggcttgagccatgcgcctggccacacatattgcagctggaacgtggtggcatagcagtctctatgtaagtggccatggaagatcacaacaaagggcagcagggcacaaagtccagagagccaggagcaaggggaattggtgatgctagaaatttagagctggaaagagcagaaaaaagagcatcctaaatagcgatgcttggtcttctccagcagtcatggaggagtcagggttcactgtgagaagagagacaccatttccacaaattgtctaatgagaatctggagaatgaccctcttattctctgtggatttgaattttctctgtaggcttcaatgagttaaagaaaatactcttcaaactacatactaagaagttcagtctttcttatggcaaataaagaaaacctagtaactttttaaaactctactttattattatgacttgagatgtttgtttctaaaattacaacccagtggactggctgtacatttttctatgtcatttgtatacaatctaaaaggtctaaataacttgattgtgaatactgtgtttgctgtaaaaaaaaaaaaagagagagagaaaaaaaggcacacttagatgagtggcctacgggtaaactatgaaagcagagattctactacacagataataatttttcattaaaaacttgtcaaggtttagttgataaatgtgattatcaataaattttacatcctgttatttaatcagcttatatatgtatctacagtcattgcataaacatggaattgtctgt

SEQ ID NO: 35191 - DNA, 1230 bp, Homo sapiens
gcaatgaaatgggtattcagcaaccatatactcgagtattttattaactcccaaacgaagacagaataatccacatattcagcagcttgattaagactcataggaggcaggggattttaagtagcaaatcaagcactgccctgtcttcacagacatgcaaacatattctgttttgttttgttttgttttgtttgagttggagttttgcttttgttgcccaggctggagtgcaatggcatgatctcagctcactgcaacttccgcctcccgggttcaagcgattctcctgcctcagcctcctgagtagctggaataacaggcatgcaccaccacgcctggctaattttgtatttttagtagagacggggtttctccatgttggtcaggctggtctcaaactcctgacctcaggtgatstgcccacctcagcttcccaaagtgctgggattacaggcttgagccatgcgcctggccacacatattgcagctggaacgtggtggcatagcagtctctatgtaagtggccatggaagatcacaacaaagggcagcagggcacaaagtccagagagccaggagcaaggggaattggtgatgctagaaatttagagctggaaagagcagaaaaaagagcatcctaaatagcgatgcttggtcttctccagcagtcatggaggagtcagggttcactgtgagaagagagacaccatttccacaaattgtctaatgagaatctggagaatgaccctcttattctctgtggatttgaattttctctgtaggcttcaatgagttaaagaaaatactcttcaaactacatactaagaagttcagtctttcttatggcaaataaagaaaacctagtaactttttaaaactctactttattattatgacttgagatgtttgtttctaaaattacaacccagtggactggctgtacatttttctatgtcatttgtatacaatctaaaaggtctaaataacttgattgtgaatactgtgtttgctgtaaaaaaaaaaaaagagagagagaaaaaaaggcacacttagatgagtggcctacgggtaaactatgaaagcagagattctactacacagataataatttttcattaaaaacttgtcaaggtttagttgataaatgtgattatcaataaattttacatcctgttatttaatcagcttatatatgtatctacagtcattgcataaacatggaattgtctgt

SEQ ID NO: 35192 - DNA, 1230 bp, Homo sapiens
gcaatgaaatgggtattcagcaaccatatactcgagtattttattaactcccaaacgaagacagaataatccacatattcagcagcttgattaagactcataggaggcaggggattttaagtagcaaatcaagcactgccctgtcttcacagacatgcaaacatattctgttttgttttgttttgttttgtttgagttggagttttgcttttgttgcccaggctggagtgcaatggcatgatctcagctcactgcaacttccgcctcccgggttcaagcgattctcctgcctcagcctcctgagtagctggaataacaggcatgcaccaccacgcctggctaattttgtatttttagtagagacggggtttctccatgttggtcaggctggtctcaaactcctgacctcaggtgatctgcccacctcagcttcccaaagtgctgggattacaggcttgagccatgcgcctggccacacatattgcagctggaacgtggtggcatagcagtctctatgtaagtggccatggaagatcacaacaaagggcagcagggcacaaagtccagagagccaggagcaaggggaattggtgatgctagaaattkagagctggaaagagcagaaaaaagagcatcctaaatagcgatgcttggtcttctccagcagtcatggaggagtcagggttcactgtgagaagagagacaccatttccacaaattgtctaatgagaatctggagaatgaccctcttattctctgtggatttgaattttctctgtaggcttcaatgagttaaagaaaatactcttcaaactacatactaagaagttcagtctttcttatggcaaataaagaaaacctagtaactttttaaaactctactttattattatgacttgagatgtttgtttctaaaattacaacccagtggactggctgtacatttttctatgtcatttgtatacaatctaaaaggtctaaataacttgattgtgaatactgtgtttgctgtaaaaaaaaaaaaagagagagagaaaaaaaggcacacttagatgagtggcctacgggtaaactatgaaagcagagattctactacacagataataatttttcattaaaaacttgtcaaggtttagttgataaatgtgattatcaataaattttacatcctgttatttaatcagcttatatatgtatctacagtcattgcataaacatggaattgtctgt

SEQ ID NO: 35193 - DNA, 593 bp, Homo sapiens
atttcagttaaatttttattcagtgttgcaatgaacaggtagggataaaggagaacatctccaagcagggtctccaacccccaggtcacagagtggtacaggtccacgttctgttaggaaccaggctgcatagcaggaggtgagcagtgggcgagcacacattactgcctgagctccgcctcctgtcaggtcagcagcagcatcagatcctcagaggagcatgaaccctattgtgaactgcgcatgtgagggatcttggtttcttgctccttatgagaatctaatgcttaatgatctgaggtggagcagtttcatcctgaaaccaccttctcccctgttcactggaaaaattgtcctccaygaaactggtccctggtgccaaaaaggttggggactgcctcttctcgagttaattaccattctagaagatgggttatcacactgacggattgtccatttgggggcagaggtggcagatacgcccccatggttgtgaacagagcattctgaaacattcttcaggagcccatttgtgaccgttgttctggttcttaagttagaaaaacgtccagatccaagctgaggtgttaaac

SEQ ID NO: 35194 - DNA, 1357 bp, Homo sapiens
ttacacaaaaatactcaatgtctatgattacaaaatgcaagtttacctttctaaaatgaaaaacaatctgaataccaaatccatctacccccaagagtttcagggaagggactgtgggcctatgtagtgactcaattaactctcccattagccctgttgacagggaaacttgatgttcccactaaaatgatggaggcagagtgagtagcagcctgaggtcatacagctaaggacacgccaaagcctgtactgacacttgagaagtttcytgatgttccgtcctagaatctcggggttggcgggacctcaaaggccagagagtctggccttcccatccagtgtttgggttccctgtgctgctggtgtcctagacaaactgccatgcagcctgtgcttgagcacccagaccaactggggcaggcgccaggcaccaggcaggcatgcaatggtggtcagccgccgacagactcagagctagatccccagagggatgggacctacagagaccccagaggctaaaggaccgcaggagggcggaggagtgggggatccagagagtcccagagacaggagggcccaccctgagcaccaccagtcaactcccaggcacatggcgcatacccaccggggcacgaaagagtcggttttctgcaaggtggtggggtccagctcaaagagagaggcgatgtcattgccatgaggcacagccaccaggcagtacttgatcttctccccagcattcctgcggcctgtgcggccctgtgccccctggatgaggaccccaaatcaggtagaaggccctccctcttctcaagcccatgaagcacctgggatcccacctgagatcccatctgtctccctccagcccacctcccaggttttcacggcctcccctgcccccgcctacccccagggcaggcccatggtctcactggagacctgctttgctcctcaccattcctgctgccttgggatctgaggcatcacctttgtaactggggttctcctggacagagatacaagatgtgggggagctactggacaccaaactatacccacacgacccactgcaaaacatggtcacctacatagggccctgggtttgggcaggcaggctgcaccctcccaggggtgcccatatcattccaggggagcccttcatggcccctctccatagaaccacaaatgaacatacacacatacacaccaatgctccaacacacacaagtgtgcgcattacagacagacgggaaattttgctcactttgtatcccctgtgcctagaatagtgcctggcacatagtaggagcacagtgatatttattaggcttatttacagtcatgcctttatttgata

SEQ ID NO: 35195 - DNA, 1357 bp, Homo sapiens
ttacacaaaaatactcaatgtctatgattacaaaatgcaagtttacctttctaaaatgaaaaacaatctgaataccaaatccatctacccccaagagtttcagggaagggactgtgggcctatgtagtgactcaattaactctcccattagccctgttgacagggaaacttgatgttcccactaaaatgatggaggcagagtgagtagcagcctgaggtcatacagctaaggacacgccaaagcctgtactgacacttgagaagtttcttgatgttccgtcctagaatctcggggttggcgggacctcaaaggccagagagtctggccttcccatccagtgtttgggttccctgtgctgctggtgtcctagacaaactgccatgcagcctgtgcttgagcacccagaccaactggggcaggcgccaggcaccaggcaggcatgcaatggtggtcagccgccgacagactcagagctagatccccagagggatgggacctacagagaccccagaggctaaaggaccgcaggagggcggaggagtgggggatccagagagtcccagagacaggagggcccaccctgagcaccaccagtcaactcccaggcacatggcgcatacccaccggggcacgaaagagtcggttttctgcaaggtggtggggtccagctcaaagagagaggcgatgtcattgccatgaggcacagccaccaggcagtacttgatcttctccccagcattcctgcggcctgtgcggccctgtgccccctggatgaggaccccaaatcaggtagaaggccctccctcttctcaagcccatgaagcacctgggatcccacctgagatcccatctgtctccctccagcccacctcccaggttttcacggcctcccctgcccccgcctacccccagggcaggcccatggtctcactggagacctgctttgctcctcaccattcctgctgccttgggatctgaggcatcacctttgtaactggggttctcctggacagagatacaagatgtgggggagctactggacaccaaactatacccacacgacccactgcaaaacatggtcacctacatagggccctgggtttgggcaggcaggctgcascctcccaggggtgcccatatcattccaggggagcccttcatggcccctctccatagaaccacaaatgaacatacacacatacacaccaatgctccaacacacacaagtgtgcgcattacagacagacgggaaattttgctcactttgtatcccctgtgcctagaatagtgcctggcacatagtaggagcacagtgatatttattaggcttatttacagtcatgcctttatttgata

SEQ ID NO: 35196 - DNA, 1357 bp, Homo sapiens
ttacacaaaaatactcaatgtctatgattacaaaatgcaagtttacctttctaaaatgaaaaacaatctgaataccaaatccatctacccccaagagtttcagggaagggactgtgggcctatgtagtgactcaattaactctcccattagccctgttgacagggaaacttgatgttcccactaaaatgatggaggcagagtgagtagcagcctgaggtcatacagctaaggacacgccaaagcctgtactgacacttgagaagtttcttgatgttccgtcctagaatctcggggttggcgggacctcaaaggccagagagtctggccttcccatccagtgtttgggttccctgtgctgctggtgtcctagacaaactgccatgcagcctgtgcttgagcacccagaccaactggggcaggcgccaggcaccaggcaggcatgcaatggtggtcagccgccgacagactcagagctagatccccagagggatgggacctacagagaccccagaggctaaaggaccgcaggagggcggaggagtgggggatccagagagtcccagagacaggagggcccaccctgagcaccaccagtcaactcccaggcacatggcgcatacccaccggggcacgaaagagtcggttttctgcaaggtggtggggtccagctcaaagagagaggcgatgtcattgccatgaggcacagccaccaggcagtacttgatcttctccccagcattcctgcggcctgtgcggccctgtgccccctggatgaggaccccaaatcaggtagaaggccctccctcttctcaagcccatgaagcacctgggatcccacctgagatcccatctgtctccctccagcccacctcccaggttttcacggcctcccctgcccccgcctacccccagggcaggcccatggtctcactggagacctgctttgctcctcaccattcctgctgccttgggatctgaggcatcacctttgtaactggggttctcctggacagagatacaagatgtgggggagctactggacaccaaactatacccacacgacccactgcaaaacatggtcacctacatagggccctgggtttgggcaggcaggctgcaccytcccaggggtgcccatatcattccaggggagcccttcatggcccctctccatagaaccacaaatgaacatacacacatacacaccaatgctccaacacacacaagtgtgcgcattacagacagacgggaaattttgctcactttgtatcccctgtgcctagaatagtgcctggcacatagtaggagcacagtgatatttattaggcttatttacagtcatgcctttatttgata

SEQ ID NO: 35197 - DNA, 1357 bp, Homo sapiens
ttacacaaaaatactcaatgtctatgattacaaaatgcaagtttacctttctaaaatgaaaaacaatctgaataccaaatccatctacccccaagagtttcagggaagggactgtgggcctatgtagtgactcaattaactctcccattagccctgttgacagggaaacttgatgttcccactaaaatgatggaggcagagtgagtagcagcctgaggtcatacagctaaggacacgccaaagcctgtactgacacttgagaagtttcttgatgttccgtcctagaatctcggggttggcgggacctcaaaggccagagagtctggccttcccatccagtgtttgggttccctgtgctgctggtgtcctagacaaactgccatgcagcctgtgcttgagcacccagaccaactggggcaggcgccaggcaccaggcaggcatgcaatggtggtcagccgccgacagactcagagctagatccccagagggatgggacctacagagaccccagaggctaaaggaccgcaggagggcggaggagtgggggatccagagagtcccagagacaggagggcccaccctgagcaccaccagtcaactcccaggcacatggcgcatacccaccggggcacgaaagagtcggttttctgcaaggtggtggggtccagctcaaagagagaggcgatgtcattgccatgaggcacagccaccaggcagtacttgatcttctccccagcattcctgcggcctgtgcggccctgtgccccctggatgaggaccccaaatcaggtagaaggccctccctcttctcaagcccatgaagcacctgggatcccacctgagatcccatctgtctccctccagcccacctcccaggttttcacggcctcccctgcccccgcctacccccagggcaggcccatggtctcactggagacctgctttgctcctcaccattcctgctgccttgggatctgaggcatcacctttgtaactggggttctcctggacagagatacaagatgtgggggagctactggacaccaaactatacccacacgacccactgcaaaacatggtcacctacatagggccctgggtttgggcaggcaggctgcaccckcccaggggtgcccatatcattccaggggagcccttcatggcccctctccatagaaccacaaatgaacatacacacatacacaccaatgctccaacacacacaagtgtgcgcattacagacagacgggaaattttgctcactttgtatcccctgtgcctagaatagtgcctggcacatagtaggagcacagtgatatttattaggcttatttacagtcatgcctttatttgata

SEQ ID NO: 35198 - DNA, 1357 bp, Homo sapiens
ttacacaaaaatactcaatgtctatgattacaaaatgcaagtttacctttctaaaatgaaaaacaatctgaataccaaatccatctacccccaagagtttcagggaagggactgtgggcctatgtagtgactcaattaactctcccattagccctgttgacagggaaacttgatgttcccactaaaatgatggaggcagagtgagtagcagcctgaggtcatacagctaaggacacgccaaagcctgtactgacacttgagaagtttcttgatgttccgtcctagaatctcggggttggcgggacctcaaaggccagagagtctggccttcccatccagtgtttgggttccctgtgctgctggtgtcctagacaaactgccatgcagcctgtgcttgagcacccagaccaactggggcaggcgccaggcaccaggcaggcatgcaatggtggtcagccgccgacagactcagagctagatccccagagggatgggacctacagagaccccagaggctaaaggaccgcaggagggcggaggagtgggggatccagagagtcccagagacaggagggcccaccctgagcaccaccagtcaactcccaggcacatggcgcatacccaccggggcacgaaagagtcggttttctgcaaggtggtggggtccagctcaaagagagaggcgatgtcattgccatgaggcacagccaccaggcagtacttgatcttctccccagcattcctgcggcctgtgcggccctgtgccccctggatgaggaccccaaatcaggtagaaggccctccctcttctcaagcccatgaagcacctgggatcccacctgagatcccatctgtctccctccagcccacctcccaggttttcacggcctcccctgcccccgcctacccccagggcaggcccatggtctcactggagacctgctttgctcctcaccattcctgctgccttgggatctgaggcatcacctttgtaactggggttctcctggacagagatacaagatgtgggggagctactggacaccaaactatacccacacgacccactgcaaaacatggtcacctacatagggccctgggtttgggcaggcaggctgcaccctcscaggggtgcccatatcattccaggggagcccttcatggcccctctccatagaaccacaaatgaacatacacacatacacaccaatgctccaacacacacaagtgtgcgcattacagacagacgggaaattttgctcactttgtatcccctgtgcctagaatagtgcctggcacatagtaggagcacagtgatatttattaggcttatttacagtcatgcctttatttgata

SEQ ID NO: 35199 - DNA, 1357 bp, Homo sapiens
ttacacaaaaatactcaatgtctatgattacaaaatgcaagtttacctttctaaaatgaaaaacaatctgaataccaaatccatctacccccaagagtttcagggaagggactgtgggcctatgtagtgactcaattaactctcccattagccctgttgacagggaaacttgatgttcccactaaaatgatggaggcagagtgagtagcagcctgaggtcatacagctaaggacacgccaaagcctgtactgacacttgagaagtttcttgatgttccgtcctagaatctcggggttggcgggacctcaaaggccagagagtctggccttcccatccagtgtttgggttccctgtgctgctggtgtcctagacaaactgccatgcagcctgtgcttgagcacccagaccaactggggcaggcgccaggcaccaggcaggcatgcaatggtggtcagccgccgacagactcagagctagatccccagagggatgggacctacagagaccccagaggctaaaggaccgcaggagggcggaggagtgggggatccagagagtcccagagacaggagggcccaccctgagcaccaccagtcaactcccaggcacatggcgcatacccaccggggcacgaaagagtcggttttctgcaaggtggtggggtccagctcaaagagagaggcgatgtcattgccatgaggcacagccaccaggcagtacttgatcttctccccagcattcctgcggcctgtgcggccctgtgccccctggatgaggaccccaaatcaggtagaaggccctccctcttctcaagcccatgaagcacctgggatcccacctgagatcccatctgtctccctccagcccacctcccaggttttcacggcctcccctgcccccgcctacccccagggcaggcccatggtctcactggagacctgctttgctcctcaccattcctgctgccttgggatctgaggcatcacctttgtaactggggttctcctggacagagatacaagatgtgggggagctactggacaccaaactatacccacacgacccactgcaaaacatggtcacctacatagggccctgggtttgggcaggcaggctgcaccctcccaggggtgcccatatcattccaggggagcccttcatggcccctctccatagaaccacaaatgaacatacacacatacacaccaatgctccaacacacacaagtgtgcgcattacagacagacgggaaattttgctcactytgtatcccctgtgcctagaatagtgcctggcacatagtaggagcacagtgatatttattaggcttatttacagtcatgcctttatttgata

SEQ ID NO: 35200 - DNA, 1213 bp, Homo sapiens
ttgggaaccagacaccgcgagggagaacaagcccacaaaatagacactaaaaacagacacaggcagagacttcagacgcagacatcacctgtaaaacagatatgtcttctctgcttcaatcaattaaaaaaaaaaaaagcttgaagatccctgcagagaacagaaaacgataaaaaaaaatgacatagcagactgaaaaaagaaccaagtagaacttctagaaataaaaaaagcttcaataaccaaaatttaaaactcactggacatatttaaccagagaatagccagagctgaagaaagaattaatgaaaccataacagcccttatagggtggatgcattccaattctaycctatccatttctgtcgatgatggctgagcccattcaagtgacttcacagcccactagcgggtcagagcctgtgcctgcatgagacacactgccctgaagcatccccgggagagcagtgaagtcagaaaagagccctccctgctcctcctgactcctccgtatctttcttggaaacttaataactggaacttgtaagattcaactttttctctcacatagatcctccctcagagccttgcccacacatacacatgccagaagatgctgagtgaatgaataaacaagtgggtagactcggggcccgtcgccatacacatcccatgcttctactgcgctgtgctccttgcccaaaggcagccctgtcagaaccccagaaggggcctgagccttccctgtcactaaaccacagggctgaagggcagagagaaggagggtggatgggtagccaggagactgggcccacacaggagttgcagcatcaaagaccatgagaaaaggtggagggtccagggaggtttcctaaagtaaggattgtgtgtcccggggtgtgtacctgtggatgaaggggcacagggctggtgaggctgcaggcaagaggctattcatttattaaataaggtcagtcaacattcatccaatactgactaaggtgcctaccactccaaatgcccactgccactgcataccatcattccagggcaagggggatagctttaaaatacacaaactcccaggtcctccacagatcttggcaggtctcgggtgaggtctaggaatatgcatttttaaaggcacctctcccccactccctttctaccccacatggttctgctgctcaatcaagcaccagagtagaggatc

SEQ ID NO: 35201 - DNA, 877 bp, Homo sapiens
aggagcggttgagactgccagccggccagcaagggaaagcaggcccacgcctgttcttggcaggagagcaaggccaatgccactgctttatcccttaccctaggtgggagcagcagaggccagggmtggagtagctgattagggccaacaaaaagtggaggattgaatgtggcctcaggccagtggctagggagaactggccttgggtacacagggtggacccatcaggatctcaagtcatctcttgaagatctctttttttttttttgagacagagtttcactcttgttgcccaggctggagtacaatggggcgatcttagttcactgcaacctcagcctcctgggttcaagcgattcttctgcctcagcctcccgagtagctgggattacaggcatgtgcctccacacccagctaattttgtatttttagtagagactgggtttctccatgttggtcaggctggtctcaaactcccgacctcagatgatccgcctgcctcggcctcccaaagtgttgggattacagccgcgagccactgtgcctggcgaagatctcttatgagtacccagagaggtagccccagacccacagaaagtaaactgggggagtgcaggtgaactgggtcttggagctgagctttcaacatttgtcaaagtgcctctgcccacccatggctcagccttggagcctatttggagctctcagggcctctggacctggatcacccagggctgggtaatcatagtgagtaggagatgctgcctcttacccatgggattctctgtctacctgccagcctgacctgcttccctggaggtcaggacccaagaagtatgggggtgaatatagacgaagccccaggtctccaggctca

SEQ ID NO: 35202 - DNA, 641 bp, Homo sapiens
gtccaaaatctgcagggttggttggcaggctgaaaacccagggaaagacaatgctgtggtacaggtctgaaggcaggcatgtggacacccaggagaagctgatggtgcagataaaggcaagaggcagtattctcaagaatcccctcttgcttgggaaggttggtcttgttctrttcaagccttcacatgattggacagggcccacctatatttggagggcattgttttactcaaagtccactaattctaatgttattttcatctataaacaccctcacagaaacaccaagaataaataatgtttgtccacatatctgggcactgtggcccagtgaagttgctacatacaattaagcatcacagtgtctgtcctaagaatgtgtggtgcacagccctgaacatgggactgtgatgctccgtgatggtgcagggtgtgtaatacatcactgcgttacagacctatagactgtaccgcagaaagagtgaatgtgaaccagtgtaacctgtggaccctgggtcagtgtaggttcatgggttgtaacgtgtaccgctctggtggatgtatgcacatgttacacaagagtgtgtaatacatactctttctacagacctctggggttggtgccctgcagcatcacaca

SEQ ID NO: 35203 - DNA, 641 bp, Homo sapiens
gtccaaaatctgcagggttggttggcaggctgaaaacccagggaaagacaatgctgtggtacaggtctgaaggcaggcatgtggacacccaggagaagctgatggtgcagataaaggcaagaggcagtattctcaagaatcccctcttgcttgggaaggttggtcttgttctattcaagccttcacatgattggacagggcccacctatatttggagggcattgttttactcaaagtccactaattctaatgttattttcatctataaacaccctcacagaaacaccaagaataaataatgtttgtccacatatctgggcactgtggcccagtgaagttgctacatacaattaagcatcacagtgtctgtcctaagaatgtgtggtgcacmgccctgaacatgggactgtgatgctccgtgatggtgcagggtgtgtaatacatcactgcgttacagacctatagactgtaccgcagaaagagtgaatgtgaaccagtgtaacctgtggaccctgggtcagtgtaggttcatgggttgtaacgtgtaccgctctggtggatgtatgcacatgttacacaagagtgtgtaatacatactctttctacagacctctggggttggtgccctgcagcatcacaca

SEQ ID NO: 35204 - DNA, 641 bp, Homo sapiens
gtccaaaatctgcagggttggttggcaggctgaaaacccagggaaagacaatgctgtggtacaggtctgaaggcaggcatgtggacacccaggagaagctgatggtgcagataaaggcaagaggcagtattctcaagaatcccctcttgcttgggaaggttggtcttgttctattcaagccttcacatgattggacagggcccacctatatttggagggcattgttttactcaaagtccactaattctaatgttattttcatctataaacaccctcacagaaacaccaagaataaataatgtttgtccacatatctgggcactgtggcccagtgaagttgctacatacaattaagcatcacagtgtctgtcctaagaatgtgtggtgcacagccctgaacatgggactgtgatgctccrtgatggtgcagggtgtgtaatacatcactgcgttacagacctatagactgtaccgcagaaagagtgaatgtgaaccagtgtaacctgtggaccctgggtcagtgtaggttcatgggttgtaacgtgtaccgctctggtggatgtatgcacatgttacacaagagtgtgtaatacatactctttctacagacctctggggttggtgccctgcagcatcacaca

SEQ ID NO: 35205 - DNA, 641 bp, Homo sapiens
gtccaaaatctgcagggttggttggcaggctgaaaacccagggaaagacaatgctgtggtacaggtctgaaggcaggcatgtggacacccaggagaagctgatggtgcagataaaggcaagaggcagtattctcaagaatcccctcttgcttgggaaggttggtcttgttctattcaagccttcacatgattggacagggcccacctatatttggagggcattgttttactcaaagtccactaattctaatgttattttcatctataaacaccctcacagaaacaccaagaataaataatgtttgtccacatatctgggcactgtggcccagtgaagttgctacatacaattaagcatcacagtgtctgtcctaagaatgtgtggtgcacagccctgaacatgggactgtgatgctccgtgatggtgcagggtgtgtaatacatcactgcgttacagacctatagactgtaycgcagaaagagtgaatgtgaaccagtgtaacctgtggaccctgggtcagtgtaggttcatgggttgtaacgtgtaccgctctggtggatgtatgcacatgttacacaagagtgtgtaatacatactctttctacagacctctggggttggtgccctgcagcatcacaca

SEQ ID NO: 35206 - DNA, 791 bp, Homo sapiens
ccacccctggctaatttttttattttttgtacagacagggtttcaccatgttgcccaggctggtctcaaactcctgggttcaagtgatccgcccacctcggcctcggtttcccaaagtgccaggattacaggcatgagccactgtgcctggccttgcttttcttgtatagaaaaaaaattctacctcattgtcatttccaaacataccctcagttctgcccctggaagcaaaacaaattggtactggaaaaaatgaacaatccttctggcttcaggagccccaattatttttggagagcatttgttgcttattagagggaccttgacaacaaaagcctcacaattcattacttaacaggagaatactcatcttcctattggatttgacaagggggctataataagttcttctaaaagcaagcccagaccacttaattataaattgtaaatgaagatttttttaaaaatccttgtttcacagaacttcacacatstatgtacaaaatcaaaagactgtgagtgtctacactgatttttgttaagtgtagtgcagatttttataagggcattaatatttggttcacagagagaccaaagaaaaatttaaataattgttgcattatctctggcagatttctccataaggtgaaaggaaatatggaagtggtcagtgtttgggaatgaaatccaattgttcctcatataaaataaggtaatgagaaatccagacccaaagttctaaggagaaaacgggtacaagtttagaaggaaaaactatcggagtaaatgaa

SEQ ID NO: 35207 - DNA, 612 bp, Homo sapiens
gcccattccctggaagttataacccaactctgctctcaggcactgtgccaggtctgggtacacagtaatgagcacatgagacatggcccctgctcttgatgagcttatagaatagtggaaaacatggtcattaagcaggtaatcacaaaatatgatgtcattgcatttgtaacacacagtatgagggaaaaacataggctacactaagatcatataacatctaatttaccctgagtggggaatggggaaagcacctgaagaagtgtcatttaggttgaaaaccgagagaaggggaattttccaggtggagatgggtgaaagggtgtgggaaatgtggagggacagcatgttagaaggccatgaaatggtagagtttggcattggaaaaagggaaagctagatcttaaagaataaaagaaagaatggccagagatgacactacagagagagacagttaccttggctaataaagtcttctaggctatgttaagaattttgaaaaatttcctctcagtatcaggaagtcattgaggggtttaaagcagtggaatggtgtgatctggtttgcattttaaaaatatsattttggccactgtggggcagaataatcaa

SEQ ID NO: 35208 - DNA, 904 bp, Homo sapiens
ctgcacagtgagttaatccatatgcaaacacagtgaccccaattgctttgcaatcgtgagccacatggcctgtgcccttaaaatacatcatttgggcagctgccagagggttgatttatcccagctggccagaaacagccccgagatcatcagcacttttgttaattgagagagaggggcagaggaatcaagatattcctgggcaccaagcattcattagccacctggcctccctaaattatgatcctgccatgattttcccagtgcttcgactgaaattttaatatttggaatgtattaataactcrgaacatgtcatttcctaaataaacgatgcccttctggactcattggagaagagagcccagagaatggttgaatagcacagatattggctacccagtgagatgagcagtgcgggggtgaccctggaagttctatccacaaagcaaatacaaacagatgccatatatgaatggacctctgggttaataccccggctttctatgcatttgttctattcacgtagcatcttaacagggccagccccaggaaaaatggtgaaatagatgataatagtagctagcaattctagagcacttactatgcacatgccacgtagattacacgagacccccacagggcactggtacatctcatggggatgtttgcttcataaaggcagggacttagtctgtcttaatcacctttttataatccccagcactgagaacagtttctggtacacagtacctgctcaataaatatctggcaagtgaataaatgagtctccatgttagaagaggtagttgaggtatagcagagttggtaacctgtccaggttgtacaactctagaaagtgacagaagcaggattcataaccttgttcaccaccaagaggatc

SEQ ID NO: 35209 - DNA, 1283 bp, Homo sapiens
gagagtagagggacaaaaggacgataacacaacatcatktgtgtttcttcaatatgcacgcaggcacagagacaggaagtgcatcacaacaggcccagcctcagccccggccacaatgcaccagctgtgtggccctggcccagttcccaggcctctcaatacctccgtttctcccgcaaagcgatgcctgcttcctcagcactggtacaggtttaaatgagttaattcggtgaagtcactggaaccacgcctagcacagaatacacaccacttatttataaaataagtcagtcagccgggcgcggtggctcacgcctgtaatcccagcactctgggaggccaaggcgggtggatcacctgtggtcaggagttcaagaacagcctggccaacatggtgaagccccgtctctattaaaaatacaaaaattagtggggcgtggtggtacacgcctgtagtcccagctactggggaggctgaggcaggagaatcgcttgaatccgggaggcagaggttgcagtgagccaaaatcgcaccattgcactccagcctgggtgacaagagtgaactccatctaaaaaaataaataaataaataagccagtcagcaaatactacctaaggacatctcagatcatgtgacacgcctgaaatggaaagctcaagagcagatgggggacaagaggaggacaaacgtccgcacgcgggggtcccactcatcatggttacactcctggacatgaccctacctgatgggaaacttccccagggagggtgtttaggcagtgacaggtggcaggcaggggctacgtgggtcaccccacagggcacagcacacagtgaagagaaaggagagagtgggacctaggaagaaactggggaggaagcaaaacacaagttccaggggccggccatctaaccagatccaccacacaaatggcagccagatgccagagggggagaggcacatcacgcacaattctcaggaaacagaaactgccttacacacctcaaacactgcaatttgacatcaaaaagtatcttgctcacctacagtcattctccacatagcagcaatggtcgtattttctatgggtaaaagatcaggcttaaaatcctccagcagcttctggccatcattagactaaaatccacacttccatcaacctacagaagggggctcagagtcctaggcagagcatggtgctggtgacagactacctgtgtggctgatagggtttggctgtgtccccaaccaactctttatcttgacttctacttccaga

SEQ ID NO: 35210 - DNA, 1283 bp, Homo sapiens
gagagtagagggacaaaaggacgataacacaacatcatttgtgtttcttcaatatgcacgcaggcacagagacaggaagtgcatcacaacaggcccagcctcagccccggccacaatgcaccagctgtgtggccctggcccagttcccaggcctctcaatacctccgtttctcccgcaaagcgatgcctgcttcctcagcactggtacaggtttaaatgagttaattcggtgaagtcactggaaccacgcctagcacagaatacacaccacttatttataaaataagtcagtcagccrggcgcggtggctcacgcctgtaatcccagcactctgggaggccaaggcgggtggatcacctgtggtcaggagttcaagaacagcctggccaacatggtgaagccccgtctctattaaaaatacaaaaattagtggggcgtggtggtacacgcctgtagtcccagctactggggaggctgaggcaggagaatcgcttgaatccgggaggcagaggttgcagtgagccaaaatcgcaccattgcactccagcctgggtgacaagagtgaactccatctaaaaaaataaataaataaataagccagtcagcaaatactacctaaggacatctcagatcatgtgacacgcctgaaatggaaagctcaagagcagatgggggacaagaggaggacaaacgtccgcacgcgggggtcccactcatcatggttacactcctggacatgaccctacctgatgggaaacttccccagggagggtgtttaggcagtgacaggtggcaggcaggggctacgtgggtcaccccacagggcacagcacacagtgaagagaaaggagagagtgggacctaggaagaaactggggaggaagcaaaacacaagttccaggggccggccatctaaccagatccaccacacaaatggcagccagatgccagagggggagaggcacatcacgcacaattctcaggaaacagaaactgccttacacacctcaaacactgcaatttgacatcaaaaagtatcttgctcacctacagtcattctccacatagcagcaatggtcgtattttctatgggtaaaagatcaggcttaaaatcctccagcagcttctggccatcattagactaaaatccacacttccatcaacctacagaagggggctcagagtcctaggcagagcatggtgctggtgacagactacctgtgtggctgatagggtttggctgtgtccccaaccaactctttatcttgacttctacttccaga

SEQ ID NO: 35211 - DNA, 872 bp, Homo sapiens
ggagttgaccaaatacaaggaaaaataagtcaaagattgccactaatgtaagagaagtggcatgatgcatgaggagacctgctcacaagaaggtgcacagatgtcaaattatgaaaaagaagcagtaaaaatggaggcaacaaaagaccattgtgttcccgtacccaagtgcgagctcagcgaggggagaggcacccggccwtctgttcactgtgcatcctggtgcctttaacagagctgcacagagcaggcgcccaataaacagttattaatgagtgggtccccaggccagtctgtcctgcagtacgatgctggggcagatggaaggtgggcactcaggaggaagctgagagtgcaagccccgcagcacaagacggtggcacagctccacgtggtggagctgctcagactccattgcaccacaccttttcaccgtttcccaacacaggtgcagaaaatgaaatgctcacaagaaaatgactgctgcacaaaaacaccaatcaactgctgtttcacaccaacaattcaaaggtctcgtgggttcatagttatatctactcaagaagaaaatgaagattgggagtaggggaagaaataacaaaacaaatgcgcattttccccagaattcaaaacatacacatgtttagagggtttactttgttgttatcatgttgagtggtttaaaattttaataaattctttaaaataaattattttccatttctatagaacatgcaattgctacataagcttaggtacaaagaaggtttagacgacacagatttagtaccatgagactatacatttgatttaatagcattagactacacagatttagtatcacatactgacatattaagcagcaaatttta

SEQ ID NO: 35212 - DNA, 872 bp, Homo sapiens
ggagttgaccaaatacaaggaaaaataagtcaaagattgccactaatgtaagagaagtggcatgatgcatgaggagacctgctcacaagaaggtgcacagatgtcaaattatgaaaaagaagcagtaaaaatggaggcaacaaaagaccattgtgttcccgtacccaagtgcgagctcagcgaggggagaggcacccggccatctgttcactgtgcatcctggtgcctttaacagagctgcacagagcaggcgcccaataaacagttattaatgagtgggtccccaggccagtctgtcctgcagtacgatgctggggcagatggaaggtgggcactcaggaggaagctgagagtgcaagccccgcagcacaagacggtggcacagctccacrtggtggagctgctcagactccattgcaccacaccttttcaccgtttcccaacacaggtgcagaaaatgaaatgctcacaagaaaatgactgctgcacaaaaacaccaatcaactgctgtttcacaccaacaattcaaaggtctcgtgggttcatagttatatctactcaagaagaaaatgaagattgggagtaggggaagaaataacaaaacaaatgcgcattttccccagaattcaaaacatacacatgtttagagggtttactttgttgttatcatgttgagtggtttaaaattttaataaattctttaaaataaattattttccatttctatagaacatgcaattgctacataagcttaggtacaaagaaggtttagacgacacagatttagtaccatgagactatacatttgatttaatagcattagactacacagatttagtatcacatactgacatattaagcagcaaatttta

SEQ ID NO: 35213 - DNA, 565 bp, Homo sapiens
agtggtgaaaatgcacatgtcaaaccaaagctctgctcctcaacgtgggtgatgctctgaacgtaacattaaatgaaagaggccaggtgtagaaatacactaaattattcagtttatgtaaagtgttaaaaaaagttgaaccatagcatatagggatgcaagcttaggtggcaaaagtgtaaagaaaagaatgtgattcccctaaacaccaggcctgttttgaccaggtggaaaatgcccttgggatggagttttctgacttggagaggtaagggaacatggcagactcgggrctcatgggccttccctgtgtcacggggggacctcccaccccaaagggctgccacagttaggatcctttaagcttttcaagaaggcgggcgcatctccggtgccgttctctgagtgaggaacacgttgacagaagtgggttgtccagatatgatcaaggcaggggtcgaaatggacctcctgatgggaagtccctctgggaggagtgtcagctcccaggcaagggctcgctttgcccctccatggcactgacctgctcagggcctcagccacc

SEQ ID NO: 35214 - DNA, 565 bp, Homo sapiens
agtggtgaaaatgcacatgtcaaaccaaagctctgctcctcaacgtgggtgatgctctgaacgtaacattaaatgaaagaggccaggtgtagaaatacactaaattattcagtttatgtaaagtgttaaaaaaagttgaaccatagcatatagggatgcaagcttaggtggcaaaagtgtaaagaaaagaatgtgattcccctaaacaccaggcctgttttgaccaggtggaaaatgcccttgggatggagttttctgacttggagaggtaagggaacatggcagactcggggctcrtgggccttccctgtgtcacggggggacctcccaccccaaagggctgccacagttaggatcctttaagcttttcaagaaggcgggcgcatctccggtgccgttctctgagtgaggaacacgttgacagaagtgggttgtccagatatgatcaaggcaggggtcgaaatggacctcctgatgggaagtccctctgggaggagtgtcagctcccaggcaagggctcgctttgcccctccatggcactgacctgctcagggcctcagccacc

SEQ ID NO: 35215 - DNA, 565 bp, Homo sapiens
agtggtgaaaatgcacatgtcaaaccaaagctctgctcctcaacgtgggtgatgctctgaacgtaacattaaatgaaagaggccaggtgtagaaatacactaaattattcagtttatgtaaagtgttaaaaaaagttgaaccatagcatatagggatgcaagcttaggtggcaaaagtgtaaagaaaagaatgtgattcccctaaacaccaggcctgttttgaccaggtggaaaatgcccttgggatggagttttctgacttggagaggtaagggaacatggcagactcggggctcatgggccttccctgtgtcacggggggacctcccaccccaaagggctgccacagttaggatcctttaagcttttcaagaaggcrggcgcatctccggtgccgttctctgagtgaggaacacgttgacagaagtgggttgtccagatatgatcaaggcaggggtcgaaatggacctcctgatgggaagtccctctgggaggagtgtcagctcccaggcaagggctcgctttgcccctccatggcactgacctgctcagggcctcagccacc

SEQ ID NO: 35216 - DNA, 724 bp, Homo sapiens
tgtgaggctgctgaactcctctggaaagggtcgtctgccaggagctctccccgccctgcttcctttacctcccacggcgcgccgcacactcattgtcttccctttttctccctttgggtcaaaactggcattaaactttctgtccttttgattcaagttttaaaattctgaaataatcctcaggccatgctgctaatyctaactcctgtatgcttaagtgtgaaataattacacgttccctcccgaactcccaagcagccattgtgtgagccccgcgcttctgtgggctctgtcgtgcgccgtgcctggcgctgctgcgcggaaatgtattatctcctaatcgttagaggcccctgcattattctgtgtaattaacttgacattattttgctcagaaatttaattcattctggatcttagtttcaaataaagatttgcaggatgcgtaattgagaaaataacaaaaccacaacacaaacccacagctgctccccacaccggttcccaggttctttagcggagagcggagtggctttgttttcgggggtgacacttgtgtatgtctgtgcttttgcagtgtgtgatgttcctctgtatgacatttgtgactacaacgtctccagggaccgatgccaggagctcgggtgctgcttctacgaaggcgtctgctacaagaaagcggttcccagtgagtagacgccccggccaccccgtggcggaagcc

SEQ ID NO: 35217 - DNA, 913 bp, Homo sapiens
ggaacagtgcagcccttaccggtggagatgatggacgtggctgatgagctctcacagctctaggcttccttggagatgagttccaaaccctccctgtcctaagccactcttttctccacccccagcaccccaaagtgagtaaaggcccctggctttgtgcagctcagggccacttcttcttccttttacttctttctcctgcatttcccgctagactgagccttcagagaccaggcaccaggtcctcttcgttccctgtatctagtaggrcttagaaagtcgggaaacgttagtgactgatgggaatgagtgactgatggaaatttccaagtagtgacctgctggtggaacctagcacaagcttggctgctcaccgcttgcaaagcctgtaacaaatgaagggaaagtgactttatttccaaagctagcagtggggaagtggctgacttgcgcttccaactttaggctgggaagaggggcttaaaaagaggcactcagaatgggaggcacatgggaggggtgcttctacaaggtctgagggtctcgttccagtggctgtcgcaagccacagcccacctggagcgggaggtgtcatcatcttgatggctggttgtagactcaccgccttcaggtgatctctggcattttgcagctggttctctatgcttggtctatctcaagatgagcccctagaacttgtaagtaagctcataattaaataccagcacacagttagataaatgtgcatggggctagggggcgcgtggtgagaaagggagaccatggtgttgcaaagaaagtacatttcaaggctatattttaagactaaggagaacaaaagttttttgcagtaagctttctgcatcgtgagactaggggaagaagagaaaaaggaaaaaaaaagttttaaaac

SEQ ID NO: 35218 - DNA, 913 bp, Homo sapiens
ggaacagtgcagcccttaccggtggagatgatggacgtggctgatgagctctcacagctctaggcttccttggagatgagttccaaaccctccctgtcctaagccactcttttctccacccccagcaccccaaagtgagtaaaggcccctggctttgtgcagctcagggccacttcttcttccttttacttctttctcctgcatttcccgctagactgagccttcagagaccaggcaccaggtcctcttcgttccctgtatctagtagggcttagaaagtcgggaaacgttagtgactgatgggaatgagtgactgatggaaatttccaagtagtgacctgctggtggaacctagcacaagcttggctgctcaccgcttgcaaagcctgtaacaaatgaagggaaagtgactttatttccaaagctagcagtggggaagtggctgacttgcgcttccaactttaggctgggaagaggggcttaaaaagaggcactcagaatgggaggcacatgggaggggtgcttctacaaggtctgagggtctcgttccagtggctgtcgcaagccacagcccacctggagcgggaggtgtcatcatcttgatggctggttgtagactcaccgccttcaggtgatctctggcattttgcagctggttctctatgcttggtctatctcaagatgagcccctagaacttgtaagtaagcycataattaaataccagcacacagttagataaatgtgcatggggctagggggcgcgtggtgagaaagggagaccatggtgttgcaaagaaagtacatttcaaggctatattttaagactaaggagaacaaaagttttttgcagtaagctttctgcatcgtgagactaggggaagaagagaaaaaggaaaaaaaaagttttaaaac

SEQ ID NO: 35219 - DNA, 601 bp, Homo sapiens
ctgtcacagggtatatatgcaaatgggtagcaaaaggaatttttatttggaatttctctgtattccagttaaggtggtagttacacaactatacacgtgttaaaatccatacaactgtgcacttaaaatgaagtcaattctatatagtaattctaaaagtaaaaacatgactacttaaaaataatatatactatgatttttatagtatatgtaaaagtaaaatgtattgcagtaacagcatagagtctggaagtgggaaaattaagtgtgctgttgtagaattttacatcatacatgagatgacatatttgaaggtgtactgtaatgagttasgaatgctactgtaaatttcagagtagccagcaaaaataagaatatagagatgtatactaatatggccaaaatttgattcaagtactcaattaaaacaaatgaatgtaagcagtttgggcaggggaaagaaacaaaaaacagatggaacagatttttaaatagcaatatgctggaccttatcaataattacactgaaggtaaatgaactaaatcctccagttaaaaggcagaataaattgtcagactggataaaaaaacaaaaacaaaa

SEQ ID NO: 35220 - DNA, 601 bp, Homo sapiens
ctgtcacagggtatatatgcaaatgggtagcaaaaggaatttttatttggaatttctctgtattccagttaaggtggtagttacacaactatacacgtgttaaaatccatacaactgtgcacttaaaatgaagtcaattctatatagtaattctaaaagtaaaaacatgactacttaaaaataatatatactatgatttttatagtatatgtaaaagtaaaatgtattgcagtaacagcatagagtctggaagtgggaaaattaagtgtgctgttgtagaattttacatcatacatgagatgacatatttgaaggtgtactgtaatgagttacgawtgctactgtaaatttcagagtagccagcaaaaataagaatatagagatgtatactaatatggccaaaatttgattcaagtactcaattaaaacaaatgaatgtaagcagtttgggcaggggaaagaaacaaaaaacagatggaacagatttttaaatagcaatatgctggaccttatcaataattacactgaaggtaaatgaactaaatcctccagttaaaaggcagaataaattgtcagactggataaaaaaacaaaaacaaaa

SEQ ID NO: 35221 - DNA, 1264 bp, Homo sapiens
agtttcatgatactttgagtacagaatgatcaaaaagtttgattggattgaacattcttttaaaaatccatgtgattttataccttgatcatagagaataaggtgaacatttgtttacccctaaaacttgtaaaccccacagaaagctgcatttcagtatatagtaaaaacaacattagtactgcccttatttatagtcacaatcccattgtatttctttgacttctttttcttttcttttcttttcttttttttttttgtgggacagagtctcgcactgtcgcctgggctggagtgcagtggtgccatctcagcccactgcaacctccacctcccgggttcaagcgattctcctgcctcagcctcccaartagctgggattacaggcacccaccaccacacctggctaatttttttgtatttttagtagagacagggtttcactatgttggccaggcttcttttttaatgaaaaaagggttggcataaatacagccaactgatcttcaacaaagcaaacaaaaacataaagtggggaaagcacaccctattcaacaaatggtgctgggataattggcaagccacatgtagaagaatgaaactggatcctcatctctcaacttatatacaaaaatcaactcaagatggatcaaggacttaaatctaagacctgaaaccataaaaatcctagaagataacatcagaaaaacccttctcgacattggcttaagcaaagacttcatgaccaagaacccaaaagcaaatgcaacaaaaacaatgattaacacattcattgaggagaagggtggcagagcagttccctgagcactgacagtcaaggacagtttgttcagtgaggctttagactggagagaagataagtgaaaacagagacagaggtgacagccagcctgcaggagccactacagatacccggagtatgagtcatcagtcagacacccttcctgtgccatctggccagatgagaggccaggtcctcagagaccagagcatctatacccagctgttgagatgatgctgcacttgcggtagaccatgagggagtacttcatgcagctgatgagcaggcagggccctgccgctggaagaatggaggcacactcaggccatccgtgagcatgaagcccttctgggtcgcttaatgtgccagatgatccagctcctatagtctggggccataagtggcctggagctccaagtgcctcttccttcccaggactctaggggtgatgtcagatatggg

SEQ ID NO: 35222 - DNA, 733 bp, Homo sapiens
  misc_feature (1)...(733): n = A,T,C or G
gtgtgtgcagggcatgtcactgggcgctgaagaaaagattntcagctgccctaggggagggtccagacagacttcctgggcatcactggggctgaggcttaaaggatggatctgggtgactagatggagaggagagggcacctcaggaaaagcatcttcaggcaactacagagagttcaatgggactggaccccccagggtaagggtagtgggaagcacagccaattcttgtgattcgaggtagttatgttctacgaacattcttcaaaccctgaactagcaaatactgagctatttctcctggagaargcatgggttgggttctgtgagcgtctggtcacaacgttttcatcagctgaaacaccatttgtgttacagaggtttgtttatcaacatcctagtagaacacgcaggtctcatcagcattgagaacctgcccttccacataactcttttcttgtatagcactcagcgggtatttttacaattctcccacagcctcctgatctgcaaaactcgcctcgcctgccctgcaggtttaacctttttcacattgtatcaccttctggaacatgagagccagtcagcactagctgagaagggcttgacatgttcctgactgtaaacttctttggctttcagactcacaacaatgttgctaccacgctttttgaaaaaaaaaaaaaaaaaaaaaaaaaaaaaagcatttattgtcagtctttgcattgctgta

SEQ ID NO: 35223 - DNA, 640 bp, Homo sapiens
ttttgagatctgccatcactacttctgaattgttcagaatagccggcttcatttgggccaggaaatgattctggtcccaattagaaaggacctcatgttcttatatacaaaaaacagtggcttaattgttttgagtaccaggcacctgaagtaaaacaagtactaacctcagtcaggattttgcaaacaggtattaactagaacttagggataaccatgccagtgactcagacttctttccactgctgtccttcctcctcaaatggttcacttgggctatgtgcctggcactgtgggtgtgtcataaagatctgtttatgaaagccacttcctaaatacttttctaaaatgtatttataaaccatctttaaaaggtggccttaatttattttcttccttattatgtattgagtattttcattaaaaataaaatcatttgggcgaggcgtggtggctcacgcctgtaatcccagcacttcgggaggccgaggtgggyggatcacgaggtcaggagatcgagaccatcctggctaacagggtgaaaccccatctctactaaaaatacaaaaaaaaaaaaaattagccgggcatggtggcgggcgcctgtagtcccagctactcgggaggctgaggcaggaga

SEQ ID NO: 35224 - DNA, 606 bp, Homo sapiens
attcaaacatgcaaccagggctgagaaccactgatttagattctgatctctaagtcctcttttctaattctttcattttatgatgttagggtgataattttggttacaaggtctcataatgcaatggcccaaatagcctgaaaagaagtaaggccctgcataccgtgccctttatgcacacatgactaggagacgttaacctgaattctagacatttttggaagttaaaaatcctcttacattactcagaatgaaagtagtgtggtttaaatgcacatgcrtgcttccaaaatgactaatcatgacaagaatcaactcctaaacttggacacttggaaatgggtcacaattagctcctgatctctcccttttccctcttcttccactaaaccacaagcacacacaaaaaaaggttgcctattagtcataatcaaaatataaaaccagctccagtttcaaagggccttctccatcatcaaagatttgaaagttcctgcatggctgcatcttttgatgaagatcatcttataaaaactctaacaaaattatatccctttagtcgtcaaggattagttgtcatgtgacactcagaaatggaattggtaa

SEQ ID NO: 35225 - DNA, 576 bp, Homo sapiens
aggtgtttggcttgaaatgttcagacatttaagaatcagaattgcatctgtttattctcatattttaaaattatatttttggggaggggtgtcagggttatattagagatatgtgtagtttttgcaataaaaagagtctacacaagacattttctagcctatttatactaataatgacaataatagtagctgtgatttattgagcccttattatgtgcccgttactcaactaggttttttatgtctaatattgattctataagataggcatttaaatgtaagcctcagtttaaagacaaggaaatggttcaggaaggtgaaagtaacttgcttgggatccaaacccagggctctctgacttgggagcatctgccttttctagtatactttcctgtctcctggagtgtgggtgggactttgggtggggtacaagaaattaaagagcttttggccggcrcggtggctcacgcctgtaatcccagcactttgggagactgaggtgggcggatcacgaggtcaggagatcgagaccatcctggctaacacggtgaaaccccatctctactaaaaatacaa

SEQ ID NO: 35226 - DNA, 1291 bp, Homo sapiens
catcatgggggtttgttgtaccggttgtttctttatggtgtggtctgttttcagttacacagactatagataattgttttttgttttcgtttttgtttttgttttctatttctttttcttttttttyttttttcctagagatagggttctgccatgttggccaggatagtctcaaactccaggcctcaagtgatctgcctgccttggcctcccacagtgctgggattaaaggtgtgagccactgaccctggccggactctagacatttgaaaagaaatttaccactctattacataaagtttagtgtacagttattctatttctaatataatttattatttgtcttctatgttgaaacaatttatcaaaatatcaaaataatatttgaagtagtatatcaaagtcttgcattttagtcttgcatttgaagtcttcttctatttctatctagcttaagttctacttttaaaaaagaatttatattttagatatgttgagtttctgctgctacttgaagtttcatgcttgttataccttcgttatatattctctttttctgcataaaatgacaatttgtatctaatttaatgctttctgccttggactctatcttgtctaagactaaaataatgatcaatatctgctttcaacttttcaaatacccacatatccttatttcccattgagtggggtagaaaaagacaaatagaatctggttagtctctatggcaaagtcatacatatgagatctagaaacatttttcttttgccaagggcattaaaatggcaggtggagaatcagtactacaaacaggcatatctgcttttagttttcttttattaattgtttatgtaacttatactagactgctcatgatcaataaaacatgcaggaagttacaagacctttttccatgactatcactaattcagtcagggtattagtagtgaagaagaaaacacaatctcaatataagcaaatatacctagtatccaacaaaataagctctcagctgggtgtggtggcatgtgcctgtagtcccaggtacttgcgaggatgaagcaggaggatcgcttgagcccaggagttcgagtaggcagagctatgatcgcaccacatccagcccggatgacaaagcgagactccatctttaaaggaaaaaataaaaaaaaaaacctaagcttttaaaattagtcatctaatgaaccactgaatacgataattatgtcttacatatttacaatatacactctctgacttaacgatggtctgacttgggatttttaaatt

SEQ ID NO: 35227 - DNA, 1291 bp, Homo sapiens
catcatgggggtttgttgtaccggttgtttctttatggtgtggtctgttttcagttacacagactatagataattgttttttgttttcgtttttgtttttgttttctatttctttttctttttttttttttttcctagagatagggttctgccatgttggccaggatagtctcaaactccaggcctcaagtgatctgcctgccttggcctcccacagtgctgggattaaaggtgtgagccactgaccctggccggactctagacatttgaaaagaaatttaccactctattacataaagtttagtgtacagttattctatttctaatataatttattatttgtcttctatgttgaaacaatttatcaaaatatcaaaataatatttgaagtagtatatcaaagtcttgcattttagtcttgcatttgaagtcttcttctatttctatctagcttaagttctacttttaaaaaagaatttatattttagatatgttgagtttctgctgctacttgaagtttcatgcttgttataccttcgttatatattctctttttctgcataaaatgacaatttgtatctaatttaatgctttctgccttggactctatcttgtctaagactaaaataatgatcaatatctgctttcaacttttcaaatacccacatatccttatttcccattgagtggggtagaaaaagacaaatagaatctggttagtctctatggcaaagtcatacatatgagatctagaaacatttttcttttgccaagggcattaaaatggcaggtggagaatcagtactacaaacaggcatatctgcttttagttttcttttattaattgtttatgtaacttatactagactgctcatgatcaataaaacatgcaggaagttacaagacctttttccatgactatcactaattcagtcagggtattagtagtgaagaagaaaacacaatctcaatataagcaaatatacctagtatccaacaaaataagctctcagctgggtgtggtggcatgtgcctgtagtcccaggtacttgcgaggatgaagcaggaggatcgcttgagcccaggagttcgagtaggcagagctatgatcgcaccacatccagcccggatgacaaagcgagactccatctttaaaggaaaaaataaaaaaaaaamcctaagcttttaaaattagtcatctaatgaaccactgaatacgataattatgtcttacatatttacaatatacactctctgacttaacgatggtctgacttgggatttttaaatt

SEQ ID NO: 35228 - DNA, 1757 bp, Homo sapiens
ccaacctcattgaaagagcctgtgacaatattacagggttaactagcagaaggtggattaaagacttctaaccacgttagtttgagaatctatgggaaatgtcaggatggaagtgagagttaaagactgtcaatcacatagaatggctactcccatctacagccatgctgtcatgagaatagttacaagagagatagaacttccttgatttgttatgyggctatataatgtcttaacttttacagtttgggggcaaagctgaagcgtttctctaagagaggacaagacaatggcttttccatatgcatggtcaggaaaccttctcctgcatggtcgttatactgggttcctggaaagactgaaattgcaatgcaccaatccctatcaaaggtgatcggctactaagagccaaggtgaaaccaactggctctctgtgctttggaataccacagtcttgctgaagccctctgtagaatgaagaaattcacttggtgagcagttttagaagggtttgactgggctcccacacaatgaactgttggaagtggaaaatcttattaaatggtgtccactggatatagctagaatgtgaactagaggccctaacagttttccagcatggctattacttgggcttttcccacaactgaaaagagtgcatgtattttggtgaccctactatctactacccacagccaaacatgcatgttgggagaagcatcattgaatctgtgccatgggagagttgagtccctgggcctcctctttccctcatcctattttcatgcctgccccattttcacattcaggactatggcctgataatccaggccatagtatattccagaatgttatgcaattttatccacagggatctagtccaacagacctcactgatgctttgcactaaacttgttatattttgaatggacaccttctatgggcaacatagcagagttaagagctcagactctgaggttagactgcatgtatttgaatttgggctcagccacttactagctgataacattgaacaaattatttaaccttttagagttccagtttccttagaatgaagataataataagagcctctcagggttgctatgatgattaagtgagataatgtatataaagcacttagcataatgtctggcatgcagtgagtactcaataagtagcaaccatcacatcatcatcatcatgttcgccattatcaccatctggagccctgctaagaggtctgttacaagtgaaatccttccccagaggccttgagtaagcatattaagttgcaggtttttgtggtcattcattccctgccttccccatgtagggcagtgattttcaccttgatctattgttgtcagcacttaatgtgggcctctcaggcagctggacagtccacccctgtcagtagctgaaatgctggccaactctgtggcttttggagagatattcttggagcataagctcagaaaacttcctccctccaggactgtaaagaccaggaccttatttccagggcccgggtctgtatgaaatatgaatactgtgtgccagggccagaggagtgcatgctctgaaattttattgacataaatatctggggagaataggggaagctttacgcacccctcaaaacagtaagctaagactcccctaggacaaccaagattacacaagactcatgccacaactgtccatcccttttcttctggctacatgcagagtggcctaaatattcaggaagctga

SEQ ID NO: 35229 - DNA, 1050 bp, Homo sapiens
cttcccctgatggggaaaggacatatttcagtgatataatgtggagctgcaggctgtaggggaactgcccctctggtggaaactaacacttgtcccaaagcacaagtgttaggttccaagaaaggcacaaagtgcccccgatgaatagagtattgcataaggtgttacartgcccttgaatggggtgtagaagtacattttgaatgacctcagaaatatgaccctatggtactctgtagaatacatgacaatagacacttcagggagggaatagatatggagttaattttctgtggcccaaaataaccaaggaagttcaaataaaatgtcatacctgcatctcaagcattcagtaaaatcactgaccatgcaaataacctatttgaaaataaatcagcccaccaaacccttagaattccttttttttttttttcctctagaataaaataaatatcacctgggcaacatacttgtgttttgctagttgtcttgcccagtgaaccttacctggaatcagagagcatccacaacatcacaagtatgctggcaggcatgttttgcttggatacattctgcccaagagagagtttcagagttggttgttatgggaactgcttcaatgggcagaaatcaaaaggtgaaaaatattcttatcattatccaaagaatccctgaattgagacttaaagaactttaaaaaaatatgttggggaccctctgggcataacagaggcaggtagaatgggtatatgggcttttgagttcatgcacataatgctatgaaggagatgcccctggtctcccactttcctttttgatatttggaagagagtcctatctggccactggatatttttgacatcagtggcaagggcccagatgggcagataggagccaagtttgcatatgtgctaaggagcaagttcccagctgctgataggcaagtgatggtggcaacacagcatcactgacacaaaagaaaaacaacgtgacacctgtgtaagacacctgaaagcctgttcagagatcagattttgctacaacatttga

SEQ ID NO: 35230 - DNA, 1165 bp, Homo sapiens
cttaatctattttgtgttgctataaaaatacctgagttggataacttatacagaaaagatgtttatttagctgatggttctgtaggttgaaaagttcaagggcatgaccatggcttctggtgagggcttttctgctatgtcacaacatggtggaggaggccaaaaagaaagtgcgcacatgcaaagagaggaaaacctgaggggcatgctgggtttataacaaaccccctcacaggaactaattcatcattataaaaactaatacagtcttgcaagagtgagacctcactcaccactgttagaacagcaccaagctactcatgaggratccacttccatcacccagacacctcccactaagccctacctcctaagatccccacactgggatcaaaacataagtttttgtggggacaaacaatccacatccaaaccataacagtatcatagttgaccagctgtccttctgtttgacacattatttctttgtatgtcccaatgacttccatcagtttatagtcaagcattactggtaagggagctattctgtcttattaaggtgtcattgcatacctctgttaatagtcatcttgtgttaattcaactgtttgactctcaaaggcaatcttagttcttccatttccaagccctataagtatagtttgctttagtgggagacagtagagcatagcctgattctagaatagtgctgccctaccatttaacatctctgagccacagttttgccatctgtgaagtggggattacaaagttacttacctcataatgttatgaggacaaaatgagaaaataaaagctccaaccatagcacctggcacatgaaatgcactcaataaatgttgtctagaattattattatagcagtatatttatttccattcttttctattttgttttattttagtatcagggagaatgcagggtgcaaaggccctaaaacaagatagcagggcataatagagaaactgcaagtaattcagtatggtgagaggatagatgtcaagaaagatgagcagctgtcctaatataaagatgaagagatagacagcagacttgtcatgttaaggaattttgactttatcctgtatatgttacaggggaaaggcactgaagaattgtaatcagaggataccaggatcagata

SEQ ID NO: 35231 - DNA, 575 bp, Homo sapiens
ccccaactctgaccctttgaatttctcctttccccttagggccctaggtctccgtctgatctcaccatcatcacttccttggtaaaacagaacctgggggctcccaggttgaagcaacgaatatcttggggaggaggcatgcaggagagaagctctcattcccagtacccccacagtgaactccatggtagggcttggcctctttctttttgcccctgctgccacatactacatgccccagcgatgtgtcactctctttttaagactctggcctgagagaggcacaaagccyatccttggctttccctgggcacagtagagtgagcaggaagcaactgcacaaagaactttctgaagcagtctgggagaaggagagggacatgccagaaacccaaacagtccagctttcacagcacatgtctcagagccaaccacagccaagttttctctgagactcacacattctgtctgtactatattcaggctccaaagcagcagaaggctggctccttccctctccattcctgacctgtgctcacagggtaggcacctcttacctccaacctcagggggca

SEQ ID NO: 35232 - DNA, 739 bp, Homo sapiens
agctaatggagtttctggcccctataatacatgggtggaagaaatatttttaggtccttacccaccctcattctgtacacccggatgatatccccaaccagaccttccagttagaaaatgakgatcagatgtctgcatgaggaaggagtgggttattcagtaaaaggttgtagcagacagaattgcttaccaactcaatagtcatctccctcttcctccttgtggaaagaatccccatttttaaggtaattcatcctcctccgcatgagtctgtgctcctctatgccagtcatggtcgttttatcccccttgccagtgatcagcctagttataggcatggtgaaattcaggccactgtgatgtgagaggaggtatgctggagagattctgggaaagttttcttgaatgataaaaataagcatacaggaagaggccttcctcttttaccattgaatattgccatgtctggaaacaatgcctgaccggcaatagccaccttgtgaccatgaaagttgctaaataacatgctgaggtttgcaaatcagaaagatggaaagaatcaggattttttaatgacattgttgaactgctgaattaatcagctccaaagccacccactactgaacttatatgcaagataatatatttccttttttaaaaacagtcatctaagttgggattttctgttattgcaactgaaaacatagcaaaagattcaagtgggatgtggatgaggcat

SEQ ID NO: 35233 - DNA, 719 bp, Homo sapiens
aatccttacaagtggccaggtgaggtggctcacacctgtaatcccagcactttgggaggccaaggtgagcggatcacctgaggtcaggagttcaagaccagcctggccaacatggtgaaaccccgtctctactgaaaatacaaaaaaaaattagccgggcgtggtggcaggtgcctgtaatcccagctacttgagaggctcaggcaggagaatcgctccaacctgggaggtggaggttgcagtgagccaagattgcgccattgcactccagcctgggtgacaagagccagactccatctcaaaraaataaataaataaataaataaacaaatagaaaaataaaaaaaacctcacaagtgaagtgccataagaaataggtgctgttataccgcagtttcttggtccttttttttttttttttttttgctgctataacagaatactaccaatgggtaatttataaagaaaagatttatttggctcattgttctggaagcagggaagtccaagagcatgctgctggcacctggtaagggcctcatcccatgtaggaaagcatcacatggtgagtgtgtgcagaagacagaggaaattgggctgaactcatccttttctcaggagcccactccctcaatgactaacccacccccatgaaaacagcattcatctgttcacctcttaaatgccacatcttccaatactgttacattggccattaa

SEQ ID NO: 35234 - DNA, 1132 bp, Homo sapiens
cacctgtagtcccagctactcaggaggctgaggctggagaattgctcgaacccaggaggtggaggttgcggtgagccaagatcacgccactgtactccagcctgggcgacagagcgagactccgtctcaaaaaaaataaatacggaaatgaatctgagacgtcactcaatagaagcaattgttacagaagttaattacaatcttgagaggctctttttcgggcaactccttacatcttttttgactaatacgcaaactcataagaacaagtacttcctctagtccatcgcaaatagaattaaaaataaataaataaaaagaacaagtacctccaaaatacatttctgtaccattaccacatatgttctccctaaaatgcctgaaccactcacaagcatatcctatttaaattaatttttaaagtttcaactcaccctgacaatggactaagtgtaccctcaatgaaatcaccgaactcatcagacacctatttttagttatacaaacactatttatgtaaatattttcacttattcaatttctcaacatattgttaactgaaaaccaaacatgttaccatgtaccaatatgggaggtaggaaataaacatatttagaacactatgcctgaatggctatgttttaattaaaagacaggcatgcaaataaatgattacaaattaagtgcctcaaatgaaatctctactagttgcttaaagagcacagtgaaataaatgcctaattctggctgagacattcaggtaaaatttacaaaggggtactacttgagccaagtattgaggccaaggtgaaagggaccttacaggcaaagggaaaaataatgcagaaaggcttacacatgtgagcaaagacagaggcagttggaataaacacaaaacgtatttttgagacacacaggaagtatagtcaatgagactctgtaattgatttaatattgggattgaggagaaagaaaaattcaaggacaactctcagttttctatattgaggraataagtgaacaatgacagatccaagtagtgataaataatactcattaagtgcttactatatgtcagccattgagctaactgtatcacttcactcagttgtgaaattaacagttaagaaaa

SEQ ID NO: 35235 - DNA, 594 bp, Homo sapiens
gtctttttgaattcatgtagtacttcctttctcaaataaccccagaaggatggcaaggggtgtacgtgctgtgttttgtccctccctcttcctrtgcccaactggtaaggaaattggatgttttactacgatctctggctccccacccctgccccctgctcatatagcttgggaagtgatgatatgcgctgagtccattctaataaaacacacaacatgacttactgcttcatgatatgttttataagatggattgatttatgcacctatataagttgagtctgaatagtcagttttcgaagtgaattaagaataaatttttgttacattgcatcttatcaataagcattttaaaaccccaagcatatttatttaaacatataatttaaaaataaatgttttgaaatggtggttgaagaaccttttctttatttttcacattttctgatgtacttgctgttctcatcttctgatttcatgccctctggccttctagccccgtgcatcgtttttgagcacatttgaacatgtctgatccatgtagtctgaacctgttgctctctgagggttaccctactcatccctgcatgcttg

SEQ ID NO: 35236 - DNA, 594 bp, Homo sapiens
gtctttttgaattcatgtagtacttcctttctcaaataaccccagaaggatggcaaggggtgtacgtgctgtgttttgtccctccctcttcctgtgcccaactggtaaggaaattggatgttttactacgatctctggctccccacccctgccccctgctcatatagcttgggaagtgatgatatgcgctgagtccattctaataaaacacacaacatgacttactgcttcatgatatgttttataagatggattgatttatgcacctatataagttgagtctgaatagtcagttttcgaagtgaattaagaataaatttttgttacattgcatcttatcaataagcattttaaaaccccaagcatatttatttaaacatataatttaaaaataaatgttttgaaatggtggttgaagaaccttttctttatttttcacattttctgatgtacttgctgttctcatcttctgatttcatgccctctggccttctagccccgtgcatcrtttttgagcacatttgaacatgtctgatccatgtagtctgaacctgttgctctctgagggttaccctactcatccctgcatgcttg

SEQ ID NO: 35237 - DNA, 611 bp, Homo sapiens
atatttgtgtttgtgcatgtgtgagatttgtatttatgtaagagtatgacatatagctacagttgacccttgaacaatacttacttgaactgtggggtccacttatacatgaattttttttttcaaccaaacgtgggtggaatatagaatattcatgggatgtgagccctgcctatgcagaggaccaactttttgtatatgtgggttctacagggccaactgagggacttgagcatataagattttggtagacacaggggttctaggttctagaaccaatcccctgcatacactgagggacaactctgttggcacagagttgattgaggcagtaggaaatgggaagataaagctggcagctctttccacacatggaaagcataataggaaagaagggcttaagttagcaggtaggtggtgtgggattcagggacattactctgcgtatatgtttcatctattgcagcagcctttcctgttacatacttataccctgtgggggcagyggacaagtacagttctgatacctgagactgtgcgaagaaagcaagccaggaatttgtgtgataggggagactccacaatttctcgtttgattcagcataagcctg

SEQ ID NO: 35238 - DNA, 603 bp, Homo sapiens
tgttctccctgagcagtcgcctttgagctctggcaacacactctcctgtgcatatgccacatgttttgcttgtttgctttttgtcatgtaggaacttctgtgtaataaagsttcttccctaatcccatgtctgttcatctggcttacttactcctttcagaatcagcccagcctacaggaagcttttcccagcctactcttctctctcaactatgttctaattgtccatgagggtattctgtactttggttaatgtatgtacaccattgtattgaaatgatttgtttatatatacagtcatctaaacaaaactgcaggttcccagacagcatgtgcctgttttatttgcatttaaaaccttcagtgcttgcaaagtcccaggtatatagtaggcattcaatttgagtgctgctatattcattccatttggtggatttaatcttaagatgtttttgtctctttttttctgaagaatggaacttgcaccaaaataaccctaatctgaaaaaaaaatgtgtcatggcattttctttttaagcaccttgcatagtactttctcttttcctccctttcctaatatatggtctgcctgtgttgtactat

SEQ ID NO: 35239 - DNA, 649 bp, Homo sapiens
ggatttaaagagggcgatatcatcacactcactaaccaaattgatgagaactggtatgaggggatgctgcatggccattcaggcttcttccccatcaattatgtggaaattctggttgccctgccccattaggatgttatgctggctggctcgcctcctcttgacccagatagttacggttaaccactgctttggcaatgctgcttataacacatcccaagtgcaggccgcagtggtccacgtcatccagccccaccaagtgactttggttgacttgtgggctcccacaggagtcatggtgatggatgatatcctcttagcctggtgggcrtggcatgtgctttttaaaacatcatctgagaccagccagtagtcacagaactgctgtttacacagttctcaggaggctgtggtttcttagaatatgaccatgagccatttcacagaaaaaccatcccaccgaagatattgtctatcaccccaggggccatctgaaggtctctttgcatttctccatgcaaagaggagaaagcttttgctttcacactgtcccttcccaaatatgtgagtcatggaattgtcaaagtaagccttccctcaccagcaaattgtctcctgatctgaatgaatttgtctcttaatgcatcca

SEQ ID NO: 35240 - DNA, 558 bp, Homo sapiens
aacagtcagtaagaaatgtcatcccattctgtcccctggctgctttttgtggctttgttcagtgggtgaaaattctggagtgtttattggtgtcttgtagcataagatgaaatatcttatcaagatattttcattttctcaaagtgaaatgcgatccctttaacttcttaggatgacaggtacatgtggaagcatcagagaggaacttgggatcccacgagctagcctctgcttcatacacagtggagtagatgcctgaggttgtcagcaaatattgaagatttttatttccagggggttagaaacttcacgtagcttctctgctctgcacacataaggagtaaktggattattttccctgagtcagtaaggttttcggtgtcacataatctcaggggaacaaatgcaattgcttagatctcaatatactcctcagatggcaactttgaggaggtaaccaggaggtatctgcactccctctgtgctcgcctggggccttctgactttctctgtaaaaagccctttctgtattgatgctcccgggtggtagtgggttgg

SEQ ID NO: 35241 - DNA, 801 bp, Homo sapiens
aggtggtagcaggtagtgggtgagggtaggacttgagtatatcgtgtatcatttggggcctctttgtggggagagattggaagtgagtcacaagcatgagtatagaaattggggaacaggtagtaaaataattaccgtcattcgatgatatgattgtatacctagaaaactttatgggagcaattgaaacaacatgacgaacaataagcatgttcattttaacatacagaaatattagcatatgggaatagcctacatagatgcgaacagccaccaattagaagatatcgtggaaggaaagatctcatttgcagtagcattaaacaaagataaaattcctagctataaatgatataatttttctatttaaaaaataaatataacacatgtatratttttcctagaaaaagacatgagaaacagaaaagcataccatgttctttttatgattgaaaagacttagcatcataaaggagtcagctttctctaagttaaactgtaaatgtaatgtgatacttatacaaaagataatatttttagtaagataagcctattataaatttatggaaaaatagtaaagtatagcccaggaaaatataaggaaggataataaggaaaactagccctaatatatatttaaaaacattaaaaaatctttgatatttaacatagtgtattactagttcatgaagaaacagattaatagtttaacataagatacaagtgtatttcaaatcactaaaacaaaatagataataaatggttttgggaaagatggatagtctgcttggaaaaaaggtt

SEQ ID NO: 35242 - DNA, 801 bp, Homo sapiens
aggtggtagcaggtagtgggtgagggtaggacttgagtatatcgtgtatcatttggggcctctttgtggggagagattggaagtgagtcacaagcatgagtatagaaattggggaacaggtagtaaaataattaccgtcattcgatgatatgattgtatacctagaaaactttatgggagcaattgaaacaacatgacgaacaataagcatgttcattttaacatacagaaatattagcatatgggaatagcctacatagatgcgaacagccaccaattagaagatatcgtggaaggaaagatctcatttgcagtagcattaaacaaagataaaattcctagctataaatgatataatttttctatttaaaaaataaatataacacatgtatgatttttcctagaaaaagasatgagaaacagaaaagcataccatgttctttttatgattgaaaagacttagcatcataaaggagtcagctttctctaagttaaactgtaaatgtaatgtgatacttatacaaaagataatatttttagtaagataagcctattataaatttatggaaaaatagtaaagtatagcccaggaaaatataaggaaggataataaggaaaactagccctaatatatatttaaaaacattaaaaaatctttgatatttaacatagtgtattactagttcatgaagaaacagattaatagtttaacataagatacaagtgtatttcaaatcactaaaacaaaatagataataaatggttttgggaaagatggatagtctgcttggaaaaaaggtt

SEQ ID NO: 35243 - DNA, 801 bp, Homo sapiens
aggtggtagcaggtagtgggtgagggtaggacttgagtatatcgtgtatcatttggggcctctttgtggggagagattggaagtgagtcacaagcatgagtatagaaattggggaacaggtagtaaaataattaccgtcattcgatgatatgattgtatacctagaaaactttatgggagcaattgaaacaacatgacgaacaataagcatgttcattttaacatacagaaatattagcatatgggaatagcctacatagatgcgaacagccaccaattagaagatatcgtggaaggaaagatctcatttgcagtagcattaaacaaagataaaattcctagctataaatgatataatttttctatttaaaaaataaatataacacatgtatgatttttcctagaaaaagacatgagaaacagaaaagcataccatgttctttttatgattgaaaagacttagcatcataaaggagtcagctttctctaagttaaastgtaaatgtaatgtgatacttatacaaaagataatatttttagtaagataagcctattataaatttatggaaaaatagtaaagtatagcccaggaaaatataaggaaggataataaggaaaactagccctaatatatatttaaaaacattaaaaaatctttgatatttaacatagtgtattactagttcatgaagaaacagattaatagtttaacataagatacaagtgtatttcaaatcactaaaacaaaatagataataaatggttttgggaaagatggatagtctgcttggaaaaaaggtt

SEQ ID NO: 35244 - DNA, 801 bp, Homo sapiens
aggtggtagcaggtagtgggtgagggtaggacttgagtatatcgtgtatcatttggggcctctttgtggggagagattggaagtgagtcacaagcatgagtatagaaattggggaacaggtagtaaaataattaccgtcattcgatgatatgattgtatacctagaaaactttatgggagcaattgaaacaacatgacgaacaataagcatgttcattttaacatacagaaatattagcatatgggaatagcctacatagatgcgaacagccaccaattagaagatatcgtggaaggaaagatctcatttgcagtagcattaaacaaagataaaattcctagctataaatgatataatttttctatttaaaaaataaatataacacatgtatgatttttcctagaaaaagacatgagaaacagaaaagcataccatgttctttttatgattgaaaagacttagcatcataaaggagtcagctttctctaagttaaactgtaaatgtaatgtgatacttatacaaaagataatatttttagtaagataagcctattataaatttatggaaaaatagtaaagtatagcccaggaaaatataaggaaggataataaggaaaactagccctaatatatatttaaaaacattaaaaaatctttgatatttaacatagtgtattactrgttcatgaagaaacagattaatagtttaacataagatacaagtgtatttcaaatcactaaaacaaaatagataataaatggttttgggaaagatggatagtctgcttggaaaaaaggtt

SEQ ID NO: 35245 - DNA, 1080 bp, Homo sapiens
cacttaccatacatgttcctcactatatatttgtagctttgaatccctggttctcaggccttaagagttggactgagccatactactggcttttctggttctccagtttgaagagaggccttcccagcctccgtaacacwtgagccaattcccctaataaataccctctcatttatctgtatgtgtatatctcctattggttctgtttctctggagaaccctaatataaccactaataggaaaattaggacaatgagatgggggttagttctggagagaacccagtggaggtgtccgcagtgaggtgaggtgaggttgatagttaacgctggtgcctgagacacatgtatgattttcatcacagtagcgaaggattcactctctctacgttgctatatccacttgtaagtacaatttgtaaactctactttggaggaatctgaaggtggtgaggaagtgaaagacctgcccaaagtgacatacccagaaagtggcaggattgatacccaggaagtgtggctttttgggcttcctgtctttaagttaacctcagatctgttctttgcctgccaagagaaggtaaatatgattatgaaaatcttctgtttagtaagctttactggtctctacttttagacaaaatgtcagttgtctgtatatgcagtaccaatatattgcacatacagaaaacttgcatatactgacatgtagttaatgtctcaatactcaagagaaaatattttctccatgcaatggtgaacattcatttactgttggaaatagtcactgcatgtttgcactctaaaccttttgtgattgagtgtggcaatgagtgtgcagtaaaatttttttttcttatttttttattttattttatcattattatactttaagttttagggtacatgtgcacagtgtgcaggttagttacatatgtattcctgtgccatgctggtgtgctgcacctattaaaatcatgctgcagtaaattttttttttaaaaagaattcctctatttaccaaatagctcatcggagtttacatacctctggatcacttcccttcagcatctgataaggc

SEQ ID NO: 35246 - DNA, 1080 bp, Homo sapiens
cacttaccatacatgttcctcactatatatttgtagctttgaatccctggttctcaggccttaagagttggactgagccatactactggcttttctggttctccagtttgaagagaggccttcccagcctccgtaacacttgagccaattcccctaataaataccctctcatttatctgtatgtgtatatctcctattggttctgtttctctggagaaccctaatataaccactaataggaaaattaggacaatgagatgggggttagttctggagagaacccagtggaggtgtccgcagtgaggtgaggtgaggttgatagttaacgctggtgcctgagacacatgtatgattttcatcacagtagcgaaggattcactctctctacgttgctatatccacttgtaagtacaatttgtaaactctactttggaggaatctgaaggtggtgaggaagtgaaagacctgcccaaagtgacatacccagaaagtggcaggattgatacccaggaagtgtggctttttgggcttcctgtctttaagttaacctcagatctgttctttgcctgccaagagaaggtaaatatgattatgaaaatcttctgtttagtaagctttactggtctctacttttagacaaaatgtcagttgtctgtatatgcagtaccaatatattgcacatacagaaaacttgcatatactgacatgtagttaatgtctcaatactcaagagaaaatattttctccatgcaatggtgaacattcatttactgttggaaatagtcactgcatgtttgcactctaaacctttygtgattgagtgtggcaatgagtgtgcagtaaaatttttttttcttatttttttattttattttatcattattatactttaagttttagggtacatgtgcacagtgtgcaggttagttacatatgtattcctgtgccatgctggtgtgctgcacctattaaaatcatgctgcagtaaattttttttttaaaaagaattcctctatttaccaaatagctcatcggagtttacatacctctggatcacttcccttcagcatctgataaggc

SEQ ID NO: 35247 - DNA, 1278 bp, Homo sapiens
tgcatgccagccttgcgacagtcacgattctgtggttctgcagatgaaagcaaaacgttgtatagtccttgtggcaggaatgataccttttcctaaagcagcgtcctttggttatgccaagctgttatttggctgagtggctttgcactaaatatatctagagcgatgttttaaaattataaatcttatgtttctccctgctatggactgaatgtttgtgttcccccaaatatacgttgaagccctaacccctaatgtgatggtatttggagatggggcccttgggaggtgtttaaagttatatgagttcgtgagggtagaaccctgctgatggaatttgtgcccttaaaagaagaggaagaggaaaagggagggaggtggggggaggtagggaagagagagagagagaaagagagagagagagacagacagagagagagagagagcatctttctctctccacacaaccacagaggaaggtttatgtgaggacacagtgagaaggcaaaggcagcgtcatgcaagccaggaattgagcgttcaccaaaaaccaaccatgttggcactcttatcttgggcttctagttctagaaccacaagaaggtaaaattctattgtttaagcttacccggtctctggtattttgttatgacagcccaagctgactgatagactccctcatcgctgttaggatggaagccttagtttagtccaaaggggcttgcaggttctggcttttgccagtgtcttcagcttcatctcaagtgctctctccctccctctctgatttgcatcggtgctggtctcttggaggagctatgctttccctatttaccccctgggcttttggacatcctcctcacagtatcctcagtgccggacatacaaaagacatkcagtgactatttttaaatgaacaagtggtagaaattagaaggtagtcaggttctgacctgtgatggcagaggaggagatactgtgatagggaaacaagcatataaaaaaggcaacacatttgactgttgtgtctgatcatgactgttttaaatgacatgagtgttgagtaggccaactcactttcactctttttttggacttcatcatattctcaacaacaatcataacagcacattaatattaccctttaaaaaataacctgtttaaggtagtactgttggagatggtgaccggagttgttgctaattactctttttttctgtaactgccttttgccctcaaggtttgccactggaagaggcatatctggtgggaaagagg

SEQ ID NO: 35248 - DNA, 1278 bp, Homo sapiens
tgcatgccagccttgcgacagtcacgattctgtggttctgcagatgaaagcaaaacgttgtatagtccttgtggcaggaatgataccttttcctaaagcagcgtcctttggttatgccaagctgttatttggctgagtggctttgcactaaatatatctagagcgatgttttaaaattataaatcttatgtttctccctgctatggactgaatgtttgtgttcccccaaatatacgttgaagccctaacccctaatgtgatggtatttggagatggggcccttgggaggtgtttaaagttatatgagttcgtgagggtagaaccctgctgatggaatttgtgcccttaaaagaagaggaagaggaaaagggagggaggtggggggaggtagggaagagagagagagagaaagagagagagagagacagacagagagagagagagagcatctttctctctccacacaaccacagaggaaggtttatgtgaggacacagtgagaaggcaaaggcagcgtcatgcaagccaggaattgagcgttcaccaaaaaccaaccatgttggcactcttatcttgggcttctagttctagaaccacaagaaggtaaaattctattgtttaagcttacccggtctctggtattttgttatgacagcccaagctgactgatagactccctcatcgctgttaggatggaagccttagtttagtccaaaggggcttgcaggttctggcttttgccagtgtcttcagcttcatctcaagtgctctctccctccctctctgatttgcatcggtgctggtctcttggaggagctatgctttccctatttaccccctgggcttttggacatcctcctcacagtatcctcagtgccggacatacaaaagacattcagtgactatttttaaatgaacaagtggtagaaattagaaggtagtcagkttctgacctgtgatggcagaggaggagatactgtgatagggaaacaagcatataaaaaaggcaacacatttgactgttgtgtctgatcatgactgttttaaatgacatgagtgttgagtaggccaactcactttcactctttttttggacttcatcatattctcaacaacaatcataacagcacattaatattaccctttaaaaaataacctgtttaaggtagtactgttggagatggtgaccggagttgttgctaattactctttttttctgtaactgccttttgccctcaaggtttgccactggaagaggcatatctggtgggaaagagg

SEQ ID NO: 35249 - DNA, 1278 bp, Homo sapiens
tgcatgccagccttgcgacagtcacgattctgtggttctgcagatgaaagcaaaacgttgtatagtccttgtggcaggaatgataccttttcctaaagcagcgtcctttggttatgccaagctgttatttggctgagtggctttgcactaaatatatctagagcgatgttttaaaattataaatcttatgtttctccctgctatggactgaatgtttgtgttcccccaaatatacgttgaagccctaacccctaatgtgatggtatttggagatggggcccttgggaggtgtttaaagttatatgagttcgtgagggtagaaccctgctgatggaatttgtgcccttaaaagaagaggaagaggaaaagggagggaggtggggggaggtagggaagagagagagagagaaagagagagagagagacagacagagagagagagagagcatctttctctctccacacaaccacagaggaaggtttatgtgaggacacagtgagaaggcaaaggcagcgtcatgcaagccaggaattgagcgttcaccaaaaaccaaccatgttggcactcttatcttgggcttctagttctagaaccacaagaaggtaaaattctattgtttaagcttacccggtctctggtattttgttatgacagcccaagctgactgatagactccctcatcgctgttaggatggaagccttagtttagtccaaaggggcttgcaggttctggcttttgccagtgtcttcagcttcatctcaagtgctctctccctccctctctgatttgcatcggtgctggtctcttggaggagctatgctttccctatttaccccctgggcttttggacatcctcctcacagtatcctcagtgccggacatacaaaagacattcagtgactatttttaaatgaacaagtggtagaaattagaaggtagtcaggttctgacctgtgatggcagaggaggagatactgtgatagggaaacaagcatataaaaaaggcaacacatttgactgttgtgtctgatcatgactgttttaaatgacatgagtgttgagtaggccaactcactttcactctttttttggacttcatcatattctcaayaacaatcataacagcacattaatattaccctttaaaaaataacctgtttaaggtagtactgttggagatggtgaccggagttgttgctaattactctttttttctgtaactgccttttgccctcaaggtttgccactggaagaggcatatctggtgggaaagagg

SEQ ID NO: 35250 - DNA, 648 bp, Homo sapiens
tcgcaagaacaaaaaaaccaaacacygcatattctcactgataggtgggaattgaacaatgagaacacatggcctctcacattctcttacttaacctctgcttgccagcttagtgaaccagtgtactaaagaactctggtaacatgagttgatttgataagaaaacttaatataggtcccttctagaaaatgcactctcagtcgagaattgcattttgaaatataaatctcaagttcatcactccagttcatcactccataacaggtgcccgcaggcacattattttgcttttcaagatcatctggaatgatgccatttagactaattgccctcaaccctttaatttacctggatttttggaaagtatctttgtttcctcattcagccacatgtttgtctgaggtagaagcattttggaagtttacagtcaccacatccatgagttttcatgtgatgtcaccttgttcttaggtaacaggacaaatattgatgctcatagattgacactaatctcttgcattggtaaagtactttacaattgacaaagcacttactcaattatactgtacagtcttcacataatttcgtgtataactgtcctgtgaggtagcttttagttatccatatattagaaaagttaagaggta

SEQ ID NO: 35251 - DNA, 648 bp, Homo sapiens
tcgcaagaacaaaaaaaccaaacactgcatattctcactgataggtgggaattgaacaatgagaacacatggcctctcacattctcttacttaacctctgcttgccagcttagtgaaccagtgtactaaagaactctggtaacatgagttgatttgataagaaaacttaatataggtcccttctagaaaatgcactctcagtmgagaattgcattttgaaatataaatctcaagttcatcactccagttcatcactccataacaggtgcccgcaggcacattattttgcttttcaagatcatctggaatgatgccatttagactaattgccctcaaccctttaatttacctggatttttggaaagtatctttgtttcctcattcagccacatgtttgtctgaggtagaagcattttggaagtttacagtcaccacatccatgagttttcatgtgatgtcaccttgttcttaggtaacaggacaaatattgatgctcatagattgacactaatctcttgcattggtaaagtactttacaattgacaaagcacttactcaattatactgtacagtcttcacataatttcgtgtataactgtcctgtgaggtagcttttagttatccatatattagaaaagttaagaggta

SEQ ID NO: 35252 - DNA, 560 bp, Homo sapiens
ttctgagcgtgtgctgctttcaattccatggattcgcctaactccagagacagctctgtgcacactggaggatcaccgctccctctctccacaccaggagtctgtaactcagatatctggagacaagcaagaaatgccttgtgtaagacagatggagtgaaagacagtaggcattttccttgcaactaaggccactatctacctacccacatccagccgcctgtgcttgcagctccatgtcattcttacctccacaattatgatggcttagaagggccttacagggaaaggatgtgagtaaaataggccagaggtggaacacaggggtatgggaattggcacacaccctgtccctagaaaggacagctgtggtggagagtgcatcttaagttattggaccatccaacttttcacrcaaagctagaaaatagtatgttctctttaaagtatccaatttttaaagcactgtgtgagtcaaacaaaactcttcaaacaaaacaagaccacatgtagtctttaggccattgtgtgctagttttctttttttctttttttctttt

SEQ ID NO: 35253 - DNA, 560 bp, Homo sapiens
ttctgagcgtgtgctgctttcaattccatggattcgcctaactccagagacagctctgtgcacactggaggatcaccgctccctctctccacaccaggagtctgtaactcagatatctggagacaagcaagaaatgccttgtgtaagacagatggagtgaaagacagtaggcattttccttgcaactaaggccactatctacctacccacatccagccgcctgtgcttgcagctccatgtcattcttacctccacaattatgatggcttagaagggccttacagggaaaggatgtgagtaaaataggccagaggtggaacacaggggtatgggaattggcacacaccctgtccctagaaaggacagctgtggtggagagtgcatcttaagttattggaccatccaacttttcacacaaagctagaaaatagtatgttctctttaaagtatccaatttttaaagcactgtgtgagtcaaacaaaactcttcaaacaaaacaagaccacatgtagtctttaggccattgtgtgctagttttctttttttctttttttytttt

SEQ ID NO: 35254 - DNA, 387 bp, Homo sapiens
ttttttttttttttttttttttgtgacggagtctcgctctgtcgcccaggctggagtccagtagcgctatctcagctcactgcaagctccatctcctgggttcacgtcattgtcctacctcagcctcctgagtagctgggactacaggcgccygccaccatgcccagctaatgttttgtatttttagtagagacagggtttcaccatgttagccaggatggtcttgatctcctgacctcgtggtccgcccgcctcggcctccgaaagtgctgggattacaggcgtgaaccaccgtgcccagccttgagaaaggtaattattagagttattttttcttggatacaaacctatggattctcaaattcttttaaaaataaaaaagccatt

SEQ ID NO: 35255 - DNA, 572 bp, Homo sapiens
gccaagcattagggaaaaaacctaaatgtccaccagtcattggtattctaaggaaacacagcaccacaaaggraacacaaaactgctgatctttgtaagaaaattcattatcacaggcatcatatagaatgaaggaagtcaaatgcaaaatgaaaacacactatattgttaaattagtatgaatttttagaacaggaaatatgaatctgctgtgatagagatcaaaatagtagctgactttgtcatgtatttagacgtggcaatgtcaatcgatatggagttcagggaagcacgctgtggtgatgaattcttcctatttcctgatctgaaatgtgtttacgccaatacttgcatatactttacaccgatatatgctgaaaatttgtgcacttatgtaagtaatactttaattgagattttaaaagagagaagtacctaatgtagatgacggtttgatgtgttcagcaaaccaccatggtatgtgtataactatgtaaaaaaacctgcatgttctgcacatgtatcccagaacttaaagtataataaaaataaataaaataaataaaccttaa

SEQ ID NO: 35256 - DNA, 572 bp, Homo sapiens
gccaagcattagggaaaaaacctaaatgtccaccagtcattggtattctaaggaaacacagcaccacaaaggaaacacaaaactgctgatctttgtaagaaaattcattatcacaggcatcatatagaaygaaggaagtcaaatgcaaaatgaaaacacactatattgttaaattagtatgaatttttagaacaggaaatatgaatctgctgtgatagagatcaaaatagtagctgactttgtcatgtatttagacgtggcaatgtcaatcgatatggagttcagggaagcacgctgtggtgatgaattcttcctatttcctgatctgaaatgtgtttacgccaatacttgcatatactttacaccgatatatgctgaaaatttgtgcacttatgtaagtaatactttaattgagattttaaaagagagaagtacctaatgtagatgacggtttgatgtgttcagcaaaccaccatggtatgtgtataactatgtaaaaaaacctgcatgttctgcacatgtatcccagaacttaaagtataataaaaataaataaaataaataaaccttaa

SEQ ID NO: 35257 - DNA, 572 bp, Homo sapiens
gccaagcattagggaaaaaacctaaatgtccaccagtcattggtattctaaggaaacacagcaccacaaaggaaacacaaaactgctgatctttgtaagaaaattcattatcacaggcatcatatagaatgaaggaagtcaaatgcaaaatgaaaacacactatattgttaaattagtatgaatttttagaacaggaaatwtgaatctgctgtgatagagatcaaaatagtagctgactttgtcatgtatttagacgtggcaatgtcaatcgatatggagttcagggaagcacgctgtggtgatgaattcttcctatttcctgatctgaaatgtgtttacgccaatacttgcatatactttacaccgatatatgctgaaaatttgtgcacttatgtaagtaatactttaattgagattttaaaagagagaagtacctaatgtagatgacggtttgatgtgttcagcaaaccaccatggtatgtgtataactatgtaaaaaaacctgcatgttctgcacatgtatcccagaacttaaagtataataaaaataaataaaataaataaaccttaa

SEQ ID NO: 35258 - DNA, 572 bp, Homo sapiens
gccaagcattagggaaaaaacctaaatgtccaccagtcattggtattctaaggaaacacagcaccacaaaggaaacacaaaactgctgatctttgtaagaaaattcattatcacaggcatcatatagaatgaaggaagtcaaatgcaaaatgaaaacacactatattgttaaattagtatgaatttttagaacaggaaatatgaatctgctgtgatagagatcaaaatagtagctgactttgtcatgtatttagacgtggcaatgtcaatcgatatggagttcagggaagcacgctgtggtgatgaattcttcctatttcctgatctgaaatgtgtttacgccaatacttgcatatactttacaccgatatatgctgaaaatttgtgcactkatgtaagtaatactttaattgagattttaaaagagagaagtacctaatgtagatgacggtttgatgtgttcagcaaaccaccatggtatgtgtataactatgtaaaaaaacctgcatgttctgcacatgtatcccagaacttaaagtataataaaaataaataaaataaataaaccttaa

SEQ ID NO: 35259 - DNA, 568 bp, Homo sapiens
taaatggaacctccaattttcagtagctcaarcaaaaaaaaacttacgtattaataacacgtttagctcctctatttctcaaacttcatattcaattatttagtgaattccttccattctattttaaaaatatatatataggatttaacatcttcttactctttctgcttcctttgctttggttcaagagaatatcctagctctcacttttattaggttatgtttctgtttttcatgattttaccctggattttactgatcattgtttccaggcagatcactgtagcttgattttgaactcactgttgcatggaacataagaaaaattaggtcacagtgaagatgaagacgcagctttttcttccttcagtgggctttactggaaagacaggagaagtgacaagaaacccgaggaaggatatggatctaataaacaaatttgagagtcctcctgtgtccgtggttagactttagctgtttctaagaagggtatcccctaatagcctttaacagagtaatctgcaaaaagcattatctactccctggaacattggaatatttaaggaaa

SEQ ID NO: 35260 - DNA, 621 bp, Homo sapiens
ggtcctccaaaggagctcccctttctgctggccatctgcgtttgctcacctggacttgctgagggagctcgggtgccctgtgtgtgcttatctgtgtgtccyggcgcccggcacaggcagggcccagagtgggtgcctgctcgaggccaggggatgggtgagttcagcagttagctgtggggtgtctgcttaggcccagcccttgggggcctctaggaggggtccccctgctctcctgccctcctgccctctctgcaggagaggctccagtgaagcagacacagctcgatgttaagtgagacaagtcggtgagaatgcacaagccacgcaggcgctgcttcgtgattttctcataacatctgacacttgtatgttcaaatcgcatcactaaagagtagctgcataggtctgtctatggagggtctcccactttgctgtctcttgtctctcctgtctagcctcggtctttagccctctcctctccctgtggacagggcagttgttctagcccaagaggattagaacctgaaggatgcccttctccctataagggaagccacacatttgttttggtgagggtcatggttttgttccaatatcattttagcttaggctgtattt

SEQ ID NO: 35261 - DNA, 621 bp, Homo sapiens
ggtcctccaaaggagctcccctttctgctggccatctgcgtttgctcacctggacttgctgagggagctcgggtgccctgtgtgtgcttatctgtgtgtcccggcgcccggcacaggcagggcccagagtgggtgcctgctcgaggccaggggatgggtgagttcagcagttagctgtggggtgtctgcttaggcccagcccttgggggcctctaggaggggtccccctgcyctcctgccctcctgccctctctgcaggagaggctccagtgaagcagacacagctcgatgttaagtgagacaagtcggtgagaatgcacaagccacgcaggcgctgcttcgtgattttctcataacatctgacacttgtatgttcaaatcgcatcactaaagagtagctgcataggtctgtctatggagggtctcccactttgctgtctcttgtctctcctgtctagcctcggtctttagccctctcctctccctgtggacagggcagttgttctagcccaagaggattagaacctgaaggatgcccttctccctataagggaagccacacatttgttttggtgagggtcatggttttgttccaatatcattttagcttaggctgtattt

SEQ ID NO: 35262 - DNA, 2144 bp, Homo sapiens
tggagttcattggtctaaccctgtcaatttacagataaggaaagtgaggtccccaggggctaagccattggactgccatgcaccgtggttgatggggaggcaggggcctgagcactctgcttggagccccctctgctttctgctctttttggctgatcagtgtgtttgcagtcagcatgccggcatcactccccaagactggcggcccagcgtcaggctcgaacaccctatgagaactgtggcagtgacagtgcgggtttttgtggacttcatccccggacacagtgagaagctcttggctaagayacagggctgatttactcacactgtgagggaataagctgggaatggaagagtctggctgtgtcagtatagccaaatacgaatcccagaatagatgggtatgaatagaccactgacaaaatcttcagatttagcatctagcagtagctgacagtgagtactttctctggaatatggatattgaaaaactacctttaaaaaaatttttaactgttatttaggtcattttctggcactgaaggagctgaggggcttcagatgactagaagaaaaaagaaacaagttcaatttagacttcctacaaacatgttagataaaaccaacacagatgtgtccccctcctgctgcagagactcaaggtagactctgataaaaaaaaaacacacagctgatcacgtaataggcgaagagagaaaacaaaagtagtgccgttgggaccaacacactctttagtggccgttcctgggtctgggtacttgttgggtttggtcctagattgcacccagggctgggaactggaatgctcacgtccagagatagatgtggttttggcctaacaaaggtgtgggagctagaatttggatccttgcataaagtttagagcctgaagatctgattgtaccctaaaaggggactggaaattacaataccaggccatgcatgggtatgggctccaagtttattttatctcagtcatacaggaaccaaaagtagaagccctgccataaaaacagttgcagcccattgaagtcctgaaggccttgggtggcagcaggtgcagaactgtcctgtaggcatgcctccaccacccagtgtgtaggagatttggagataaaacaacccccacggaggataagatcacactagaaaaataagcacataaacaaatctaccaccatggtgagaagaggggtcaagaaataaacagtagaatcaaagtctctaacaatctgaaataattgaagaacctgaaggtggatataaagtacgggcacaactcattttattgcacttcactttattgtgctttgaaggtactgtggtttttacacattgaagatttgtggcaaccttgcattgaacaagtctgtttggtgccattgtcccaaaagcatatcctcatctcatgcttctgtgtcagcattttaaaacaacaaagtatttttaaattaaggtgtgtacatatttttaggcagaatgttgttgcacacttaatagactacaagcatattgtaaacaaaacttgtatatgcactgagaaaccaaaaaatttgtgtgactcactttattgcagtgttctgcaaccaagcctgccatgtctctgaagtatcctgtagttattttataaaatgattaaagaagaaatagagccatagtaagaaaggaagacagtttgaaaaaaaattggaaggtttttttaaaaagaactaaaagtgcatgatatgttcattgaagtttttttaaaaagtcatcagattagacacagttaaagacagaattagtgaattagaagatagagctggataaatcccccaagcacagcaagagagataaaaagatggatagtataaaagtgtaattaggagtcatagaggaaagaatgagaatgcccattaggaaatccagaaggaaggactttagagaatgttttgagtagaatagttgaaaagataatggctgagaattttccagaattgaagaaaggcatatgtggtcaaacaattttgaagtagaataacaagcaagggaaattatccatcagatatcaagatatattacaaagctgtgaccattaagacaatgtgttaattggcctaagtgtagactaaccaatgaaataa

SEQ ID NO: 35263 - DNA, 601 bp, Homo sapiens
gtttctttacttgcttctctgttctttgatctttctcatgcattggccataacattgtgcatgtgtgtgggtggcctttttattaaaatataacacacatgcagaagagcgaataaatgtgtgcccaggtctagtacacctgcatgggtatgatcaactttaggatcattttgtcaaatctcaaaaaaaaaacccacataaagtgttgatggggtctgtgctgattattgatgaattgcaggataaggggtagctttacagtattragacttacacagacacgtggtacattttgctctgataaacactttcctgtttcgttagtatagataggtcctgcactttaagctcatcccagatcatcttggttcaattactgtttctatgtgtaactgttataccagatcatttctgaaaaaaaaaaaaaaaatgctgtttaaaacctactagtgcatttttcccagatgcaaagggaaattttgatcaaatttctacatgcttcatcaatttcataatgattttgttttgttttgtgtggctgtcctcaggaagcccatccttcctgagcaccctgtatgtcagacaccgtgctgaatacttg

SEQ ID NO: 35264 - DNA, 540 bp, Homo sapiens
ttcaaacatactcaagcatgctaggccagtgagcctccacgcccctcacccagctgcagtgagcatcagcgttttgcaggcttgcttccgcactgtctccgagttttttcctggagtgtattaaggtaatccgtaattccaccttgaatacctcagtatgtgtctttaacagataagggtattttgccacgrctgatacacacatttaacaaaatgatccataattccttaatagagtctgatattcagttcactttcaagtttcctccaagccgtgacggcccacctcctttccaagcgttgctttccctacttgtgttttcagtttccacctttctcacactggctatacgaatataggctctccagacgttggctgaggtgatgaaaacagtatgtggctttcggcagctctggatcaaaggacggagaggtggatccaaacctgacagcaaacaactgatttcagatgcccatggtgttaacagtagagtgatgcccgcgaggaggggtgggccagagctgagggaggtctcccat

SEQ ID NO: 35265 - DNA, 701 bp, Homo sapiens
gccaggatggtctcgatcttttgatcttgtgatccatccacctcggcctccgaaagtgctgggatcacaggcgtaagccaccgtgtccggcccttttttttttttcttaaatgcagctgatttaatcatttggattaaaacaaaagcaaaaccaaccactgtacctggttgctttattgagtaacggcagcaccagtgcctcgtgtgaacctggkttagcagaagaaaacatgcctgagtgaggggcaggcagggctgaggaggggctgagtggggaattgctagttagtttttggttattgttagggaagaaagtggaagtggttctcaacaagagacttggaagacatcccaagtatgccaaacctctatgctttttttttttttaagtaaacttcattttggaataatcttatatttacagaaaagttacaaagatggtacagagagtatctgtgtgcccctttcctggtttcccctaatgttgcatcttcttttcctggtatatttctgaaaactaagacagtgatgctggcacattacgatgaactacgctccagacttcacttgggtttcactagttgtttttgttttccaggatccaattcaggatatgataattgcgtttggttgtcacgtctcctgagtttcctctggtctgtcacaatttctgagactttccttgtctttagtgagctcag

SEQ ID NO: 35266 - DNA, 564 bp, Homo sapiens
tggccttatcctcatgcttcatttgaaaatacgaaaaccatctttggccagagtctgctgcatgtaacaattgagatgctttctgtggctataactaccctgccttctgaccaccttgacagatatctggactctaatgagctgttttggctctcataggaagtggttgaagccattgatcgcagtgccttcatcaactctgacctgccaatcatcatatcgattgagaaccactgttcattgcctcagcaacgaaaaatggcagaaattttcaaggtgagctctcaacaaaaaggcaggatggtatgttggcccttgttttgcaattgtcattgggttgttttgttttgttttgttttttgagacagagtctckctctctcacccaggctggagtgcagtggtgcagtcttggctcactgcaacctctgcctctgaggttcaagcgattgtcctgcctcagcctcccgagtagctgggattaccagcatgcgcccccatgcctggctaatttttgtatttttagtagagatgaggtttcgccatgatggccaggctgctctgg

SEQ ID NO: 35267 - DNA, 222 bp, Homo sapiens
ctacattctctcaatcttccatatctcttccttgtcttttttaaaattaaaacaaaattttctcctacccttcttctatatattttagacataatttattgtgtttaytttttctgatgctccttatcatttagttttcatttcaaaatgatttttctattgtttctaattattttcaatacctcattagccttttaaaataatttttccccataatctaat

SEQ ID NO: 35268 - DNA, 828 bp, Homo sapiens
atcgctaccctcgcacctgatgcagacccctaccccatcaccttaaaaaatgctgatttcctaaagttaaaatgaacacttagtttccaactatggccattctcaaccctgcccatttctcctcatttgcctgtatattcacctgctctgtgaacttgaccatcttttggctccctctccaaaggtagttccccaagggcacttggcctgaatttctgcttcattatttgggttccattcttacttccttgacttacaaccttccttgacttacataaccaggcagctttcctattctcatttgcatagtaaatctgcatagcttcctggccctacttccttattctatcccacagccactccagaacccaccaaaaacaacttgcaagaaaccactgatttgaatttcaagagatcaagtttccaagctctgtcctgctctctgcagtccctgtgtaccttagttcctgggttatttgagtagtgtaaatgttgaccgaggccaaacattccaccattctgaggaaggaaggggaaccacgttcagaaagggacaggagaggagagatggataaaaccagaggtaggggcgtatgcaccctgtagtcctagctccttgggaggcagaggtaagatgccttgagcccaggagtttgagacacgcctgggcaaaacggtcagacattgcttaccctgcccccaaaaaaggcaagggtgtgatagtaggaattaagttggagacaaagggatgatagaggggcccctytcacctcaacacaaaaccaaaagtgagtcagggctgaaaaccagctccccttacaacacaaa

SEQ ID NO: 35269 - DNA, 1277 bp, Homo sapiens
tggtcccctcagagcctctggtctctgttcttttgcatgtggtacccttgggtggtgtcaggattggggtaggagaccaggctagaaggctaggtggaaggagaggaggctactgtggtgaggacaagggcatcaagcccgttcccctgccagggcttgttgaggcaggagaggcctgcaaagggtatmcaaggcagaaggttagagaaggtcaaaggtggggagggggagagggagaggcattgccagtggctgtggtggccatgggaataggtggtgggggaattgggacatcaaagtaaaagttttccatctgtcccagctcctacttcaggagggaggccatggcttccaggtcatgtgggagcagggaaaatggagggagcctagctggggtcacatggggggctctagagccccctgtaaagtcaagagcccagttatctggtcagagaagtcatcacctgtcagggccttcaccctcccctcagcctgctctccagggctcccgtgaggatcttacgaggcccaaaggggtagaggagtagaggcccgggagagcacctcatggtctaagagctcgcccaggccctgtccacagcaccaggagtggcatggctgcagcacaggctctgggcacctgtggcagtggaggaggcagcagcaccatctggaggaggatctgggcattgctcagatgttgcagacaggcaccaaggcgaaagtgaaggcttccatgggggccgagcaaaggcagctgcggcctctgctgaagaaagaggaaagcctgagagccttgaacatggatccttctcctcccggcttccgggtgagaaaaaaggacacctgacgatggggaatcttatttgagctttccatttctgaattttgcccaaatagtccattaatcctttctgccaaatgttgactgtgtccagatcggtattaagaattttcccaacaaacatcttgtccccacttctgctcatagggtaccactattttcccaggacattatgcataaaacttattataaaactttgctctccctaccctccacctggcatataatcagggatcaaattctgtcaatccttccttcacaatctttcccaaactcatttccacttataaattcctttcctttaccactatcatagtgtaaaattaatactttattacctctgatgtagatcgtggacaactgtacatagttaaataaatatgaatagaatatcgacacaaaacataaagagagcttgacatctatctcacca

SEQ ID NO: 35270 - DNA, 1277 bp, Homo sapiens
tggtcccctcagagcctctggtctctgttcttttgcatgtggtacccttgggtggtgtcaggattggggtaggagaccaggctagaaggctaggtggaaggagaggaggctactgtggtgaggacaagggcatcaagcccgttcccctgccagggcttgttgaggcaggagaggcctgcaaagggtatacaaggcagaaggttagagaaggtcaaaggtggggagggggagagggagaggcattgccagtggctgtggtggccatgggaataggtggtgggggaattgggacatcaaagtaaaagttttccatctgtcccagctcctacttcaggagggaggccatggcttccaggtcatgtgggagcagggaaaatggagggagcctagctggggtcacatggggggctctagagccccctgtaaagtcaagagcccagttatctggtcagagaagtcatcacctgtcagggccttcaccctcccctcagcctgctctccagggctcccgtgaggatcttacgaggcccaaaggggtagaggagtagaggcccgggagagcacctcatggtctaagagctcgcccaggccctgtccacagcaccaggagtggcatggctgcagcacaggctctgggcacctgtggcagtggaggaggcagcagcaccatctggaggaggatctgggcattgctcagatgttgcagacaggcaccaaggcgaaagtgaaggcttccatgggggccgagcaaaggcagctgcggcctctgctgaagaaagaggaaagcctgagagccttgaacatggatccttctcctcccggcttccgggtgagaaaaaaggacacctgacgatggggaatcttatttgagctttccatttctgaattttgcccaaatagtccattaatcctttctgccaaatgttgactgtgtccagatcggtattaagaattttcccaacaaacatcttgtccccacttctgctcatagggtaccactattttcccaggacattatgcataaaacttattataaaactttgctctccctaccctccacctggcatataatcagggatcaaattctgtcaatccttccttcacaatctttcccaaactcatttccacttataaattcctttcctttaccactatcatagtgtaaaattaatactttattacctctgatgtagatcgtggacaactgtayatagttaaataaatatgaatagaatatcgacacaaaacataaagagagcttgacatctatctcacca

SEQ ID NO: 35271 - DNA, 1277 bp, Homo sapiens
tggtcccctcagagcctctggtctctgttcttttgcatgtggtacccttgggtggtgtcaggattggggtaggagaccaggctagaaggctaggtggaaggagaggaggctactgtggtgaggacaagggcatcaagcccgttcccctgccagggcttgttgaggcaggagaggcctgcaaagggtatacaaggcagaaggttagagaaggtcaaaggtggggagggggagagggagaggcattgccagtggctgtggtggccatgggaataggtggtgggggaattgggacatcaaagtaaaagttttccatctgtcccagctcctacttcaggagggaggccatggcttccaggtcatgtgggagcagggaaaatggagggagcctagctggggtcacatggggggctctagagccccctgtaaagtcaagagcccagttatctggtcagagaagtcatcacctgtcagggccttcaccctcccctcagcctgctctccagggctcccgtgaggatcttacgaggcccaaaggggtagaggagtagaggcccgggagagcacctcatggtctaagagctcgcccaggccctgtccacagcaccaggagtggcatggctgcagcacaggctctgggcacctgtggcagtggaggaggcagcagcaccatctggaggaggatctgggcattgctcagatgttgcagacaggcaccaaggcgaaagtgaaggcttccatgggggccgagcaaaggcagctgcggcctctgctgaagaaagaggaaagcctgagagccttgaacatggatccttctcctcccggcttccgggtgagaaaaaaggacacctgacgatggggaatcttatttgagctttccatttctgaattttgcccaaatagtccattaatcctttctgccaaatgttgactgtgtccagatcggtattaagaattttcccaacaaacatcttgtccccacttctgctcatagggtaccactattttcccaggacattatgcataaaacttattataaaactttgctctccctaccctccacctggcatataatcagggatcaaattctgtcaatccttccttcacaatctttcccaaactcatttccacttataaattcctttcctttaccactatcatagtgtaaaattaatactttattacctctgatgtagatcgtggacaactgtacatagttaaataaatatgaatagaatatcgacacaaaacataaagagagyttgacatctatctcacca

SEQ ID NO: 35272 - DNA, 452 bp, Homo sapiens
aaattatgccaaatatttggcccaacacctgccactattgggaacaatagctcagaaattccagacttgactagggaagtttctccaggatgctgagaggatccacttcactcaggaatattacyatttttatgtttcaatctgacatttcagtatccaaggataggtgcctcattgatcccacttttatcactagaagttcacagctcagagtgggaaaggaccttatttaactcctcaacaaatgaagctgatggaattcaatgaggtaaagtgactttcctaaagtcatacagctaagaaggggcaaacataagaccaggaaggtccattatatcagtgtatgtagaaattctctattattatctattaatatgagacattcttgaaacagaaaataaaacaaccatcaattgaattttaaaattttaatcattctttcaatatttaaa

SEQ ID NO: 35273 - DNA, 575 bp, Homo sapiens
cccagrcagccctccccttctgagggtcccctccctggctcccacctgtctgaggactcccctgccaggctgccacctgagaggatcttagaggaccccctggaccaccacctaccaaacactatggagaggcttagtccatggtttccttttggattgtgaagtgatgtcaaggcccttggtccttcccctgcctcctctggccctggtagctctgaaggaatggtgagggcttcatctctcactcctccttccactccaggcctcctctgagaagcccctgaccccaccatcagctctcattctgcctggcctgaggtctgtcccatctttgaccttccatctccagattccagctgtgaccagctgagcaacagaagggtggccaaggggaaccagtgtctgctgcctgccctggccaagattggccagtttgtccctggggaccaagtatttgaggttactgagtaacttggggctgctcagagctgatttctaccagggtcaactcctcccaacctcctgctctcttggctcaggaatccccaaagccacttggctcctttagttgcatg

SEQ ID NO: 35274 - DNA, 575 bp, Homo sapiens
cccagacagccctccccttctgagggtcccctccctggctcccacctgtctgaggactcccctgccaggctgccacctgagaggatcttagaggrccccctggaccaccacctaccaaacactatggagaggcttagtccatggtttccttttggattgtgaagtgatgtcaaggcccttggtccttcccctgcctcctctggccctggtagctctgaaggaatggtgagggcttcatctctcactcctccttccactccaggcctcctctgagaagcccctgaccccaccatcagctctcattctgcctggcctgaggtctgtcccatctttgaccttccatctccagattccagctgtgaccagctgagcaacagaagggtggccaaggggaaccagtgtctgctgcctgccctggccaagattggccagtttgtccctggggaccaagtatttgaggttactgagtaacttggggctgctcagagctgatttctaccagggtcaactcctcccaacctcctgctctcttggctcaggaatccccaaagccacttggctcctttagttgcatg

SEQ ID NO: 35275 - DNA, 570 bp, Homo sapiens
ttctgtttgtgagatgcccgacgcgcrggaggggcatcctagagttcaggactggcgaaaggggcttggacactcaccaatactgctgggtgcttataaactcttaacatccgtttggaaagaaatttggcaatatgtatcaaactcataaatttttcataccctttagtttatgtagtacttttgaatgtctgttccacggaaataatctagaattttttataaaagtttcatgcgtgaaaatgtttattacagtattatgttttggagaaaaataacctaaatagccaacaaaagaaaagtggcttagggaagtagattaaattgtttggtagtatgttatggaatcatggaaaccaattatgaaacccaataacatggggatgcttgtgaaatactattttttttaaaagcacaatgcaatagcataggattataaatatgtaaaaatcttagtcaaatgtaagggcaatgataatacccattgttggttaggctgtggggaaattagaaaacaatttcctagtggggattgcaaagaggggaaatgtcttctcaggacgttttggc

SEQ ID NO: 35276 - DNA, 761 bp, Homo sapiens
aagtaagtctttgggttaaatggatatgggcaatagcaagagaaagaagtggcaaaggtgatgatagaagataacttaggttttagttcatattaagtgtacatgacttacagacatacagacacagttggcacttcatatccgtgggttccacatccgtagatttaaccaactgccgatcgaaaatattaaaaacaaaaaacaaaaaaaccaaacccagaacgcctgtgctgaacatgtatagacttttgtgtgagttatttttttcttaaacaatacagcataacaactatttacatagcatttarattgtattaggtatcataagtaatctagagattacttaaagtatgcaggaggatgtgcatattttatatgcaaacagtatgccattttataaaagggacttgagcatctgtggattttggtgtctgcagagagtcctggagccaattccccacagatacagaggtataattgtactctaaattagaggttttgcttatgacctttgattaaaactttacttttgtaaaaatcaagtttacttgtcttttttttgctcagttattagctttctctctgaagtatataggagtcattctcttccctctcttgcatgaatctgttaggaagaagattgtagttatttttttttcattaaccttttcagaagacaaacagatccctgataagggaataaaattttaaacacatttttaaaacaaattttaaatgttaagcaaatgtgaaacattggg

SEQ ID NO: 35277 - DNA, 1297 bp, Homo sapiens
gcattattgtaggcactaaagacacatagtgaccaagacaaagtctccaccctaagggagtttatattctaagagtcaacagtttaacagataaatatacaacactcaggtagtataaatgctactgaggaaaaataaggcagaataaggacataatacacgtgtggaaggtttttgtcaatagtatttagagaggggttctcaagattatctagaagcaggtaattgaaaaaacaagtcttgcaaagatttgggagaggaagattttaggcagaaggaacagctgacacaaagattccaagatggaagcaagcatggaatgtcctatgttgaagaataatttttttaaaaaatgttaaaaaacgttacacttgctactttgtttgtttggttggttgttcagtttgagacagggtctcactatgtaggccagggcctcaaacttctgggctcaagtgaccctcctggcccaacctctccagcagctgggactgcaggcacataccaccacaaccagcttcagtttaactttctttgtaggcaatagcctatatatacattctcagctacagtgtaaaaaatctgatttttattccacatgtgatagtaagccactggaaagtttacaagaagaaggtgaaattatatgattgccatttttaaaagacaactctggattgttcggcaggtgatataatctagggcaaaatttcccaactagttgtactaaaaacaggtaggttataaaataatgatttacaatctttttctctccttaataatcaagttgaatcatcccagctagtttatcattatatctgcaatccctttattatcaagggagcttttgttttgcatgtgcatgtacaaatgttaagctttttccccccaattttttactttttcactagcatatgattatgatcagtatcaacctggtataagaggttttaaagagaaaacaattgacttttaaagttttttctgatagctattttatggattgcttgtttcatattgcttgctagcatattggcttttgatgttaacaactaatcaagattcaattcttaataaacatttaaaatgaataatttgtrcccagaaaaataaacttatttctaatttatttgcttttataaataaaagtctcttcatcagacataaattattcattttgaatttaatcaaattcattaaaggggctacatgtaataacattcaagaaacttactttcaaagtagtattcatgtgtaaaataaatttgtcaattaaaaaaaatttaaaactcatgca

SEQ ID NO: 35278 - DNA, 1297 bp, Homo sapiens
gcattattgtaggcactaaagacacatagtgaccaagacaaagtctccaccctaagggagtttatattctaagagtcaacagtttaacagataaatatacaacactcaggtagtataaatgctactgaggaaaaataaggcagaataaggacataatacacgtgtggaaggtttttgtcaatagtatttagagaggggttctcaagattatctagaagcaggtaattgaaaaaacaagtcttgcaaagatttgggagaggaagattttaggcagaaggaacagctgacacaaagattccaagatggaagcaagcatggaatgtcctatgttgaagaataatttttttaaaaaatgttaaaaaacgttacacttgctactttgtttgtttggttggttgttcagtttgagacagggtctcactatgtaggccagggcctcaaacttctgggctcaagtgaccctcctggcccaacctctccagcagctgggactgcaggcacataccaccacaaccagcttcagtttaactttctttgtaggcaatagcctatatatacattctcagctacagtgtaaaaaatctgatttttattccacatgtgatagtaagccactggaaagtttacaagaagaaggtgaaattatatgattgccatttttaaaagacaactctggattgttcggcaggtgatataatctagggcaaaatttcccaactagttgtactaaaaacaggtaggttataaaataatgatttacaatctttttctctccttaataatcaagttgaatcatcccagctagtttatcattatatctgcaatccctttattatcaagggagcttttgttttgcatgtgcatgtacaaatgttaagctttttccccccaattttttactttttcactagcatatgattatgatcagtatcaacctggtataagaggttttaaagagaaaacaattgacttttaaagttttttctgatagctattttatggattgcttgtttcatattgcttgctagcatattggcttttgatgttaacaactaatcaagattcaattcttaataaacatttaaaatgaataatttgtgcccagaaaaataaacttatttctaatttatttgcttttataaataaaagtmtcttcatcagacataaattattcattttgaatttaatcaaattcattaaaggggctacatgtaataacattcaagaaacttactttcaaagtagtattcatgtgtaaaataaatttgtcaattaaaaaaaatttaaaactcatgca

SEQ ID NO: 35279 - DNA, 665 bp, Homo sapiens
ccctaataaaaacccctccctttttaaaatccctaataaaaacttgctggctttgtggctcaggggacatcacagacctaccaatatgtgatgttacccctggaggcccagctgtaaaattcctctctttgtactctttttatttctcagacaggctgacacttagggaaaataaaaagaacctatttaaatattgggggctggttcccccgatactttcaactgcctgtatttatgaatccactggaaaacatgtgcctcttgttagttatattccctaaatgaattttgagaggttggaaatttttagagctttataggtttaaagtgtttaactgtaaacactttaaaacattaaatttacccagagacttgcctggcacaacagcactaaataaatatttgatgmaatgagaaataaaaatttgtgaatgctcaaaaaacagaactccacccttgaggtatctcactcaaagagagaataggtgagacagtctctcatttccaaattatgcaaactctacccaacaaataacagttatacttctataatcccccttcttacactggccatatatattttgggcattcacatttttcagattttaaagaaataatactagtgtacatgtcagatattaaacaatatcccttcaaaactgggc

SEQ ID NO: 35280 - DNA, 549 bp, Homo sapiens
taaggcatgcgtcgagctgtgacctatctggctgtttatatgcctcactttcgttttctgtagatcactttcctttttctgcccataaatcttctcccactatgtggctgcgctggagtctctgagcctactctggcttgggaggctgcgtgattcgtgaatagttctctgctcagtgaaactctgttaaacttaattcagctaaagtttttctttcaataatgtcttaaagcatactaatcagttttgtttgtatgaccctattctaaarttcatacttacatgaacttcagttctcaaagtcttttgaaaccagttttatcatttttctcctttcattcattaatgtgttcaataaaatatctgacatatatcctttccctatttgtatgagtcatgttttagccctttgaaattacactttgatcatttcatgcattatttccacccaagctgccccaaatttcacatttttgaatgcttcattcatacaagaatgaattctcctttaaaaatattcaaaacaagcctaaatctaaaggataaatg

SEQ ID NO: 35281 - DNA, 549 bp, Homo sapiens
taaggcatgcgtcgagctgtgacctatctggctgtttatatgcctcactttcgttttctgtagatcactttcctttttctgcccataaatcttctcccactatgtggctgcgctggagtctctgagcctactctggcttgggaggctgcgtgattcgtgaatagttctctgctcagtgaaactctgttaaacttaattcagctaaagtttttctttcaataatgtcttaaagcatactaatcagttttgtttgtatgaccctattctaaaattcatacttacatgaacttcagttctcaaagtcttttgaaaccagttttatcatttttctcctttcattcattaatgtgttcaataaaatatctgacatatatcctttccctatttgtatgagtcatgttttagccctttgaaattacactttgatcatttcatrcattatttccacccaagctgccccaaatttcacatttttgaatgcttcattcatacaagaatgaattctcctttaaaaatattcaaaacaagcctaaatctaaaggataaatg

SEQ ID NO: 35282 - DNA, 617 bp, Homo sapiens
aatgataaaaactcccaataaactaggaatatattgggaactcctttaacccaataaaggaaaatataaaatgctacagttaatatcatacctaatgatgagttaaatactttcactctaagtttgcaaaaaaggcaaggatgttctttctgacactcctccttatttaaaattgcaataaatgttttagctagtgaaatagaaaagctaaaagaagtgaaaaatatacaggctgacaaggaagaaatacaacagtcttcatgtgtatrtaacatgattgtcaaaatgaatgagacttaagtgtaaaatgaaaaactataaaactcctagaagaaaatataggggaaactccatgtaaccttgtgtttggttatctttatttttaatctaaatcaaacacataagctatgaaagaaaatacttttgagatgggcgctattaaaaaagtcactgcagtcttattgcagaaacataataaagaaaaactaagaaaacaaaccactttttgtagcaaaattttccaaaataatgtcaacatttatttcatatatcttattttaatatattcataattaatctgcttacttatgtatatgtttgtatttactcatttatgt

SEQ ID NO: 35283 - DNA, 547 bp, Homo sapiens
attatgatgtttactcaggcatttacctcacatttcaaagctgtaagacataataggcattgctgtcagtcattcaaaaaattgagaaggtccttttagtgtaatgattgcacaagaaagagtactcgctagatgtttatgggaaacctataaggttacctttgaaatattytggactctttacttagatgttcttcttcatgtaccattttccaaaagggtaaagatgctattagatgattttgtattcagaaatatgtgattgaggtatttgtaatcattaataaaagttccatgatatgtggttaattctgtagtaatgatctacaggaaataacatcaattaccttgctgaactgccctcattattacaggatataatgaactgaaaaactacattagtgttgctgtgtttctctgcaattaaaaaattctgcattgaaaaatttattttataaaggaaaaatatccttttatctcataatgtatctgctagaagctcagagcagaatttgggagggaaactgtttttgtcgcttttaagtga

SEQ ID NO: 35284 - DNA, 682 bp, Homo sapiens
ttggtagagatgtagtgccttaggcccccaggtaagaaatgggtttctcctatcatctgattgtctatgattcctgatcaattctctttgccttgcattgtcagtggaatacccatttcatttagcaaggkttgtgtttaactcaatcaccatctgttgctgggttagggttcaggaaacatcaggcctggatcatcttctgttgagtgggaaatgaaaggcctctgatactttgctattcgtccagttctggagaaaacgaaaccaattggttttcctacttccacctttcagaattctcctctggttgcattatttcttgggtttatagttttaattaatgaggtagggcagaaagcaatgattctatatcattttacctggaccataagtgcaatatctggtttcttttttgttgttgttgttgatgtgctagtttttaagtttgcctccttagatttatttattggcattgtaatctggaatagtttgatttaaaaaatacatctaactccagaaatataatattctcaattccatgaaagcaaaccatattaacagtaaaattatcttgcaatgagatattttcactgcttctatagttaatgctttctggatagagtccaaagtgccgtggaccaaggggtccatttttgtatacttacaaatacaattgcatatg

SEQ ID NO: 35285 - DNA, 682 bp, Homo sapiens
ttggtagagatgtagtgccttaggcccccaggtaagaaatgggtttctcctatcatctgattgtctatgattcctgatcaattctctttgccttgcattgtcagtggaatacccatttcatttagcaagggttgtgtttaactcaatcaccatctgttgctgggttagggttcaggaaacatcagrcctggatcatcttctgttgagtgggaaatgaaaggcctctgatactttgctattcgtccagttctggagaaaacgaaaccaattggttttcctacttccacctttcagaattctcctctggttgcattatttcttgggtttatagttttaattaatgaggtagggcagaaagcaatgattctatatcattttacctggaccataagtgcaatatctggtttcttttttgttgttgttgttgatgtgctagtttttaagtttgcctccttagatttatttattggcattgtaatctggaatagtttgatttaaaaaatacatctaactccagaaatataatattctcaattccatgaaagcaaaccatattaacagtaaaattatcttgcaatgagatattttcactgcttctatagttaatgctttctggatagagtccaaagtgccgtggaccaaggggtccatttttgtatacttacaaatacaattgcatatg

SEQ ID NO: 35286 - DNA, 682 bp, Homo sapiens
ttggtagagatgtagtgccttaggcccccaggtaagaaatgggtttctcctatcatctgattgtctatgattcctgatcaattctctttgccttgcattgtcagtggaatacccatttcatttagcaagggttgtgtttaactcaatcaccatctgttgctgggttagggttcaggaaacatcaggcctggatcatcttctgttgagtgggaaatgaaaggcctctgatactttgctattcgtccagttctggagaaaacgaaaccaattggttttcctacttccacctttcagaattctcctctggttgcattatttcttgggtttatagttttaattaatgaggtagggcagaaagcaatgattctatatcattttacctggaccataagtgcaatatctggtttcttttttgttgttgttgttgatgtgctagtttttaagtttgcctccttagatttatttattggcattgtaatctggaatagtttgatttaaaaaatacatctaactccagaaatataatattctcaattccatgaaagcaaaccatattaacagtaaaattatcttgcaatgagatattttcactgcttctatagttaatgctttctggatagagtccaaagtgccrtggaccaaggggtccatttttgtatacttacaaatacaattgcatatg

SEQ ID NO: 35287 - DNA, 682 bp, Homo sapiens
ttggtagagatgtagtgccttaggcccccaggtaagaaatgggtttctcctatcatctgattgtctatgattcctgatcaattctctttgccttgcattgtcagtggaatacccatttcatttagcaagggttgtgtttaactcaatcaccatctgttgctgggttagggttcaggaaacatcaggcctggatcatcttctgttgagtgggaaatgaaaggcctctgatactttgctattcgtccagttctggagaaaacgaaaccaattggttttcctacttccacctttcagaattctcctctggttgcattatttcttgggtttatagttttaattaatgaggtagggcagaaagcaatgattctatatcattttacctggaccataagtgcaatatctggtttcttttttgttgttgttgttgatgtgctagtttttaagtttgcctccttagatttatttattggcattgtaatctggaatagtttgatttaaaaaatacatctaactccagaaatataatattctcaattccatgaaagcaaaccatattaacagtaaaattatcttgcaatgagatattttcactgcttctatagttaatgctttctggatagagtccaaagtgccgtggaccaaggggtccatttttgtrtacttacaaatacaattgcatatg

SEQ ID NO: 35288 - DNA, 626 bp, Homo sapiens
gaccttgccagaggtcccctggggggtgcaaaatgctttctaccctcctgcctgagccccattgagaatctctgagtgtgatgaaaaacacatggaaaagtagatggaytttccacactgggcaaaagatgcttgtttccacataaggggctaggcttctggctgtccagccagctactcaaatttgacctatttcccaatttttctataaacagattatttttattctcagagtagtatgagtctttgcctgggggaaaaaatgaacagaagtaaacaatatactcctgtatgccctctctgctaacctcatctgtcactgctggcctgagatttagagaatgaggcactcagacatgatcttcgggagccccacaaacagaagccccctttctctcttccagctgccattgccttggcctaggacgctatcatctgcctcctcagccaaactggcagcctcctgactggtctgcctggcccccgtcttgctcttttcagcagaacctctgcatcaggccctctaagatgcaaatgacatcattccactcctggtctaagccttcagtggctctctgagctttcaggataaaggcaaacttctcaccatttgagcctctgccctt

SEQ ID NO: 35289 - DNA, 626 bp, Homo sapiens
gaccttgccagaggtcccctggggggtgcaaaatgctttctaccctcctgcctgagccccattgagaatctctgagtgtgatgaaaaacacatggaaaagtagatggactttccacactgggcaaaagatgcttgtttccacataaggggctaggcttctggctrtccagccagctactcaaatttgacctatttcccaatttttctataaacagattatttttattctcagagtagtatgagtctttgcctgggggaaaaaatgaacagaagtaaacaatatactcctgtatgccctctctgctaacctcatctgtcactgctggcctgagatttagagaatgaggcactcagacatgatcttcgggagccccacaaacagaagccccctttctctcttccagctgccattgccttggcctaggacgctatcatctgcctcctcagccaaactggcagcctcctgactggtctgcctggcccccgtcttgctcttttcagcagaacctctgcatcaggccctctaagatgcaaatgacatcattccactcctggtctaagccttcagtggctctctgagctttcaggataaaggcaaacttctcaccatttgagcctctgccctt

SEQ ID NO: 35290 - DNA, 626 bp, Homo sapiens
gaccttgccagaggtcccctggggggtgcaaaatgctttctaccctcctgcctgagccccattgagaatctctgagtgtgatgaaaaacacatggaaaagtagatggactttccacactgggcaaaagatgcttgtttccacataaggggctaggcttctggctgtccagccagctactcaaatttgacctatttcccaatttttctataaacagattatttttattctcagagtagtatgagtctttgcctgggggaaaaaatgaacagaagtaaacaatatactcctgtatgccctctctgctaacctcatctgtcactgctggcctgagatttagagaatgaggcactcagacatgatcttcgggagccccrcaaacagaagccccctttctctcttccagctgccattgccttggcctaggacgctatcatctgcctcctcagccaaactggcagcctcctgactggtctgcctggcccccgtcttgctcttttcagcagaacctctgcatcaggccctctaagatgcaaatgacatcattccactcctggtctaagccttcagtggctctctgagctttcaggataaaggcaaacttctcaccatttgagcctctgccctt

SEQ ID NO: 35291 - DNA, 626 bp, Homo sapiens
gaccttgccagaggtcccctggggggtgcaaaatgctttctaccctcctgcctgagccccattgagaatctctgagtgtgatgaaaaacacatggaaaagtagatggactttccacactgggcaaaagatgcttgtttccacataaggggctaggcttctggctgtccagccagctactcaaatttgacctatttcccaatttttctataaacagattatttttattctcagagtagtatgagtctttgcctgggggaaaaaatgaacagaagtaaacaatatactcctgtatgccctctctgctaacctcatctgtcactgctggcctgagatttagagaatgaggcactcagacatgatcttcgggagccccacaaacagaagccccctttctctcttccagctgccattgccttggcctaggacgctatcatctgcctcctcagccaaactggcagcctcctgactggtctgcctggcccccgtcttgctcttttcagcagaacctctgcatcaggccctctaagatgcaaatkacatcattccactcctggtctaagccttcagtggctctctgagctttcaggataaaggcaaacttctcaccatttgagcctctgccctt

SEQ ID NO: 35292 - DNA, 901 bp, Homo sapiens
atccagcctgttctagcccctggaggctgggctggcaaacagcagaggatgctgccgcattaaaatttggtagaaagtaatttgtcagtgagatgtrctctctaaatacatagcttttgcaaacggtaagctttagtttggggctaatgcagacagcttggaggctacctccatgtcctttgtttccagcctcctttggctggtgacaaacccatgacagtgttatagaggaaggagatggggagggaagaatgtcacccacttcatccagccatacctccattccacttgtggcaatcgtgtgcagaaaaacacatcagtccccataggtgcacatacagatgtggggtctctcacctcctggtgcccttcgcataatcagaagtagaaaagcagagtggggtgtggttctgaggcaatccaggtggtctgggcatgcccacagggtgttcctaatgcaccgaagatgtcctggtcactcactaggagtttgtgctgattcaacaacaggtctgagcacttagtatgcataaggcactgggcttggttctggagatacaaagagtggaagggatgcgacccctggctctgagggagctgacaacccacaggatggagcttaaatgacttattactcatcgaaccaagcccttcagggtctccctccaaccatctctccggcctcttctctcttcatcacttgagcttcccactacactgagcttctagctcttctctagactctacgctgttgtcctccatttctcctttcctgctgctttccttccatcctctcctccatcctcccccatcatgcctcaaaagtttattgaatcccctctctgtgccttgcacttcactagaaaagctgggatatagacatttcaaaaaacattggctc

SEQ ID NO: 35293 - DNA, 857 bp, Homo sapiens
tggtctccactggaaagctgccatcctcagaacaamaggggtgaaaatagagcctggcttcggggtgaaaatagagcctggcttcggagacatttagtaagagaactgtgatgcccctgctggaggaaggcagggaacatgcttggtagagactgagcaggaaagagtatcttcccatgcagaggagggaagaaggaagggaactcatcttcagtgagcacttaccatctgtcacgtgccgcaccgaacaattgccactctcatattcacatcaactttcattttatttctatctcagaatgaccctgcaagtgaaggatgatctccatattatcagtcaggaaactaaggctcatcagaattgcataagttgtccaggaccatgtaacgaataaaaggcaaagcatgattaaatctacagcgttctgactctgtcctctccccactctgcattatcaattgcctgggtagagtgagaggcagccctgacaataggcaaggaaataaaggaaatagcttcagacagggttaattctagggcacctcctttatgatgcttagagtctattagcgtcacagaatttagagtccagctcacctcaagcagaaatgatcccataactgtctgaagttagggaatcttggaatggatttgacattgaggagacagatcagctcattaaccacactgagcctcagtttcctcatttgtaaagtagggtaacaagagctacttcatagaatcattatgtggtgtaaatgagctaacagcagaaacacttagcttattgcctgatctataaatgtccattagaatgcagtgggattaggtgctcgggaaggcaggaaatcaagtt

SEQ ID NO: 35294 - DNA, 857 bp, Homo sapiens
tggtctccactggaaagctgccatcctcagaacaacaggggtgaaaatagagcctggcttcggggtgaaaatagagcctggcttcggagacatttagtaagagaactgtgaygcccctgctggaggaaggcagggaacatgcttggtagagactgagcaggaaagagtatcttcccatgcagaggagggaagaaggaagggaactcatcttcagtgagcacttaccatctgtcacgtgccgcaccgaacaattgccactctcatattcacatcaactttcattttatttctatctcagaatgaccctgcaagtgaaggatgatctccatattatcagtcaggaaactaaggctcatcagaattgcataagttgtccaggaccatgtaacgaataaaaggcaaagcatgattaaatctacagcgttctgactctgtcctctccccactctgcattatcaattgcctgggtagagtgagaggcagccctgacaataggcaaggaaataaaggaaatagcttcagacagggttaattctagggcacctcctttatgatgcttagagtctattagcgtcacagaatttagagtccagctcacctcaagcagaaatgatcccataactgtctgaagttagggaatcttggaatggatttgacattgaggagacagatcagctcattaaccacactgagcctcagtttcctcatttgtaaagtagggtaacaagagctacttcatagaatcattatgtggtgtaaatgagctaacagcagaaacacttagcttattgcctgatctataaatgtccattagaatgcagtgggattaggtgctcgggaaggcaggaaatcaagtt

SEQ ID NO: 35295 - DNA, 770 bp, Homo sapiens
aggggtacccctcacttagactggagtccacttactgtaatcacaagggctcctgacagttttagagtcatgtatttattttctgtctcctgggttagagtacaaacagacttttcttcactgctatatccccagtgcctggaacagtatcagggacataatacacggtattatttaaataaatgaatagatcccttttagaagacattcagtagatccacagatcctccctctcccaagtgtacacacacacacacacacacacacacaagtgcataaatktcccaagtccaccgattagggaatctcacacaaagtctggccatccacccagattccttctgtaataagattcctgacagccaaaacctggtttattccaagcagagatgatgctacacaggtgccatcgaaaggaaccaccaggggggaggggagggcctcccctctgtagcaggtgaagggcatctggaagctggtgcagcctggttggactccactgacgctccagtggcctgtgcggatgctctctgtgtgcatggctgtgggcctgctttggggatgtcgaactgaatctgagctctgcttccctcttgatagggagaaacccagcaggtggaaccagtgtattcctcgctccctccaccattgcctctaagcatggctaatgagtatatttgacctcacatgctcaccccagcagctccacaaacgtcactcaagatccctcctgacatccaaatgcagggggcaccgcattttaagttaaa

SEQ ID NO: 35296 - DNA, 1169 bp, Homo sapiens
acataagaaagtgttctcaattccatagcttgggagagaaccattctaaccccagattatcaagacagtaaaattatttccctttagatgtttttgttttgatgttggcaagggaagagtcatcacatttcttaagggacgcttagtttttgccctcccatttttggtaaaaaatagttgacaaaaaaatttgtgctccaccctagatgcaattatattgtaatcataactacctgaagtcaaaaatcattggatatactgtttttaaaacttatcggattattgaacatagtctcttaaatttgttattcctataagatccttgactattgctgctctttgttgaagagtttcaatattttttgatgaattctcaaaagacatgaacacacttcccttcactcaattttaacacagttggtgtgattgttttctccttggatcttctgaaagattcattaagatatgaataacttactttcataacttcatttgctttagtctttcagttttcttcatattttttgtaaacttcttaaacctttccacttttgaagaagtaaaaagttttcaaccttttttttttggagatgaagtctcactctgtcacccaggctggagtgcaatggcctgatcttgactcactacaacctctgcctcccagattcaagcaattctcccatctcagcctcccaagtagctgggactacaggtgtgcaccaccactcaggctaattcttttgtatttttagtagagacggggtttcaccatgttggccaggctggtctcaaactcctgacctcaagtgatccacccgcctcagcctcccacagggctaggattacaggcataggctactgcacctggcccaaactttttttcttattcaacaatttgattagggcattttttttctagaatttcacatattgtggtgtatgcctattgacattctatgtataagtgtatttcatgtkttaaaaacatcatttccagtgaaagtaaagctacagatataggcatggcattttgtgaaggtgtgcagattctttcgtctcttatcgttggctgatttgttataggctgagaggttgaaacataaaggtaatgtaacttgtattaagctatgcaattagaactgatgctgggaatggactctctgcctcct

SEQ ID NO: 35297 - DNA, 1251 bp, Homo sapiens
tatcaaaacatattgtacaccttaaatatagacaataaaaaagatttttttaatgggggctttttccatggtatgtagaccctcttctttctccatggttatggcatttttactgctttattaactcccaaaactaactctccaactctgccttctctcactgacagacctataacctcaacttcaacagggccacctacaaatgcttcatcttcctcccctctaggacatagggtatagtctgaaacacctgggrtcaaaacctagatctgacatttgttgggtgtgtttccttgagaaatggcgtctgatttctcttattttcccccttgataaatgggataattcttttcacatatgcttgttatgtggctcagtgaggtaaaatatgggtcacaatgcttaccatataataagaatccaaatatgatcattctaatcccaacaatgcaaactgcctttttatgttttcagcttctttccaaaaaatgttagttgtctgctgttagaattagttcaactgggagtaccagcactctcccacaatttgagggtagaaatcttggattcctctttaaccttccctctgctttttctcctatggctgactgatctgttaccaagaaccagcaatccatcctttcaaacatccttgattcatcccatcccaccaataactctatccatatccttagcacatcttgcctgaatcgatgcacatgttttaaattagtttttctttctccagttcttctgccccaaggctatcctggaacatacttccagaactccttaagattctgctttcagtatgcaccaccctagctgagaagctgcagtagctacctcaagtccaaactcttcccctggcctgttggcctccgtagtctcatctccccatctcccgctgtgcagcttcttctccagccatgtcatccttgctgttgcccctctgtttccccatctgagtcacccagtgtccactcccatcttggtgtctctgaacaggctcttccttaccacctagaaggagctcctactctgccctctcctgtctgtcctgaaagacccataaagacctccctgattcttttaaacctcactaatttccttttcttggaaccctgtctaacacaggtgttttgtgttttgtattttctttttaatttttacctaccgaaacacacttcaatttccctgaggacaaataatctacatttcttatcacccatgttgcttagcacagtcctt

SEQ ID NO: 35298 - DNA, 1251 bp, Homo sapiens
tatcaaaacatattgtacaccttaaatatagacaataaaaaagatttttttaatgggggctttttccatggtatgtagaccctcttctttctccatggttatggcatttttactgctttattaactcccaaaactaactctccaactctgccttctctcactgacagacctataacctcaacttcaacagggccacctacaaatgcttcatcttcctcccctctaggacatagggtatagtctgaaacacctgggatcaaaacctagatctgacatttgttgggtgtgtttccttgagaaatggcgtctgatttctcttattttcccccttgataaatgggataawtcttttcacatatgcttgttatgtggctcagtgaggtaaaatatgggtcacaatgcttaccatataataagaatccaaatatgatcattctaatcccaacaatgcaaactgcctttttatgttttcagcttctttccaaaaaatgttagttgtctgctgttagaattagttcaactgggagtaccagcactctcccacaatttgagggtagaaatcttggattcctctttaaccttccctctgctttttctcctatggctgactgatctgttaccaagaaccagcaatccatcctttcaaacatccttgattcatcccatcccaccaataactctatccatatccttagcacatcttgcctgaatcgatgcacatgttttaaattagtttttctttctccagttcttctgccccaaggctatcctggaacatacttccagaactccttaagattctgctttcagtatgcaccaccctagctgagaagctgcagtagctacctcaagtccaaactcttcccctggcctgttggcctccgtagtctcatctccccatctcccgctgtgcagcttcttctccagccatgtcatccttgctgttgcccctctgtttccccatctgagtcacccagtgtccactcccatcttggtgtctctgaacaggctcttccttaccacctagaaggagctcctactctgccctctcctgtctgtcctgaaagacccataaagacctccctgattcttttaaacctcactaatttccttttcttggaaccctgtctaacacaggtgttttgtgttttgtattttctttttaatttttacctaccgaaacacacttcaatttccctgaggacaaataatctacatttcttatcacccatgttgcttagcacagtcctt

SEQ ID NO: 35299 - DNA, 1251 bp, Homo sapiens
tatcaaaacatattgtacaccttaaatatagacaataaaaaagatttttttaatgggggctttttccatggtatgtagaccctcttctttctccatggttatggcatttttactgctttattaactcccaaaactaactctccaactctgccttctctcactgacagacctataacctcaacttcaacagggccacctacaaatgcttcatcttcctcccctctaggacatagggtatagtctgaaacacctgggatcaaaacctagatctgacatttgttgggtgtgtttccttgagaaatggcgtctgatttctcttattttcccccttgataaatgggataattcttttcacatatgcttgttatgtggctcagtgaggtaaaatatgggtcacaatgcttaccatataataagaatccaaatatgatcattckaatcccaacaatgcaaactgcctttttatgttttcagcttctttccaaaaaatgttagttgtctgctgttagaattagttcaactgggagtaccagcactctcccacaatttgagggtagaaatcttggattcctctttaaccttccctctgctttttctcctatggctgactgatctgttaccaagaaccagcaatccatcctttcaaacatccttgattcatcccatcccaccaataactctatccatatccttagcacatcttgcctgaatcgatgcacatgttttaaattagtttttctttctccagttcttctgccccaaggctatcctggaacatacttccagaactccttaagattctgctttcagtatgcaccaccctagctgagaagctgcagtagctacctcaagtccaaactcttcccctggcctgttggcctccgtagtctcatctccccatctcccgctgtgcagcttcttctccagccatgtcatccttgctgttgcccctctgtttccccatctgagtcacccagtgtccactcccatcttggtgtctctgaacaggctcttccttaccacctagaaggagctcctactctgccctctcctgtctgtcctgaaagacccataaagacctccctgattcttttaaacctcactaatttccttttcttggaaccctgtctaacacaggtgttttgtgttttgtattttctttttaatttttacctaccgaaacacacttcaatttccctgaggacaaataatctacatttcttatcacccatgttgcttagcacagtcctt

SEQ ID NO: 35300 - DNA, 597 bp, Homo sapiens
aatagcagccagcacagaagaggtgcagagctgtgcctgccagccaagctgcctgtcccaatgtgggcaacagagacagagggcagatggactggcctcagtgtgttttgcccaactgaaactcctttccactttgtaacctatttgaagcccatctttatttcattattttttaaacacagcacagggagaatcaaaatgagtttccaaagaggaatgacaaatgacagcacatatcataaccaggtattttctgatattttttcatccatgcctcttctcaacaccaacagttactaaatgtccacacctcagaactcctgataagtaacagcaataagccgcattggagcagagtaaagccaaaatcttcacggtggtcttcaagagcctcattgtcaagattcccccatccctagactaacgcctgccattcttccctctccttccactactccctggctccctgggagccctcttcccctagatagctgtattgtgacctccctcawcaacttcatctgtttgctcagtcactttctcaaggaagcctaccctgcccaccttatataaaatcgcaaaaccctttgccctgga

SEQ ID NO: 35301 - DNA, 946 bp, Homo sapiens
cggaacaccgaaaggataggggtaagaactaaggaaatctaaacaaagtacagattttagttaacgttaacatatcccyatcagttcattaactgcaacaaatataccacagtaatgtaagatttaataataagggatactgtgtgtgggaggggttataacataggaactctctgtactatccgttcaatttttctgtatatagaagactgctctgtaaataaacaaatattaaaaataacttttaaagaggaggcatgttgttgactctactacactaattttaaaataaataaagcccctgtctttcataagcagttactttactctttgatatggtaaaataaacagaggagtggcaatttgttcaaaattaaatttaaacagacattgtaactgagaatgagatgcctctgatattcttggataaagcgaatatgtttattagaggggtgcttgttaagggtagggttacaattcggtttctgtatcttcatactctagatcatttctcttgagaaagctaaaccctcagtgttgctaaagtttgggtttggttactctgcttcttttgaacagttttttttgtttgttttgcttgtttgttttttttttttgagacgagtctctgctctgtcacccaggctggagtgcagtggcacaatctctgctcactgcagcctccgcctcccgggttcaagtgattctcctgcttcagcctctggagtagctggcattacaggcgcccgccaccatgctcagctaattcttgtattattagtagagacggggtttcacggtgttggccagactggtctagaactcctgacctcaagtgatctgccagcctcagcctcccaaagtgctgggattacaggcatgagccatggtgcccagcctctttagaacaaatcttaaactcagacacctaaaattgctctgatct

SEQ ID NO: 35302 - DNA, 585 bp, Homo sapiens
aaatcctaaaattcatctggaactacaaaggaccctgaatagctaaaacaatcataagaaagaagaacaaagctggaggcctcacatttcctgattttaaaacatactacaaagctatgtatggtagtatggtactggcataaagtccaacatatagaccagtggaaaagactagagagcccaaaaataaacccacacatacataatcaacggatctttgacaagggtgccaagaattcacaatggagaaaagatagtctcttcaacaaatggtgctatacatatgtaacaaacctgcacgttgtgcacatgtaccctagaacttaaagtakaataataaaaaaaaatggtgctagaaaaaaatagatactcacatgcaaaagggcatggccctggagatagccagactgagtttaaagccttgcttaccaacaagttagttatcttctctatcttaatttcctcatctacaaaacggggataataaaggtaacttcctcctaaggctgttaggagatttaaaggtgcttagactagcccctaacaaacagttctaatttaattattgttattatcagtgggatc

SEQ ID NO: 35303 - DNA, 585 bp, Homo sapiens
aaatcctaaaattcatctggaactacaaaggaccctgaatagctaaaacaatcataagaaagaagaacaaagctggaggcctcacatttcctgattttaaaacatactacaaagctatgtatggtagtatggtactggcataaagtccaacatatagaccagtggaaaagactagagagcccaaaaataaacccacacatacataatcaacggatctttgacaagggtgccaagaattcacaatggagaaaagatagtctcttcaacaaatggtgctatacatatgtaacaaacctgcacgttgtgcacatgtaccctagaacttaaagtataataataaaaaaaaatggtgctagaaaaaaatagataytcacatgcaaaagggcatggccctggagatagccagactgagtttaaagccttgcttaccaacaagttagttatcttctctatcttaatttcctcatctacaaaacggggataataaaggtaacttcctcctaaggctgttaggagatttaaaggtgcttagactagcccctaacaaacagttctaatttaattattgttattatcagtgggatc

SEQ ID NO: 35304 - DNA, 625 bp, Homo sapiens
ctttgttctcccttgcctttacctatctaaaaaagttttaggctcttagcaaatcgggtatcagtttagactgtgaggttcggctccagccagtggatgcaggacacagcagtgaggacaacccaaatgtgtaagggataaatatgtctgcttttcctttgtttggtgtactctcgtggcaagactgctggtgagtataccctttccgcagaaagtaaaaattgccttgctgagagaattaaatttatgttcaagcgctatttctttgtggcaccggggaacaagcattttgcatttctaacataatgattgtggtaaatgtcaataaaaatcttgaagcacatctctccttagagtttttggtaagagtttatggaggaaaatctatataatcaaatgaaaatatcacagtaaaactctaaatgcatcatagaaattagcaaccattagtcagtttgcctgtttcagagaaagctcagaagaaactcagtttacctctacaatgttaaatgaygttaacaccttctcctaaagcattttactttccccatcaacaaaacagagtatatcagctgaaataggccacagacctcattgtctgtctgtacgaaactggggcaaaaat

SEQ ID NO: 35305 - DNA, 1280 bp, Homo sapiens
cagagatcaaaccaggactttgtggctcattgttcagaaatgactttggacaatgttgatatcccctcatagtgcctcactggtcgtgcagggtcactgtgctggagtggatcaccttaaggctgtggcttagccctctgagcacactgtcaagagctgaaccttacggggtctatgccagtctgccttttgtgcccctcagggctggagatgggtgtcctgcttcatagtaagcctgcagggtggcgagagttctccctcaacrccaacgtccagcctggctcccctgacctggcttggagaaatgaggaaattcctgatgggttttttctgtccttgcaccccatatgttccgtacattaaacctacttatgcctagtgttccattattggaacactaagtatgtgggagttatttatatcctactgttcaaggtcattgccaaggtctgatttttcactcatgcaaaaattcaaaaagttgcaacctccggcatacatgggttttaattaaggaaatgttaggagcttaccacctgtaatcctcatggggtgcagtcgctggggctgggagagtcggaaggagcatcactgggactggtctcaacacaaactgctgaccatctctgcagggtctggatggaaaaaggcagatcagtaccacatgcactcaggcatttttacaacttcattttttcttcttgtgagatgggggccatgccactctccttgctctgttcccccagtctcaggctaccttggtccagaaacattcctccaacatgactgtatttactaccaccttccaaatgaaggcagtcgtaggagtgggcacaaagcaatcctgtctcagcgtccctcccatcagttcactctcccttcccctccccttcagtcttctcacgcccacccccacacaccgccctagcctaagggaagcagaggcaaagcacctcctggcatttacttgcaagaccctcctttcccaggcagcctcattaggctctaaacctttgtgatcccactcccaaatcttgattgtggtcacaggtgggaggctgagggtaggatggagtccttataaagtccctatgcagtttgtaagcatcagaatacagaatacagattttattagtggttacaccaagtcttgacaccttaatagacacaaaactgctgctggccaaggtcagagcatctcagagtgtgtgggtataggggtaatggggaagggatgatgcagaaacggaaagtcttggatatgcttcttttcttaaaat

SEQ ID NO: 35306 - DNA, 1280 bp, Homo sapiens
cagagatcaaaccaggactttgtggctcattgttcagaaatgactttggacaatgttgatatcccctcatagtgcctcactggtcgtgcagggtcactgtgctggagtggatcaccttaaggctgtggcttagccctctgagcacactgtcaagagctgaaccttacggggtctatgccagtctgccttttgtgcccctcagggctggagatgggtgtcctgcttcatagtaagcctgcagggtggcgagagttctccctcaacgccaacgtccagcctggctcccctgacctggcttggagaaatgaggaaattcctgwtgggttttttctgtccttgcaccccatatgttccgtacattaaacctacttatgcctagtgttccattattggaacactaagtatgtgggagttatttatatcctactgttcaaggtcattgccaaggtctgatttttcactcatgcaaaaattcaaaaagttgcaacctccggcatacatgggttttaattaaggaaatgttaggagcttaccacctgtaatcctcatggggtgcagtcgctggggctgggagagtcggaaggagcatcactgggactggtctcaacacaaactgctgaccatctctgcagggtctggatggaaaaaggcagatcagtaccacatgcactcaggcatttttacaacttcattttttcttcttgtgagatgggggccatgccactctccttgctctgttcccccagtctcaggctaccttggtccagaaacattcctccaacatgactgtatttactaccaccttccaaatgaaggcagtcgtaggagtgggcacaaagcaatcctgtctcagcgtccctcccatcagttcactctcccttcccctccccttcagtcttctcacgcccacccccacacaccgccctagcctaagggaagcagaggcaaagcacctcctggcatttacttgcaagaccctcctttcccaggcagcctcattaggctctaaacctttgtgatcccactcccaaatcttgattgtggtcacaggtgggaggctgagggtaggatggagtccttataaagtccctatgcagtttgtaagcatcagaatacagaatacagattttattagtggttacaccaagtcttgacaccttaatagacacaaaactgctgctggccaaggtcagagcatctcagagtgtgtgggtataggggtaatggggaagggatgatgcagaaacggaaagtcttggatatgcttcttttcttaaaat

SEQ ID NO: 35307 - DNA, 524 bp, Homo sapiens
tctcctctaccctctgaagagaataaatctccagttgtctgcagggaggatgaacatgcaaaaagtccacaacactcagcacagagtccagattttggtggtggggttgatggggaggaagctcacatttcaggcctttcaaaattgtaggaaaagttttctttatttctaactgtgaaatgtacaaagctttgggtcattcataatttcttcttcttctagaaagatcacaggacacctaatgtttgtgtccccccaaaatgccttggttgaaackctaaccttcctccacccacacctggaaagtgttaaaattaggaggaggggcctttgggaggtaattagatccagagagtggagtcctcctgagtgggattagtgcccctataaaagggacactagagagctctctccccctctttcagccacccgcagatacaatgggaagatggcagtctatgaccaggaagaggttcctcaccataaccctaccatgctggcaccttgattttagacttccaaac

SEQ ID NO: 35308 - DNA, 807 bp, Homo sapiens
tcatcccctaccattgttgctgggttgtggagtcaggctgggcccacatcccaggaccattcctgccaggttccagaagygagaattggaaagggtgactgtcactggtcttgaaggtttttatctgacacttcctgccctccacttatctttggcagcctttctggtgccacgtctgcattcttggataatgctccatcttacttcacttaagagcaggatgctatggttctggcttcataaggaattagatggagacaaataaatgctcatctcatctcgacactctgccacacaggggttttgtttcttccccttcattctctcttttttaagctagctcacagtcttcttccattacggcagctttaagggttgctcagccttttaccaatttgaattaaaatgctgaaactttttctcccatgtttgaggggtaaagctaaaaatttatagaaaatatggaaataaaagggtaagttatctcatacaaggtcctgtatataagttaacattagacatcttttactatttttcattttttaaataaatgagagaacttctcttttgtgagtggtacctttttctaaacttttacagcacaatgaaacactgtcttcagaactaacttggaatactttgaatttctaatttaaaggtaactatgctttcatattgatgactcttctgcttattttttgataaaatataaaatagtctgccacctttagattctctgaaagctaagaatctgttcatttaacttgcttcttcaataataagttttacatgttagactgccaattt

SEQ ID NO: 35309 - DNA, 807 bp, Homo sapiens
tcatcccctaccattgttgctgggttgtggagtcaggctgggcccacatcccaggaccattcctgccaggttccagaagcgagaattggaaagggtgacwgtcactggtcttgaaggtttttatctgacacttcctgccctccacttatctttggcagcctttctggtgccacgtctgcattcttggataatgctccatcttacttcacttaagagcaggatgctatggttctggcttcataaggaattagatggagacaaataaatgctcatctcatctcgacactctgccacacaggggttttgtttcttccccttcattctctcttttttaagctagctcacagtcttcttccattacggcagctttaagggttgctcagccttttaccaatttgaattaaaatgctgaaactttttctcccatgtttgaggggtaaagctaaaaatttatagaaaatatggaaataaaagggtaagttatctcatacaaggtcctgtatataagttaacattagacatcttttactatttttcattttttaaataaatgagagaacttctcttttgtgagtggtacctttttctaaacttttacagcacaatgaaacactgtcttcagaactaacttggaatactttgaatttctaatttaaaggtaactatgctttcatattgatgactcttctgcttattttttgataaaatataaaatagtctgccacctttagattctctgaaagctaagaatctgttcatttaacttgcttcttcaataataagttttacatgttagactgccaattt

SEQ ID NO: 35310 - DNA, 807 bp, Homo sapiens
tcatcccctaccattgttgctgggttgtggagtcaggctgggcccacatcccaggaccattcctgccaggttccagaagcgagaattggaaagggtgactrtcactggtcttgaaggtttttatctgacacttcctgccctccacttatctttggcagcctttctggtgccacgtctgcattcttggataatgctccatcttacttcacttaagagcaggatgctatggttctggcttcataaggaattagatggagacaaataaatgctcatctcatctcgacactctgccacacaggggttttgtttcttccccttcattctctcttttttaagctagctcacagtcttcttccattacggcagctttaagggttgctcagccttttaccaatttgaattaaaatgctgaaactttttctcccatgtttgaggggtaaagctaaaaatttatagaaaatatggaaataaaagggtaagttatctcatacaaggtcctgtatataagttaacattagacatcttttactatttttcattttttaaataaatgagagaacttctcttttgtgagtggtacctttttctaaacttttacagcacaatgaaacactgtcttcagaactaacttggaatactttgaatttctaatttaaaggtaactatgctttcatattgatgactcttctgcttattttttgataaaatataaaatagtctgccacctttagattctctgaaagctaagaatctgttcatttaacttgcttcttcaataataagttttacatgttagactgccaattt

SEQ ID NO: 35311 - DNA, 807 bp, Homo sapiens
tcatcccctaccattgttgctgggttgtggagtcaggctgggcccacatcccaggaccattcctgccaggttccagaagcgagaattggaaagggtgactgtcactggtcttgaaggtttttatctgacacttyctgccctccacttatctttggcagcctttctggtgccacgtctgcattcttggataatgctccatcttacttcacttaagagcaggatgctatggttctggcttcataaggaattagatggagacaaataaatgctcatctcatctcgacactctgccacacaggggttttgtttcttccccttcattctctcttttttaagctagctcacagtcttcttccattacggcagctttaagggttgctcagccttttaccaatttgaattaaaatgctgaaactttttctcccatgtttgaggggtaaagctaaaaatttatagaaaatatggaaataaaagggtaagttatctcatacaaggtcctgtatataagttaacattagacatcttttactatttttcattttttaaataaatgagagaacttctcttttgtgagtggtacctttttctaaacttttacagcacaatgaaacactgtcttcagaactaacttggaatactttgaatttctaatttaaaggtaactatgctttcatattgatgactcttctgcttattttttgataaaatataaaatagtctgccacctttagattctctgaaagctaagaatctgttcatttaacttgcttcttcaataataagttttacatgttagactgccaattt

SEQ ID NO: 35312 - DNA, 807 bp, Homo sapiens
tcatcccctaccattgttgctgggttgtggagtcaggctgggcccacatcccaggaccattcctgccaggttccagaagcgagaattggaaagggtgactgtcactggtcttgaaggtttttatctgacacttcctgccctccacttatctttggcagcctttctggtgccacgtctgcattcttggataatgctccatcttayttcacttaagagcaggatgctatggttctggcttcataaggaattagatggagacaaataaatgctcatctcatctcgacactctgccacacaggggttttgtttcttccccttcattctctcttttttaagctagctcacagtcttcttccattacggcagctttaagggttgctcagccttttaccaatttgaattaaaatgctgaaactttttctcccatgtttgaggggtaaagctaaaaatttatagaaaatatggaaataaaagggtaagttatctcatacaaggtcctgtatataagttaacattagacatcttttactatttttcattttttaaataaatgagagaacttctcttttgtgagtggtacctttttctaaacttttacagcacaatgaaacactgtcttcagaactaacttggaatactttgaatttctaatttaaaggtaactatgctttcatattgatgactcttctgcttattttttgataaaatataaaatagtctgccacctttagattctctgaaagctaagaatctgttcatttaacttgcttcttcaataataagttttacatgttagactgccaattt

SEQ ID NO: 35313 - DNA, 611 bp, Homo sapiens
cactatataaaaaacattataactgaaatatacagaaatcactcsaatatattatcctactgactcattccttctgtttattactgtattgccacattggagttccatatttccagctattctttctacggtacaaatggttccacactaccaaagagaaaagaaaagctcactgagctttaaccctgagagaactgagagaaaatactctgtgctggtatctcacaggatatatctggaaaagaaatctaatttcatttgttctatctctagtacaatttctacacagtaaaatggaaaacggactttaagtgtgtgtgttgctaatatttcttcctaacctcacaggaagtttgtcacgtttccttgcaggatactgactgtaaacctgcagaatactacataataccctatttgaaaaggccacttgagcttttcagggatgccaaatgtcaagattttgtgactgttttatataaaaagatcatgaaatgagaaaacaagtttatcctatcaatgggaactagagttttctaatactacctcaagaaaagcaaaggtattattgttctctctaaggctcacagtccaaaggaaagtgactttaggta

SEQ ID NO: 35314 - DNA, 821 bp, Homo sapiens
ttaatagatctcttgctatatataatgtaatagaaacatcttttaaaaatataaataaggaaaaatgtatttcctctaagaagcaaakgtactgaaaatattactgctgtccacagctgaatgaagagaagagggtgtggagaagattcggtggcagataagagtacacactatcaaaggaaaaggctgacctactaacatagtccaataatgtcttgtcaaaaaagttataacttggttatctaaaaagagaacatcagatgaatgttgatttatactaggtactaatagtcatcaaattttccatactataaactttcaatagaaaagagtttgggaaaatatctatctaaggacatttatttcactcattaaataagtcctcttggaggttctttgcaactctatacttctaaaacctacagatttcatctaccctgaactcttacaaccattactctgcattatttgctattattcaaaaaggaaacatgagaaaaacaaaatttatcatatggatttttttctgaatttaagttctatgcttccaattaagcatggcctaagtaaaaatttacttcattatttttatttgaagattatttttactcaagcacaaggttctataagcacaggatgctttatctaaaattactgtcatgttgaaaaatgactgtcaaaggaagaataatccagtatgagaaagagtctgtgctcctgaagagaaaatggaatattatatcatgctaaatattattaaatgatgtgtccaacacacaaagttgttagaccagcaagctctctccagataacactgtttg

SEQ ID NO: 35315 - DNA, 821 bp, Homo sapiens
ttaatagatctcttgctatatataatgtaatagaaacatcttttaaaaatataaataaggaaaaatgtatttcctctaagaagcaaaggtactgaaaatattactgctgtccacagctgaatgaagagaagagggtgtggagaagattcggtggcagataagagtacacactaycaaaggaaaaggctgacctactaacatagtccaataatgtcttgtcaaaaaagttataacttggttatctaaaaagagaacatcagatgaatgttgatttatactaggtactaatagtcatcaaattttccatactataaactttcaatagaaaagagtttgggaaaatatctatctaaggacatttatttcactcattaaataagtcctcttggaggttctttgcaactctatacttctaaaacctacagatttcatctaccctgaactcttacaaccattactctgcattatttgctattattcaaaaaggaaacatgagaaaaacaaaatttatcatatggatttttttctgaatttaagttctatgcttccaattaagcatggcctaagtaaaaatttacttcattatttttatttgaagattatttttactcaagcacaaggttctataagcacaggatgctttatctaaaattactgtcatgttgaaaaatgactgtcaaaggaagaataatccagtatgagaaagagtctgtgctcctgaagagaaaatggaatattatatcatgctaaatattattaaatgatgtgtccaacacacaaagttgttagaccagcaagctctctccagataacactgtttg

SEQ ID NO: 35316 - DNA, 821 bp, Homo sapiens
ttaatagatctcttgctatatataatgtaatagaaacatcttttaaaaatataaataaggaaaaatgtatttcctctaagaagcaaaggtactgaaaatattactgctgtccacagctgaatgaagagaagagggtgtggagaagattcggtggcagataagagtacacactatcaaagraaaaggctgacctactaacatagtccaataatgtcttgtcaaaaaagttataacttggttatctaaaaagagaacatcagatgaatgttgatttatactaggtactaatagtcatcaaattttccatactataaactttcaatagaaaagagtttgggaaaatatctatctaaggacatttatttcactcattaaataagtcctcttggaggttctttgcaactctatacttctaaaacctacagatttcatctaccctgaactcttacaaccattactctgcattatttgctattattcaaaaaggaaacatgagaaaaacaaaatttatcatatggatttttttctgaatttaagttctatgcttccaattaagcatggcctaagtaaaaatttacttcattatttttatttgaagattatttttactcaagcacaaggttctataagcacaggatgctttatctaaaattactgtcatgttgaaaaatgactgtcaaaggaagaataatccagtatgagaaagagtctgtgctcctgaagagaaaatggaatattatatcatgctaaatattattaaatgatgtgtccaacacacaaagttgttagaccagcaagctctctccagataacactgtttg

SEQ ID NO: 35317 - DNA, 821 bp, Homo sapiens
ttaatagatctcttgctatatataatgtaatagaaacatcttttaaaaatataaataaggaaaaatgtatttcctctaagaagcaaaggtactgaaaatattactgctgtccacagctgaatgaagagaagagggtgtggagaagattcggtggcagataagagtacacactatcaaaggaaaaggctgacctactaacatagtccaataatgtcttgtcaaaaaagttataacttggttatctaaaaagagaacatcagatgaatgttgatttatactaggtactaatagtcatcaaattttccatactataaactttcaatagaaaakagtttgggaaaatatctatctaaggacatttatttcactcattaaataagtcctcttggaggttctttgcaactctatacttctaaaacctacagatttcatctaccctgaactcttacaaccattactctgcattatttgctattattcaaaaaggaaacatgagaaaaacaaaatttatcatatggatttttttctgaatttaagttctatgcttccaattaagcatggcctaagtaaaaatttacttcattatttttatttgaagattatttttactcaagcacaaggttctataagcacaggatgctttatctaaaattactgtcatgttgaaaaatgactgtcaaaggaagaataatccagtatgagaaagagtctgtgctcctgaagagaaaatggaatattatatcatgctaaatattattaaatgatgtgtccaacacacaaagttgttagaccagcaagctctctccagataacactgtttg

SEQ ID NO: 35318 - DNA, 821 bp, Homo sapiens
ttaatagatctcttgctatatataatgtaatagaaacatcttttaaaaatataaataaggaaaaatgtatttcctctaagaagcaaaggtactgaaaatattactgctgtccacagctgaatgaagagaagagggtgtggagaagattcggtggcagataagagtacacactatcaaaggaaaaggctgacctactaacatagtccaataatgtcttgtcaaaaaagttataacttggttatctaaaaagagaacatcagatgaatgttgatttatactaggtactaatagtcatcaaattttccatactataaactttcaatagaaaagagtttgggaaaatatctatctaaggacatttatttcactcattaaataagtcctcttggaggttctttgcaactctatacttctaaaacctacagatttcatctaccctgaactcttacaaccattactctgcattatttgctattattcaaaaaggaaacatgagaaaaacaaaatttatcatatggatttttttctgaatttaagttctatgcttccaattaagcatggcctaagtaaaaatttacttcattatttttatttgaagawtatttttactcaagcacaaggttctataagcacaggatgctttatctaaaattactgtcatgttgaaaaatgactgtcaaaggaagaataatccagtatgagaaagagtctgtgctcctgaagagaaaatggaatattatatcatgctaaatattattaaatgatgtgtccaacacacaaagttgttagaccagcaagctctctccagataacactgtttg

SEQ ID NO: 35319 - DNA, 825 bp, Homo sapiens
  misc_feature (1)...(825): n = A,T,C or G
cacaaatagcagggacagaacaacctgatatcacagggtcaaggactgaataaatgaggccatacttactggagcaaaatgaattttttttattgtacttcagggcaacaagtcawcagctgcaggaaaacaaaaccaggtccaatctatgatctaagaggaagtcaggaaaggcttggaagagagatccaaaggccggcctggcaaggggaatcccacatgagaattcctgggagagagcaggccccaggcagcaaggtcatcttgcctgcttctctgtaagttaatcctggaaacaaaaggaaaaatatttcaaagcccaactcagtaaactgaggcctaagtcaagttactaaacaatggatgctcagagttggaaggctgctacccaattatctaatcaggagtttcaaatggttctaggccctttgccaggatagcagagccagtcttttagttgtctgtctgcagtgagccccagcgccctgcttctccaccctctgccctagaaccaatgtatcacagcataactgtttggtcagcaacagccttcatctgcacaggaggatatacaacacacctannnnnnnnnnnnnnnnnnnnnnnnnnnnnnnnnnnnnnnnnnnnnnnnnnnnnnnnnnnnnnnnnnnnnnnnnnnnnnnnnnnnnnnnnnnnnnnnnnnnaaggcatagccataatgaccatgggagctcccaaatgtctagactaagtaagatcaactgtgggtgggggaaaagagcatcaggtaatgagtgagatggaaattatcatcagtccagtgaattgaggacatagagtcagatt

SEQ ID NO: 35320 - DNA, 267 bp, Homo sapiens
ataaaaatcagttttggggacatatagagtgatttatagcctgcarccaatttttagaacacttctgccctatattgttttaatttagaagaaaatacactttattgcttttcataatgttatgcttccatcaatatttgaattcatattatcaccataaaaataattgattttcaatgctgaacttctaaactgaatctacaatagcttttacaatgatgtcagatgtttcatgctgctatggttcgaatgtgtcctttccaaaat

SEQ ID NO: 35321 - DNA, 739 bp, Homo sapiens
gatccgaggcctttccctgcccagtctggagcctgccccacacttcaccaggcactggactccaggaggaccccctcctccccctttcttgtcttcaggtcacgccaccctgtgctgtatccagcaccacagaaacctcagtgttcgtcctccactgggctcggaggcacaaggaagccttggggtgtggtgaaagactgttcttatctagagtttactcccaggccaggggactaccgtcttcttcacacacatccttgaaagagaaagcccctttggggcagagaggtgagggcttcatctcaacatatgctgatggaggaggggggatgctttttcttttcttcttgtacttttttttttttggacttgttaggagttaatgttgcaaagagtagcttacatcttcactttctgaagacacttgaattgaggaccaatgtagctgtcatggcaagggccatcggggctggccacctcacacccaccatcctcccatggggctccaagacctgagacacaaggcagcagcctgcccagatccccctgttcatcctgcatgctcccaaggttggtccatgccagcacaaactttgggcatcagacaccagaaggtgtgtgygcctcggccctgaaaggtgcgagtctctctcaccctctcctgcatctgggagcagatgcattgccagtagaggagggccacccggccctgccccagccgggacccctgcagctcagg

SEQ ID NO: 35322 - DNA, 1189 bp, Homo sapiens
ccctgctaatttttttaattttttgtagagacagggttttgccatgttgctcaggctggtctcaaactcctgggctcaagtgatcctccctccttggcctcacaaaatgccgggattacaggcatgagccacctcgcctggcttatcagttcttttctaacagtaaagacagaattggcttaagaaatacatagtcctgctgtgaagtttcttgtttgaatcacctttctgaattgttgtatgaaaaaaggtaaatagtatatgaggaaaataaataagttatgaatattaaatcaacatgaacaaatagtaagttgtacttgttaaaattgtcataaacttctgacccctatcaaattaaatttaaataattaagtcaaatatgaatagacagggatcatatgggagagtgtagtctggatcccaaatttgtacaataaaagagaaccgctagaaaatcattttgagcaagggactgataggtgttacctgagaaataaaagccctagcccctgccttccgactgcttacattctggttgaagacatagaatgcacaaccttaaagagaatgtkccatcttagaatgcacaacccatgttggaagccggagcgctcaggcagtcaggatgggcaggagctggaatcaaggatggcaggactctgggtaaagcagagagatgtagagagggcccccaggaccggagccagcacaagccaagtgtgagatccggaaagcaaagagttccagagaagattgacctgagagatctgaaggtctgtttgggagacattttctagaaccttctcttgaaagcaacggggaggctttgaaggccactgagaaggggagggatatgtgaatttgtcctgaattctcagacatttggtttcactcttttttttttaatggagtcttgctctgtcatccaggctggaatgcagtggcatgatcttggttcactgcaccctccacctcccaggttcaggcgattcttctgtctcagcctcccaattagctgggattacaggcacccaccattccacccagctagtttttgtatttttagtagagacagggtttcatcatgttggccaggctggtctcgaactcctgtcctcaagtgatctgcccacctcagcctcccaaagtgctgggactacaggcgtgagccaccatgcccggcctg

SEQ ID NO: 35323 - DNA, 873 bp, Homo sapiens
aaaaaaaaaaagtacttaccttataaagtttcagtgaggattaaatgtatgcatgtggccagaatagggccgggctcataagcgggtgcttactaaagcttagctattattatcctcattacccaagacagcactggtctccctttctctcccagcccccttcaccctgagcatgcagagccctactgggaccctcagccccattgtccctctgtctagtcagccctggtgtgtctggcccacccagacctgagggagcttggttccctggtaagggaagtgctgtacagggaggggaagagggaactggaagagggaaatgagacccctgagacagaggtaggatggcaagggatacccattccagttacgtctatttgggtgagcgttcgttgggctaaacatagccacttccctcactcctcagcaggtcatcttccaaacctggaggctgaggtgtttgtggagatgccagggccctggacacccagtgtgcggcgtggccatagaggccagcacatcaggccggcctaccagaaacgctgttgcttcagtcacagcaggcaacgcctccttgcctttagcagacacctcattcccctctaagtctcacttccaacctctgtgaaacaggaaaaacagcacagccggagcaaacctccrtccacaactgaggtgtgcaagaaatgacttattttttcctgtgaaccaactttccatggatcctgagcacatatccctctgggatggagagggatcactgcagctattctggtgctttcagttatcccgcctgcctggggaatgtgcccaggccctgggtctcaggcagtgtgcaggtgacagggttataggtcctctgcacccttctta

SEQ ID NO: 35324 - DNA, 873 bp, Homo sapiens
aaaaaaaaaaagtacttaccttataaagtttcagtgaggattaaatgtatgcatgtggccagaatagggccgggctcataagcgggtgcttactaaagcttagctattattatcctcattacccaagacagcactggtctccctttctctcccagcccccttcaccctgagcatgcagagccctactgggaccctcagccccattgtccctctgtctagtcagccctggtgtgtctggcccacccagacctgagggagcttggttccctggtaagggaagtgctgtacagggaggggaagagggaactggaagagggaaatgagacccctgagacagaggtaggatggcaagggatacccattccagttacgtctatttgggtgagcgttcgttgggctaaacatagccacttccctcactcctcagcaggtcatcttccaaacctggaggctgaggtgtttgtggagatgccagggccctggacacccagtgtgcggcgtggccatagaggccagcacatcaggccggcctaccagaaacgctgttgcttcagtcacagcaggcaacgcctccttgcctttagcagacacctcattcccctctaagtctcacttccaacctctgtgaaacaggaaaaacagcacagccggagcaaacctccgtccacaactgaggtgtgcaagaaatgacttattttttcctgtgaaccaactttccatggatcctgagcacatatccctctgggatggagagggatcactgcagctattctggtgctttcagttatcccgcctgcctggggaatktgcccaggccctgggtctcaggcagtgtgcaggtgacagggttataggtcctctgcacccttctta

SEQ ID NO: 35325 - DNA, 1199 bp, Homo sapiens
aatagagaaatggtatcctgagggctctatcactgtctccatttcttggctcggctttcctctgggaacgtgctttattctcagacaggatcatttcacacagttggaaagatgctgccaatgacctcagccccgcattgttgtggcttatgaacatcaaagaaaaagtgaccctctttatcatagcgtccatgtggccagtctcagggaagactctaattgtctttgcttgcgtcacaagttgatccattaaccgattattgtggccaggttgatgaataactctgattggcagtctccctagggagggtgagataccgtaattaactcatgtcaggcccaattggatgctaagcagggaaaaaacagattgtttgcttgtttttcacaggaatggataaggaaaggacaatgggtaacttgttttttattttacttttccagtaaaatttttctttaatgaggacacatcacattttatcactttttaagagaaaattatatatatatatatatatatatatatattcattatcatgagggtaatatttaggagagataaaagtccaggatgagctgaagtctgccaaaaattctaagaatactcagaaagggctcttttataaagttatattagtaacttagagatagaagaaggtataggtttgctacctggagccaagggtgtaatgctcatggtgaatacagaaaaaagagaacagaaatgcagataatgttttatgtctatggtttctgccaaagagaattgtcttttaattttctttttctttcttttttttttttgagacagagtcttgctctgtcgccaggctggagtgcaatggcgcgatcttgactcgctacaacctctggctccctggttcaagggatcctcctgcctcagcctcccgagtagctaggattacaggtgtgcgccaccacgcccagctaatttttgtatttttagtagagatggggtttcrccatgttggccaggctgatcttgaactcctgacctcgtgatcctcccagctcggcctcccaaagtgctgggattataggcgtgtgccaccgtgcctggccaattgtcctttaattttaaagggtgggaccttgcttagccagaatggcagactgaaatggaggccttgattgtaagcaattgttctccactcatgtcccctgatcacttatgcatg

SEQ ID NO: 35326 - DNA, 513 bp, Homo sapiens
tgagctggttcccactgtaggcaactgggcatatcctgctggggcccctcagagaaaccatgaggaataccctcagaattgttccacagaaggtaggaaagctgacgcatttatccatgattccagtccctcattgctgagggctgccgcagggacatcagcttcctggacttccaagctgtgtctgctgsagggttgagtggccttctgcagctaaggagaaagcccggaggcagaaaagctgagggaagctgcagggcgcatttgaaatggggttcaagcagggtgcatgcaactgtcccccctggatgccctgagtcaactgggccaagcaggtgtgaggagcgccccaccagggtctgtacagtgtctcagcagatgagttcctgctgcaggtgcacttctggccttgctggctgcctccagcagatgtaagagctctggcccttaccacatactggaatttctctgtgtgggctgtaacgaatgtgtgccccccccccccaagacgtg

SEQ ID NO: 35327 - DNA, 513 bp, Homo sapiens
tgagctggttcccactgtaggcaactgggcatatcctgctggggcccctcagagaaaccatgaggaataccctcagaattgttccacagaaggtaggaaagctgacgcatttatccatgattccagtccctcattgctgagggctgccgcagggacatcagcttcctggacttccaagctgtgtctgctggagggttgagtggccttctgcagctaaggagaaagcccggaggcagaaaagctgagggaagctgcagggcgcatttgaaatggggttcaagcagggtgcatgcaactgtcccccctggatgccctgagtcaactgggccaagcaggtgtgaggagcgccccaccagggtctgtacagtgtctcagcagatgagttcctgctgcaggtgcacttcyggccttgctggctgcctccagcagatgtaagagctctggcccttaccacatactggaatttctctgtgtgggctgtaacgaatgtgtgccccccccccccaagacgtg

SEQ ID NO: 35328 - DNA, 547 bp, Homo sapiens
gaagaccctggatgcaaaggactggatctctcttacggcataatcaaggctactagtggccatacgggtagcagccagagtgtgggctctgagcctccatgtgcccccagtatgccaacagtaacagcacaggagagttaccttgcggacactgagacagggccgtggtgatgccatacagccgggtctgcttgtggggttggaaagcatccgtctccttggaaattgcaagatcgagagcaaccacggaattcctacaaagcaccaaagggcagaaggtgaaaacacatctgatggcttgaacttgtatctaaacaaggcagcctctttgtcattttgaggataaactggaggccataaacagacatgatggccttcttcctagacatcccttccttcccctggggtgggycaagcctgcatttctctggctttttacaaaagggtaaagaccagttagctctcccctcccactctagatcccaggcaggaaatgagctttctagacagatgcccctggccagttgtcttctcagtttaatccctc

SEQ ID NO: 35329 - DNA, 1220 bp, Homo sapiens
tttctgctcacacaacactctctgatgagccatgggacagactgaatgtcacatttgtagcatcagttactccaaaggacatgatggaaggtagccaggtgggtaagcatgcaagtggacagcatcagctgggttcagggatgcttactgataccacacaaattctaccttgcaggcccctgaccctaggcttgcagaaggattcgctctgacttcacaaacaagactgttgtgaaagtatttttgttctgggacttaccgtcatgggtcagaatctagatgctgctgcttatttaatagctatgcaaacattattaaactctctatgtctcagttttccaaactgtcaaactcttttttatgactgttgggaagataactgagactattctttcacttaacaagtatttactaagcattgatgatggtctggaagcagtgctagaccctggaccttagggatacagatatgaatacagcatagtctytggtctccaggagccacagtctaggggtaaaggcagatgaaaaactatagcaagatgaaacattatgtgtgtgtatagtacacataactgataagagtcaagtcttcctggaatacaccattcataatccttcagggccttggcacttattgttgcctctgccctcaaacttgcctcccagatatctgccaagtttgctccctaactttcttcaggtctttgctcaaatggcattttgtcataggcatcttccctttccaccttatgtaaaataacatccactctcttggggtctattcccatatctgttttcttcctagccatatcatcacctgatatactgtctttctttttccttcccttccctgctctagattgtgaactccatgtgggcaggagcgttgttttattcactgctgtaactcaagcaactgcaactatgtttgtaatgtaattaaatgttacaataaatatttgctgactgactgaacaaataaacagaaaaatgagtgaaaattggaatgacagaataaaagacataattcttactgggagagtctcaaagaaaaaaacccttgagagggacctgcagatgtcagagttacttgaataatacagggaacagatgagggaagagaatgtgcaaaggacatttagaaagtcatggtctgttctagaagcagctgttatttgttagtaactagagagatgaagataggctcagaggcatgg

SEQ ID NO: 35330 - DNA, 1317 bp, Homo sapiens
cttctgaaggtggagttgatgattggttgcaagatttgatgagttcaaagaaggaaaataagtaggaatttagtcccgtctgcttcccctcccagcttcccatatttaatcatttcttttttagcttttatttaattcttattatatacctggcagtgtttaaagtggtggaggtccagcgttgagcaagacaaaatccccacccttaagatgtttacactctggtgagataaagagaaaactaatgtgatggtaatgatacagtgagatcagtgctctgaaggagacaagcatttagattatatgcaggtattcaggcagtgggaacaggttagaagcagcattagtgggttcagacaatttcagatctccattagggttggagggtgaagtgtgaatrttaggaatggtgagaaatggggcttgtaggaagcagcaccagattgtaaagaaccttgtgaccaactttaaggtttttacttccattgctcttcccatatcagcaatgcctttcttaacatgctactgacatggggagagtagagggaagaacaatgtaaagatgtgtttcgagggtcacacgattcctttttttctgagtaacacaattggaactgcatgtttaatctcttcattaattatttttcattgtagatactgatatccatatgacttttcatctctaaactgtaaaatcctcaagaacaggaagtgtgttttattcacttctgtatcttcagcatctgatagtaactcagtaaatgtttttaaaaagtcatttaacatttgtagtcattttatgttttagcctagtaactaaaacatagttgttgtgttatttatttgaaaaacagtttaagttttaaacaactgagtttacagaccactctgtgaacttaagattacttgcctttgaatagggaaaaattactaaatttaaaaattgaggaattttttttactgtttaattacaaggacaatcacagcttaacagaagacttcaatacagaatttgggcaactatgttaagtgtttagtctgaaatgtgttattattcctttggtttatagacatatgaggaagatcgaaaaaactactctgaagttcaaattagatgtcaacgtttggccttagaattagcagacacaaaacagttaattcagcaaggtgactaccgtcaagagaactatgataaagtcaagaggtaagtagttaaaatggctgcagtagtagttctctatttttagggtgcatcaaagtcacctgagtttttaccaacaatcagttgttaattttacttttaccttattcttcttt

SEQ ID NO: 35331 - DNA, 1317 bp, Homo sapiens
cttctgaaggtggagttgatgattggttgcaagatttgatgagttcaaagaaggaaaataagtaggaatttagtcccgtctgcttcccctcccagcttcccatatttaatcatttcttttttagcttttatttaattcttattatatacctggcagtgtttaaagtggtggaggtccagcgttgagcaagacaaaatccccacccttaagatgtttacactctggtgagataaagagaaaactaatgtgatggtaatgatacagtgagatcagtgctctgaaggagacaagcatttagattatatgcaggtattcaggcagtgggaacaggttagaagcagcattagtgggttcagacaatttcagatctccattagggttggagggtgaagtgtgaatgttaggaatggtgagaaatggggcttgtaggaagcagcaccagattgtaaagaaccttgtgaccaactttaaggtttttacttccattgctcttcccatatcagcaatgcctttcttaacatgctactgacatggggagagtagagggaagaacaatgtaaagatgtgtttcgagggtcacacgattcctttttttctgagtaacacaattggaactgcatgtttaatctcttcattaattatttttcattgtagatactgatatccatatgacttttcatctctaaactgtaaaatcctcaagaacaggaagtgtgttttattcacttctgtatcttyagcatctgatagtaactcagtaaatgtttttaaaaagtcatttaacatttgtagtcattttatgttttagcctagtaactaaaacatagttgttgtgttatttatttgaaaaacagtttaagttttaaacaactgagtttacagaccactctgtgaacttaagattacttgcctttgaatagggaaaaattactaaatttaaaaattgaggaattttttttactgtttaattacaaggacaatcacagcttaacagaagacttcaatacagaatttgggcaactatgttaagtgtttagtctgaaatgtgttattattcctttggtttatagacatatgaggaagatcgaaaaaactactctgaagttcaaattagatgtcaacgtttggccttagaattagcagacacaaaacagttaattcagcaaggtgactaccgtcaagagaactatgataaagtcaagaggtaagtagttaaaatggctgcagtagtagttctctatttttagggtgcatcaaagtcacctgagtttttaccaacaatcagttgttaattttacttttaccttattcttcttt

SEQ ID NO: 35332 - DNA, 1254 bp, Homo sapiens
gcttgatctaaagttatattctttactctttggtttagtacctccacatctatttccacaagtattcaaaatatttgctgatataaactggtaaccttttgcaattgtttagttatgaagtcttttccttctgggtttgactttgtaattggattcccggtcacgctgggttctgaccctggtttgaagtgtaaaaataatgagaaggagggaagatggggtttgaggagaattggtcaaccctttccaggtaattagcttagataaggtcattttaaagtttcaagcaaaataaccatagcctcataagactgtaaagacagcctgcttccactgacaagagagtgycagtggggttttgctgtggagtgtactctaaatatgggggaacatattcacttttttacagtgtgctccaacattccttcattccagatttcagggttccagtctttcccaaacaatgcctgaattctcatacaagaaacctggcaaaactgtgacttcaactcatgttataattcaaaaaccctttggtgtcaaattttgagggcttttgtttgttcattgatttggtttgttggtttattctttttgtttttattttttttatttttttcggttctaaattactggcttaaagcatggactgaagatcaggaattggaacttgttagtttctctttgtaagtgtccagaccatgggaaacaagcctcccattcctagcgctgattttcataccattcagagttcttgattgcaagcaacataatccaactctagctaattggagcaaagaaatagtttattaaaaagttatttggcggccgggcatggtggctcacgcctgtaatcccaacactttgggaggccgaggagggcggatcacgaggtcaggagattgagaccatcctgactaacacggtgaaaccccgcctctactactaaaaaaaaatgaaaaaagaaaaaaagttatttggcaactctccaacttatcatgagggctggaaaacaacgttcaggactactcaggcaagaacaataccccaaatcacacttcagagggggccctgtgagttcacatgggcaacactgctgagcactagatgctggcacttgtaccctccacactgctgtccctctctatgacatgctgtcactcgtcatgccactgctgcctgaaaaacttgatttttctgaaaatactactgctgctctgtccccaaagagagttccctgtgatgctcatgagt

SEQ ID NO: 35333 - DNA, 1254 bp, Homo sapiens
gcttgatctaaagttatattctttactctttggtttagtacctccacatctatttccacaagtattcaaaatatttgctgatataaactggtaaccttttgcaattgtttagttatgaagtcttttccttctgggtttgactttgtaattggattcccggtcacgctgggttctgaccctggtttgaagtgtaaaaataatgagaaggagggaagatggggtttgaggagaattggtcaaccctttccaggtaattagcttagataaggtcattttaaagtttcaagcaaaataaccatagcctcataagactgtaaagacagcctgcttccactgacaagagagtgccagtggggttttgctgtggagtgtactctaaatatgggggaacatattcacttttttacagtgtgctccaacattccttcattccagatttcagggttccagtctttcccaaacaatgcctgaattctcatacaagaaacctggcaaaactgtgacttcaactcatgttataattcaaaaaccctttggtgtcaaattttgagggcttttgtttgttcattgatttggtttgttggtttattctttttgtttttattttttttatttttttcggttctaaattactggcttaaagcatggactgaagatcaggaattggaacttgttagtttctctttgtaagtgtccagaccatgggaaacaagcctcccattcctagcgctgattttcataccattcagagttcttgattgcaagcaacataatccaactctagctaattggagcaaagaaatagtttattaaaaagttatttggcggccgggcatggtggctcacgcctgtaatcccaacactttgggaggccgaggagggcggatcacgaggtcaggagattgagaccatcctgactaacacggtgaaaccccgcctctactactaaaaaaaaatgaaaaaagaaaaaaagttatttggcaactctccaacttatcatgagggctggaaaacaacgttcaggactactcaggcaagaacaataccccaaatcacacttcagagggggccctgtgagttcacatgggcaacactgctgagcactagatgctggcacttgtaccctccacactgctgtccctctctatgacatgctgtcactcgtcatgccactgctgcctgaaaaacttgatttttctgaaaatrctactgctgctctgtccccaaagagagttccctgtgatgctcatgagt

SEQ ID NO: 35334 - DNA, 1474 bp, Homo sapiens
taaaacctgttcctacttttttcagtttcaaactttgtgatagtatgtatgtctgttttatttgttagcaaattttgtagctttttaatctatgtttaagtaatgcttttaaaaagggccaagattcgtgtataagatacctatgtgttcagcttaagcaaaattaggttagaaatgaaattatatgaatcaaattgtacctaatttaagagccctggttgcattcataaaaataatctagaaggctaaatggaccattttttaatgaaaaggatacgttgtattagcgccatctactgttaggtcagaataattacttcttggtgtacgtttggatttttcccaatggcatattccaagtccagcatctttctgcatgtcctttaacttaattgaccagtctgtagaatgtgggcgttttaagctattcaaataatatcctgtctatgttcagggtcagccaatttttgtagatcttgtttcataattctttttttttttttttttgagacggagtctcgctctgtcgcccaggctggagtgcagtggcgcgatctccgctcactgcaagctccgcctcccgggttcacgccattctcctgcctcagcctattgctgggactacaggcgcctgctaccacgcccggctaatttttttatttattttttgtatttgtagtagagacggcgtttcactgtgttagccaggatggtctcgatctcctgacctcatgatccgtctgcctcggcctcccaacatgctgggattacaggcttgagccaccgcacccggcccataattcttgttaaagtagcaatggcaaatttcctacaattttcttgatagttcatgattttaaaataaagctagctgattgtgctagctttctacaaagcatccttgttttaaaatttgctaattgataattgttataaagactgggatattaaaattgaacatccaatttgtagctgaaagactgtctagagaaagctgtatctcaatatgttgcttgttaattcactgaatgtctaactctgcatcgtacattattaagtgtattcgtaatttaggggaaaacctatatctaaataatgtagttacttttttaaaatttctyaatgtaaagaatattacaaaaatagctttatataatgtactgattaggaatataagctttaaagttagattctctgagtttaaataccggctttagcacttgttgcatttatgatcttgggataattgtgaagcataaatatctttctaaagcacttggaataacatctggcatattagtaagcactcaataaatgttagttgctatcattaatattttaatcaatgtttacatatccaaagtaaacataatgtttcaataactatatttttatcttagtaactaataacttttttggtaatgaaacctataatatttgacataaaatatgtaacttaagaatataaatgttc

SEQ ID NO: 35335 - DNA, 546 bp, Homo sapiens
gtctaacctctccataaaagcaaaatggctttataactagaaagctttaagtcagcatcattgaaagagccctgggtggccgagcgcattggctcatgcctgtaatcccagcactttgggaggccaaggtgggcggatcatgaggtcaagagatcaagaccattctggccaacatggtgaaacccygtcactactaaaaaaaaaaaaaaaaaattagctgggcatggtggtgcgtgcttgcagttccagctactcaggaggctgaggcaggagaatcgcttgaacctgggaggtggaggttgccgtgggccgagattgcgccactgcactccagcctgtcaatagaacgagactctgtctcaaaaaaaaaaaaacaaaaaaaacgcaaacctccagagaggtggagctaacatactcaatccctaggaaactgctggagaccaggagagttctaaaagatgcttgttagcaaatgtcccaatttacccaagagggaaagatacaggtcctgctgcatgggctggtaagccaggcaaaagtttaggc

SEQ ID NO: 35336 - DNA, 546 bp, Homo sapiens
gtctaacctctccataaaagcaaaatggctttataactagaaagctttaagtcagcatcattgaaagagccctgggtggccgagcgcattggctcatgcctgtaatcccagcactttgggaggccaaggtgggcggatcatgaggtcaagagatcaagaccattctggccaacatggtgaaaccccgtcactactaaaaaaaaaaaaaaaaaattagctgggcatggtggtgcgtgcttgcagttccagctactcaggaggctgaggcaggagaatcgcttgaacctgggaggtggaggttgccgtgggccgagattgcgccactgcactccagcctgtcaatagaacgagactctgtctcaaaaaaaaaaaaamaaaaaaaacgcaaacctccagagaggtggagctaacatactcaatccctaggaaactgctggagaccaggagagttctaaaagatgcttgttagcaaatgtcccaatttacccaagagggaaagatacaggtcctgctgcatgggctggtaagccaggcaaaagtttaggc

SEQ ID NO: 35337 - DNA, 1831 bp, Homo sapiens
tttaaaatgtctaagtaaataacataatgcttcatggaacatggatcagctattttattacctatttgcatagaaatttaccttgcaataaatgtttaaagaaatgcaaatttccttgcttattcctttaaacatatttgcccttaaaaattagtaaacatttttactgagcttagaagattaaacatttactatataaaatttaaagctatctcaaattcaaagtaattttagtatgtaaatatgataggtgcatttgattatatgtaacatgactcaaaattaaatgaagtttgacattcagtaataaactgtgaataaaagtatttatggatcaaaaagtcatacaaataacagagggaattaaacaaacttcacatgcacatacactcagtttggatcttaaacaaatgttgcattaatatttgttacctaatttttttaagtttatatttgatatggttaggctttgtgaccccacccaaatcttatcttgaattataatccccgaaatcttcaggagttgaggaaggagcctgttgggagataactggatcatgggratggtttccctcatgctgttctcatgacagtgagttatcacaagatctgatggttttataagtgtttggcaagttcttccttcactacttttctctctcctgccaccatgtgagaaggtgtaagcttgcttcccctttgccttgtgccgtgattgtgagtttcctgaggcctcctcaccgaagtggaactatgagtcaattaaaactctttattttataaattacccagtcttgggcagtatttttatagcagtgtgagaatggaccaatacagtattcctattatacagcatcacttccatcattccccacttcccctcaaaggaaactatggtatgacttatgctagcaggactgtccatgtagtgaagtcttgagaaccagattggaagcaaacacttacttcttgatgtggagtgaaacatcatagtgcaggagtgaactgtgtccttctgtgggaacagagatgacttccaaacatgaggacataggttaggaagatgtagtaaataattatttttttaaaaggacaagataaataaatgctaatcagtttgataggaaagagtgtgaatgagatattgcaatttaggtagagtagtcagagaatgcaccagaatgatgatgaaatagtcatatcaagaacaaggctgtaagtctcatatgtaaagataaagatatgtaatcatcctaatgcataaatggaaaatgtggctggaagtgagtaaaagagttaagtagggagggtaacaaaaagttgatgttagggacgaagtaggcaaagaccagacagtagaaacttgtgaaccatggtaaacagtttggattttattctgaatttaataggtagttatcagaaaagttttttgtttgtttgtgttttgacacagagtctctctctgtcacccagcctggagtgcagtggagcgatctcagctcactgcaaactctgcctcctgggttcgagggattctcctgcctcagcctcccaagtagctgaaattacaggcacttgccaccatgcccatctaatttttgtattttcagtagaaacagggtttcaccatgttagccaggctggtctcaaactcctgaccttaagttatccacccaccttggcctcccaaagtactgggattacaagcatgagcctggctggaaattttttttttaatatgtattttatttacattatctgattatattggaagatatatctgacatttttagaagatgcaatatggagagtagtagatcataaggagtcc

SEQ ID NO: 35338 - DNA, 1831 bp, Homo sapiens
tttaaaatgtctaagtaaataacataatgcttcatggaacatggatcagctattttattacctatttgcatagaaatttaccttgcaataaatgtttaaagaaatgcaaatttccttgcttattcctttaaacatatttgcccttaaaaattagtaaacatttttactgagcttagaagattaaacatttactatataaaatttaaagctatctcaaattcaaagtaattttagtatgtaaatatgataggtgcatttgattatatgtaacatgactcaaaattaaatgaagtttgacattcagtaataaactgtgaataaaagtatttatggatcaaaaagtcatacaaataacagagggaattaaacaaacttcacatgcacatacactcagtttggatcttaaacaaatgttgcattaatatttgttacctaatttttttaagtttatatttgatatggttaggctttgtgaccccacccaaatcttatcttgaattataatccccgaaatcttcaggagttgaggaaggagcctgttgggagataactggatcatggggatggtttccctcatgctgttctcatgacagtgagttatcacaagatctgatggttttataagtgtttggcaagttcttccttcactacttttctctctcctgccaccatgtgagaaggtgtaagcttgcttcccctttgccttgtgccgtgattgtgagtttcctgaggcctcctcaccsaagtggaactatgagtcaattaaaactctttattttataaattacccagtcttgggcagtatttttatagcagtgtgagaatggaccaatacagtattcctattatacagcatcacttccatcattccccacttcccctcaaaggaaactatggtatgacttatgctagcaggactgtccatgtagtgaagtcttgagaaccagattggaagcaaacacttacttcttgatgtggagtgaaacatcatagtgcaggagtgaactgtgtccttctgtgggaacagagatgacttccaaacatgaggacataggttaggaagatgtagtaaataattatttttttaaaaggacaagataaataaatgctaatcagtttgataggaaagagtgtgaatgagatattgcaatttaggtagagtagtcagagaatgcaccagaatgatgatgaaatagtcatatcaagaacaaggctgtaagtctcatatgtaaagataaagatatgtaatcatcctaatgcataaatggaaaatgtggctggaagtgagtaaaagagttaagtagggagggtaacaaaaagttgatgttagggacgaagtaggcaaagaccagacagtagaaacttgtgaaccatggtaaacagtttggattttattctgaatttaataggtagttatcagaaaagttttttgtttgtttgtgttttgacacagagtctctctctgtcacccagcctggagtgcagtggagcgatctcagctcactgcaaactctgcctcctgggttcgagggattctcctgcctcagcctcccaagtagctgaaattacaggcacttgccaccatgcccatctaatttttgtattttcagtagaaacagggtttcaccatgttagccaggctggtctcaaactcctgaccttaagttatccacccaccttggcctcccaaagtactgggattacaagcatgagcctggctggaaattttttttttaatatgtattttatttacattatctgattatattggaagatatatctgacatttttagaagatgcaatatggagagtagtagatcataaggagtcc

SEQ ID NO: 35339 - DNA, 803 bp, Homo sapiens
catctctatacccggctgttgtctttactgtctcataaaattagcctgacagccaaggaaagcgaaggcagacgcatggcctgaatttattagcctgaatctgattccccaaacagcaacctggaagaaattctgcctatcactcactcagatttcttttttctcactcactcagtcgtcagcagaaaatgccgtattgttgcagaagggaagctcacgcctggggcagcctcctcttctataaaacgtgtatatgtgaggggtaggaggtgggcagagggtggactagatcagtgcttcccaaaatctgtctgaacctcaatcagctgtttaaaaatacggattcctgggtcccgtctctaatgtgctaagtgagaggctattcaggtagaacccagaaatctgaatttttgaaagctccccttgatggttttgctaatcagtcaagattgggcatcatggatctaccaggttactttggtctggaacattgtagattctggaagcccagctcctcccctaaaccatagttgtcagtcccatctctgtataaaaactagaaatcattttctaacaacccagagaagytctacactcaaaggagtttgtttgcctaaaatggcttcaaaattttctcctccccacggatcagttggcatcagggacaacaaacacaccatggccgtgtctatccgaggtgtggcctgaagcttaggagcactggcatcacctgggaacttgttagaaatgctgattctggggccccattccacacctcctgaatcacaatctccacttgacca

SEQ ID NO: 35340 - DNA, 676 bp, Homo sapiens
ttttatgctgggcacttttcattagataagtaagtatatgtcagaaaaacgtgaaaaaaaacccatctgtgtctataactaattaaaaagatgtgtgatcaacaaacaccctcttctcctacaaccagggaacaaacagctcattactttccttaaaagscatcctggaaacctttcccggggaaaatgcgctgagcattgattatctatctacacccatcatagccacacggcacattattccatttgttgggagaccttactttaccggttgcagaccaagtttccagagtagaaagcatggtcttagtctcaccccaactaatggttcttcagaggtctcccaaaactcctgccgcctcttctgcacgttaatgaaaataaatggcaccaatctcaatgttctttgcctcagaccaaatggggccaggagcttagaagcaagaagctgaggcatcagcagggtactcccaggacagggcttcctttggctgtgatcattacgtgattccctgacaggctgctgttttcgtcgacggtgtccgtaactcactgactgaaatctttgacctctgtagtacagatgggatccatttgctgccagtaatgatgtgtgacctcttggtgaaggcaggggaagaaaagaagctgaagagatcttcaatatttttgagaa

SEQ ID NO: 35341 - DNA, 676 bp, Homo sapiens
ttttatgctgggcacttttcattagataagtaagtatatgtcagaaaaacgtgaaaaaaaacccatctgtgtctataactaattaaaaagatgtgtgatcaacaaacaccctcttctcctacaaccagggaacaaacagctcattactttccttaaaagccatcctggaaacctttcccggggaaaatgcgctgagcattgattatctatctacacccatcatagccacacggcacattattccatttgttgggagaccttactttaccggttgcagaccaagtttccagagtagaaagcatggtcttagtctcaccccaactaatggttcttcagaggtctcccaaaactcctgccgcctcttctgcacgttaatgaaaataaatggcaccaatctcaatgttctttgcctcagaccaaatggggccaggagcttagaagcaagaagctgaggcatcagcagggtactcccaggacagggcttcctttggctgtgatcattacgtgattccctgacaggctgctgttttcgtcgacggtgtccgtaactcactgactgaaatctttgacctctgtagtacaratgggatccatttgctgccagtaatgatgtgtgacctcttggtgaaggcaggggaagaaaagaagctgaagagatcttcaatatttttgagaa

SEQ ID NO: 35342 - DNA, 923 bp, Homo sapiens
tgaggcccccataggccgagctcagcgcacctgcatagctgctggtggtcttcgtatggatactcmtgttctgcatcccagactccagccggctctcctcgccctctagcagcttcctgtaggtggcgatctcgatctcgatgtccagggccagcttgacgttcatcagctcctagtactcacgcagctgccgcgccatgtcctgcttggccggctggagggcggcctccagctcggacagcttggcgttggcacccttaactgccagctcctcaggctgctcggcatctgtgatggcggcctccagggaagccctctggcctttgaggcactcagtctcagcctggagcccactgatgttccagtttatctcggaggtctcagtctttgtatgctgcacgtcatcccagtgcctcccagccagcgcctgcagcttctcatacttgatctggtacatgctctcagcctcagcccgcctgcggttggcgatctcgtactgcgccttgacctcagcgatgatgctgtccgtgtccatggagcggctgttgtccatggacagcaccacagacgtggcggagatctgggactgcagctcccggatcttctcttcatacagccgcctgaggaagttgatctcgtcagtcagcccttccaggccagactccagctctaacttgttcatgtaagcttcatccacatccttcttgatgaggacaaattgattctccatctctgtacgcttattgatctcatcctcgtacttgttcttgaagtcctccaccagcccctgcgtgttgccaagctccgtctccagcttcagcttctcctggcccagagtctccagctgccgcctaaggttgttgatgtagctctggaacatgttgtccgtgttgctcccagccgtctgctgctgctgcaggagg

SEQ ID NO: 35343 - DNA, 923 bp, Homo sapiens
tgaggcccccataggccgagctcagcgcacctgcatagctgctggtggtcttcgtatggatactcctgttctgcatcccagactccagccggctctcctcgccctctagcagcttccygtaggtggcgatctcgatctcgatgtccagggccagcttgacgttcatcagctcctagtactcacgcagctgccgcgccatgtcctgcttggccggctggagggcggcctccagctcggacagcttggcgttggcacccttaactgccagctcctcaggctgctcggcatctgtgatggcggcctccagggaagccctctggcctttgaggcactcagtctcagcctggagcccactgatgttccagtttatctcggaggtctcagtctttgtatgctgcacgtcatcccagtgcctcccagccagcgcctgcagcttctcatacttgatctggtacatgctctcagcctcagcccgcctgcggttggcgatctcgtactgcgccttgacctcagcgatgatgctgtccgtgtccatggagcggctgttgtccatggacagcaccacagacgtggcggagatctgggactgcagctcccggatcttctcttcatacagccgcctgaggaagttgatctcgtcagtcagcccttccaggccagactccagctctaacttgttcatgtaagcttcatccacatccttcttgatgaggacaaattgattctccatctctgtacgcttattgatctcatcctcgtacttgttcttgaagtcctccaccagcccctgcgtgttgccaagctccgtctccagcttcagcttctcctggcccagagtctccagctgccgcctaaggttgttgatgtagctctggaacatgttgtccgtgttgctcccagccgtctgctgctgctgcaggagg

SEQ ID NO: 35344 - DNA, 1296 bp, Homo sapiens
agtcatattcccgataggaaacagcacattcaaaacagggtaagtgatagaagatttatttccaaagatgagggcataaggaaaccataaggaaccgtgaagttgtatggtgcttatctgatagcagccaggctggtatcagataagtgggatgaaaggacactgaactgattacaatccagacagtgagagtcctgtagtgaggggcttcttgagacagaaggatcttctgtagaggaatacagccagcttgtgcaaactttgtaggaaggacttgagggaataaatactctgatctcactgtccactttctctttaatcccctgacaaatccatctggagagcagaggacctgggaacccatattgtatcccattcagaacagcctccaggagcacagggcagaatggagaagggtgaaggtggttctggagggacaaataaagctatccaacacaaaggcaccaggcacgcccattccagagaaagggaccagagtgaattcagggagttgtgaaatgtcctgatgactttggactgatgaatgtgacctgaaacaggagaaagatcagatcaggaagagggagctgagggcagagaagtaggcaggggccaggctatgagaggctccctgagtcttttgtaaaattgtcctatcaaccctgccagtttatgcccaccatgccaagttgtgctaaagagcttggatttcaccctgaaggtagtgtggacacaaagataactttttagctaggcatgtgcattgtgggccaggtggctacacagtgaagggtggattggaaggggcatggtttagagtccagctctgcctactgctttaggactttgcactttaacctctctggatcctagtttcctggctcgtgaaacacagatgacaactcctgctggctgrcatggggattagatgggatagacatttataaaataccaaacactcaacatggcatgtggggttatttgtacacagatcaacaattggttttgatggggaattcaaaaactttgggcactccccacccaagtgccaggcattgtgcttgaatgctttacatttgatattccattcaatccatgcaacagcttttgagatagctattatctcaatttacagaacaggaaacaaaggcttatttttattacctgttatgtgccatacactgtgcctgaggattatgaaggtgagtaagaagacatggtcctggcccttaagaaatcctaattatggatgctaaggtcatttagattggtgctcctcaaattataatgtgcata

SEQ ID NO: 35345 - DNA, 719 bp, Homo sapiens
gcatgaatagacttacaataagccaaagaaatttcattttaaatcctactctccctttattcctcaactgttacagtaaaatgaggggctggggatttggagaaacagtcaggagccaaggaaccagctatagagatatgagatagggaagaaagaaccacggggcctcgtagcgcacataatttgcaagctgatgtacaaactatttgctgggaccaattactctcatcttaattaatgaacacacaacccacaatctgtctgagaaatgtgaaaaaatatggcatgtgtttagaggctgcagtgtgccagccaccagatctggaagcaccttcctcagactgctgggctgggagtcaccatggagaccacgttttagcatcctaatgacactgaaattcagttcaaaccagctcttcgaagtgcccatgtgaagtgcttgctgtgtggctggccttgggttaggcgctgtggagtgctcagaataaaggcagcccactccctgccctagaggacgaaggaggaaggattgctcgtcaacccaccagccttgattttgtgcctccagtctactcagtgcggtgcctggcactgcaggggactccaaggctgaggccacagacttgcattccaggcatttaacttggacagttggtaatgaccatagataaatttttttatttatttatgtatttatttatktatttatgtatttattt

SEQ ID NO: 35346 - DNA, 1230 bp, Homo sapiens
aggaacatagcaaagctcaaaaagatgtctgtttggatttctggaacatttcagaacctcaaaagaaagattataggttaaaagcaccatgatcgcctgggcatggtggctcacgcctgtaatcccagcactttggggggcagaggcgggcggatcacgaggtcaggagatcgagaccatcctggctaacacggtgaaaccccatctctactaataatacaaaaaaattagctgggtgtggtggtgggggcctgtagtcccagctactcgggaggctgaggcaggataatggcgtgaatctgggaggcagagcttgcagtgagctgagattgcaccactgcactccagcctgggcaacagagtgagactccatctcaaaaaaaaaaaaaaaccaaaaaaaaaaaagaaagcatcattatctctgactcttgggtccaatgttcttccaaattagtatgagaatgagtgggaatgaagaaaggcaaactgcacctctaatgtgttcactactgtcacttaygcttggtgtgacacacaaaaccacagtctccttgggcttcacgaggctttcagggctctgaccctggagggctgggtgtgcagagtccatccttgttgcattagaagagcacacaaagacatgttgaaggaggctatttggtaggctcggacatgctatatgacggctttgtccaagagtaatatgctcttatgtgcatcactccaaagtaatatacacagtctcattccatgtagacttacaaaaattccatgacataactttcattcactcactaaattatccacatgcgtttgttgagcacttacatctattgcctgcttactgtataccaggcactgttttaggtgctcaccaaacttaccctcttaacctcatacttgaagaaacagacacagagattaagtttgtccaaggcttccaaccgaggcaccgtcctctaaaacaacagtacttactgtcctgatttaataataatgatgaataattaattttgtctaccataattagcataaataacaagaattgtaactatcctttgtactttacggcgtaccaagaatacatacataaccaatcctatgcactgtggcgggcaattgtccctattttaaaaataaacatgctaaggcccagagaggttaattaacaagccccagttcacccagacagcgagtagacagaggagtctgctctgtgactgtcactgt

SEQ ID NO: 35347 - DNA, 1230 bp, Homo sapiens
aggaacatagcaaagctcaaaaagatgtctgtttggatttctggaacatttcagaacctcaaaagaaagattataggttaaaagcaccatgatcgcctgggcatggtggctcacgcctgtaatcccagcactttggggggcagaggcgggcggatcacgaggtcaggagatcgagaccatcctggctaacacggtgaaaccccatctctactaataatacaaaaaaattagctgggtgtggtggtgggggcctgtagtcccagctactcgggaggctgaggcaggataatggcgtgaatctgggaggcagagcttgcagtgagctgagattgcaccactgcactccagcctgggcaacagagtgagactccatctcaaaaaaaaaaaaaaaccaaaaaaaaaaaagaaagcatcattatctctgactcttgggtccaatgttcttccaaattagtatgagaatgagtgggaatgaagaaaggcaaactgcacctctaatgtgttcactactgtcacttatgcttggtgtgacacacaamaccacagtctccttgggcttcacgaggctttcagggctctgaccctggagggctgggtgtgcagagtccatccttgttgcattagaagagcacacaaagacatgttgaaggaggctatttggtaggctcggacatgctatatgacggctttgtccaagagtaatatgctcttatgtgcatcactccaaagtaatatacacagtctcattccatgtagacttacaaaaattccatgacataactttcattcactcactaaattatccacatgcgtttgttgagcacttacatctattgcctgcttactgtataccaggcactgttttaggtgctcaccaaacttaccctcttaacctcatacttgaagaaacagacacagagattaagtttgtccaaggcttccaaccgaggcaccgtcctctaaaacaacagtacttactgtcctgatttaataataatgatgaataattaattttgtctaccataattagcataaataacaagaattgtaactatcctttgtactttacggcgtaccaagaatacatacataaccaatcctatgcactgtggcgggcaattgtccctattttaaaaataaacatgctaaggcccagagaggttaattaacaagccccagttcacccagacagcgagtagacagaggagtctgctctgtgactgtcactgt

SEQ ID NO: 35348 - DNA, 1599 bp, Homo sapiens
gagcctgacatttaatcatgaagcaagagatacaaacggaagctgggaggttctgcaaggaggacacaagaaagagacatggccctttctctgcatcagggtatgtcatttccagatgaactgcaaagaacttctgctgtcattttgcagtgatgaagggacacaaacagcctrgggggggggtagttgagatactgaagatggtagagtccagtaaaatggaaagagctgggtccccatcacgtttctaaatcaaataactaacctggcctctgatcttatttaatgagataatgtagttatttactgtgtaaattgggggtcagtacatttttttttctgcaaaaggccaaaaggtaaatattttaggctttgctagtcacacagtctctgaaccaaccattctgcccttggacatgaaaacagctacagacattacataatgaatgggcatggctatatttcaataaaacgtgatttacaaaagcagacagtgggctggatgtcacctatggactgtttgccaatttcccatttaagtaatcctgagtcagtgtgtcttgttacttgcagcccacggcatgttaagtgatacgaggatgattcccaaaactgagtctgcatgaacaactattctccctgctgaaccccagatacatatattttgtgtctgctagtcaaatcctccttgatgtcccataggtacttcaaactcaacatgttcaaaactgatctcatctttcccatacctatccctaggtctgcccctccccttgaacttcccacttagcaaatgccaccatcaccttgagttgctcaaactaaaaagccctgaacaaccttaattgcctctattgtcattagtcagccagccactatgttctgtcaatccagctataaaatatttctccattctccatctgtaataagctatgtactatgtaccaggtgcaaggccaaaatagtttataacaatgaacaatgcagatgcagctaccaccctctccaagcttaagataggatccttgacgtacaatagataacactattaaaaccattattaaaacctcctacttgccagcctctacactaggcactttacagcgagcgctctgatcttcaggacaaatctgagtgcacgtattattctctgttattcgtagataaagaaattgaggtgaagaaaagttgaatctcttgcccatggtcatggtggcacagtgggggcagcaccataatgggaggcatatctgtcctcacatgaaagcccaggttctcctcattacctctagtccactgattgttcatccttgcatggggttggctttctggaccacgttgtcactttgggaatactagatcaatcagttcgcaggatgacacctggatctcactttggcaaaaagcccatgacaaacttctcatcagcacaagggctatgcgattaggcacaggctattaaaacatctcatgttcgaaatcagtcactctgttctctgccagttaggaccaccacctgtgcccaggcagggctttctcacagagaacaacaaaaatccaagtgctaggatgtaggcagtgggggtcctcagcaagata

SEQ ID NO: 35349 - DNA, 1599 bp, Homo sapiens
gagcctgacatttaatcatgaagcaagagatacaaacggaagctgggaggttctgcaaggaggacacaagaaagagacatggccctttctctgcatcagggtatgtcatttccagatgaactgcaaagaacttctgctgtcattttgcagtgatgaagggacacaaacagcctggggggggggtagttgagatactgaagatggtagagtccagtaaaatggaaagagctgggtccccatcacgtttctaaatcaaataactaacctggcctctgatcttatttaatgagataatgtagttatttactgtgtaaattgggggtcagtacatttttttttctgcaaaaggccaaaargtaaatattttaggctttgctagtcacacagtctctgaaccaaccattctgcccttggacatgaaaacagctacagacattacataatgaatgggcatggctatatttcaataaaacgtgatttacaaaagcagacagtgggctggatgtcacctatggactgtttgccaatttcccatttaagtaatcctgagtcagtgtgtcttgttacttgcagcccacggcatgttaagtgatacgaggatgattcccaaaactgagtctgcatgaacaactattctccctgctgaaccccagatacatatattttgtgtctgctagtcaaatcctccttgatgtcccataggtacttcaaactcaacatgttcaaaactgatctcatctttcccatacctatccctaggtctgcccctccccttgaacttcccacttagcaaatgccaccatcaccttgagttgctcaaactaaaaagccctgaacaaccttaattgcctctattgtcattagtcagccagccactatgttctgtcaatccagctataaaatatttctccattctccatctgtaataagctatgtactatgtaccaggtgcaaggccaaaatagtttataacaatgaacaatgcagatgcagctaccaccctctccaagcttaagataggatccttgacgtacaatagataacactattaaaaccattattaaaacctcctacttgccagcctctacactaggcactttacagcgagcgctctgatcttcaggacaaatctgagtgcacgtattattctctgttattcgtagataaagaaattgaggtgaagaaaagttgaatctcttgcccatggtcatggtggcacagtgggggcagcaccataatgggaggcatatctgtcctcacatgaaagcccaggttctcctcattacctctagtccactgattgttcatccttgcatggggttggctttctggaccacgttgtcactttgggaatactagatcaatcagttcgcaggatgacacctggatctcactttggcaaaaagcccatgacaaacttctcatcagcacaagggctatgcgattaggcacaggctattaaaacatctcatgttcgaaatcagtcactctgttctctgccagttaggaccaccacctgtgcccaggcagggctttctcacagagaacaacaaaaatccaagtgctaggatgtaggcagtgggggtcctcagcaagata

SEQ ID NO: 35350 - DNA, 972 bp, Homo sapiens
tgcccacactcaagaatggacttgcccaagctttatcatacttagaacatacaaaaagccattttatcatcaaggcatttgtttgtagccaacataacttaaaattgcagggattctagaattttttatcttgctgatctcagagccatctaaaaagatctcttttcttttctggtttactcttcttcctttgggatgacttttctcttgtagcgcctgtctgtgcattgcagagctctagctttaatggctgctccttcctcttcccatctcaagcttccaggcaaaattkaagtatttgatcatggattgaggagagggacaatttattttctctctttaggaggctccatgaaaaccacataaaccagtagatatgaacaaacacttggttttgaaaggagacaaattagctaacttcgcattcctatttatttgagtcctagctggcatctacttccataaccattggaatagtcttcagaggaagaaaatgacacctagagaaaccaaataacttttcaatttcatatacattagctaatggcagagtccaatgttatctccactctgcctgatccctcacatgaacaaattcacacgaagggtaggaagtaaaacaggaaaaagacagaattgagaagggaatacgtatgtaagttagttttcacaaagggccagcaattgattgtgaggtcagcttcttgcaaattgggaaagaaagcagcatatggaagaaaaatcatccctacttcagaaggtttttttttaatgcctattaaaataagcatataaaagacatagaatataagcatacttggttccttgaaaaaattatcaagacatgattatagggacaataaattgttattccaaaacatggttttcaatttataatggcacctaatcaaaacattattagggtcaaagtttgtattccagggtacacataagataactttgtttaaaaaa

SEQ ID NO: 35351 - DNA, 576 bp, Homo sapiens
tggctaatttttgtatttttagtagagacggggtttcaccatgttggccaggctgctctccaactcctgacctcaggtgatccgcgtgcctcagcctccccaagtgctgggattacaggcatgagccaccactcccggccagaccagccacacttgtaaggggtgagtcacactctctcgtttttggtaccctgcctatctgtcagggcctagtcagcaaaatggcccatgcagtcccagagctagggaagatttggggtttatctgatttcaaagctgccccaggcaaaggcacaatccctttctggtgttttggacaattggaaagtgttcaggggcccctagctgggaagcacaggcctctacccaaggcctatcctacccttgccctataagctccactccacttctcccggcccctcacccgtgggtcccctcacygtgagcattagactctggatcttcccacagtctcggccccgttcctcctcaaccacagagaacagcacatcctgggcagggatccgggcccaggccacacggcgctgcccgctgagcatccagaccagcacatcg

SEQ ID NO: 35352 - DNA, 624 bp, Homo sapiens
ctcccatcagtattacacaaacgtattacataaccatacaatttctccaacagttaatctgatgagtatcttattgttgtttccattttcatttctctgacatccagtaaggttcagcatccttacatttccattcttggaacttttaatttccttttctgagaagtatttttcaatatgacttacacaatttcctactgcgtggttttatctttttcttataggttaaagttcttacaaattctggattccaatctgctatctccttgtttgttactgatcatataactccyaaacagttactgctatgtaaacactttaaattttcataaaatcaaatatgtcagtgtcttcttctgattgttcttgcatttctgtgtcttaataaatctctcttcaagaaataagaatactcttcttgttttcttttaatggttttaatattttgtttgtttacactgaggactttgatccatctagcatgtattactaagcaggatgaatataagcaatctttgcccttttgggatggctaattgatccaacactatctcctgagtgactggcacccgttgacacacagatttacatgcttcctttatcacacagctaagaatgttccat

SEQ ID NO: 35353 - DNA, 538 bp, Homo sapiens
ggattagtgggttcatgggagtaggactggtggctttaygaaaagaggaagagagaactgagcttgcatgctcagcccccttaccatgggatgccctatactgcattgggactcttgcagggagtccccactagcaagaaggctctcacaagatgtggcctgttgaccttggacttctcagcctctataactgtaagaaataaattccttgtctttatgaatttcccagtttcaggtattccgttataagcagcagaaaatgaactaaggcacagtttttggctatcatgaagaatgttgctattaacattcatgtacacgtttttgtgtggacttatattttcgtttctcttgagtatatacaactaaaagtaaatttggtgggtcacagagtattctatatttaaccttttgaggcactgccagactgttttccattcttaccagcaatagttagaggttccaatttcagagagctcttttttagtcactattccaactctccacagagaagaaaagccatctataaaatctgaat

SEQ ID NO: 35354 - DNA, 538 bp, Homo sapiens
ggattagtgggttcatgggagtaggactggtggctttatgaaaagargaagagagaactgagcttgcatgctcagcccccttaccatgggatgccctatactgcattgggactcttgcagggagtccccactagcaagaaggctctcacaagatgtggcctgttgaccttggacttctcagcctctataactgtaagaaataaattccttgtctttatgaatttcccagtttcaggtattccgttataagcagcagaaaatgaactaaggcacagtttttggctatcatgaagaatgttgctattaacattcatgtacacgtttttgtgtggacttatattttcgtttctcttgagtatatacaactaaaagtaaatttggtgggtcacagagtattctatatttaaccttttgaggcactgccagactgttttccattcttaccagcaatagttagaggttccaatttcagagagctcttttttagtcactattccaactctccacagagaagaaaagccatctataaaatctgaat

SEQ ID NO: 35355 - DNA, 538 bp, Homo sapiens
ggattagtgggttcatgggagtaggactggtggctttatgaaaagaggaagagagaactgagcttgcatgctcagcccccttaccatgggatgccctatactgcatygggactcttgcagggagtccccactagcaagaaggctctcacaagatgtggcctgttgaccttggacttctcagcctctataactgtaagaaataaattccttgtctttatgaatttcccagtttcaggtattccgttataagcagcagaaaatgaactaaggcacagtttttggctatcatgaagaatgttgctattaacattcatgtacacgtttttgtgtggacttatattttcgtttctcttgagtatatacaactaaaagtaaatttggtgggtcacagagtattctatatttaaccttttgaggcactgccagactgttttccattcttaccagcaatagttagaggttccaatttcagagagctcttttttagtcactattccaactctccacagagaagaaaagccatctataaaatctgaat

SEQ ID NO: 35356 - DNA, 538 bp, Homo sapiens
ggattagtgggttcatgggagtaggactggtggctttatgaaaagaggaagagagaactgagcttgcatgctcagcccccttaccatgggatgccctatactgcattrggactcttgcagggagtccccactagcaagaaggctctcacaagatgtggcctgttgaccttggacttctcagcctctataactgtaagaaataaattccttgtctttatgaatttcccagtttcaggtattccgttataagcagcagaaaatgaactaaggcacagtttttggctatcatgaagaatgttgctattaacattcatgtacacgtttttgtgtggacttatattttcgtttctcttgagtatatacaactaaaagtaaatttggtgggtcacagagtattctatatttaaccttttgaggcactgccagactgttttccattcttaccagcaatagttagaggttccaatttcagagagctcttttttagtcactattccaactctccacagagaagaaaagccatctataaaatctgaat

SEQ ID NO: 35357 - DNA, 1008 bp, Homo sapiens
caaagccaccagatccttagataatatttttctctctctctctctctctgttaatcaaaagttcacccaggtcccttcaagctttctctggttttaatactgtgtctcttttcccatcaaatgaggaaaataagaacttgcaatgccaggaatatatatctcctttccttggaaaagttgaaaaatggattcaagagttttattgggagaaggaggaaggtgatttggataatatcaataaaaattattatttattcctgtgcctccagttccttttctctactaagcctcagttttacatgtaaaacatgggaataataacagtacctatacttcatagataagtgcatggactaaaggagatgatatggtaagtgcttagcatactgcttggcacataagtattcagtaaagtaaacccactttaaaagaattttaaccaagtgctaagtctgttacatgccaaacaccatattagttccactctgcttaggatgtagaaagcagaagagaatgttcttcccactgtaacaagagaaaagaccagctgatctataaaatcataacttttcttgagtttaccagagagctgagtttgtaagataacaagggaaactgcttatcttaaaatccatacaatgacaagtctctcccaaagagaaacagaatacataaactgttttgcctttggcagaccactggaagaagtgatcaccacataagtgggcaagaagrtatcagttaaactttaataaattcttaaacgtctagagtagattagtgttaacagtttggaataactcagaggccagggacaaaaggagtctgcaataacttgcaagtcaatccttatgccagtgccacactgttttggttactgtagctttatagtactctttgaaatcaagaagcttactagaaagcctgagtcctccaactttgttcttttcaaaatcacttttgattatttagggcactttgcatttccagagaatttgaggatctgct

SEQ ID NO: 35358 - DNA, 1218 bp, Homo sapiens
tctaatcagacgaagggcatgaacttgagcttcagtcgtccagtttcttcagatctaataaaaataacaattaattagttaaatgacattgggcaaatcacctaacttccctgtgcctaattttcctcatctgtaaaatgggatacaaatagcaactaactcataaggctgtagtaagaactacatgaaaaaatgtawgcgaagtgctcagaacagagcctggtgcatcagacagatctgttggctgtgggggagttgttgttgtactttgccattcacaaggattttaggtgttagttttacctccattttacagaatagggacctaatgtttgggaaagtgtaagtaacttgcttaaggagtacagagctagaacttgagccaggaattgactagataatgaaaaagtgtcctcttgatccagtactctgtagtctttcttcttcctgacatcagtgatgataactttgtaatctccttcataaaaggtcctccaaatccctttcgactcttggatttacagggagggatgagaggggagtgggcaggagggaccctttgtgctacactgtcctgttggcaaggatgtggggaggggtgagcaggtggcactcccaggggcacagtgccccttattagcaagacccctaaccctgagcagcccctctagttagcagtcttctgctcatctgccatccactacttcctagaaaaggggttaactttcacttccaaaagttgcagctagtgaatttgcaaactttttctgatatgaactctgaagttctttggcactggatgtaaagcatgcccaggaatgttgaatcaacagcaatcctgaaggatacccagacatttgatttagaaggcatctttgtgaatcaggctaaaaccctgggatggcaatgccaaaactataacttctgatttttctttatttactgctgcaaaatcccaaatcttatctggcaattcagtggtccagttaaggggaacatttttcagggacaaaaatgttgaactgactttgccttcaaaattgagagaggaaaaaaatagctggcttttgctttgttgttggtgccttagcttcttggtcaagtagtagaaatccacttggacggatttccataaaacagttatggaaagagcaagaggcatctaaaggccatgccacagactcatgtaactcatgttcacattgtttttcttaaaga

SEQ ID NO: 35359 - DNA, 1218 bp, Homo sapiens
tctaatcagacgaagggcatgaacttgagcttcagtcgtccagtttcttcagatctaataaaaataacaattaattagttaaatgacattgggcaaatcacctaacttccctgtgcctaattttcctcatctgtaaaatgggatacaaatagcaactaactcataaggctgtagtaagaactacatgaaaaaatgtaagcgaagtgctcagaacagagcctggtgcatcagacagatctgttggctgtgggggagttgttgttgtactttgccattcacaaggattttaggtgttagttttacctccattttacagaakagggacctaatgtttgggaaagtgtaagtaacttgcttaaggagtacagagctagaacttgagccaggaattgactagataatgaaaaagtgtcctcttgatccagtactctgtagtctttcttcttcctgacatcagtgatgataactttgtaatctccttcataaaaggtcctccaaatccctttcgactcttggatttacagggagggatgagaggggagtgggcaggagggaccctttgtgctacactgtcctgttggcaaggatgtggggaggggtgagcaggtggcactcccaggggcacagtgccccttattagcaagacccctaaccctgagcagcccctctagttagcagtcttctgctcatctgccatccactacttcctagaaaaggggttaactttcacttccaaaagttgcagctagtgaatttgcaaactttttctgatatgaactctgaagttctttggcactggatgtaaagcatgcccaggaatgttgaatcaacagcaatcctgaaggatacccagacatttgatttagaaggcatctttgtgaatcaggctaaaaccctgggatggcaatgccaaaactataacttctgatttttctttatttactgctgcaaaatcccaaatcttatctggcaattcagtggtccagttaaggggaacatttttcagggacaaaaatgttgaactgactttgccttcaaaattgagagaggaaaaaaatagctggcttttgctttgttgttggtgccttagcttcttggtcaagtagtagaaatccacttggacggatttccataaaacagttatggaaagagcaagaggcatctaaaggccatgccacagactcatgtaactcatgttcacattgtttttcttaaaga

SEQ ID NO: 35360 - DNA, 966 bp, Homo sapiens
gccatgaatgtctgcgtcgcacgccctgcactgcagtatggacttgggaggctgtggtgccggatccgagcttcacaacccctcccctcccctcccccaggctgcctgcctcgctccttctctcccctcctctctccattcagcctcctgctgtagcttgtcccaggagagggggctgcagggtccagggagtccaggccagagtcagctgtcccagcccaggaacagactggtctcaccccctcggttcctgcacacctgctcacagaaagcccgggtcccagaggtaccatctgctaaagcacagagacgttaatccccaccccaggtctgcacgctgagggaccctggcgggggcgttgtagaggaccaagggcagtactggccgggccttcttggggaagctactacgtgatcacgagcagaggggaattgaagggatggaagccatggcatggggggctgggctctccggggcacatgggaggtgaagacgcaggtatggctgcagggatttaggagaggggtgaggcaggacacaggggcagggggcgggcagaggcctgcaacagggcagcctggacaggacccygtctgccgctggaacagagagctggcaggccagcccggaccggggccctccacaggccaccacaagacacacactccaccctcccagccatacccagccagtctcctctgcagagtctcctaacggcaaaggccctcatgtccggcaccaggatgccagcccagccgcctgggctgcaagcaccactgacccccagagcacaaggcaccccttcaatgagagcattggagccacctgagatcccccctcgcccccttgggttcagcccccaggccctgcaggtgcctgggagaccgaggtgtgctgagcacgcctctgagcggctgaggggcagggccagccgacgctgctggacccacatgatccctagagca

SEQ ID NO: 35361 - DNA, 613 bp, Homo sapiens
aacaaaaaataacttgtccaagctcacacagttagaagtgatagagccagaatttgaacccaggtaaaagagtcttcaaattttgtttttctaccaaagcatgctgcttctggtgttacaatccatgatgcttcaggaaccatacctttcagtcacccaacctataagcagtcattaagaagccttctgcattatatgtaggatgggatatccccattttacagagaagaaaatgccctaggagaccagccattttaagatgtgccaacaaaactggagacagacatttcaaggcacaaatagaaagacctggacccttatcctaattgtgccaccrccccaccctgtgattccacagtgccctggtgtctctaggccttttctcttccaatctaaagcaaagaggctagatgagaccccttctggctatgatattctgtggttgtaggagcctgttctacaagggaaatgtatacttccacaacctagccttccatggagttattcccacgagactatgattttcaagaattgttaactgtggacatattcaccatatatcatcataggacctgggaaacattgactaaacaaatgcatgagtgaatgaatg

SEQ ID NO: 35362 - DNA, 613 bp, Homo sapiens
aacaaaaaataacttgtccaagctcacacagttagaagtgatagagccagaatttgaacccaggtaaaagagtcttcaaattttgtttttctaccaaagcatgctgcttctggtgttacaatccatgatgcttcaggaaccatacctttcagtcacccaacctataagcagtcattaagaagccttctgcattatatgtaggatgggatatccccattttacagagaagaaaatgccctaggagaccagccattttaagatgtgccaacaaaactggagacagacatttcaaggcacaaatagaaagacctggacccttatcctaattgtgccaccaccccaccctgtgattccacagtgccctggtgtctctaggccttttctcttccaatctaaagcaaagaggctagatgagaccccttctggctatgatattctgtggttgtaggagcctgttctacaagggaaatgtatacttccacaacctagccttccatggagttattcccacgagactatgattttcaagaattgttaactgtggacatattcaccatatatcatcataggacctgggaaacattgactaaacaaatgmatgagtgaatgaatg

SEQ ID NO: 35363 - DNA, 1538 bp, Homo sapiens
attggctgatagcggctaggacgggtgaaggccaagggcggagaattatgggagggattaagactgcaagagctgagtgatggttggttcctgaacaaagagggcggagtaaaaggcggaagcagaattgggggcggggctttgtggaacttgggggaaccagcgaaatggaagaagttaggtgtccagagcacggtaaggggctagggtctcagcgtcccggggcctgttgatttagcgtggcgtaatcgttgttcactttcttctctcttcagggactttctgctttcttaagaccggcgtccgcgatggcccgaataaaggaaagagcttctacgtgtgccgggcagacacgtgcagcttcgtgcgggccaccgagtaggtcttgagctgggccccactccctgtggctgcccggggcctcccgagaggagcttcccgctccccgctgtcgggcgtcacagggccgaggagtggtggggccctagtttgcggtgtcaggaccctttaagcaattggtgatcccagggcagcgtggcgtgttcggaagacgcccagctaattctggctgtgtgacccgaggctggttacccccctctctgggccgatggttcccctacctgtaaaattgaggatccggtgttttccagctctgggtttctattcacttgacaggccttaaccactcccttctcctgcccagacagtccctccccctttaaaggagtaaggacacacagcagacatagtggaaaataatttgtccctgttttgcactagttttaggcccgacggttttttttaaatgtttgagcttaaaacactctagtgattagttgttaggcttcttatttttaagtaggattctctgcatctaaatggtgaaattgataattcaaaraaattagcgctggaagaaacaacggagggcctggcgcggtgtgtgacgcctgtaatcccagcactttgggaggcgaaggcgagcgaatcgcttgagcccaggggttcgaaaccagcctgggcaacatggtgaaatcccgtctctacgaaaaattaaaaaaaattgtctaggcatggtatcacacgcctgtagtcccagctactcgtgaggctgaggtgggaggagagagtcagaaatgttaagcatcttctctaaagtgaggaaagttaatagtttgtcaagtgttaatgttttcacagtaccaagtgtctacattttctatgtgaattttaaaactatcatcacatcattaaacatctcctgctctctattcagcaaaacttggtagagaaaagttatttttctccgtgtcagatgtagagtacataatggatatcagtattagaaaagtgccctttcaacatgtatactaacttcccatgtttctgtttcatgagttagatgatttacactgagcctctcagatatagtacccaggtcaagttttgtgagatagaagcatttttacctttgcaggaattcaacattaatggtggcataagatttggttttacattaagagaaacactcttattta

SEQ ID NO: 35364 - DNA, 565 bp, Homo sapiens
tgacttattatctaattttatcccccaagaccccagagagatrcaccatcctatagatggaggaaaaactgaatacagagttcagtgagtggcctggcaatcagtggctaagccaggcatcttggaacctgtggtgatgacctttctgctagatttcacaacacaggccactctggttcgggtgggatgacattgctttcctggacatgactcagctttccctgggggtcactgaacccagccatcagccttcacactgagtcatgggctgaggtgaacttcagacctgaggagggagcagggctgccctgccaggtgggtgtgcccagggatccctcagtccagctgagcacaccacctgggaaatccttcatggggtgaagatggggcggggacaaggatgtcacaccagatccacacccatctcccacaagagcgtctaaagagcaacacctatcccgtcactgtgactggtgggctctgactcagaggtgccccttctccatccccaatgtcacgtcctcagcattgactccaatcatcttttgttctgcctggactccta

SEQ ID NO: 35365 - DNA, 1179 bp, Homo sapiens
tagccctcaaaggggtgtataatcatagaacttccaggttacatccaactccagtcagccccaaagctgtttcacttttatttatttatttattctttttattttttattttttgagatagagtctcgctctattgcccaggctggagtgcagtggtgcgatcttggctcactgcaacctcctcctgccaggttcaagtgattctcctgcctcagcctcctgagtagctgggattacaggcataagtcaccacacctggccctgctgtttcacttttaaacacaagaggggagagagagagagagagagagagagggagagagagagagaggtggacacctgcataggagtgagagtgaagtgggcaaagagaaaagagatcatgacagcaagaaaaagacatcagaggcacacaaagacccagagggagacagtgtggtggaaggcttggctgtagttgtgtgcacgctgctgtgacatcagtgaagcacagcgggtgttctgtaaatggtcatgcccttccctaataaggctgagagcagaaaccattcatttattctcatgctctcaatggatatttattgagcatccacagtgtgctagacactgcacctggcacatgtcgcatccctaactttgacccaggggtctacagagcaggtcctcacaccccacccctgtactgcaaacagagcaagggtgctaatccctatcatacagacaggggttgggcagacccctgaagtcacctcccacacagagttaagagttcttgtacgacaaggatgctggcttcaatgcctggcatagagtaggctctctgaagagtgagtttgcatgagtgaatcaagcactggaatttaggcctctcagacctgagaatccttactgtctcattcaagtcttagcagggggacccctgccctcaaccccagagcctctttgctatcctattcctaaatgaaacatgtgccaacaggcacaagtgagatcatcttggaagcatcctgggacttcctcctatgcaacagaagctgagtcagggccagatcagagtcgggggaggtgggagcctgagccaggctggcgcttactttaattcctcacgtttaagggacatgacaaatttaggcttgaccctacatgggtccaaggggatggaggtacttgrtggcagga

SEQ ID NO: 35366 - DNA, 1858 bp, Homo sapiens
  misc_feature (1)...(1858): n = A,T,C or G
tgtggggggttttttgtttttttttttttgggcatagcttgtggtcactgtcagatacactttaatatgtcagatttttgtagtttgataggcttttctccccccagtcttcagttcctgaggtggaagccatcattagcctttagcatgtgatattttgctagtaatggcacctaaagtacgttgtcttgtgtcattctaatgtgcttaacatacattaaggtcagtgatttcttaagaatcagataactattttaatgtctgtgcatcttttgaacgtgaagagaatgaagtatcgtttcttttttagattactgagttgggggtatgagtattgactgcagtgtaaggttcaagatgagtataccactagccttcagaatagtttcaagtaaactgttatataatggcttatttatctcttgtctcgtggaggggaccaatgctctgtcacttcaatgtggctaaaaaacttaactagtacactctcaatttctgcagattcaacccacgatgcctacagaaacgttcgctccctcataaagtgatctgctaagctatatgccttattagaatctgggggtcagagatgctaccagctaacatatttcaaatgtnatataattttggtacatactcagttgcggtagtctttcgaagcttacgtggcgcatactgagatacttgcggagtcacgctaagcctggaatcttcttgagtaatatactatagcctgtttgtactcctacttttgaccaaatctgtgctccacttacatcgtagtgccgcggtattatgttaaaggatttggttcgctagaatctatctttaccatattttaatcaatctctcaattctatgatcatatacttgttacaatctcgaaaaacgcgacactattgcgtactagtgccattgctaatataatgtcttccctttcattggctctcttgcccctgtcaatgccaatataaatatggtgtaaaaaatttgactctcttcaaggtgttgtctgtgcattagggagagatttttgaatgtttgatgtgattgtgttgttaaatatataagtaaatttaaattttgaatttttgttttatttttatttaattttttgatagcttttggaacacagttaccaccgatgcatcagcagcaaaggtatagtcacaagattttcaaaaagtactctgcaagttttggttgagctgtatgtaaaaacacaaccacattggtgtatattgaatatgtgtctgtgtattttttggtgtacctagttcatatcactccccttgggaaggtaccataaagtgatgatttttcttttgagtgagaaaaatttgtgatttggagagataggtggaattaaccacattttagaagaacaggggtgaattagagtaactgttaagatgacattctctaaactccacttcaacttctttacagttaatgccttcagactgttccattcatcatcccttcttcacttgatgtgtcatcttaaatttcttaatttaactaytcaagtaataagatcatattttttgacatgagtctgagcctagaaccttagtttaagccattgggagacattagacttccatttttattaatagattatcttttatttgtaaacaaagtatctttcattgaaggaaaatggtgctttctgttatttcttagcagatctgtaatgacagaagaatacaaagttccagatggaatggttggattcagtaagtaacttgatttttaaagttttgaaaacatgatcaaaacatactttagaatctttcaaccaaaaaaaaaatttttttttttctaactagtaattggcagaggaggtgaacagatc

SEQ ID NO: 35367 - DNA, 612 bp, Homo sapiens
attttttgatatttttttgtagagacagggttttgccaatacctgggttcaagcgatccgcccacctctgcctcccgaagtgctgggattacaggcgattaatgttttaatgtctgtcttccccaycagaccgtaagcagcttgagggtatgagctctattttagtagtctctagtgtctctactacctaacacaacgtcaacccctaataggcacttagaaaatatttactgtgcaaaatcgaaatatgcctgtttaaacatttggtatttattggggactctgccttaagctagatactgccctagacgatttaggggacgtaaacagaattaagagtcggcatttatctttgatgagttttcagtctagttagcagactctagtagaaactgtcttgttcatcttggttgcccggcgcctgactcagtgcttggcacaaagcaagcactcagtaaacatttgttgtaaattcacgtgtctgggctagaagggttgcttcagactggtcattctttgtctacccctccaaatctgccagcccagcaaactcagctccacagaattactcccagtgatccgacaaactattacagttagccaggaacaaaa

SEQ ID NO: 35368 - DNA, 1500 bp, Homo sapiens
ggccagctattcttggtgcctcttagacctttgtgttcattttcttggtggccctcaggaggttagaatatgccacatttcatatgtagaaaccagtgaccatatgtctctttgtttttaattttcctttaatattcacagcagcttttgtgtagcagctaggaaaatgcataactcaaatctggaatttgcacacaattaagcagctgaaagccaggaaacagaaattcacacccaaatctctctaacttggaagactttattctttactgtgtggaaggaaaataaatcttgggaccccaaaatctctaagctaaaaggaaaagtcaagcaggcaactgcctaggaagacctgcctcccattctattcaaagtcatccttctgaggctcaccagagacaaatgcatatctgattcttcttctcccctattgtttatgtaaaaaatgcagactcactgagccagactaaattgtgtattaagtggaaggactcaaaagaatgcagcattttgtctcttatctacttctaacctggaagcccccacttcccgttgtcctgccttactggaactagactgaaccactgtacatcttacacatattgattgatgtctctcactcgcgtccgtgtgaagagaccaccaaacaggctttgtgtgagcaatgaagctttttaatcacctgggagtaggcaggctgagtctgaaaagagagtcagggaagggagacaggggtggggccgttttataggatttgggtaggtaaaggaaaattacagtcaaagggggttgttctctggtgggcaggggcgagggtcacaaggtgctcagtgggggaacttttgagccaggatgagccaggagaaggaatttcacaaggtaatgtcatcagttaaggcaggaacaggccattttcacttcttttgtggtggaatgtcatcagttaaggcaggaaccagctatctggatgtgtacctgcaggtcacaggggatatgatggcttagcttgggctcagaggcctgacagtctcatgtctccctaaaatgtataaaagcaaactgtaccccctgaccaccttgggcacatgtctcagtacttcctgaagctgtgtcacaggtgaatgcttaactttagcataataatctttctaaattgactgagatctgtctcagatgtttggagttcacaactstattattaaactgcctgtctctaataatagccagccataagatgcccacaagattagtaataaagggaaataattagaaagaaaattggaagtcctgggtaattttgctgtctctacatttatagtctcacctagtgcccctttccttatgagtatttatggcatgaggggttaggttagagtatgtcataatgaaactggcctggagaaaaattatacccaggcctgaaatataagcaatttagacaactgtaccaagcagaatatattttaaggacacctaaacaattttggtctaagtcagtgg

SEQ ID NO: 35369 - DNA, 1500 bp, Homo sapiens
ggccagctattcttggtgcctcttagacctttgtgttcattttcttggtggccctcaggaggttagaatatgccacatttcatatgtagaaaccagtgaccatatgtctctttgtttttaattttcctttaatattcacagcagcttttgtgtagcagctaggaaaatgcataactcaaatctggaatttgcacacaattaagcagctgaaagccaggaaacagaaattcacacccaaatctctctaacttggaagactttattctttactgtgtggaaggaaaataaatcttgggaccccaaaatctctaagctaaaaggaaaagtcaagcaggcaactgcctaggaagacctgcctcccattctattcaaagtcatccttctgaggctcaccagagacaaatgcatatctgattcttcttctcccctattgtttatgtaaaaaatgcagactcactgagccagactaaattgtgtattaagtggaaggactcaaaagaatgcagcattttgtctcttatctacttctaacctggaagcccccacttcccgttgtcctgccttactggaactagactgaaccactgtacatcttacacatattgattgatgtctctcactcgcgtccgtgtgaagagaccaccaaacaggctttgtgtgagcaatgaagctttttaatcacctgggagtaggcaggctgagtctgaaaagagagtcagggaagggagacaggggtggggccgttttataggatttgggtaggtaaaggaaaattacagtcaaagggggttgttctctggtgggcaggggcgagggtcacaaggtgctcagtgggggaacttttgagccaggatgagccaggagaaggaatttcacaaggtaatgtcatcagttaaggcaggaacaggccattttcacttcttttgtggtggaatgtcatcagttaaggcaggaaccagctatctggatgtgtacctgcaggtcacaggggatatgatggcttagcttgggctcagaggcctgacagtctcatgtctccctaaaatgtataaaagcaaactgtaccccctgaccaccttgggcacatgtctcagtacttcctgaagctgtgtcacaggtgaatgcttaactttagcataataatctttctaaattgactgagatctgtctcagatgtttggagttcacaactgtattattaaactgcctgtctctaataatagccagccataagatgcccacaagattagtaataaagggaaataattagaaagaaaattggaagtcctgggtaattttgctgtctctacrtttatagtctcacctagtgcccctttccttatgagtatttatggcatgaggggttaggttagagtatgtcataatgaaactggcctggagaaaaattatacccaggcctgaaatataagcaatttagacaactgtaccaagcagaatatattttaaggacacctaaacaattttggtctaagtcagtgg

SEQ ID NO: 35370 - DNA, 578 bp, Homo sapiens
agaccattttagtgtctattttgcctcattttttatcttcatgaaggatgggtaaagaaatactgtcccgaactcaacaaaaccttctcaggatcagggctccaccctcagacttggaattctgtgatgttaaccccttctgagaggtgatgaaatgtgtccttttaaactgtcttctggaaagagatgtaggagggaccggagagactatctgcagcaaggcttttgccagaataatgttaacattgaatgtgcacaggaagagaccggcatgagtgaaactgtgacgcagctgtctacttcccggctgtaaggtgaaaatgcaccttcccacaggaggccctccctggccyggcctggactcacctcccaggcggcgtccttcatggaggaggagctgaagtctgcggggcgggggctttcatccttgtttacgggtcttaattcgttcctcaagtgcacactgttcaaggaaaggatgtgttgcctctgcaaccatggttttctcattcaacgcctaccccaggacacaccaagggaaggacagagccgagacccagacaggctggtgacagcag

SEQ ID NO: 35371 - DNA, 682 bp, Homo sapiens
agcctaagtagagagacataatctacaatgtcccaattagttggttaaatgagaaaacatagaaagtgtgtagtaataaatacttctgctttcctaaatatttagatatcaacataaagtctgcagagaccaaaacgattaatatgattgtcaacatcttggttaatagaaaatcaattagaagtaaaactttaaactccatctctactaaaaatacaaaaaaaaattaggtaggtgtggtggtgggcscctgtaatcccagctactaaggaggctgtggctggagaatcgcttgaacccagaagatggaggttgcagtgagccgagattgcaccactgcactccagcctgggcaacaagagcaaaaactccctctcaaaaaaaaaaaaaaaaaaaaaaaaaaaaggaaaactgatacgttcttgtaaatcatcactgaagaatagggtaaatcccgtagggtcagagacaaggtaaatcttaaggatgaaagtgaaccctacagaaataaataagagaaagtcattttattcagctctagagataatccaaaacctatttgcagggaaaggaaatcaagtgtatatttaaattttcttttgtctcacatgtatctacgttctgttcttaaataactatgtgagacagggcaggtgttaatatgcacattttacacagcaca

SEQ ID NO: 35372 - DNA, 614 bp, Homo sapiens
taattttcatttcttgattccatccattttgtatttttcatttcttggttccatccattttgtatttttcatttcttgattccatctattctttaaactcatayagttaaaaaaaaaaatctgtcccccctactcctgtatactgcttttcctgcttcccaggcaacagtctgtacctgcagtaaatgaggttaaatttcaatgtaggtataattatttaatatagagtacaagattaaattggtaaatactttaagagaccctctagattatcttcctcatcttataagaagaaactaaagcacaaagagttcattcaggaaattaaaaaaaaaactcaaacatggatttcctaactttctctccagaggtcttcccattacatcatgctccccatgtaaataaaaaagagaggcagttgtttagtgagagttaacttttccatttagagaggcaagtaaaatttgagaaaaaacttggctggtagggatgtagggctggttgcagtgtacatgatcatgggattcaaatatttgaaatgctgttatgtgggaaaagcttttggctcattacaaaatgaattttttagatgtttgactgaaacacttcctgaa

SEQ ID NO: 35373 - DNA, 687 bp, Homo sapiens
tctacgggatggggccccacctgattttatttcctaactttcgagctggcctcagatacccgtttattctttgcttcacaaagatgcttagataaaagatctgaagactctcttcaaagattcaaaaagctccactgttttgtgggaagatgtctgtggtcagataggcaggtggatcgggcgcctagggcccggaggtagaaggaggtggccggaggcgctcaggccagcgcctctcgcatctctgaggaggggcgccgcccaggcgctcgcgttgctaagtcctctgtttgccgcgttctaaaggagccccgagcgggaccaaggcaaacggggkgggggtgtgtgtggcccgggaaagctcgagcagtgtcttcagtaaacccccagaagaggcagcggcccctccgttgatccctcctgtccccaggacctcctgactccgagggggcagaggattccccgagtcctttgttcctcccaaccgtcgccgcccccggcgcccgcgcctctcggcacgtcgtgcacccccggccgcagcaggcgaatggtctggcccgtcggtagccgccacccgcttgggcagcgacagctgttccaggcactccgcgtcgagcaccggagtcccgagccgtggctgccacgggcggtgggcgggcggaagagagcaccggaccaccagtgcag

SEQ ID NO: 35374 - DNA, 687 bp, Homo sapiens
tctacgggatggggccccacctgattttatttcctaactttcgagctggcctcagatacccgtttattctttgcttcacaaagatgcttagataaaagatctgaagactctcttcaaagattcaaaaagctccactgttttgtgggaagatgtctgtggtcagataggcaggtggatcgggcgcctagggcccggaggtagaaggaggtggccggaggcgctcaggccagcgcctctcgcatctctgaggaggggcgccgcccaggcgctcgcgttgctaagtcctctgtttgccgcgttctaaaggagccccgagcgggaccaaggcaaacggggggggggtgtgtgtggcscgggaaagctcgagcagtgtcttcagtaaacccccagaagaggcagcggcccctccgttgatccctcctgtccccaggacctcctgactccgagggggcagaggattccccgagtcctttgttcctcccaaccgtcgccgcccccggcgcccgcgcctctcggcacgtcgtgcacccccggccgcagcaggcgaatggtctggcccgtcggtagccgccacccgcttgggcagcgacagctgttccaggcactccgcgtcgagcaccggagtcccgagccgtggctgccacgggcggtgggcgggcggaagagagcaccggaccaccagtgcag

SEQ ID NO: 35375 - DNA, 597 bp, Homo sapiens
tacacatactatacatttgcctttttccatatggctkttcccaactttgcataattcttggaccatggcttaatttttatgggattaaatttaatttagagggatttgaaaattgtgacaaatttgtttgattctagaaattagcacagttgaaatttttttattttaaattcaaaaaaaccttccagagaactatatttccctgatatggtagctcagcagtttaactcctatgttccaggctctgggaataggctacagccaattggaacaataaataagtattaagtgcattagtgggagttactgttgctcaaggtcaagattgttactagaatgaataaatagttcttgtgtttattcttacataatatcatacttggctgttatcaggtttttagaagtagttgatcaaatggttctttcaggtctagaacacaggacagatccagctttgggtaatgggcccagccagggaaagggagacaaaagttactatgttcaaggagtaagtagcttctctaaataccctttcaatttgtacacacaatgagtggtggcaatgttttattgttatgagagttgtttgggtgatgt

SEQ ID NO: 35376 - DNA, 598 bp, Homo sapiens
taagagacaaagagcagaaaagtcaggagagagataagagaaacatctaatctattatacagatcggggtgaggatgggcagagcaaaggatagtcctcgcaactaagtaactccctttaaagggatttcagagaagatatagtccctcccctacatcccaaaagcaggcatggggaaagaragacattcaaatgcagagcaagagtgatgcagaatgagtcaagtctctggctacactctcattactctccctgaaaaaagacaccatacagagctacctttatgagatatcaagggaatgggaattgggaatagcgagctaaatggacatcttatgaaggctcaagagccagagctgagggaaggaaatcatgggcagttttgaggactcagagcgaagaggagaaccttatgaggcagctacagaatatcactcactgctgtgatagaaggttttttcccatcccctgctggggggtgtgtaacatctgctcccaggaatatcactggctgttgaaaaacggcagagctgagcaaggaagagaaaacaaaatggtgaggcgctgggtcttctctagctggcaccatccagtaccc

SEQ ID NO: 35377 - DNA, 1055 bp, Homo sapiens
cagaacagagaagggaccatcctcccaggagaaggcagcagagagcgccacaccccaggagttgcagccacccctgagcagggccggatgcagagacagctgcacccagagctgccgccctcgggtttggggcgcccgtgtccctggagagccagcaaggggggatggctgcacccaggagctcacggacgtgctcatggggacagggtgggccctggcagaggccccgagagccgctcccactgctgggagcccctcagctctcccttcctcrgtcctggggacctaggcctcctctgctgtgctcagcccaggatttcctcagcagcttggaggacggggaggagggtgaggctgccccccaaccaaagccatgactcagcgcctgaagccccacccaggggaggggcacactgaacagaggccaggcggttcccctacacgggctcccctggcctccggcccactgcacctgggctgccactaggccctccccagaccaggagggtgcgggcagggtccccctctcccgggctggggcgaccaggctccacgttacagaccacatcttcccgcccaccctgcctggccccccaacctggcggtaggccaggaaactcaagttacgcccttagggcctgcccccaggacagcctcagggagcccctcgaaccccagttaaatcacagcctaaccccaaaacccactgggccaggccattctcatctccccactccagtccatgccccacaggggtgaggcactttcccagggcagtcactctacggcacctactgcagccccacagcccccataactggctcctgtaacaggctcccatgagagccggttaccagagagaaggcccagaggtgagtgggttccagcacccccacacgactggaagagggcagtacagggccgtctgcgtggaggaggaggtccattaggcttctgacggaggggccagggagaaggtgggtgcttcagccagggtccagcccccagcagggaggccatgcccacacctccccacagcccgggtcctcaatgca

SEQ ID NO: 35378 - DNA, 1055 bp, Homo sapiens
cagaacagagaagggaccatcctcccaggagaaggcagcagagagcgccacaccccaggagttgcagccacccctgagcagggccggatgcagagacagctgcacccagagctgccgccctcgggtttggggcgcccgtgtccctggagagccagcaaggggggatggctgcacccaggagctcacggacgtgctcatggggacagggtgggccctggcagaggccccgagagccgctcccactgctgggagcccctcagctctcccttcctcagtcctggggacctaggcctcctctgctgtgctcagcccaggatttcctcagcagcttggaggacggggaggagggtgaggctgccccccaaccaaagccatgactcagcgcctgaagccccacccaggggaggggcacactgaacagaggccaggcggttcccctacacgggctcccctggcctccggcccactgcacctgggctgccactaggccctccccagaccaggagggtgcgggcagggtccccctctcccgggctggggcgaccaggctccacgttacagaccacatcttcccgcccaccctgcctggccccccaacctggcggtaggccaggaaactcaagttacgcccttagggcctgcccccaggacagcctcagggagcccctcgaaccccagttaaatcacagcctaaccccaaaacccactgggccaggccattctcatctccccactccagtccatgccccacaggggtgaggcactttcccagggcagtcrctctacggcacctactgcagccccacagcccccataactggctcctgtaacaggctcccatgagagccggttaccagagagaaggcccagaggtgagtgggttccagcacccccacacgactggaagagggcagtacagggccgtctgcgtggaggaggaggtccattaggcttctgacggaggggccagggagaaggtgggtgcttcagccagggtccagcccccagcagggaggccatgcccacacctccccacagcccgggtcctcaatgca

SEQ ID NO: 35379 - DNA, 763 bp, Homo sapiens
tcctgtttccttctttataaaatatctgtcttatagtgtgttgtgagaatcacatgtaataaaccagaaaggtgatatgatatattcgttaaatgctaaggaacatgcaaggaaccttatatatgttgtgtcattcagacttgtgcaaggaaggtggcattctcacagaggagaaaactgaaaaatgagaaagatttagtaccttactcaaatgccactcatccaggaactagcagtttggagttagaagatctgagcttaaaatctcagattcggataaaacaccaccaccaggaaaggtgccaacatatcagtaggtgggaagggtgagagatgtgtataatgatasaaatagtattcattactgcatacatactgcatgctcagtaccattctaagctctttaccaatatcagttaatcctcagccctatgaagtggacactgtatcatctcctttttttagtttaggaactgaggcacagagatattaagagtaacaaagtaagccgggcgcagtggcttacacctgtaatcccaacactgggaggccgaggtgggcagatcacctgaggtgaggagttcgagaccagcctgaccaacatggagaaagcctgtctgtactgaaaatgcaaaattagccaagcatggtggcgcaggcctgtaatctcagctactcgggaggctgaggcaggagaatcgcttgaacccgggaggtggaggttgcgatgagctgagatcatgccattgcacttcagcctggg

SEQ ID NO: 35380 - DNA, 719 bp, Homo sapiens
aaaaaaaaaaatgaaacaaatgaaataaaatgtaattatatatttaacccaaaactcccaaaattttcaaaatgtaataaaatacaaaacatcgtgagatatttaacattttttttggtaccaagtctttaaaatctagtgttgtattttacactgatagcacatcccatcttggtctagcaacattgtaagtgctcagtagccccatatagtagtctttaccatatagagcagtacagatctaaagtaatttcaagtcaagacacacaatcctgggagtctcagccaaaagttaagcttttttttttttttttttgagacgaagtctcgctctgtcgcccaggctggagtgcagtggtgcgatcttggctcactgcaacctccgcctcccgggttcacgccattctcctgcctcagcctcccaagkagctgggactacaggcgcctgctaccatgccctgctaactttttgtgtttttagtaaagacggggtttcaccgtgttagccagatagtctcaatctcctgtcctcgtgatccgcctgcctcggcttcccaaagtgctgggattacaggcgtgagccaccgtgcccagcctaagttaagcattttttaactccctgatttgcatttctgaaaattttatcagaaggtaaagagattgaagagttctgcccctgggtgtaataaagttattgacttttagaggctgttaggatc

SEQ ID NO: 35381 - DNA, 695 bp, Homo sapiens
gggttcaagtgattctcctgcttcatcctccccagtagctgagattacaggtgtgcgccaccatgcccggctaatttttgtatttttagtagagacagggtttcaccatgttggccaggatggcctcgatctcctgacctcgtgatccacccatcttggcatcccaaagtgctaggattacaggtgtgagccactgcgcctggctgactcagctgaattttaagtattgaagtgaactatacgaaattgttgatatgcaatctaaaaacattaaaatgttttgttttgagataattgtagattgatatgtagttgtaaggaataatacagagagaccccatgtactcttttgcccattttctcctaatagtaacattgtgcaaaactataatctaatatagtaaccaataagttgatattgatacagtaaagatacatacagaacagtttcatcaccacagaacaatttcatcaccacagaatctcttctatagccacatccaccctgcccctccctggcagctacgattttgtcctccatttgtataattttaccattttaagaatgttacataaatgaaaatgtaaagtatgtaayattttgggattagcttttttcacttatggtaattccttggagattcactgagcttgttatatgtgtcaatagtttgttactttttattgctcactag

SEQ ID NO: 35382 - DNA, 541 bp, Homo sapiens
tctgaacatgtacccctcttttatctaaaaacaggggggaaatcaaagtagataaaaatgtttcyatttcaacaatcagttgatattgtgtctacccaaaagtttagttcaatggggaaaaactcaaacctttgagtcagaagacctaagtctggctgtcattatctattctacctttgataggtctcctaccacctctgagaataagtttcttcatatgataaattgaaagggcaagatacaaagtaaagaaaaactgcaaatgtatttttatattgttttcagcctcaactaaagctctgtggtaagaacagctcttatgattccacttttataaatgggaacaggccaagcatggtggttcatgtctgtaatccgagcactttgggagggaggccgaggtggtcagatcgcttgagcccaggagtttgagaccagcctgggcaacatggcaaaaaaccccatctctacaaagaaaaaaaaaaaaaaaattagccaggcatggtggttcatacctgtagtcccagctactcaagaggct

SEQ ID NO: 35383 - DNA, 541 bp, Homo sapiens
tctgaacatgtacccctcttttatctaaaaacaggggggaaatcaaagtagataaaaatgtttccatttcaacaatcagttgatattgtgtctacccaaaagtttagttcaatggggaaaaactcaaacctttgagtcagaagacctaagtctggctgtcattatctattctacctttgataggtctcctaccacctctgagaataagtttcttcatatgataaattgaaagggcaagatacaaagtaaagaaaaactgcaaatgtatttttatattgttttcagcctcaactaaagctctgtggtaagaacagctcttatgattccacttttataaatgggaacaggccaagcatggtggttcatgtctgtaatccgagcactttgggagggaggccgaggtggtcagatygcttgagcccaggagtttgagaccagcctgggcaacatggcaaaaaaccccatctctacaaagaaaaaaaaaaaaaaaattagccaggcatggtggttcatacctgtagtcccagctactcaagaggct

SEQ ID NO: 35384 - DNA, 617 bp, Homo sapiens
gacctgttcactcctgtttctaagccagcatcttaagagtaggtattacctgtgtgtgaaatcaaagtattttaaaattaactctaggaagaatgttgkattttcctgtgttgttttcagtggttggagaaagggtttctggagagaaaaaaaaaattgcttatttgccaagtcatgctaggccatggacatgatttagaaaaaaaattaaagctgcttgaattggaggcccaggttaaggttaatattcaacattgtttgaaatggaaacactcctggtttctcagtgtatcagtgtgttttaagctcagatccccagcctttttctaaggagagttggtatttagaatttttttttttttttttgagatggagtcacgccctgtcgcccaggttggagtgcaatggtgcgatctcggcccactgcaacctctgcctcccaggttcaagcgattctcctgcctcagcctcccgagtagctgggattacaggcccatgccaccacgcccggttaatttttgtatttttagtagagatggggtttcaccatcttggccaggctggtctcgaactcctgacctcaggtgatccacccgcctcggcctcccaaagtgctg

SEQ ID NO: 35385 - DNA, 1274 bp, Homo sapiens
actcctgggtatytgttcttgcaaatatccttagattaatgcagagcagacatcaggccaaggtctgccttttttgttctccagcagtgcttttgggtttgactgtttccttttatgttttaagcttttaacaaatataataggaggcagcaaaatgttgtcagtggaacacaggctttggagtgagacagacctagggaagagcctggctgtatgacctaaatttttgtgttgggtcctgctgtgggctgaatatttgtgtcccctcctttcccagattcgtatgctgaaacctaatccttaatgtggtaatatttggaggtagggcctttgggaggtgattaggttgtgatggcagagccatcgtgaacgagattagtgcctttataaaagagggccccagagaacttgcttgtctctttcaccatgggaggatacagggagaagatggccttctacgaataaagaagtgggccctcactaggtaccaaatctgcaggcaccttgatcttggactttctcgtctccagaactgtgaggaatacatttctgttcttaataagccactcaatttatagtaccttgttacagcagcccaaatggtctaagacaagttctcactttgctcctctgtaaaaaggggataatcaaacttacctggcaacataattgtgaagattaagtaagataatggacataaagcttgtagtctagttcccagggatcaaagggtgcttaataagtgatggctattgctgttatcatcttgctgcacttcaatgcaattgaaattggtttaaaagtgaatagaaacggttggtttcttgatggattcaattcagttcaattaagtgtccttttttagatggcttaccctggtaagtgtcatgctgaatacttgatacagatagaaattaagcactctcttctcgctaagctcttcttgtgcattctcaattttgcgttgcagctttcaacaaaagcatcccctcacccttcccagtgattctaaatttctttatctactcatttgaaggttagtttgactttcaagccttttgagatctgagcatcattcacctttgcggtctcacctctcacccctctctaatataccacccagttctgtgaggaaacaccataatatcttggctctagtatgtaccattgccactgcctgatacacattcctctccatttcagagtcttcctccttcctcctgtgtagtggagacgcaatactcatctgtcagtgttggatgaggatttatgca

SEQ ID NO: 35386 - DNA, 541 bp, Homo sapiens
  misc_feature (1)...(541): n = A,T,C or G
tgcacacatacacacacacacaaaaatgaagattttcttgaccagtygtacttccagttccaaaatctcaggattccttgttgcatatattggttgactccctcccttgagctctctgatatatggttttgtaagaagtttttaacatgatttttctcaagtaattgagctcctagtttttagcatagtacagcagagtttgaacagagaatgaccaatggcaatgcagacagccttattggactaaggatggcattttctggtgattcgtatgtttggcttatcttccccagtctaggctctattcaagcatatggcaaaagggacacaccatttgcagttagagcaatatttgtttccttgccctgccagctactagcaagctaagtgacttgagccttaatttcatcattatgccttaaagcacttcaatgaatcttaattgacacccagaaatacgcattttttaaccttttgaaatttgtcgataattattttatgccccagcatatgtaaacacttgataagagggtaattnttc

SEQ ID NO: 35387 - DNA, 541 bp, Homo sapiens
  misc_feature (1)...(541): n = A,T,C or G
tgcacacatacacacacacacaaaaatgaagattttcttgaccagtcgtacttccagttccaaaatctcaggattccttgttgcatatattggttgactccctcccttgagctctctgatatatggttttgtaagaagtttttaacatgatttttctcaagtaattgagctcctagtttttagcatagtacagcagagtttgaacagagaatgaccaatggcaatgcagacagccttattggactaaggatggcattttctggtgattcgtatgtttgscttatcttccccagtctaggctctattcaagcatatggcaaaagggacacaccatttgcagttagagcaatatttgtttccttgccctgccagctactagcaagctaagtgacttgagccttaatttcatcattatgccttaaagcacttcaatgaatcttaattgacacccagaaatacgcattttttaaccttttgaaatttgtcgataattattttatgccccagcatatgtaaacacttgataagagggtaattnttc

SEQ ID NO: 35388 - DNA, 565 bp, Homo sapiens
tttttaatagtgaccttaatctagttcaggtccggatttgcctcctttccaaactcttgttatttggtctgttctgtacattgtggccagacttattcccatgaaagatatttctaatattgatatttttcctttgccaaagcctcctttggcttcattcctacaaaagtttatagaatgccatatgcccttctgattttttggtttctttctctcattgttcttctttatgtctgcatttcagaaaacaactgctgatggtttcctgtgtgtgtcttcttttccccacctaaaatgcatcacatttagtctccctattcttggttcatatgtcatctcctcaggaagacatgatgattaatgcactcttcctytaacccctagtcatttggagttcccatagaagcacagcacttcatctgaaacttaatcacagtatctgggtttagcctgagggctaggatattttatctcattcaattgtattgatactatatttttatctttatgaattttatagtgaaacattcttcaattagaatatgccctctgaattaacattatt

SEQ ID NO: 35389 - DNA, 1205 bp, Homo sapiens
caagcgtgaaatgaatgggagagaaaggtctgaggaaaaacatgcgaacaccgaaactcaactggaacctgcgcgggacttcaaggagcagaaaatccagcgcagagctagggcggaggcagcggggggtcagagaccctccctgtttattgatcacctttgrcatgaaatatcttgtatatgggttcggaccatcgcgaaggtttcagacacaaacaagctacagcaacactttctctacgcatcccctagttattgaatagcacacacacacacgcacacacacacacacaaacgcgcatccctgagcaagaaggcaaaaaagaatccaaaacttgagcaggtcgccaggcccttttcctctctcagccaaagtatgcccagtctacatccccgccccaccaccccagccacgcgggcgggactgcgtccataggacgcacctcgcagatactgcagcctccctccagttgttccagcttcccgaggccccagttgtttcagtcccatcgccaactggcaaaagcagttttctagtctgccttctgaagacgtctctttttatccaagtacttttgccataatatatgggtagtgtctcactttccccaactctacaatggactcgaatagactgttttgtctttcgccaaagatttgagaaagattcttgagctgtggagagatttttgcactaaaaagattcttgaaggagaaggagtaggagagaagcaatagaatattttcaagcaatatccaaacaggcttctagactggagaataaaattaattcaataaaatataacacatttttttccttaactaataatactcagagatggtgatatggatttcattagacttgagttacagtttggttgtagactcaagactgcatgaattctgtgtgtgctgttcctgggattgggctgaagccttaccctccaggaattagaatattttcggggcaaggttggagaatccattaatagaagaattattttttttaaaaaaaactcttgttttaataaagtcttgcatttgaggctaaattttagtatttgtctgagaaaagtgggtgggttcggttgtgtgtgtgtgtgtgtgtgtgtgtgtgtgtgtgtgtgttttccttttggcattggtatgtgtgatttgcagtccaggttgttaagtttccaagcaggaaccagttaaaaatgcat

SEQ ID NO: 35390 - DNA, 1205 bp, Homo sapiens
caagcgtgaaatgaatgggagagaaaggtctgaggaaaaacatgcgaacaccgaaactcaactggaacctgcgcgggacttcaaggagcagaaaatccagcgcagagctagggcggaggcagcggggggtcagagaccctccctgtttattgatcacctttggcatgaaatatcttgtatatgggttcggaccatcgcgaaggtttcagacacaaacaagctacagcaacactttctctacgcatcccctagttattgaatagcacacacacacacgcacacacacacacacaaacgcgcatccctgagcaagaaggcaaaaaagaatccaaaacttgagcaggtcgccaggcccttttcctctctcagccaaagtatgcccagtctacatccccgccccaccaccccagccacgcgggcgggactgcgtccataggacgcacctcgcagatactgcagcctccctccagttgttccagcttcccgaggccccagttgtttcagtcccatcgccaactggcaaaagcagttttctagtctgccttctgaagacgtctctttttatccaagtacttttgccataatatatgggtagtgtctcactttccccaactctacaatggactcgaatagactgttttgtctttcgccaaagatttgagaaagattcttgagctgtggagagatttttgcactaaaaagattcttgaaggagaaggagtaggagagaagcaatagaatattttcaagcaatatccaaacaggcttctagactggagaataaaattaattcaataaaatataacacatttttttccttaactaataatactcagagatggtgatatggatttcattagacttgagttacagtttggttgtagactcaagactgcatgaattctgtgtgtgctgttcctgggattgggctgaagccttaccctccaggaattagaatattttcggggcaaggttggagaatccattaatagaagaattatttttttwaaaaaaaactcttgttttaataaagtcttgcatttgaggctaaattttagtatttgtctgagaaaagtgggtgggttcggttgtgtgtgtgtgtgtgtgtgtgtgtgtgtgtgtgtgtgttttccttttggcattggtatgtgtgatttgcagtccaggttgttaagtttccaagcaggaaccagttaaaaatgcat

SEQ ID NO: 35391 - DNA, 1163 bp, Homo sapiens
atttaaaactgatgatgtttcaagtcaataacagcaaaaacaaatcaactttttatggaagagttctatgtttaaaaatacctctagtgctttttttttttaacattaacaactgtttaaaatcgcagcttttaaaatgtactattctttttgaacatcaagtgttttccttcacagatttgccggtgaaattaaaaagatttggctaaaataagatgacttcagatgatataatctcarctcttaagaaactttgtacatttggcatctgatctagtcccaagtcaccaagaaatagaggctctctagtcactgtggagcagtaggtggcacactaaatgttttaaaatgtattaccctccaaagaaaagccattcagttactaggtgtttttagggtagaatatcacatctaaacctccaaattcctctgtccctgaccctaaatttaaatgttttttgggtgcctggttatttattggttttcaccactctggatcaagtgctgtggtttaagagtttctgcagttaaaaaataataacttttataaacacaggcaactaatatagaattcattttatttagagcaccacttttcatgagttatctgaaagtgaattctgattcagcaaaaaaatacatcattctcaatctctcccctttttgtcccccttcaacaccctaccctccccccatttctttgtgttttctttttgtttggttgtttgttgaaaggttctaccaggacctggcccagtataaacacaaaaacgcacccaaatcataaaactgctcttctttcagttatgttttatttgtaagtgtactgggacacatccccctgttgtattttggcgcatagaattggttctgatagaagtaagggaggagaaaggtaaaagagaaaaaacataaccaaggagaaagctcagcagacatacatggacaggtagatcaatccgtgagacatttcaggatgaacactggcagtctgttaccactgtgtgaatgtgtgcattaaataaaatatttacaataatcttttttcctttttctttgaatacaagaatatgacaaaaatgttttcagtggaaacaggcagtagactgtgaaatcgcactagccacaaaacggtctaccagaaagctagcccagtttagtgc

SEQ ID NO: 35392 - DNA, 1163 bp, Homo sapiens
atttaaaactgatgatgtttcaagtcaataacagcaaaaacaaatcaactttttatggaagagttctatgtttaaaaatacctctagtgctttttttttttaacattaacaactgtttaaaatcgcagcttttaaaatgtactattctttttgaacatcaagtgttttccttcacagatttgccggtgaaattaaaaagatttggctaaaataagatgacttcagatgatataatctcagctcttaagaaactttgtacatttggcatctgatctartcccaagtcaccaagaaatagaggctctctagtcactgtggagcagtaggtggcacactaaatgttttaaaatgtattaccctccaaagaaaagccattcagttactaggtgtttttagggtagaatatcacatctaaacctccaaattcctctgtccctgaccctaaatttaaatgttttttgggtgcctggttatttattggttttcaccactctggatcaagtgctgtggtttaagagtttctgcagttaaaaaataataacttttataaacacaggcaactaatatagaattcattttatttagagcaccacttttcatgagttatctgaaagtgaattctgattcagcaaaaaaatacatcattctcaatctctcccctttttgtcccccttcaacaccctaccctccccccatttctttgtgttttctttttgtttggttgtttgttgaaaggttctaccaggacctggcccagtataaacacaaaaacgcacccaaatcataaaactgctcttctttcagttatgttttatttgtaagtgtactgggacacatccccctgttgtattttggcgcatagaattggttctgatagaagtaagggaggagaaaggtaaaagagaaaaaacataaccaaggagaaagctcagcagacatacatggacaggtagatcaatccgtgagacatttcaggatgaacactggcagtctgttaccactgtgtgaatgtgtgcattaaataaaatatttacaataatcttttttcctttttctttgaatacaagaatatgacaaaaatgttttcagtggaaacaggcagtagactgtgaaatcgcactagccacaaaacggtctaccagaaagctagcccagtttagtgc

SEQ ID NO: 35393 - DNA, 378 bp, Homo sapiens
tagtagaaaagaggaaaacattttagaccatggaaaaaatgataattacaatgaaacagatgttagattgtgcctggcattgcaaagacagtgagaagacatacttgagcaaaccaatgagctcctgcagggaggaagcagaaaggaagggttgaaaatagacagtggcaagatatggagaaacttcaagctagaggatggggtttgtggatggggttaagttagacaatgctggtattcaaatctatccttgaaaggaaaacagaatgttgataagaattaggggraagtatgtggaaaatagtaaggaggtgggaaaggacagtgtatgtccaatatggttggaaagttttattggctttgcatggtcttacatga

SEQ ID NO: 35394 - DNA, 1194 bp, Homo sapiens
taaacaagacagttggatcaaacttattttcctgataaaactggaatctgttcacatggctaaattttatttgccctgatgagcaaagcagtttccagggcactttgattttaaaagacctctttccttttttttctttagccagtaacctgaaactagtaataccatgaacagtaagttttatttcaacaccagcagaaaagtcagcagattcakagtagtcaggaaggaaaaataggcaaagaacttagaagactacatggtaactctttaaggacagaagaagaaagagggattgactgaaaatgttttacatgtgccatttttcttcaggttttctagtttatggagttgctttgttctaattgagtgtgcaggagtctggagatctcataaggcttctgctgtagccatcacagtctttgacctctgttaagccaaatattgctacacagaccaaaaatacagacagaccaacaaaaatcagaaccagactagattatcttagtggctgtagctttttagtattgccttaattctttgggacttaaacatacaccagatttgggactctgaactgaccagaatcccccttgggtaggactcaaatccacaatcctagacaaggttgggactctcatccataatcctaaaccacagggtgggacttgaacccacagtcgttatgatgagttcaaagacaattaaaagtacaggggcatattaacaaggtactcaccagaaagatgtctaatccagaagcaatttattttcccaaaagagaagtgccaagggagcctgaagtgccatggtggagaagaaggaaccctatagtcgagcctctggacaccctggtctaggtggccactcaggatcagtgcagggggcctgcacaccactaggggcaacagtaccttggacaggctgttcgtctcacctggggttctagtttgttaacaagcaaaaggggctcactgcccaatgtgctagaagccaacactgacaccaaatttttgaaaaaaagaaaagctttatattaaaagtcacctctgaaggagacaggagtcaagctcaaatttgtctctttctgctggcattaaggcagtacttttattagaaaaggttcagggggtggattctgagattagtaggtgatttgtgcaaggaaaagggaggtctggaaagtccttgggc

SEQ ID NO: 35395 - DNA, 1194 bp, Homo sapiens
taaacaagacagttggatcaaacttattttcctgataaaactggaatctgttcacatggctaaattttatttgccctgatgagcaaagcagtttccagggcactttgattttaaaagacctctttccttttttttctttagccagtaacctgaaactagtaataccatgaacagtaagttttatttcaacaccagcagaaaagtcagcagattcagagtagtcaggaaggaaaaataggcaaagaacttagaagactacatggtaactctttaaggacagaagaagaaagagggattgactgaaaatgttttacatgtgccatttttcttcaggttttctagtttatggagttgctttgttctaattgagtgtgcaggagtctggagatctcataaggcttctgctgtagccatcacagtctttgacctctgttaagccaaatattgctacacagaccaaaaatacagacagaccaacaaaaatcagaaccagactagattatcttagtggctgtagctttttagtattgccttaattctttgggacttaaacatacaccagatttgggactctgaactgaccagaatcccccttgggtaggactcaaatccacaatcctagacaaggttgggactctcatccataatcctaaaccacagggtgggacttgaacccacagtcgttatgatgagttcaaagacaattaaaagtacaggggcatattaacaaggtactcaccagaaagatgtctaatccagaagcaatttattttcccaaaagagaagtgccaagggagcctgaagtgccatggtggagaagaaggaaccctatagtcgagcctctggacaccctggtctaggtggccactcaggatcagtgcagggggcctgcacaccactaggggcaacagtaccttggacaggctgttcgtctcacctggggttctagtttgttaacaagcaaaaggggctcactgcccaatgtgctagaarccaacactgacaccaaatttttgaaaaaaagaaaagctttatattaaaagtcacctctgaaggagacaggagtcaagctcaaatttgtctctttctgctggcattaaggcagtacttttattagaaaaggttcagggggtggattctgagattagtaggtgatttgtgcaaggaaaagggaggtctggaaagtccttgggc

SEQ ID NO: 35396 - DNA, 584 bp, Homo sapiens
aagtcaggacttctggtgctctgatgccacttcttaactgtattggaatcttgcctctgaaataccactgcatacaaattttctttactggtgatcaaaattatgcaacttgagtgtggagagattggttagtacacacagaagccttgagtcttgacctatctatgccattgtttagctagaaaagaggctaataggctgtgactttgaaaagatgacaactttgtgaacaaaactgtttcaaaccaagatctatgggtgcaaaataatgaaaagggtccatatagatgtcttcatagacaccrgtcctatgatctcaaaagcctcctgaccaagccggtcttcttataaacatatttgccagccacaagggaaggaataagtggatgacactgaaaaaaaaaatacatctcagagatcccaggaccctttagtttccagatccttatccttggctgacaagcgttagctgatttatccatgaatattttcctgcttgctgagtgccttcaggacagggactaattgttcgtgtgtccttactgctagtacagtgcccgacatgcaatgtatgcttgccatat

SEQ ID NO: 35397 - DNA, 584 bp, Homo sapiens
aagtcaggacttctggtgctctgatgccacttcttaactgtattggaatcttgcctctgaaataccactgcatacaaattttctttactggtgatcaaaattatgcaacttgagtgtggagagattggttagtacacacagaagccttgagtcttgacctatctatgccattgtttagctagaaaagaggctaataggctgtgactttgaaaagatgacaactttgtgaacaaaactgtttcaaaccaagatctatgggtgcaaaataatgaaaagggtccatatagatgtcttcatagacaccagtcctatgatctcaaaagcctcctgaccaagccggtcttcttataaacatatttgccagccacaagggaaggaataagtggatgacactgaaaaaaaaaatacatctcagagatcccaggaccctttrgtttccagatccttatccttggctgacaagcgttagctgatttatccatgaatattttcctgcttgctgagtgccttcaggacagggactaattgttcgtgtgtccttactgctagtacagtgcccgacatgcaatgtatgcttgccatat

SEQ ID NO: 35398 - DNA, 584 bp, Homo sapiens
aagtcaggacttctggtgctctgatgccacttcttaactgtattggaatcttgcctctgaaataccactgcatacaaattttctttactggtgatcaaaattatgcaacttgagtgtggagagattggttagtacacacagaagccttgagtcttgacctatctatgccattgtttagctagaaaagaggctaataggctgtgactttgaaaagatgacaactttgtgaacaaaactgtttcaaaccaagatctatgggtgcaaaataatgaaaagggtccatatagatgtcttcatagacaccagtcctatgatctcaaaagcctcctgaccaagccggtcttcttataaacatatttgccagccacaagggaaggaataagtggatgacactgaaaaaaaaaatacatctcagagatcccaggaccctttagtttccagatccttatccttggctgacaagcrttagctgatttatccatgaatattttcctgcttgctgagtgccttcaggacagggactaattgttcgtgtgtccttactgctagtacagtgcccgacatgcaatgtatgcttgccatat

SEQ ID NO: 35399 - DNA, 1758 bp, Homo sapiens
taatatgatttaatgcttttataaaaaatacaatcaaatgtattgcatttaataaattactgaaagcaaaagaaccagataattgtggttatctctgggtggaattacaggcagtttttttcttagtggctttccatattttacaratgtctgtacagaataaatactacttttataatttaaaaaactaaatgttgtttcaagaataatgtagtcaagggggagacaaaacaaaatgaacaaagcaaaagcaaaagcaaaaccaaaccaagaaatctgcctctgtttagaacttctttcagcagcccaggcagaagcttgtcacgttgccatgggctccctggtcgagctagtcctgagtcacagcccccaaagttcctaaagcagcccagagccctgaggcagcgacctgaaggcacagtccaacaaaggtcacttagacaacagggcccacagccaacattctggaccctgaactctccatcctccctcaggagacaccagcctcctgaggatgctcagtcccacctggactacccaaaggagatcagagacgagtggcccagtcctatccgtcattcactgggacgctccatcatggctagtcagctgaatggatggatgaagtcctgttcagcaccagtgcctgggtgaggaatagtctgcaccagaagctcacatatatcttgactcttgtgtgtgtggttgtcaggccgctatagtgctgccgcaaaccactctggatacttaaaatccaggaggtatttttcaaactctgctaccggcagctggtgtttggtggcttacatatggaggtattgatgtgttctggaattggagaaaatcaccctctggaaatagaaaaatgtggtgacagggacccatgtagactggaattttgtcccagtgcgtttgcctggggctggttggtttctcctctcctgggcttatggtcagagacaaagacattgagaaaaaatgtgctgcagtatgatgggagtctagaattcatactcccaagaatgtttaatttgaagaaattctactgctaaaatttggctctgcattgtcgctgctggtcagttatggatggctctagagataggaagaggcaaacatcccctgcttctctggtgcattgttgccatggaccttttagtgagaaagagtgtctgcatgcatggggcctggaaatgcctggggtgaactttgcagaaagcaggaacagagtgagaagaaaagagaatgtactgcttgcatacccatatctgttggttggcttccatggacatgtggttgaaggattgttctggtatgactgacagaggcaaaataggaaagagattaagagaatgagctttggaaccctaaggctgagtcctggttcagctgttcatttgctgtgcaacctgggcaaagttacttaacctctcagagtgtcatttgtaaaatcagaacaataatagggtgatttcaagaattaaaaagaatttcatttaaaactttggcatattgcctgggacacagtagttggtaatgagtgctggtggtggtgatggtaatgatggtaatgattcttctcctttgagcttagtgaggcaggactagttggagagggtgagaggtggtgatatttgtactctggccatggtgagggcaatgaatatttcctaacagaaatgaatgttttcaggctaactagactttgaaaactctgtaattaatctttgttgatatgtaatagaacgttttgaaagg

SEQ ID NO: 35400 - DNA, 1758 bp, Homo sapiens
taatatgatttaatgcttttataaaaaatacaatcaaatgtattgcatttaataaattactgaaagcaaaagaaccagataattgtggttatctctgggtggaattacaggcagtttttttcttagtggctttccatattttacagatgtctgtacagaataaatactacttttataatttaaaaaactaaatgttgtttyaagaataatgtagtcaagggggagacaaaacaaaatgaacaaagcaaaagcaaaagcaaaaccaaaccaagaaatctgcctctgtttagaacttctttcagcagcccaggcagaagcttgtcacgttgccatgggctccctggtcgagctagtcctgagtcacagcccccaaagttcctaaagcagcccagagccctgaggcagcgacctgaaggcacagtccaacaaaggtcacttagacaacagggcccacagccaacattctggaccctgaactctccatcctccctcaggagacaccagcctcctgaggatgctcagtcccacctggactacccaaaggagatcagagacgagtggcccagtcctatccgtcattcactgggacgctccatcatggctagtcagctgaatggatggatgaagtcctgttcagcaccagtgcctgggtgaggaatagtctgcaccagaagctcacatatatcttgactcttgtgtgtgtggttgtcaggccgctatagtgctgccgcaaaccactctggatacttaaaatccaggaggtatttttcaaactctgctaccggcagctggtgtttggtggcttacatatggaggtattgatgtgttctggaattggagaaaatcaccctctggaaatagaaaaatgtggtgacagggacccatgtagactggaattttgtcccagtgcgtttgcctggggctggttggtttctcctctcctgggcttatggtcagagacaaagacattgagaaaaaatgtgctgcagtatgatgggagtctagaattcatactcccaagaatgtttaatttgaagaaattctactgctaaaatttggctctgcattgtcgctgctggtcagttatggatggctctagagataggaagaggcaaacatcccctgcttctctggtgcattgttgccatggaccttttagtgagaaagagtgtctgcatgcatggggcctggaaatgcctggggtgaactttgcagaaagcaggaacagagtgagaagaaaagagaatgtactgcttgcatacccatatctgttggttggcttccatggacatgtggttgaaggattgttctggtatgactgacagaggcaaaataggaaagagattaagagaatgagctttggaaccctaaggctgagtcctggttcagctgttcatttgctgtgcaacctgggcaaagttacttaacctctcagagtgtcatttgtaaaatcagaacaataatagggtgatttcaagaattaaaaagaatttcatttaaaactttggcatattgcctgggacacagtagttggtaatgagtgctggtggtggtgatggtaatgatggtaatgattcttctcctttgagcttagtgaggcaggactagttggagagggtgagaggtggtgatatttgtactctggccatggtgagggcaatgaatatttcctaacagaaatgaatgttttcaggctaactagactttgaaaactctgtaattaatctttgttgatatgtaatagaacgttttgaaagg

SEQ ID NO: 35401 - DNA, 631 bp, Homo sapiens
aaggggtatgatctaatggtgttaaactacagggaagtcagcaaggcctgcttgttcaggttcttcttggcttccaggtatagggcaggacaactgttaaatgagggtcttaccatctactttcaggggagagaagtcagacaattcttctagggccatgtttcaggggagaaaggtgaaagaaagtcagagagtggccttctttttctacagtttcctccatttccttcagcttaaaatacttagtatgccaaggtgccgtatttggggatattatattcagagctctgacaatattctgagaggttttgaccagtttaacctccttaaatattgctccaacctccttaggcctggcaaggaattatattcttatggctcctctctagcttcacctgggtaaacctgtgagttcctgaagggcaagaaccacacccctctttttgtcgctacactgcatattggggactaagtctcttgtccatgtccagctaatcaaagttgggacaagaagtgaatgagaaactcgctgttagggttatgcaaagtacaggatcaggtttattcttgtttacaatttcgataccttttcatcatggattttttagggatcaattttgatttttwaaaa

SEQ ID NO: 35402 - DNA, 1278 bp, Homo sapiens
tgctgagttaagaccagacaacatcatccataaatccactttgcctgacacgtataaactgccatccatcattgcaatgtgcaacaagggaaaggtggcaccctcaacctcttgtggaatgttgtttttctcaggasactcccctttcctaacaagaaatgggaccactattcactccacatgaaggtgccagtgcctgtccatgcattatactttagcagactttagagcttagtgtctttctaactttttagggaaaataaacagaacttacaatatttcctttttttctttttttttttttttggaaacagggtcttactctgtcaccaggctggagtgcagtggcataatcttggctcactgcagccccaacatcccggctcaagcaatcctcccgcctcagcctctaagtagctgggaccacaggtatgcaccaccatgcctggctaatttttgcactttttgtagagatgatacaatattttcttccacatatcagtgaatcaccttgtgcatcctttggagcccacattcagggctcaccctctgatctagtccttttcactgtcaaagaaggtgacaaataaagctgctaccatgtcagaatgaggattggccccagctcctgggcaaacagaattcctagaagaatgaaagatcaagttgagttcctacgcttgaaaaagaaaacattaaaaagcaattgtctcttgttaaactttaaaggctttcctatagactattaaccaatgaaaactgtgctaattttctttcctggggcaattgctattaagttgtttttgtaggctggtcaaaacctaactgagaaaaagtttatttttacctgtctttgtggccttcttagtaaaattggctattcaaagtggattaggaacctgaacttctttccttaggaaagtttcacaccaaatgtaaaaaagagagaatgatttagaaattaagttttattttttatttaatactctatctgaaactgaaaactttgagttttacttagcaacaaaataggcaacattccctcttcagaaacactaagtcaacataaggtaaaagaccttcatttctcagtaaaactgagatttgaggtggcggcaggaatgtgaatgaccctcgtaaattttctagctccaaattacttggctgctaatcaacataggcaggtccctaaatataggaccatatttctaaaacatccctttctcttattattcacagaaacccaaactgcagaacatgttcagtgaagcaaccaga

SEQ ID NO: 35403 - DNA, 1278 bp, Homo sapiens
tgctgagttaagaccagacaacatcatccataaatccactttgcctgacacgtataaactgccatccatcattgcaatgtgcaacaagggaaaggtggcaccctcaacctcttgtggaatgttgtttttctcaggacactcccctttcctaacaagaaatgggaccactattcactccacatgaaggtgccagtgcctgtccatgcattatactttagcagactttagagcttagtgtctttctaactttttagggaaaataaacagaacttacaatatttcctttttttytttttttttttttttggaaacagggtcttactctgtcaccaggctggagtgcagtggcataatcttggctcactgcagccccaacatcccggctcaagcaatcctcccgcctcagcctctaagtagctgggaccacaggtatgcaccaccatgcctggctaatttttgcactttttgtagagatgatacaatattttcttccacatatcagtgaatcaccttgtgcatcctttggagcccacattcagggctcaccctctgatctagtccttttcactgtcaaagaaggtgacaaataaagctgctaccatgtcagaatgaggattggccccagctcctgggcaaacagaattcctagaagaatgaaagatcaagttgagttcctacgcttgaaaaagaaaacattaaaaagcaattgtctcttgttaaactttaaaggctttcctatagactattaaccaatgaaaactgtgctaattttctttcctggggcaattgctattaagttgtttttgtaggctggtcaaaacctaactgagaaaaagtttatttttacctgtctttgtggccttcttagtaaaattggctattcaaagtggattaggaacctgaacttctttccttaggaaagtttcacaccaaatgtaaaaaagagagaatgatttagaaattaagttttattttttatttaatactctatctgaaactgaaaactttgagttttacttagcaacaaaataggcaacattccctcttcagaaacactaagtcaacataaggtaaaagaccttcatttctcagtaaaactgagatttgaggtggcggcaggaatgtgaatgaccctcgtaaattttctagctccaaattacttggctgctaatcaacataggcaggtccctaaatataggaccatatttctaaaacatccctttctcttattattcacagaaacccaaactgcagaacatgttcagtgaagcaaccaga

SEQ ID NO: 35404 - DNA, 1278 bp, Homo sapiens
tgctgagttaagaccagacaacatcatccataaatccactttgcctgacacgtataaactgccatccatcattgcaatgtgcaacaagggaaaggtggcaccctcaacctcttgtggaatgttgtttttctcaggacactcccctttcctaacaagaaatgggaccactattcactccacatgaaggtgccagtgcctgtccatgcattatactttagcagactttagagcttagtgtctttctaactttttagggaaaataaacagaacttacaatatttcctttttttctttttttttttttttggaaacaggktcttactctgtcaccaggctggagtgcagtggcataatcttggctcactgcagccccaacatcccggctcaagcaatcctcccgcctcagcctctaagtagctgggaccacaggtatgcaccaccatgcctggctaatttttgcactttttgtagagatgatacaatattttcttccacatatcagtgaatcaccttgtgcatcctttggagcccacattcagggctcaccctctgatctagtccttttcactgtcaaagaaggtgacaaataaagctgctaccatgtcagaatgaggattggccccagctcctgggcaaacagaattcctagaagaatgaaagatcaagttgagttcctacgcttgaaaaagaaaacattaaaaagcaattgtctcttgttaaactttaaaggctttcctatagactattaaccaatgaaaactgtgctaattttctttcctggggcaattgctattaagttgtttttgtaggctggtcaaaacctaactgagaaaaagtttatttttacctgtctttgtggccttcttagtaaaattggctattcaaagtggattaggaacctgaacttctttccttaggaaagtttcacaccaaatgtaaaaaagagagaatgatttagaaattaagttttattttttatttaatactctatctgaaactgaaaactttgagttttacttagcaacaaaataggcaacattccctcttcagaaacactaagtcaacataaggtaaaagaccttcatttctcagtaaaactgagatttgaggtggcggcaggaatgtgaatgaccctcgtaaattttctagctccaaattacttggctgctaatcaacataggcaggtccctaaatataggaccatatttctaaaacatccctttctcttattattcacagaaacccaaactgcagaacatgttcagtgaagcaaccaga

SEQ ID NO: 35405 - DNA, 1278 bp, Homo sapiens
tgctgagttaagaccagacaacatcatccataaatccactttgcctgacacgtataaactgccatccatcattgcaatgtgcaacaagggaaaggtggcaccctcaacctcttgtggaatgttgtttttctcaggacactcccctttcctaacaagaaatgggaccactattcactccacatgaaggtgccagtgcctgtccatgcattatactttagcagactttagagcttagtgtctttctaactttttagggaaaataaacagaacttacaatatttcctttttttctttttttttttttttggaaacagggtcttactctgtcaccaggctggagtgcagtggcataatcttggctcactgcagccccaacatcccggctcaagcaatcctcccgcctcagcctctaagtagctgggaccacaggtatgcaccaccatgcctggctaatttttgcactttttgtagagatgatacaatattttcttccacatatcagtgaatcaccttgtgcatcctttggagcccacattcagggctcaccctctgatctartccttttcactgtcaaagaaggtgacaaataaagctgctaccatgtcagaatgaggattggccccagctcctgggcaaacagaattcctagaagaatgaaagatcaagttgagttcctacgcttgaaaaagaaaacattaaaaagcaattgtctcttgttaaactttaaaggctttcctatagactattaaccaatgaaaactgtgctaattttctttcctggggcaattgctattaagttgtttttgtaggctggtcaaaacctaactgagaaaaagtttatttttacctgtctttgtggccttcttagtaaaattggctattcaaagtggattaggaacctgaacttctttccttaggaaagtttcacaccaaatgtaaaaaagagagaatgatttagaaattaagttttattttttatttaatactctatctgaaactgaaaactttgagttttacttagcaacaaaataggcaacattccctcttcagaaacactaagtcaacataaggtaaaagaccttcatttctcagtaaaactgagatttgaggtggcggcaggaatgtgaatgaccctcgtaaattttctagctccaaattacttggctgctaatcaacataggcaggtccctaaatataggaccatatttctaaaacatccctttctcttattattcacagaaacccaaactgcagaacatgttcagtgaagcaaccaga

SEQ ID NO: 35406 - DNA, 544 bp, Homo sapiens
atgtttattgtgcacttaatttttattattgttacactgtaatatgtaatgaaataattacacaactcaccataatgtagaatcagtgggagtcctgagcttgttttcctacaactggacggccccatctgggggtgatgggagacagtgacagatcatctaggcattagattctcataaggagctcgcaacctgtatccctcgcatgtgcagttcacaatagggcttacgcttctttgagaatctaataccgctgctgatctgatgggaggtggagctcaggcggtaatgtgagtgatggggagcagctgtaaatacagatgaagcttcgctcactgccactcacctcctgccgtgcracccagttaataacaggccacggaccagtacaggcatatggcctggggtgtggggacccctgatctaggaggatatagtcaatgaccatattttttccaaacttaacatttaaattgttaggacatttgttctgaaaagaatgcctgtgccattttaagatataagaactgggggaagcctttta

SEQ ID NO: 35407 - DNA, 1032 bp, Homo sapiens
gatcacagaagcccacagcacaccacacaaggcaatttaaaagttcatgcttgcaatacctcagaaaacagtccaagttccagggacactagctgccaagtcacagcaacaaaagcaacagatcagggcaagagcactgttctcctttcccaaatgcccacttctcatcctcagctcactgtgagttaggatagatcacacagaccgccgaggaaaacttggaaaacagaccagcaaatccaagcaaatgaggaaagtggacactgagaaaatgccctaacaaatgtgatggcttaaataccatttcttttttttttcttttttgagacaggatctcactccgtcacccaggctagagcgcagtggcatgaccatggctcactgcagcctcgacctcccaggctcaagcaatccttccacctcagcttcccagaccacagctgcaccaccatacccggctaagttttgtattttttatagagacagagtctcgctatattgccagggccggtcaccaactcctgggctcaagtgatcctctgccttcgcctcccaaagtgctggggattacaggtgtaagccatcgtgcctggcccatttctttataaatgtaactttttctctcatctcctaccagagctcagaacactcattgggctgataagcattggctgggggtcacggactctgaacgttccaatccaaaaggaaaacaagccaaacttactatatttctcagtagtatgcttcttgggtaaggtctcataatcagaagtcagcactccaggacataggaggtaaraccttacaattaggctgaacaacatcaagcatctattccagtaacacatattatatcaaatcaatatttaaacagataatgtcctttcaagagcagatttatttaaaagttgttttacttggctcaaagtaaaagtttatattacaccataaacatcaacatggccatagaccttacttgtcttccatactaaaagggcaacagcaagactgcagtaattataccaagat

SEQ ID NO: 35408 - DNA, 522 bp, Homo sapiens
tgttaccagtaggtttcttctcttcccacatgaccaaacatagctgccccagctaaactctaaccttctagtgcaagtgttatctcatgtgacatatatatatatatatatwtttttttttttttttttaaatagagacagggtctagtcatgttgcccaggctgatcttgatctcctgggctcaatgaatcctcccacctcggcctgccacagtgctgggattacaggcatgagccaccgcacccaaccattttttttaatatcttaatttaaattattgaaagagacagtataaaaagcccagtatgtatacaagacccaacatctttgagtacactgaaattaatatacctgcctttcagaagaggatgactaaagaagggactgagcaaaataccagatttacctactgcagtctttagatgaatacagtatacattcttgttttaaaatatgcccccttaatggtcatagaggatagaatgacttcttactttagccttgccaaaagctagataatc

SEQ ID NO: 35409 - DNA, 615 bp, Homo sapiens
ttccccttcctccaaagagcaaaacaggaaccaaaaaattcatacccgaggccaggtgcggtggctcatgcttgtaatcctagtactttgggaggccaaggcaggcagatcacttgagctcaggagtttgaggctagcctgggcaacatggtgagaccccatctctaccaaaaawgcaaaaaattagctgggctttgtgacgcatgcctttcgtcccagctactcgagaggctgaggtgggaggattgcatgagcccaggaggcagatgttgtggggaaccaagattgcaccactgcactccagcctgggtgacagagtaagaccctgtctccaaaaaaaaaaaaaaaaaaaaaattcataggcaaaatgtcaaatgacatttacagaataatatactacagaatccagtttgaaacatatttatttggttaagtcaagttgaaaaggacaacagaacagtttactatctctataaatctgtaagtgtataagtaacttgagagtgagtaacctatatcaaaacaaagaacaaggccatgagaacctaaggaatgtattacagtgaattctgaatgaaagaaaatagggtgttttatctcagagagacaaataaa

SEQ ID NO: 35410 - DNA, 1266 bp, Homo sapiens
aaagaaagagcaaaaaatgcaatttcaatcctcattttgtttctaaaacgctaaatgcattagcaacttatacttcactactagaaaattaaaataagcccatagcttaatacctaggtgatgggttgacaggtacagcaaaccaccatggcacacgtttacctatgtaacaagcctacacatcctgcacgtgtaccccagaacttaaaaataaattaaaaaaaaaaaagtccttcagtaacattagaacaaaaaagcctatggtcataaactaggtccaaaactattaaccataataactacacaatactayttttaaagatacttacttcaaatcttttttaagcaccaaattaaagccaatacacctgaagctttttacatttcaggactaagaatatgaggggatatattctccaccatgcggctcgtccatcccaatgctaccacagtacctatagcatcttctggcggcaggtcgactgtgtctgtgtagaggtactggagaaaggcacgatacactgggtaagaaaactgatcgatttctatcacttccttcatgtcttcattccaatacgactggaacatggatcgaaaatgctcacacctaaaacagcaaagcaaaagtcttatttgttcagcagcaatttttaaaaaagaaaaaaaaattacctaattaagttgataaaatcagataaacagaagtatccttgggccgggcgtggtggctcatgcctgtaatcccagcactttgggaggccaagcgggtagatcacctgagatcaggagttcgagaccagcctgaccaacatggataaaccccgtctctactaaaaatacaaaattagctgggcatggtggtgcatgcctataatcccagctactcaggaggctgaggcaggagaatcgcttgaacccgggaggtggaggttgtggcgagccgagattgcgcttctgcactctagcctggcaacaagagcaaaactccgtctcaaaaaaaaaaaaaaagtaagtatattaactactatctgggcctgaacacaccaggatcacagacctttagttagcacccaaaaaacattccacatgcaagtggtttttgtacatgccttttacatacactcactttcattttttgtaactcctattaaatactaataggtatacatagagcctggaagtacctagcacttccactactgtttccatttgatggtccccaagatttttttgctcctttgttttttttaaaatgatgtacagaaa

SEQ ID NO: 35411 - DNA, 1266 bp, Homo sapiens
aaagaaagagcaaaaaatgcaatttcaatcctcattttgtttctaaaacgctaaatgcattagcaacttatacttcactactagaaaattaaaataagcccatagcttaatacctaggtgatgggttgacaggtacagcaaaccaccatggcacacgtttacctatgtaacaagcctacacatcctgcacgtgtaccccagaacttaaaaataaattaaaaaaaaaaaagtccttcagtaacattagaacaaaaaagcctatggtcataaactaggtccaaaactattaaccataataactacacaatactacttttaaagatacttacttcaaatcttttttaagcaccaaattaaagccaatacacctgaagctttttacatttcaggactaagaatatgaggggatatattctccaccatgcggctcgtccatcccaatgctaccacagtacctatagcatcttctggcggcaggtcgactgtgtctgtgtagaggtactggagaaaggcacgatacactgggtaagaaaactgatcgatttctatcacttccttcatgtcttcattccaatacgactggaacatggatcgaaaatgctcacacctaaaacagcaaagcaaaagtcttatttgttcagcagcaatttttaaaaaagaaaaaaaaattacctaattaagttgataaaatcagataaacagaagtatccttgggccgggcgtggtggctcatgcctgtaatcccagcactttgggaggccaagcgggtagatcacctgagatcaggagttcgagaccagcctgaccaacatggataaaccccgtctctactaaaaatacaaaattagctgggcatggtggtgcatgcctataatcccagctactcaggaggctgaggcaggagaatcgcttgaacccgggaggtggaggttgtggcgagccgagattgcgcttctgcactctagcctggcaacaagagcaaaactccgtctcaaaaaaaaaaaaaaagkaagtatattaactactatctgggcctgaacacaccaggatcacagacctttagttagcacccaaaaaacattccacatgcaagtggtttttgtacatgccttttacatacactcactttcattttttgtaactcctattaaatactaataggtatacatagagcctggaagtacctagcacttccactactgtttccatttgatggtccccaagatttttttgctcctttgttttttttaaaatgatgtacagaaa

SEQ ID NO: 35412 - DNA, 655 bp, Homo sapiens
accctcatcagtaattctaatttcacccttgccttgtgatcctgctctgcccttttgccttgtgatcttttattgccctttgaagcatgtgatctctgtgacccactccctattcgtacacccctccgcttttgaaatccctaataaaaacttgctggttttgcggctcggggtcgccatcacagtcctaccaatatgtgatgacacccccggaggmccagctgtaaaatttctctctttgtactctttctgcttatttctcagaccggccaatacttagggaaaatagaaaagaacctacattgaaatattggggactggttcacctgatgttaactgacttattacccatcctggcagaaacggccacttaaataagagtctaatgactcctctcaaatctagaatgacttggtgggaaagtgggagataaggagcttatgaatagcaaaatcaagtgggattttgagtttacttgtccctgttctacccaagaggttggtgagcgggagggagacaaggttttgcaaaaagatggtggacagaaagacctggagaaagaaaagatggtgaggaaaaagtttttgggtagatggacgggggaaaagagggtgacaagcaggttaggggaaagaagacggcgagtgggaagttg

SEQ ID NO: 35413 - DNA, 582 bp, Homo sapiens
tgccaagagttttatcatgaattggtgttgaactttgtcaaatagttttttcctgcatctgttgaaatgatcacatgatttttctcctatattctattaaaatggtgaattatattatttgcttttcatatcaaagcaacattgcatttgttggagaaacaccagttgatcatggtacttttttaaaaaaaattgctagattcaatttcttaatattttgtttaaaatttttgcatttattttcatgaaggatattagtctatagttttcttagtatgtctctgtcaagtattaaaccaaggtattgcaggcctyataaaatgagtagagcagtattccctcttcttttacctgacatagtttgggagagatggttatgtgttaaaacataattttttcacttaacatgttaaaacttaaatgtttcaaaaaacttaaatatttcataaaattcaccatgaagtcatcagagactggagttttctctgtagaaaagtttttatttaaaaaataatttttactaatagtctgggcacagtggctcatacctgtaagctcagcactttgggaggttaaggtggg

SEQ ID NO: 35414 - DNA, 582 bp, Homo sapiens
tgccaagagttttatcatgaattggtgttgaactttgtcaaatagttttttcctgcatctgttgaaatgatcacatgatttttctcctatattctattaaaatggtgaattatattatttgcttttcatatcaaagcaacattgcatttgttggagaaacaccagttgatcatggtacttttttaaaaaaaattgctagattcaatttcttaatattttgtttaaaatttttgcatttattttcatgaaggatattagtctatagttttcttagtatgtctctgtcaagtattaaaccaaggtattgcaggcctcataaaatgagtagagcagtattccctcttcttttacctgacatagtttgggagagatggttatgtgttaaaacataattttttcacttaacatgttaaaacttaaatgtttcaaaaaacttaaatatttcataaaattcaccatgaagtcatcagagwctggagttttctctgtagaaaagtttttatttaaaaaataatttttactaatagtctgggcacagtggctcatacctgtaagctcagcactttgggaggttaaggtggg

SEQ ID NO: 35415 - DNA, 582 bp, Homo sapiens
tgccaagagttttatcatgaattggtgttgaactttgtcaaatagttttttcctgcatctgttgaaatgatcacatgatttttctcctatattctattaaaatggtgaattatattatttgcttttcatatcaaagcaacattgcatttgttggagaaacaccagttgatcatggtacttttttaaaaaaaattgctagattcaatttcttaatattttgtttaaaatttttgcatttattttcatgaaggatattagtctatagttttcttagtatgtctctgtcaagtattaaaccaaggtattgcaggcctcataaaatgagtagagcagtattccctcttcttttacctgacatagtttgggagagatggttatgtgttaaaacataattttttcacttaacatgttaaaacttaaatgtttcaaaaaacttaaatatttcataaaattcaccatgaagtcatcagagactggagttttctctgtmgaaaagtttttatttaaaaaataatttttactaatagtctgggcacagtggctcatacctgtaagctcagcactttgggaggttaaggtggg

SEQ ID NO: 35416 - DNA, 1901 bp, Homo sapiens
ccgttgtgcccagcatgacaacattttagtcactgatgcctcgcctacaggacagcagccccatgacattataataccacatttctatgccttttctacatttgggtgtgtttagatgcacgaatacttaccattgtgttacagctgcctacagtactcagtacagtaacgtgtgcaggtttgttgcctgggagcaataggctacaacgtgcagcctcgctgtttggtgggctacattatctaggtttgtgtgagtacrctccgtgttgttcacacagcaacaacatcgcctacatttctcagaatgtagccccattagtaagaaatgcatgactagacctaagaaggtgttggtggtcacagtaacgtttaaaatgtaacatgctgtaatgcaacttaagcagtacatgcaatatctaggaggcctgtatagggagtctgtaatatacatgcaatgataccaacctcaggctactaaaaacacgaaactgatgggctgtgaagggagtggatgatctgtttgtcagcaaggcatgtgcaccacatgtgtaaatatcctgaagaaagtacctcaagtgtctgtcatgcagccaacagacagtatctgcagggccctttacaaaccaggaagagggaaatcggattctttccatttgcagacattttcagactcgttctttctttcttttttgagacagagtcttgctctgtcgcccaggctggagtgcagtagcacaatctcagctcactgcaccctctgcctccccggttcaagcaattctcctgcctcagcctctcaagtagctgggattacaggtgcccaccaccacgcccagctaatttttgtatttttagtagagatagggtttcactgtgtggccaggctggtctcgaactcctgaccttgtgatccacccaccttggcctcccaaagtgctgggattacaagtgtgagccaccatgccaggcctttcagattctttctgaaccatctggggaagtcacagtattgataatggccatgaatttatgagaaactgttaagtataatagatattaaaaaatagaaagttgatttttagttggtaacaaaagactaaaatctttaatgcactctagttccttgaaatctgataatgctgacgagtcagtttccggagccaaatttccccgcttgactcatcctcacaagaaatcagatatccttgttataagaggagagcatcaacacaaaacaaaaacagcacggatgggctgcctcatgctgtataggattcgagacccaggagccatagcttaggggccactgtccctggtcaggcacacagacaggaaaggaggagggacccagctggcatgtggctggagcagcacccaggacacagcatggcagctggccaggtctcagccctggacaagaatccacaagaggcgaaggcattttctgtgctgtgcctcagccagaagttccaatgcagggatgtggaggcattttctaaaacttgcctttgtcttgctccaagtgcaggcaccatgcataatgctgacgagcatggtctgtgactcccgcgctggcaggactttatggccaaggtgcctcatgccacccaccacgtgtggtagtggcagtcatttgtgtaacactcagacacccaaataaaggggcaagcatcctaaactggtgcagctttactgtcctgggaggccttacccacttctcaaaagaatgtgctatttgctgacttcagtactaaaatatctgagttgtgttacctgagggttttccagctgtttttgcaggtgagtgtactgtgagctaagcaggctatagacccatatctgccatccaccagctgggtagctgtgggagcacctctttccttctccggatttcccccacc

SEQ ID NO: 35417 - DNA, 1901 bp, Homo sapiens
ccgttgtgcccagcatgacaacattttagtcactgatgcctcgcctacaggacagcagccccatgacattataataccacatttctatgccttttctacatttgggtgtgtttagatgcacgaatacttaccattgtgttacagctgcctacagtactcagtacagtaacgtgtgcaggtttgttgcctgggagcaataggctacaacgtgcagcctcgctgtttggtgggctacattatctaggtttgtgtgagtacgctccgtgttgttcacacagcaacaacatcgcctacatttctcagaatgtagccccattagtaagaaatgcatgactagacctaagaaggtgttggtggtcacagtaacgtttaaaatgtaacatgctgtaatgcaacttaagcagtacatgcaatatctaggaggcctgtatagggagtctgtaatatacatgcaatgataccaacctcaggctactaaaaacacgaaactgatgggctgtgaagggagtggatgatctgtttgtcagcaaggcatgtgcaccacatgtgtaaatatcctgaagaaagtacctcaagtgtctgtcatgcagccaacagacagtatctgcagggccctttacaaaccaggaagagggaaatcggattctttccatttgcagacattttcagactcgttctttctttcttttttgagacagagtcttgctctgtcgcccaggctggagtgcagtagcacaatctcagctcactgcaccctctgcctccccggttcaagcaattctcctgcctcagcctctcaagtagctgggattacaggtgcccaccaccacgcccagctaatttttgtatttttagtagagatagggtttcrctgtgtggccaggctggtctcgaactcctgaccttgtgatccacccaccttggcctcccaaagtgctgggattacaagtgtgagccaccatgccaggcctttcagattctttctgaaccatctggggaagtcacagtattgataatggccatgaatttatgagaaactgttaagtataatagatattaaaaaatagaaagttgatttttagttggtaacaaaagactaaaatctttaatgcactctagttccttgaaatctgataatgctgacgagtcagtttccggagccaaatttccccgcttgactcatcctcacaagaaatcagatatccttgttataagaggagagcatcaacacaaaacaaaaacagcacggatgggctgcctcatgctgtataggattcgagacccaggagccatagcttaggggccactgtccctggtcaggcacacagacaggaaaggaggagggacccagctggcatgtggctggagcagcacccaggacacagcatggcagctggccaggtctcagccctggacaagaatccacaagaggcgaaggcattttctgtgctgtgcctcagccagaagttccaatgcagggatgtggaggcattttctaaaacttgcctttgtcttgctccaagtgcaggcaccatgcataatgctgacgagcatggtctgtgactcccgcgctggcaggactttatggccaaggtgcctcatgccacccaccacgtgtggtagtggcagtcatttgtgtaacactcagacacccaaataaaggggcaagcatcctaaactggtgcagctttactgtcctgggaggccttacccacttctcaaaagaatgtgctatttgctgacttcagtactaaaatatctgagttgtgttacctgagggttttccagctgtttttgcaggtgagtgtactgtgagctaagcaggctatagacccatatctgccatccaccagctgggtagctgtgggagcacctctttccttctccggatttcccccacc

SEQ ID NO: 35418 - DNA, 1028 bp, Homo sapiens
ttcagacccatggattgcatttagttcttctgtctcttagacttcgtctggagcagttcctsagttttcccttgaccttatgaccttgaatctttcaaagagtaaagtccagtaatgtagaatgttcgacaattgggtttatctgatgtttcattgtgattagatttaaattatactttttaaaaaattcaacttttagttccagggagtacatgtgcagctttgttacatgagtatattgcatcatgctgaggtctggggtacaaagagattttacatttttggtaaagtgtatcacagaagtgatcctgtaatcgtctcactgcatcttaccatgtgtcctacaattttgatttgtcctgttaattaatatcttgtggggaggtaatttgagactacgtaagtatctcttcctcataaaaccttcaatttattcatttacttgtatcaatacggactcatgggttattttctccaatagtgtataatttgttaatttttaaaaaaacttttcttttaagaaatgttatattttgacaatttcagactttttaatacaatgtcatgacttctttacttcttgggagccttccagcatcaatggtggcactctgtatgggtcccgtgatgttatttgactccacagtattgcattaaaaacaatgaaaaatatgtaagaaccataaatcatcactttttcccatgagacacaatttcttggatggatgaactgctcatgtggagatgattagcatcacaaagcattttaaggaaatacttgcaacagttctgctcactgcagtaccacaggtggctatgaaatcattccagtagtacagtgtacactatagttaattttacgcagttatggtttaatgctgcatctttgtttgtttacctttctcttggctgtgaatggtgccacataccatgtgtaaattttaataaatcgtattttttataatagattatatatattttatggtagtaatgatgaaatacatgagtatctacatatatattatgca

SEQ ID NO: 35419 - DNA, 1028 bp, Homo sapiens
ttcagacccatggattgcatttagttcttctgtctcttagacttcgtctggagcagttcctcagttttcccttgaccttatgaccttgaatctttcaaagagtaaagtccagtaatgtagaatgttcgacaattgggtttatctgatgtttcattgtgattagatttaaattatactttttaaaaaattcaacttttagttccagggagtacatgtgcagctttgttacatgagtatattgcatcatgctgaggtctggggtacaaagagattttacatttttggtaaagtgtatcacagaagtgatcctgtaatcgtctcactgcatcttaccatgtgtcctacaattttgatttgtcctgttaattaatatcttgtggggaggtaatttgaractacgtaagtatctcttcctcataaaaccttcaatttattcatttacttgtatcaatacggactcatgggttattttctccaatagtgtataatttgttaatttttaaaaaaacttttcttttaagaaatgttatattttgacaatttcagactttttaatacaatgtcatgacttctttacttcttgggagccttccagcatcaatggtggcactctgtatgggtcccgtgatgttatttgactccacagtattgcattaaaaacaatgaaaaatatgtaagaaccataaatcatcactttttcccatgagacacaatttcttggatggatgaactgctcatgtggagatgattagcatcacaaagcattttaaggaaatacttgcaacagttctgctcactgcagtaccacaggtggctatgaaatcattccagtagtacagtgtacactatagttaattttacgcagttatggtttaatgctgcatctttgtttgtttacctttctcttggctgtgaatggtgccacataccatgtgtaaattttaataaatcgtattttttataatagattatatatattttatggtagtaatgatgaaatacatgagtatctacatatatattatgca

SEQ ID NO: 35420 - DNA, 1028 bp, Homo sapiens
ttcagacccatggattgcatttagttcttctgtctcttagacttcgtctggagcagttcctcagttttcccttgaccttatgaccttgaatctttcaaagagtaaagtccagtaatgtagaatgttcgacaattgggtttatctgatgtttcattgtgattagatttaaattatactttttaaaaaattcaacttttagttccagggagtacatgtgcagctttgttacatgagtatattgcatcatgctgaggtctggggtacaaagagattttacatttttggtaaagtgtatcacagaagtgatcctgtaatcgtctcactgcatcttaccatgtgtcctacaattttgatttgtcctgttaattaatatcttgtggggaggtaatttgagactacgtaagtatctcttcctcataaaaccttcaatttattcatttacttgtatcaatamggactcatgggttattttctccaatagtgtataatttgttaatttttaaaaaaacttttcttttaagaaatgttatattttgacaatttcagactttttaatacaatgtcatgacttctttacttcttgggagccttccagcatcaatggtggcactctgtatgggtcccgtgatgttatttgactccacagtattgcattaaaaacaatgaaaaatatgtaagaaccataaatcatcactttttcccatgagacacaatttcttggatggatgaactgctcatgtggagatgattagcatcacaaagcattttaaggaaatacttgcaacagttctgctcactgcagtaccacaggtggctatgaaatcattccagtagtacagtgtacactatagttaattttacgcagttatggtttaatgctgcatctttgtttgtttacctttctcttggctgtgaatggtgccacataccatgtgtaaattttaataaatcgtattttttataatagattatatatattttatggtagtaatgatgaaatacatgagtatctacatatatattatgca

SEQ ID NO: 35421 - DNA, 1028 bp, Homo sapiens
ttcagacccatggattgcatttagttcttctgtctcttagacttcgtctggagcagttcctcagttttcccttgaccttatgaccttgaatctttcaaagagtaaagtccagtaatgtagaatgttcgacaattgggtttatctgatgtttcattgtgattagatttaaattatactttttaaaaaattcaacttttagttccagggagtacatgtgcagctttgttacatgagtatattgcatcatgctgaggtctggggtacaaagagattttacatttttggtaaagtgtatcacagaagtgatcctgtaatcgtctcactgcatcttaccatgtgtcctacaattttgatttgtcctgttaattaatatcttgtggggaggtaatttgagactacgtaagtatctcttcctcataaaaccttcaatttattcatttacttgtatcaatacggaytcatgggttattttctccaatagtgtataatttgttaatttttaaaaaaacttttcttttaagaaatgttatattttgacaatttcagactttttaatacaatgtcatgacttctttacttcttgggagccttccagcatcaatggtggcactctgtatgggtcccgtgatgttatttgactccacagtattgcattaaaaacaatgaaaaatatgtaagaaccataaatcatcactttttcccatgagacacaatttcttggatggatgaactgctcatgtggagatgattagcatcacaaagcattttaaggaaatacttgcaacagttctgctcactgcagtaccacaggtggctatgaaatcattccagtagtacagtgtacactatagttaattttacgcagttatggtttaatgctgcatctttgtttgtttacctttctcttggctgtgaatggtgccacataccatgtgtaaattttaataaatcgtattttttataatagattatatatattttatggtagtaatgatgaaatacatgagtatctacatatatattatgca

SEQ ID NO: 35422 - DNA, 1028 bp, Homo sapiens
ttcagacccatggattgcatttagttcttctgtctcttagacttcgtctggagcagttcctcagttttcccttgaccttatgaccttgaatctttcaaagagtaaagtccagtaatgtagaatgttcgacaattgggtttatctgatgtttcattgtgattagatttaaattatactttttaaaaaattcaacttttagttccagggagtacatgtgcagctttgttacatgagtatattgcatcatgctgaggtctggggtacaaagagattttacatttttggtaaagtgtatcacagaagtgatcctgtaatcgtctcactgcatcttaccatgtgtcctacaattttgatttgtcctgttaattaatatcttgtggggaggtaatttgagactacgtaagtatctcttcctcataaaaccttcaatttattcatttacttgtatcaatacggactcatgggttattttctccaatagtgtataatttgttaatttttaaaaaaacttttcttttaagaaatgttatattttgacaatttcagactttttaatacaatgtcatgacttctttacttcttgggagccttccagcatcaatggtggcactctgtatgggtcccgtgrtgttatttgactccacagtattgcattaaaaacaatgaaaaatatgtaagaaccataaatcatcactttttcccatgagacacaatttcttggatggatgaactgctcatgtggagatgattagcatcacaaagcattttaaggaaatacttgcaacagttctgctcactgcagtaccacaggtggctatgaaatcattccagtagtacagtgtacactatagttaattttacgcagttatggtttaatgctgcatctttgtttgtttacctttctcttggctgtgaatggtgccacataccatgtgtaaattttaataaatcgtattttttataatagattatatatattttatggtagtaatgatgaaatacatgagtatctacatatatattatgca

SEQ ID NO: 35423 - DNA, 1329 bp, Homo sapiens
tacgaatgctcattgtagtgctgttcaacaatagcagagacatggaatcaatctaaatgcccatccatggtagactggattaaaaaaaatgtggaacatatgcaccatggaatactatgcagccataacaaagaatgagattgtgtcttttatagggacrtggatggagctggaagccattatccttagcaaactaatgcaggaacagaaaaccaaatactatatgttcttacttataaataggagcttagtgatgagaactcgtgaagaccaggaggggaacaacaacactggggtctaattgagagtggagtgtgggaggagggagaatcacagaaaaaaatcatggatactaccaggcttcatacctgggtgatgaaataatctttacaacaaactcctgagtttatttatataacagacttcaaatgtaccccaaacctaacataaaagtttttaaaaaaaattaaaaattaaaaaaaaaaaagaaaaaaactgaggctcagagaagttaagtacctcacccaaagccacacagctagctggtatgttttagaactaagctttaacttaagtatctttgactcaaagcctacttttcactgctgttgctgccttgagacagaggtccagaggtgttatgtgcgatggaagcgtcactggatggagacatgacccacccatgggggtatcttgaggaacacactcagttgcctgtgtgaattctaacaggtctgtttgcatctcagatgctctactgtgacctctggtacagtgtggctgtttactagtgatgctattccgggaagagctctagggcttcttagccccatgttaacttctcatggttcaaagtgctgttggcggagcacaatgcaaaatcctgtggatatgggtgaggctgtcatctttggaggaaggactaaagggctgggggcaggaggccagggactgactgggggctgatcaggacgaagagagctgagggcacacagtcaggatgaaattcttctccaatggcgccagggtgcacggtgctgggagccaaggggctctgccttcccaccagccctgccgctccagggctctgtgaacctgggtcacctcacctccatggagccacacttcttatttgcaaaacagagggtggggatccggtgacgaaggagcctccatccagttctaattttccgttttcttatagaagtcgggcttcggtgtgtctggaactgtgtaaggaagacccagtgaagtatcctcatgactgcacctgagctgtactgaataaggggttgtgtgtgtgtatgtgtgtttgtgtgtatgtatgtg

SEQ ID NO: 35424 - DNA, 1329 bp, Homo sapiens
tacgaatgctcattgtagtgctgttcaacaatagcagagacatggaatcaatctaaatgcccatccatggtagactggattaaaaaaaatgtggaacatatgcaccatggaatactatgcagccataacaaagaatgagattgtgtcttttatagggacatggatggagctggaagccattatccttagcaaactaatgcaggaacagaaaaccaaatactatatgttcttacttataaataggagcttagtgatgagaactcgtgaagaccaggaggggaacaacaacactggggtctaattgagagtggagtgtgggaggagggagaatcacagaaaaaaatcatgratactaccaggcttcatacctgggtgatgaaataatctttacaacaaactcctgagtttatttatataacagacttcaaatgtaccccaaacctaacataaaagtttttaaaaaaaattaaaaattaaaaaaaaaaaagaaaaaaactgaggctcagagaagttaagtacctcacccaaagccacacagctagctggtatgttttagaactaagctttaacttaagtatctttgactcaaagcctacttttcactgctgttgctgccttgagacagaggtccagaggtgttatgtgcgatggaagcgtcactggatggagacatgacccacccatgggggtatcttgaggaacacactcagttgcctgtgtgaattctaacaggtctgtttgcatctcagatgctctactgtgacctctggtacagtgtggctgtttactagtgatgctattccgggaagagctctagggcttcttagccccatgttaacttctcatggttcaaagtgctgttggcggagcacaatgcaaaatcctgtggatatgggtgaggctgtcatctttggaggaaggactaaagggctgggggcaggaggccagggactgactgggggctgatcaggacgaagagagctgagggcacacagtcaggatgaaattcttctccaatggcgccagggtgcacggtgctgggagccaaggggctctgccttcccaccagccctgccgctccagggctctgtgaacctgggtcacctcacctccatggagccacacttcttatttgcaaaacagagggtggggatccggtgacgaaggagcctccatccagttctaattttccgttttcttatagaagtcgggcttcggtgtgtctggaactgtgtaaggaagacccagtgaagtatcctcatgactgcacctgagctgtactgaataaggggttgtgtgtgtgtatgtgtgtttgtgtgtatgtatgtg

SEQ ID NO: 35425 - DNA, 701 bp, Homo sapiens
  misc_feature (1)...(701): n = A,T,C or G
tggagggagaatggggtgaacagatgtaggagaagatggtcctctgcaagtcayggagagatacctgggccatatccttccctcacagccctcacaaggaaccaactgtgccaacaccttgatttcagattttgagtctccagaactatgatatagtaaattttgttgttcaagccactcaaaggtggcactttgttaacaacagggcttagcaaactaatacagattccaaataaaaatctttagccaagagctttctcccaggagacctagattgtaatttctggttttcaattgaactttatctggatatctcatagaaaacttaaacgggggtcctgtagagtcgaacaaacagcattnnnnnnnnnnnnnnnnnnnnnnnnnnnnnnnnnnnnnnnnnnnnnnnnnnnnnnnnnnnnnnnnnnnnnnnnnnnnnnnnnnnnnnnnnnnnnnnnnnnngttcatctgtaccactacatattaataatcttcctgccctcagcctctcccctccaattcatcatccacaaagccaccagagtgacctttaaaaatgcaaatttgatcctttccttggagaaaggactcagtattgttgggggctttggctagatctcctacgccatattgtttcccccaaataaagtccacatagttttaaagagatcccttagagagctagaagaacacgtaaatga

SEQ ID NO: 35426 - DNA, 563 bp, Homo sapiens
gtgtggctcagagcagggtgggaaaatggagggatgagaagagatgagatcctttgaagaaggagycagactgctctcctggtggatatgaggttgggtgagaatgaaagagaagagtcttagtccaagggctgagaggtctggggaggaagactaggatcccagtttaggcacagtgagtttgagacgtctgttagacatcccagcagagatgccaagaaggctgttggagttgagcctggagtcctggaggaaagtctaattgctaccttcaaacccttaaaaggctgtcatgtagaactcttcatcctggctcccccaggactgaaaaaggccagtgatgagtggaagtcaaaccaagaagactgattcaatccgaggacttctggactgcagctgtctggaaattgaatgatgagctttataaagcacaggctatcttacatttatagataacaacttcctgaaagcatggctgagagtcagaaaatgtgctgacacattgtgagggcagttctctctgggcaaacaaagcatcaccaagaaaatccctcaagtcaggc

SEQ ID NO: 35427 - DNA, 563 bp, Homo sapiens
gtgtggctcagagcagggtgggaaaatggagggatgagaagagatgagatcctttgaagaaggagccagactgctctcctggtggatatgaggttgggtgagaatgaaagagaagagtcttagtccaagggctgagaggtcyggggaggaagactaggatcccagtttaggcacagtgagtttgagacgtctgttagacatcccagcagagatgccaagaaggctgttggagttgagcctggagtcctggaggaaagtctaattgctaccttcaaacccttaaaaggctgtcatgtagaactcttcatcctggctcccccaggactgaaaaaggccagtgatgagtggaagtcaaaccaagaagactgattcaatccgaggacttctggactgcagctgtctggaaattgaatgatgagctttataaagcacaggctatcttacatttatagataacaacttcctgaaagcatggctgagagtcagaaaatgtgctgacacattgtgagggcagttctctctgggcaaacaaagcatcaccaagaaaatccctcaagtcaggc

SEQ ID NO: 35428 - DNA, 1251 bp, Homo sapiens
catcacaagccaaggaatgtcaaggatctccgtctatcatcaaaagccaagagaaaagcatggaagagatccttcctcaaaacctctagaaggaaccaaccctggggaccctttgatttcagacttccagcctccacaatagtgagattaaatttctgtagttttaagatgcccagtttgtgagactttgttcaagcatccctgggaatctaatgcaatcaataatcattggggtgattgaaatgacagtttaaaatctacacacacacacagatccagtccagcctcctcatcatatagacaagtaaactgaagccccgcagctccccagcaagttgatgaggtagcacgtggcatcggagagcaagcagatggggtccacaccgtgctctgcagtaggacagttggtacccatgtacttttcacacttttcataggcttgtcttttcttcccaggtgcatcaaggkgatggaaaattaattctctaccccaacaagaatgtctatcaaattctctttcctgatgggacaggccagatacagtatccacagaagcacagggatgctcgtattgacatatattggcacctaaaatgtctacgattttttatggggtaaggggtttgactgaggtgtggggtttgactgaggcctgcatcatctgcagggccctaccttttccaggggaccccaaggactgactacttgtgccttaaccttctcccagttatccatcaggaaacctggctatgctcatcttatatgcgaaaatgaaaaagttcacatacatcattctggaagacagtctagaagggaggatccgggcccttatcaacaactcaggcaatgctaccttctatgatgaaaatagtgatatctggtaagcttgggtcatgagtccctaacactcctgcccatggagaagcagctggaaaaagcgtgactcccagactgtatgaacttcctccctgtctcagagttacacatgttggaaatgggagaatgagcaccatgatggaccagtccatgaggtccctgaccacagaggaggcacgatgttcttcctgcaccgttgctcctccatgtgtgaaatagccgtcaaggctccacaaccaccacattctattggtttcatctcctaaatacttcttaagagtcacctttgtgataatttgcttaggaagacccagtgcctccctgttctgggtgcctcagagaggagggtttggtgacggtttggagacacatgca

SEQ ID NO: 35429 - DNA, 1405 bp, Homo sapiens
  misc_feature (1)...(1405): n = A,T,C or G
attctcacccagtcctctgtgaatccccacagtttgtgatcccagaggtgctgagcgaaatgaagaagaaaaccatcctggaggcagaacccggcccaacagcccagaagatccggktccttctggggaaaatgaataggctcctgaattacgcgaccacccctgatctggaaaacttcatagaggccgtcagtatatcactgatggacaacaagtacctgaagaagatgctctctaaactctggttttaaggcggggcttatctggcatccaccaaatgccttaggaagttggagaccttgggagctccagggaaaaaaaacccaaagacctgttgaccttttatgagagttggtttgtaatttgggacctgtcgtggctccttgatttgaagtaaacatttttggcagaagggctaacagagtctgtggctgagcacagaaaaggcttgacagccctgacccaacagcacggaagcaagttgtcgtttcagtgacatgtcaatgcctgtcctgcctgcttctacggtcactcactcagttcttttgtggctttcagtacgggccttgactcaggacaacgactgtgctcacagccaagctctgtcttttgttggctgtgtgatcttgggcaagtacttttatacctcagtttcctcatctgtaaaatgggcctaaaaatagcaacgatcaccacagagttgggagtattaaattagataatgcacgtacagtccctagaacagggtctggcccataggagccactcagcgtcactccaattactgtcagcttggcccttccttcacgtctgggcagctcctgggaagggtctgtgagacaatcgggtaggctgagtgtctgcacttccttgggctgcgaaggcacagccccttcagcttcctcaggcctttctcttcatgatgctccctattgttactgagactgcgcacgaaccaggcgggccctgttgtgagcactgtgcaagctgtagctcgtgtggctccaggatgtgggcagtattttctcaggacactgggatgcaaagaggttaaaggactcgcccaggatcacacaccattnnnnnnnnnnnnnnnnnnnnnnnnnnnnnnnnnnnnnnnnnnnnnnnnnnnnnnnnnnnnnnnnnnnnnnnnnnnnnnnnnnnnnnnnnnnnnnnnnnnnaatcactttttacgaattcgagctcggtaccctacaaagtgatatcactgtggtgataatatgagtatgtttatgaccctgccaccaccaccactccagggtatctcaaagactcaaggccactccaggtgctactgcccttatcctaccttgttgcatggcccctacccacctccaccccactccagggagctctggaggccagtcccggccagtcagcttct

SEQ ID NO: 35430 - DNA, 1405 bp, Homo sapiens
  misc_feature (1)...(1405): n = A,T,C or G
attctcacccagtcctctgtgaatccccacagtttgtgatcccagaggtgctgagcgaaatgaagaagaaaaccatcctggaggcagaacccggcccaacagcccagaagatccgggtccttctggggaaaatgaataggctcctgaattacgcgaccacccctgatctggaaaacttcatagaggccgtcagtatatcactgatggacaacaagtacctgaagaagatgctctctaaactctggttttaaggcggggcttatctggcatccaccaaatgccttaggaagttggagaccttgggagctccagggaaaaaaaacccaaagacctgttgaccttttatgagagttggtttgtaatttgggacctgtcgtggctccttgatttgaagtaaacatttttggcagaagggctaacagagtctgtggctgagcacagaaaaggcttgacagccctgacccaacagcacggaagcaagttgtcgtttcagtgacatgtcaatgcctgtcctgcctgcttctacggtcactcactcagttcttttgtggctttcagtacgggccttgactcaggacaacgactgtgctcacagccaagctctgtcttttgttggctgtgtgatcttgggcaagtacttttatacctcagtttcctcatctgtaaaatgggcctaaaaatagcaacgatcaccacagagttgggagtattaaattagataatgcacgtacagtccctagaacagggtctggcccataggagccactcagcgtcactccaattactgtcagcttggcccttccttcacgtctgggcagctcctgggaagggtcygtgagacaatcgggtaggctgagtgtctgcacttccttgggctgcgaaggcacagccccttcagcttcctcaggcctttctcttcatgatgctccctattgttactgagactgcgcacgaaccaggcgggccctgttgtgagcactgtgcaagctgtagctcgtgtggctccaggatgtgggcagtattttctcaggacactgggatgcaaagaggttaaaggactcgcccaggatcacacaccattnnnnnnnnnnnnnnnnnnnnnnnnnnnnnnnnnnnnnnnnnnnnnnnnnnnnnnnnnnnnnnnnnnnnnnnnnnnnnnnnnnnnnnnnnnnnnnnnnnnnaatcactttttacgaattcgagctcggtaccctacaaagtgatatcactgtggtgataatatgagtatgtttatgaccctgccaccaccaccactccagggtatctcaaagactcaaggccactccaggtgctactgcccttatcctaccttgttgcatggcccctacccacctccaccccactccagggagctctggaggccagtcccggccagtcagcttct

SEQ ID NO: 35431 - DNA, 1405 bp, Homo sapiens
  misc_feature (1)...(1405): n = A,T,C or G
attctcacccagtcctctgtgaatccccacagtttgtgatcccagaggtgctgagcgaaatgaagaagaaaaccatcctggaggcagaacccggcccaacagcccagaagatccgggtccttctggggaaaatgaataggctcctgaattacgcgaccacccctgatctggaaaacttcatagaggccgtcagtatatcactgatggacaacaagtacctgaagaagatgctctctaaactctggttttaaggcggggcttatctggcatccaccaaatgccttaggaagttggagaccttgggagctccagggaaaaaaaacccaaagacctgttgaccttttatgagagttggtttgtaatttgggacctgtcgtggctccttgatttgaagtaaacatttttggcagaagggctaacagagtctgtggctgagcacagaaaaggcttgacagccctgacccaacagcacggaagcaagttgtcgtttcagtgacatgtcaatgcctgtcctgcctgcttctacggtcactcactcagttcttttgtggctttcagtacgggccttgactcaggacaacgactgtgctcacagccaagctctgtcttttgttggctgtgtgatcttgggcaagtacttttatacctcagtttcctcatctgtaaaatgggcctaaaaatagcaacgatcaccacagagttgggagtattaaattagataatgcacgtacagtccctagaacagggtctggcccataggagccactcagcgtcactccaattactgtcagcttggcccttccttcacgtctgggcagctcctgggaagggtctgtgagacaatcgggtaggctgagtgtctgcacttccttgggctgcgaaggcacagccccttcagcttcctcaggcctttctcttcatgatgctcccwattgttactgagactgcgcacgaaccaggcgggccctgttgtgagcactgtgcaagctgtagctcgtgtggctccaggatgtgggcagtattttctcaggacactgggatgcaaagaggttaaaggactcgcccaggatcacacaccattnnnnnnnnnnnnnnnnnnnnnnnnnnnnnnnnnnnnnnnnnnnnnnnnnnnnnnnnnnnnnnnnnnnnnnnnnnnnnnnnnnnnnnnnnnnnnnnnnnnnaatcactttttacgaattcgagctcggtaccctacaaagtgatatcactgtggtgataatatgagtatgtttatgaccctgccaccaccaccactccagggtatctcaaagactcaaggccactccaggtgctactgcccttatcctaccttgttgcatggcccctacccacctccaccccactccagggagctctggaggccagtcccggccagtcagcttct

SEQ ID NO: 35432 - DNA, 1405 bp, Homo sapiens
  misc_feature (1)...(1405): n = A,T,C or G
attctcacccagtcctctgtgaatccccacagtttgtgatcccagaggtgctgagcgaaatgaagaagaaaaccatcctggaggcagaacccggcccaacagcccagaagatccgggtccttctggggaaaatgaataggctcctgaattacgcgaccacccctgatctggaaaacttcatagaggccgtcagtatatcactgatggacaacaagtacctgaagaagatgctctctaaactctggttttaaggcggggcttatctggcatccaccaaatgccttaggaagttggagaccttgggagctccagggaaaaaaaacccaaagacctgttgaccttttatgagagttggtttgtaatttgggacctgtcgtggctccttgatttgaagtaaacatttttggcagaagggctaacagagtctgtggctgagcacagaaaaggcttgacagccctgacccaacagcacggaagcaagttgtcgtttcagtgacatgtcaatgcctgtcctgcctgcttctacggtcactcactcagttcttttgtggctttcagtacgggccttgactcaggacaacgactgtgctcacagccaagctctgtcttttgttggctgtgtgatcttgggcaagtacttttatacctcagtttcctcatctgtaaaatgggcctaaaaatagcaacgatcaccacagagttgggagtattaaattagataatgcacgtacagtccctagaacagggtctggcccataggagccactcagcgtcactccaattactgtcagcttggcccttccttcacgtctgggcagctcctgggaagggtctgtgagacaatcgggtaggctgagtgtctgcacttccttgggctgcgaaggcacagccccttcagcttcctcaggcctttctcttcatgatgctccctattgttactgagactgcgcacgaaccaggcgggccctgttgtgagcactgtgcaagctgtagctcgtgtggctccaggatgtgggcagtattttctcaggacactgggatgcaaagaggttaaaggactcgcccaggatcacacaccattnnnnnnnnnnnnnnnnnnnnnnnnnnnnnnnnnnnnnnnnnnnnnnnnnnnnnnnnnnnnnnnnnnnnnnnnnnnnnnnnnnnnnnnnnnnnnnnnnnnnaatcactttttacgaattcgagctcggtaccctacaaagtgatatcactgtggtgataatatgagtatgtttatgaccctgccaccaccaccactccagggyatctcaaagactcaaggccactccaggtgctactgcccttatcctaccttgttgcatggcccctacccacctccaccccactccagggagctctggaggccagtcccggccagtcagcttct

SEQ ID NO: 35433 - DNA, 1405 bp, Homo sapiens
  misc_feature (1)...(1405): n = A,T,C or G
attctcacccagtcctctgtgaatccccacagtttgtgatcccagaggtgctgagcgaaatgaagaagaaaaccatcctggaggcagaacccggcccaacagcccagaagatccgggtccttctggggaaaatgaataggctcctgaattacgcgaccacccctgatctggaaaacttcatagaggccgtcagtatatcactgatggacaacaagtacctgaagaagatgctctctaaactctggttttaaggcggggcttatctggcatccaccaaatgccttaggaagttggagaccttgggagctccagggaaaaaaaacccaaagacctgttgaccttttatgagagttggtttgtaatttgggacctgtcgtggctccttgatttgaagtaaacatttttggcagaagggctaacagagtctgtggctgagcacagaaaaggcttgacagccctgacccaacagcacggaagcaagttgtcgtttcagtgacatgtcaatgcctgtcctgcctgcttctacggtcactcactcagttcttttgtggctttcagtacgggccttgactcaggacaacgactgtgctcacagccaagctctgtcttttgttggctgtgtgatcttgggcaagtacttttatacctcagtttcctcatctgtaaaatgggcctaaaaatagcaacgatcaccacagagttgggagtattaaattagataatgcacgtacagtccctagaacagggtctggcccataggagccactcagcgtcactccaattactgtcagcttggcccttccttcacgtctgggcagctcctgggaagggtctgtgagacaatcgggtaggctgagtgtctgcacttccttgggctgcgaaggcacagccccttcagcttcctcaggcctttctcttcatgatgctccctattgttactgagactgcgcacgaaccaggcgggccctgttgtgagcactgtgcaagctgtagctcgtgtggctccaggatgtgggcagtattttctcaggacactgggatgcaaagaggttaaaggactcgcccaggatcacacaccattnnnnnnnnnnnnnnnnnnnnnnnnnnnnnnnnnnnnnnnnnnnnnnnnnnnnnnnnnnnnnnnnnnnnnnnnnnnnnnnnnnnnnnnnnnnnnnnnnnnnaatcactttttacgaattcgagctcggtaccctacaaagtgatatcactgtggtgataatatgagtatgtttatgaccctgccaccaccaccactccagggtatctcaaagactcaaggccactccaggtgctactgcccttatcctaccttgttgcatggcccctacccacctccaccccactccagggagctctggaggscagtcccggccagtcagcttct

SEQ ID NO: 35434 - DNA, 1838 bp, Homo sapiens
tgccttaatttagactttgtgctaaagcaaaatcttcacctcaaatttgtcaaactgtactacaaaataamatttctgcagcaagcactttacagatacacatatgatcttgttttctctcctgataaccttaacttcagtcagaaggtggcagacgcagttgcaggatctagggctcagctgccttgacacaaagttcttgctttctactataaccactaccatcccaagtcctacttaagagtttgtttcaagcaacatttagtacaatggaattctagaacgataaaaaagtatcaacactttttgaatttggtagaaaataatctaagccaaatgttttcatatgagcctctactcctaagccttagaatagcattacattccctcaggccaaatacttagaggttatttttccaggggcaggagatgaggcaacagagcatatacactcttctagtacttattttattttttctcaggaaagatcaataattataccaaaatcaggtattaaacagaaaccagacaggtgaagatgttgtagaaatgcttatctcatgaatactcaacccatttctcaacctgtcaaataaagatgcttctcttactccaggttccagggatgtagtaagaattaatgcatacaaagtgtctcaacaaggagcacagaggaagaagctacataaacaacaaggccaatttacagtagatgaaagggatccaaatcagaccccaactctttaagctcaaaaacaagtctctgacaatctaaaaatattctctacacggtaatacatctatattgttaaaaatcagtccaaacttagaaacaagctgaggacattttgttgatgagccttacacccaaatgataaataccgagacctacaaacacacatccaaatgagatgaaagactttcccatctgtacctatgggtgttgattttcctgcaaccgtttatcaagggacaagcattataaaatgctaactaaggccaggcacagtggctcctgcctgttatctcagcactttgggtggccgaggagagcagatcccttgaggccaagagtttgagaccagcctggtcaacatggtgaaaccccgtctctacaaaaaatacataaatattagccaggcacggtggcacacacctgtaatctcagctactcaggaggcagaggcaaaagaattgcttggacccgggaggcagaggttgcagtgagccgagatcgtgccactgcactccagcccaggtaacagagcaagactgtctcaaaaaaaaaaaaaaaaaaaagctaactaaataaaagaggcatgagattctgcacttgcaggtaattaatgctgaggtttacctttaaagaaaatcattttaaagttttctataaaatcttcctgtttctctgctattcagaatgctagtaacagtcactaggtaaaaagtgaaaaatctttggtccacaaattttaagatgcagtgtctgaaatggttgcgtgtgtgtgtgtgtgtgtgtgtgtgcacgtatgtatctttgtctctgactcactctatgccacaggatgaaagggaactgaatctggaatatgacaccataaaagggaagctcagtcctccaggctgcagtgtccactcagtagaaactcagtgagcagcagtgagggcccagggttgacagaggaaaagggaggcaactacaagtggtctgagcaagggcagcagagactgatcacgtaggatgagactggcttctaatggggatgagaggcatgcctttcccttcccaatcccattacgaagggaatataaaaacaggtccatgaacatttgttcag

SEQ ID NO: 35435 - DNA, 1838 bp, Homo sapiens
tgccttaatttagactttgtgctaaagcaaaatcttcacctcaaatttgtcaaactgtactacaaaataacatttctgcagcaagcactttacagatacacatatgatcttgttttctctcctgataaccttaacttcagtcagaaggtggcagacgcagttgcaggatctagggctcagctgccttgacacaaagttcttgctttctactataaccactaccatcccaagtcctacttaagagtttgtttcaagcaacatttagtacaatggaattctagaacgataaaaaagtatcaacactttttgaatttggtagaaaataatctaagccaaatgttttcatatgagcctctactcctaagccttagaatagcattacattccctcaggccaaatacttagaggttatttttccaggggcaggagatgaggcaacagagcatatacactcttctagtacttattttattttttctcaggaaagatcaataattataccaaaatcaggtattaaacagaaaccagacaggtgaagatgttgtagaaatgcttatctcatgaatactcaacccatttctcaacctgtcaaataaagatgcttctcttactccaggttccagggatgtagtaagaattaatgcatacaaagtgtctcaacaaggagcacagaggaagaagctacataaacaacaaggccaatttacagtagatgaaagggatccaaatcagaccccaactctttaagctcaaaaacaagtctctgacaatctaaaaatattctctacacggtaatacatctatattgttaaaaatcagtccaaacttagaaacaagctgaggacattttgttgatgagccttacacccaaatgataaataccgagacctacaaacacacatccaaatgagatgaaagactttcccayctgtacctatgggtgttgattttcctgcaaccgtttatcaagggacaagcattataaaatgctaactaaggccaggcacagtggctcctgcctgttatctcagcactttgggtggccgaggagagcagatcccttgaggccaagagtttgagaccagcctggtcaacatggtgaaaccccgtctctacaaaaaatacataaatattagccaggcacggtggcacacacctgtaatctcagctactcaggaggcagaggcaaaagaattgcttggacccgggaggcagaggttgcagtgagccgagatcgtgccactgcactccagcccaggtaacagagcaagactgtctcaaaaaaaaaaaaaaaaaaaagctaactaaataaaagaggcatgagattctgcacttgcaggtaattaatgctgaggtttacctttaaagaaaatcattttaaagttttctataaaatcttcctgtttctctgctattcagaatgctagtaacagtcactaggtaaaaagtgaaaaatctttggtccacaaattttaagatgcagtgtctgaaatggttgcgtgtgtgtgtgtgtgtgtgtgtgtgcacgtatgtatctttgtctctgactcactctatgccacaggatgaaagggaactgaatctggaatatgacaccataaaagggaagctcagtcctccaggctgcagtgtccactcagtagaaactcagtgagcagcagtgagggcccagggttgacagaggaaaagggaggcaactacaagtggtctgagcaagggcagcagagactgatcacgtaggatgagactggcttctaatggggatgagaggcatgcctttcccttcccaatcccattacgaagggaatataaaaacaggtccatgaacatttgttcag

SEQ ID NO: 35436 - DNA, 1838 bp, Homo sapiens
tgccttaatttagactttgtgctaaagcaaaatcttcacctcaaatttgtcaaactgtactacaaaataacatttctgcagcaagcactttacagatacacatatgatcttgttttctctcctgataaccttaacttcagtcagaaggtggcagacgcagttgcaggatctagggctcagctgccttgacacaaagttcttgctttctactataaccactaccatcccaagtcctacttaagagtttgtttcaagcaacatttagtacaatggaattctagaacgataaaaaagtatcaacactttttgaatttggtagaaaataatctaagccaaatgttttcatatgagcctctactcctaagccttagaatagcattacattccctcaggccaaatacttagaggttatttttccaggggcaggagatgaggcaacagagcatatacactcttctagtacttattttattttttctcaggaaagatcaataattataccaaaatcaggtattaaacagaaaccagacaggtgaagatgttgtagaaatgcttatctcatgaatactcaacccatttctcaacctgtcaaataaagatgcttctcttactccaggttccagggatgtagtaagaattaatgcatacaaagtgtctcaacaaggagcacagaggaagaagctacataaacaacaaggccaatttacagtagatgaaagggatccaaatcagaccccaactctttaagctcaaaaacaagtctctgacaatctaaaaatattctctacacggtaatacatctatattgttaaaaatcagtccaaacttagaaacaagctgaggacattttgttgatgagccttacacccaaatgataaataccgagacctacaaacacacatccaaatgagatgaaagactttcccatctgtacctatgggtgttgattttcctgcaaccgtttatcaagggacaagcattataaaatgctaactaaggccaggcacagtggctcctgcctgtwatctcagcactttgggtggccgaggagagcagatcccttgaggccaagagtttgagaccagcctggtcaacatggtgaaaccccgtctctacaaaaaatacataaatattagccaggcacggtggcacacacctgtaatctcagctactcaggaggcagaggcaaaagaattgcttggacccgggaggcagaggttgcagtgagccgagatcgtgccactgcactccagcccaggtaacagagcaagactgtctcaaaaaaaaaaaaaaaaaaaagctaactaaataaaagaggcatgagattctgcacttgcaggtaattaatgctgaggtttacctttaaagaaaatcattttaaagttttctataaaatcttcctgtttctctgctattcagaatgctagtaacagtcactaggtaaaaagtgaaaaatctttggtccacaaattttaagatgcagtgtctgaaatggttgcgtgtgtgtgtgtgtgtgtgtgtgtgcacgtatgtatctttgtctctgactcactctatgccacaggatgaaagggaactgaatctggaatatgacaccataaaagggaagctcagtcctccaggctgcagtgtccactcagtagaaactcagtgagcagcagtgagggcccagggttgacagaggaaaagggaggcaactacaagtggtctgagcaagggcagcagagactgatcacgtaggatgagactggcttctaatggggatgagaggcatgcctttcccttcccaatcccattacgaagggaatataaaaacaggtccatgaacatttgttcag

SEQ ID NO: 35437 - DNA, 1838 bp, Homo sapiens
tgccttaatttagactttgtgctaaagcaaaatcttcacctcaaatttgtcaaactgtactacaaaataacatttctgcagcaagcactttacagatacacatatgatcttgttttctctcctgataaccttaacttcagtcagaaggtggcagacgcagttgcaggatctagggctcagctgccttgacacaaagttcttgctttctactataaccactaccatcccaagtcctacttaagagtttgtttcaagcaacatttagtacaatggaattctagaacgataaaaaagtatcaacactttttgaatttggtagaaaataatctaagccaaatgttttcatatgagcctctactcctaagccttagaatagcattacattccctcaggccaaatacttagaggttatttttccaggggcaggagatgaggcaacagagcatatacactcttctagtacttattttattttttctcaggaaagatcaataattataccaaaatcaggtattaaacagaaaccagacaggtgaagatgttgtagaaatgcttatctcatgaatactcaacccatttctcaacctgtcaaataaagatgcttctcttactccaggttccagggatgtagtaagaattaatgcatacaaagtgtctcaacaaggagcacagaggaagaagctacataaacaacaaggccaatttacagtagatgaaagggatccaaatcagaccccaactctttaagctcaaaaacaagtctctgacaatctaaaaatattctctacacggtaatacatctatattgttaaaaatcagtccaaacttagaaacaagctgaggacattttgttgatgagccttacacccaaatgataaataccgagacctacaaacacacatccaaatgagatgaaagactttcccatctgtacctatgggtgttgattttcctgcaaccgtttatcaagggacaagcattataaaatgctaactaaggccaggcacagtggctcctgcctgttatctcagcactttgggtggccgaggagagcagatcccttgaggccaagagtttgagaccagcctggtcaacatggtgaaaccccgtctctacaaaaaatacataaatattagccaggcacggtggcacacacctgtaatctcagctactcaggaggcagaggcaaaagaattgcttggacccgggaggcagaggttgcagtgagccgagatcgtgccactgcactccagcccrggtaacagagcaagactgtctcaaaaaaaaaaaaaaaaaaaagctaactaaataaaagaggcatgagattctgcacttgcaggtaattaatgctgaggtttacctttaaagaaaatcattttaaagttttctataaaatcttcctgtttctctgctattcagaatgctagtaacagtcactaggtaaaaagtgaaaaatctttggtccacaaattttaagatgcagtgtctgaaatggttgcgtgtgtgtgtgtgtgtgtgtgtgtgcacgtatgtatctttgtctctgactcactctatgccacaggatgaaagggaactgaatctggaatatgacaccataaaagggaagctcagtcctccaggctgcagtgtccactcagtagaaactcagtgagcagcagtgagggcccagggttgacagaggaaaagggaggcaactacaagtggtctgagcaagggcagcagagactgatcacgtaggatgagactggcttctaatggggatgagaggcatgcctttcccttcccaatcccattacgaagggaatataaaaacaggtccatgaacatttgttcag

SEQ ID NO: 35438 - DNA, 616 bp, Homo sapiens
agagatacacacatctctaccagattctttgtttagaggatgtgaagaacttggatttgtatgggatgtgattgccaaacccattttagggttctgatgcacaaaaagaataatagaaaaaagtgagaattagaaagatttgaacctacatatttctttaaaaactgggaagaaatatgccaaaatattagcatagatgcttttgatgagacttggtgattttttttttttctgtattgaatgaactcttcactatggaaacctgtaaccatatacaaaaatgaagaaaatacacagcgaaccctcctatatcatctcccaacttcaactaccaatttatggtcagtctcatttgaatacagcatcatctcaatttccaccccaatctctgttactctcacgtaatcctsgacataccagaaaaccaagttatatgaacctcaaacaaaacagtcaagggactcatttcaaggttggaaattaaatcctgtttttttgttttgtttatttcattttcatagaccaccattgttagcttctttcctttttagtccctctgcttccctcttcaaataatttgtcaggccttttaaaattcctcttacagatgttttca

SEQ ID NO: 35439 - DNA, 564 bp, Homo sapiens
ggagtatcttcctcatttgacctattcctcgccttttctttcccatcttttgctggggaaaattggatcctatttcacacataaattgcagcagaacttatatttcttgggtggaggggaggtgagtgaatgacgggtgatattgaagacaacagaattaggcgttggaagatacactgaccctacaaatggcagtttctgtattttgaagaaatgacaaaagcagtaggatcacggtggccgagatagctcagctgtttaagcgttagactgaagaactaaacggccctggtttcatcccgggtttcggcagttgcattttggtttttttttatttgtcactccttcacttatctcttgcgcaccaatcccagaggtctatatataactccaggggtttgtggtttttttggtccttttttcttttctcttttttttggcgggtttctgaaaattccatattggtaatgtatccacactcgcgcacgcgcacacacacacacacacacacacayattctatatatatatgtatttacacacaaacacatatatatatatatat

SEQ ID NO: 35440 - DNA, 885 bp, Homo sapiens
aaacccaatataatgttgtatattaaataaaaaccagtttttattctcaactagaattgtacattgagaattgccttttataaagcaaaagctcaaagagatgtgaatgttcactttaagaaacatttatgtgctaaatgtttcacttgaaacacccttttaactttttggccttatttttcaaaacctcaaaactattcatcttatatgtgaccacagagagagtggcaatgaaatcacaccattaaaaccaagaaccagtaatgaattctaaagtgcttaatttgtcaaataaaagtagccatttatctataaaaacataactaaacaaagatgcattaacttagttgtgaagaagtttcttggaggcaggaaagtgattgtaatactaaatcagcatttaaatataaacgatttaaggaagtgttccagtaaacaacgaaatacaagtccatccttaagaaaattgtacaatttcaaaaacaccaatataatgctttgtacttggyccagaattattacccatggtaatattttttcaataccaggttgttgagaaagaaaagaaaaaacagtaaaaataaactggtgttcatcctgtattttcaccatttaaaaatcaatgtttccccagcaatttatctaatctctgaaagtttaattccaatttttttttgagacaagatctcattctgtggcccatgctggaaggcagtggcataatcacagctcactatgaccttgacctcctgggctcaagcaatcctctcacctcagcctcccaactagctgggactacaaactcatgtcaccactccgggttaatttacttttatttttttgtagaaaggaggtcttgctatgttgcgcagactggtcttgatc

SEQ ID NO: 35441 - DNA, 594 bp, Homo sapiens
aatgaaatgaacaaattttaacgaaaattgcttgtaaatgtttaactaagtttattatatagtgcttccattagtgttgcttttcaaaayagagaattatgtgatttcaccattttaataataaaatgtatgctgattgtacattaatttaaagtgaattcagttagataaaaacattgctatttttgaatagtctaatactcttacatctcatttttctggcaaattcgtcaagaaagagcccagtatattttttcattaaggaagattatattggaaatcaattttcttaaagccccatgatctattattaaatatatttgaaaatgtctgtaaagaataaaagaaatacattttaatgtgatgactgcatgcatcatcagttttttatttgttttcttcctgctctaggtaactcttgatgtaactataattttaaagcaaattgttactaaaatgttagctttttaataattgcattttcaaaattgtgtttcaaatgttcatcactgtagtcattctcacctgtgcccttcaatggaagagtaacaaatgctatgtgtactggtttttatacttgtctgaaatttaaaa

SEQ ID NO: 35442 - DNA, 594 bp, Homo sapiens
aatgaaatgaacaaattttaacgaaaattgcttgtaaatgtttaactaagtttattatatagtgcttccattagtgttgcttttcaaaatagagaattatgtgatttcaccattttaataataaaatgtatgctgattgtacattaatttaaagtgaattcagttagataaaaacattgctatttttgaatagtctaatactcttacatctcatttttctggcaaattcktcaagaaagagcccagtatattttttcattaaggaagattatattggaaatcaattttcttaaagccccatgatctattattaaatatatttgaaaatgtctgtaaagaataaaagaaatacattttaatgtgatgactgcatgcatcatcagttttttatttgttttcttcctgctctaggtaactcttgatgtaactataattttaaagcaaattgttactaaaatgttagctttttaataattgcattttcaaaattgtgtttcaaatgttcatcactgtagtcattctcacctgtgcccttcaatggaagagtaacaaatgctatgtgtactggtttttatacttgtctgaaatttaaaa

SEQ ID NO: 35443 - DNA, 594 bp, Homo sapiens
aatgaaatgaacaaattttaacgaaaattgcttgtaaatgtttaactaagtttattatatagtgcttccattagtgttgcttttcaaaatagagaattatgtgatttcaccattttaataataaaatgtatgctgattgtacattaatttaaagtgaattcagttagataaaaacattgctatttttgaatagtctaatactcttacatctcatttttctggcaaattcgtcaagaaagagcccagtatattttttcattaaggaagattatattggaaatcaattttcttaaagccccatgatctattattaaatatatttgaaaatgtctgtaaagaataaaagaaatacattttaatgtgatgactgcatgcatcatcagttttttatttgttttcttcctgctctaggtaactcttgatgtaactataattttaaagcaaattgttactaaaatgttagctttttaataattgcattttcaaaattgtgtttcaaatgttcatcactgtagtcattctcacctgtgcccttcaatggaagagtaacaaatgctatgtgtactggtttttatacwtgtctgaaatttaaaa

SEQ ID NO: 35444 - DNA, 357 bp, Homo sapiens
tgcattcacttctttcttctttattacttatttgattctttagttgatgtgggagagaggatgtagacgatattgaaaaaatacctgcagcattagttaaaacaaygctcttacaaatatcttgatgataaagattactgtttcactctatcaacttgtagttgtcatcacttcaatcaaattgcatcagtataacatcccatttggcagtcctaaaaacaagtacagggtaaatgtcttttggaagtatgaggaggagatggattaaggaaatggctttagggctttgcttacatgagaaaagaatatctttccagctgttgggttctgatctacataaaataaaagctagtgatg

SEQ ID NO: 35445 - DNA, 574 bp, Homo sapiens
ctgttctaaaaaaaaaaaaaaaaaaaaatgccaaccattttgattacaatttctttytttttttttttttttagcatagaccaattacatattcaaacgtacctaagtcacattatgaaaagacaagtgctgctgttgaaatgatttcatctgggttaacaaacggcatttttatagaaatttgtgctatatagggtcaaaacaaaaaaataaactctgcaacaacttacttttaacagtagtagacaaaaaatctggaaaattaaactataataatgaaacttctttttaggctaacattttgaatttaaaatcattgtcattatttatagtataataagttaaggaaaccagtggacagtacttatagtgagtgctacaaagcaggcaatccaccttgacttaccttactagaacctattcggggcatggaaatgtgctaattgttctgtttccccacttgactctttctcagtagcctataccaaagtatgcctttgcttggcaaactagcaataaagaaaacagaaagtatgcattactgatgaggttgcttctgaattaaaaatcaagg

SEQ ID NO: 35446 - DNA, 517 bp, Homo sapiens
atgcccaatatgactatatttggagatagggtctttaggaggtaattaagttaaatgaggtcagaggggtgaggtcctgatctgataggattagcggctttataataagaggaagagagaaagatcgttctcgytccatatgcacacaccaaggacaggccatgtgaggccacagcaagaaggagccacctgaaagccaggaagagggccctcaatggaacctgacagtgctggcaccttgatctcagacttccagcctccaggactctgagaaaatgcatttccattgttaagccatccagtctgtagtattttgttatggcagaacaagccgactaagacaccatcccagagggcccaggaaaagagtcctaatatggagaaattccccccaagatcagtttcctcgctgatcagctttggtgtcctgagtagagatcccagccctgctctttcctagctcagtgtttctgggcagcactcttcacatccattaatctcagctgtctcgtgtata

SEQ ID NO: 35447 - DNA, 522 bp, Homo sapiens
atgaccctagcctaccttcaaagattgacctgttaacctccccactggggaccccacatccaggcaagaggactgctcaccatccctgaacacaycctgtgtttctctgcctctgtgcctttgctgccagcccactcaccaagacacctttctagctcccctccaaatctcccccatccaactctgggctctcctcctctgaggagcctggtcccacctcctccaagcatgcaagagtaggactgttctgaggccccagagtcacaacagttctcagatcttgaggaccctgttaaacacgcaggtttgagggtcccatccccaatatattctgagtcagcgggtctgagctgggggctgggaacctgcatggtatacatgcttccagctaatgctgatgcaggcagtagaaaaacctcactctgagaaacactggccccaaagaaccacaagtttcctccaaagtgtctaaaaccccgaagaaagcgtaagggggaggaggctgggaattccagactagca

SEQ ID NO: 35448 - DNA, 582 bp, Homo sapiens
cccacgcctgcctactgaggagagagctgtatggagactctcaggatgggcttccaagggtcatgtgctgctgggtgggttctccaggccccctggagataggggcctaggtcaggtcccctatccagggtgtgcctcagcttggaggtgctgagcatgagtgatccccagccgaggaccacactgccatctgggccttctgcttcccaggctaaaccaatatttaccctcagctgtggctgctaggggccaagaggcaaatattagtttaaggagcctgagccagctgttgggctgggggaaacagctgaggctgccgatcatgatttcttcctctttgatgattttcatttctttttgattaagaaaaaaatcttgcttttccttctgcttcagaggsttttctggtgcttcctttctgcttaccccaaattctgccagctatatcagtgccccacaccaaaccctcccctccattaggaagctttcccagacctccctcattcaaaatgacccttcctcctcctgaccatcggaagcacttggagacctaagtggtataagcagctttgagtcatgtat

SEQ ID NO: 35449 - DNA, 761 bp, Homo sapiens
gtcctcagatcccaccccaaatgtagaccctaagaggctgtgtccccacagctcctgcagcattagaaacccctgccccaaccccaatggctgagtctgaggctctcctggattctgcctccattcctagaaaggatgcccaccagatcccaaacgggcctgaggtttgggctggacgcagagtcctgggtctgattctctcttcaagctaagaggatgaagcaaaggactgccttccctcttcattaggcctcaaaaactccctctgtttggaaaaccaccacagggatttcgcccaggtatgtagtgagttcttttcttactgtgtttctgctcaaactggttccctcatataagtgtatggactcttgtgaaggttacccttagcagtttcagggaagaagactataaaatataaatgagtagatctatttcacagatggccgcagctatggcagaaagcctgaggacccatgggcccctggtggcagccacccamaatgctgccggcctgcctaggaggagctaccccacaggttgagaaacttcccagcccagaacgtgcgaagacactgtgctccctggggcaaagctgagacctgaaggagatggtcttaagggccctctcagccacggcacgggccttctcgatctccgtggcctgcaggtggaaagccatgtactgcagccacagaatggagctgttgggggagctcagcaccagtcggtcaaaatcatccgcggactctggctgccgccca

SEQ ID NO: 35450 - DNA, 717 bp, Homo sapiens
cctgaaaagcctgaaatatttaatatatgtaaaaacatttgccaatcattcagttcatggcatctgataaagactaagatactggttgagattgttgccgctggagtcaaacttccagggttcctagtcctccctctttcacttactagttgagaagtgcttaactatgctagtctcagtttactcatcttttaaagtgaatcaaaatagaacagttatgggacttttttttttttttttttttttttttttttttttttttttttttgagacggggtctcgctctgtcgcccaggctggagtgcatggcgcatcttggctcacagcaagctccgcctyccgggttcacgccgttcttctgccttagccttctgagtagctgggactacaggcgcctgccaccgcgcccgggtatatttttgtgtttttagtagagacggggtttcaccacgttagccaggatggcctcaatctcctgacctcgtgatccgcccgcctcggcctcccaaagtgctgggattacaggcatgagccaccgcacccggcccagttattggactattttaagaattaactgggtcaatacacatgaagcaccaaatatatattagtaataatttattttgattttgagattttgcaaccctcttatggccttttttaggctatggatatatttttctcaactatcttgaaatctgctttttttatatgagg

SEQ ID NO: 35451 - DNA, 717 bp, Homo sapiens
cctgaaaagcctgaaatatttaatatatgtaaaaacatttgccaatcattcagttcatggcatctgataaagactaagatactggttgagattgttgccgctggagtcaaacttccagggttcctagtcctccctctttcacttactagttgagaagtgcttaactatgctagtctcagtttactcatcttttaaagtgaatcaaaatagaacagttatgggacttttttttttttttttttttttttttttttttttttttttttttgagacggggtctcgctctgtcgcccaggctggagtgcatggcgcatcttggctcacagcaagctccgccttccgggttcacgccgttctyctgccttagccttctgagtagctgggactacaggcgcctgccaccgcgcccgggtatatttttgtgtttttagtagagacggggtttcaccacgttagccaggatggcctcaatctcctgacctcgtgatccgcccgcctcggcctcccaaagtgctgggattacaggcatgagccaccgcacccggcccagttattggactattttaagaattaactgggtcaatacacatgaagcaccaaatatatattagtaataatttattttgattttgagattttgcaaccctcttatggccttttttaggctatggatatatttttctcaactatcttgaaatctgctttttttatatgagg

SEQ ID NO: 35452 - DNA, 706 bp, Homo sapiens
taccagcatcccctaggaatttgttacaaatgtaaattctcagattcaatcctggacccaatgagtcagaaattctgcggattgggccctgggcaaggcaatctgtgttttgacgagtcctacaagtgattctgatacatgctccagtttgagaaccattttctggatgatcttcctctatacatggagactaaaggactgaaggactaaactgggttgattccatgtgctcactctctgcatgtctatcccttcttttctgtcttccatgctcttaatcacttttgcctaaaaaattataattatcttttatgcagataaactgtttcctaaaccagccagatgtgtacactgtattctaatccttcttatctgtctctacttgaggacttgtttcttgcaatgatcccccattctcctgcattacttggatttttttctctttaccgaatcattctcatcagaaaaaaaaattgctataatatcttccattaaaaatataccccaagcctgggcaatatagggagaccctgtctctacaaaaagtttaaaaataagctgggcatggtggtgygtgcttgtagtcccagctacttgggaggctgaagtaggaggattgcttgaacccgagaggttgaggctgtaataagccgtgattacaccactgcaccccagcctggacaacagagcgtagaccctgtctcaa

SEQ ID NO: 35453 - DNA, 1204 bp, Homo sapiens
tgatttgcatttctttaattgctggtgaggttaaacatctaaagatgtttcctgtttgttttgtttcattttgtgaatttcctattcatgtcttttcttggtttaccattgtgatggtcatcattttcatcttaatttgtaagatatatttttatataggaggtgtatatttgtgtaacaggaaaaaaatctgatatttcaaatattaaatcagctaatcctctgtgaggcatatattttaataatccccaatttacaaatgagaaaattgagggagagaagttaagtaatttccttgaggtctcttagctagcaagtggtagagctgagatttgagtctgggtccctaacccctaaattacgctgcctctcctgccttacaaacttttctcaatttctcatatgcctttaatgatctagatttaaatctagaaacctggatttactccttttttgtcagtttcacacatctcaccacagtacccagaaatattgtgtggaagcaactagattactttttaattactcaatatttagtaaaacagattttccttgagtagtagcagaaggtttctggttagagaagtatccagatagctttccaaatttctcggctcaagggttccctcttttgttgatacagaggacttgatataagactagtctgtgtagccatttttctaagagcctaccctggttctggaggacttctgcttctagcacagtgtcccccagatttcttcacagcccttccatccaagatgatgcactcactttttaaattaatagactatttttagagcagttttaggtttacagaaaaattgagtggaaagtgcacagagttcctgtttactctgctcacagtttccccaattattaacatcttgctttagtgttgtatatttgtwacaactgatgaaccaatcttacattattattaactaaagcccatagtttacattagggttcactcttggtgttgtacattctatgtctcatgtatcatacagaataattttgccaacctaaaaatccctcttcacctattcacccttcttattccacccatcctgaaccacacacacactaccccaccaaacacctgggaaccactgacctttttattgtctgtatagttttaccttttccagaatgtcatatgattagaatcataccttatgtagcctttctagaccaggtt

SEQ ID NO: 35454 - DNA, 565 bp, Homo sapiens
agctaattgttcccatactgagcacagatcttaactaaatgaccttaactaagtgacatttaaatttctgctctctgatatgaaagttaccatgctcatatttgggtagtagggtttaatttaatttgcctaagattgcagctgatttctgagatcccaaaaacaaatttgatgcacatatcacaagatattatgtaaatgctgagaagacarggactttccaggcagaagagggatgatgcacatcagctgtacagcatccagcaagttgcatccctgccgctggcgtcaggggactcaaagccaaagtgagaacagtaattcctgtttctagccacctactgcctaggatgggggtgagagtcaaatatgaaacagttgcattcacatcctaccaagagcttgaccaaatctgggtttaactttcaaatctgggtttaactttcaaatctgggtttaactttccaaatctgggttttcatcctcatgaaataaagataacagtatgtgccttacagagttgttataggaattaggtagtgtagataaagcaccatcacagtgg

SEQ ID NO: 35455 - DNA, 1132 bp, Homo sapiens
cgaggtatggcagaggtgcaagacctagtcccctttcctctaactcactgcctaggaggctggccaaggtgtccagggtcctctagcccactccctgcctacacacacagcctatatcaaacatgcacacgggcgagctttctctccgacttcccctgggcaagagatgggacaagcagtcccttaatattgaggctgcagcaggtgctgggctggactggccatttttctgggggtaggatgaagagaaggcacacagagattctggatctcctgctgccttttctggagtttgtaaaattgttcctgaatacaagcctatgcgtgatcttgtgtgtcaggcctgtgttttctgagaaagccctcccattatccggggcagaattcaggggcrgagttctctgtgaacctcacaaggtgaaatcacatggtcttaaagaaagccagaagacaggccttcaagtgatccaagaaacccaattcatattaataataattaacttttttatttatttatttttttgagatggagttttgctcttgttgcccaggctggagctggagtacaatagcacgatctcgactcactgcagcctcccgggttcaagtgattctcctgcctcaagactcctgagtagctgggattataggcgcatgccaccatgctcggctttttttttttttttaaatatatttttagtagagatggggtttagccatgatggtcaggctggtctcgaactcctgacctcaagtgatccgcccgccgcctcggcctcccaaagtgctgggattacaggcgtgagctactgcgcccagccaataattaacattgcttgagcgcctgctatgtgctaggcactagcactttatacagaccagtgcttcccagcgtttttgaccagagaagagcagggagaatgaaggctgcctcccagggactggggagcatagcctgaaatcaactaacccaagggtgaaattgttcgaagtctcatgttttattgtttacaaacaaaacaaaacaaaaaacaaaaacaaaaaaaaacacccaacaccaaatacatatattttacattttcctccatggtctacctgtgtttgtttaaaaagtaaaactgtatttccatta

SEQ ID NO: 35456 - DNA, 402 bp, Homo sapiens
gatcgtcaacgttagcagcctggcaatattaaagtcaatgcagaactcataaaggtgggagctcacgatggggaggagaagactgggatcagtctgtgcctttaaaagacactgcctttcattataagctcttttatgctctccactttttaaactacatatatggataaccaatttttaaattgtargttaaatatgccaatttcagtctagaaagtagtcaagataaatacagtatcgcttatattcaaattgctgcttgttggcatttggggcagaacttattccctcatactggctttctaaattattttaaaacatctatgttatcatctctttcagtcatatgaacattttctgccatcttcatttacacatctgcagcacccagtattaaacagc

SEQ ID NO: 35457 - DNA, 1219 bp, Homo sapiens
gttactgatggcaagaatgacctatcaacaaagacagaggataaagagtctcatcattacccatatactaacaacagtcattcggggttattacaaccccatttttcactcagggcaatgccattttatttgtcaaattgctttaataaatattactttctatcactaccagagaacagaagtgtcctgggatactttaagttacaaagtcctatagggactttacttccagtatcttcctgtatctcttttcttaaattttctcttttcaggttgatcagcaggaattgctctaaatgtccaagtccagattcacaaaggaagaatggagaattttttttctcctcaaatatctcttcaaaacatttgcagagattctaaaaagaggggaaatcttcttgtctattctagtctgaagaacaatctacaggtaaaaaaatctcccctggaccatgcagattgggaaggatgtaattagcataatgaataggttcaaaagactcttgctgaatcattcaaattagccaaatcaactctgaccactaaaccagatgatagttgaagcttctaatgtggtcagcatttggaactgccaagggttcaagtccaagagccccattttaataaatactctagcaaatacatttatgttttattcatcaaacaccaattgagatgtaaatatttatgtcaaccaygaccataggttgtaggaacaacgatgaacaagacaccgacaccaagtaattgccaagtcagttcccattcctgatggggcacagagatcaataaaggagagcaaggggctttggggtgtttcatgttaggggatgttgtcattttacacatggtggtcagagatgtcttctgggataaaatgacatttcagtaaagacccaaaggacgggagaaagttagccatgtgaatgatgaattcagagcagacatctaccttgcctccttacttgtctttaaaagcaaagtttctgtcacttatgtttatcttattttgatatggaaaatagaggataagcaaaaatattatttttcttctactgcatcaatttttaactttcagaagctaattgcctatttgcatcttctcacttctgccaagtcacttcacgattcatcacacacagaaaaagtcaccaacaatcttggtccttgagacgacatgccgtcaggatcaactcagcgactgcgtactgcactccag

SEQ ID NO: 35458 - DNA, 1219 bp, Homo sapiens
gttactgatggcaagaatgacctatcaacaaagacagaggataaagagtctcatcattacccatatactaacaacagtcattcggggttattacaaccccatttttcactcagggcaatgccattttatttgtcaaattgctttaataaatattactttctatcactaccagagaacagaagtgtcctgggatactttaagttacaaagtcctatagggactttacttccagtatcttcctgtatctcttttcttaaattttctcttttcaggttgatcagcaggaattgctctaaatgtccaagtccagattcacaaaggaagaatggagaattttttttctcctcaaatatctcttcaaaacatttgcagagattctaaaaagaggggaaatcttcttgtctattctagtctgaagaacaatctacaggtaaaaaaatctcccctggaccatgcagattgggaaggatgtaattagcataatgaataggttcaaaagactcttgctgaatcattcaaattagccaaatcaactctgaccactaaaccagatgatagttgaagcttctaatgtggtcagcatttggaactgccaagggttcaagtccaagagccccattttaataaatactctagcaaatacatttatgttttattcatcaaacaccaattgagatgtaaatatttatgtcaaccacgaccataggttgtaggaacaacgatgaacaagacaccgacaccaagtaattgccaagtcagttcccattcctgatggggcacagagatcaataaaggagagcaaggggctttggggtgtttcatgttaggggatgttgtcattttacacatggtggtcagagatgtcttctgggataaaatgacatttcagtaaagacccaaaggacgggagaaagttagccatgtgaatgatgaattcagagcagacatctaccttgcctccttacttgtctttaaaagcaaagtttctgtcacttatgtttatcttattttgatatggaaaatagaggataagcaaaaatattatttttcttctactgcatcaatttttaactttcagaagctaattgcctatttgcatcttctcacttctgccaagtcacttcacgattcatcacacacagaaaaagtcaccaacaatcttggtccttgagasgacatgccgtcaggatcaactcagcgactgcgtactgcactccag

SEQ ID NO: 35459 - DNA, 566 bp, Homo sapiens
cataggcaatagacacagggcttgtaatgtatagacaagcacttaccttgtagaataatggtaattttgatgaaggataaacagcaattacttttaatttattggtatctattggtcttccaatccagtgaatagtctttcagagttcaaatttgggctgcattatccatcccaaggttaaattttccactgaatagcagtgaccccaaatcaagctacttttcacatgacatagtcacgcactcggctgaacactcctgcagcacttttcacatgcctctgttaagcagttgaggccacagctctgattgagatgcctcagagaaaggttattaagtgagaagagtagatggyctaacatcaagcattaaggcaccccacacttataggctgtgtaagtgaggatttgagaggtagagccaatgagtagctggggacaggaagacaattaggagagggtgacatcactatagaaatccaaggaagaaagtgtttctcaaagaagggcgtggccaacagggctgagttgtcggggaagatgagggctgaaaaaggtcagttggctc

SEQ ID NO: 35460 - DNA, 688 bp, Homo sapiens
catatagtatatagatgtgtggaaatttacttttacttttcacttgtttttcctgaaattttaccataatcattaaccacattttacagaaaaaaatactggctaaggccagtcatagtagctcacgcctgtaatcccagtactttgggaggccgaggcaggtggatcacaaggtcaggagttcaagaccagcctggccaagatggtgaaacgctgtctctactaaaaatacaaaaattagccaggtgcagtggcaggcgcctgtaatcccagctactcgggaggctgaggcaggagaatcgcttgaactcggagggcagaggttgcagtgagccgagattgygccactgcactccagcctgggcaacagagtgagacttcgtcttaaaaaaaaaaaaaaaaaaaaaactagctaaaaaattaccaatctcttaacataattttcaagatgaacattttccatatgtgcccaatatgaagtatctctagattggcctgactacttttgcctattctccatgggtcctactccattgaacattgatctagaccagggttgacaagctttttctggaaaggcctaaatgataaatattttaagctttgcagactggtctctgttgtaactatacaactctgctgtcgcaaaaaagaagcagctgcaggccatgtggctatttaaatttaa

SEQ ID NO: 35461 - DNA, 555 bp, Homo sapiens
gtaaatacataaaatcatttgattataaagtcatctgtcatctacattttatgattcatagaagaccaggattttagacagcctcagggttcttgctataagcatgtgctttcattgtacaatagatgtcaagatgcctgtttccataattccaaataatggataatttacatagatgtttaacttcaagtgacaattcacttgtcacaatctgttctgctaatgataagacaaggagtataaggaggggatatttgatcttcctggtcctctgccccactgtccctaggttagacatgttcttgataaagcattgaaggcctttatatctcttgtaagaatattaatagcctgggaaatgttagaactctaatgcttgctggacagtcacaattgaaaaggrtctctggcagtcagctagtgagttaattggctccagaacaagtggaaagaatgcaaggagcccctattggaaacccctctggaaacagtgtgtgtagtgtcccctctttacagacaaaaactatcccatgttattttgagcatttactttgc

SEQ ID NO: 35462 - DNA, 827 bp, Homo sapiens
aacattgcatttgattactattggaacaacatggccgcaggcatcaggtcagtgggctcactcctccatatggactgtgatagtatattcctaaaaatccataacttgctttagaagaaagcaaaaaaaacaatgcttccctatttactacatatttctcccagcttaggagatggatttccagtggagctattctgatttgagctcttctcactgattggctgccaatgtggatttcataaaaatctcacctttcaaatatgcactaaggagaatggtgtgatattaaatagcgaccaactgcaataagcagagcaaaatgaaaccttttataagattcttattttctaaagacatataatttccaagtttcagttccaaaaatacagccttatttctttagcattagaacacgaaaccaaaagaaaacagctgttacacaacaattgatagaggatacttaggtaaggagcgtaagataactgaatgccacctccaactccctccaaccacaattccatccatgttctcctcttatggtgaaaaaaaaagaaaaagaaaacagatgagtctactaccataattcaagttaacgaatgacagcctaagataattaaaaggactctttagcaatttatgataatgtacaatcatattcttttctcctaaaagacttttgcattattgtatttatttcttattaagaagaaatatcactcgccttgcaacagatgtgaaattatccttattagatacttttctttgacattggtattttaacactgtgattaaaccagatggaagacaactttttttttttttwaaaa

SEQ ID NO: 35463 - DNA, 506 bp, Homo sapiens
tttttatgctggccttattcccatgagattgccacaatgaaacatcctaacttcctgagttatagtataatttcaaagcatagtatgcctaaaacacaactcataggaagcaggtatagagaaggagartgaagtgggttattctgggaattctgggccacaccagctgtaactgtgtgtgggggcaatgctgaggctaactgcagaagagaaaatactttgtgtctctctgttgagcctggagagaatgaacacgcacagagctgggagacaaagtcatgtgttagaggctggaggaagaaaccaaggtgttaaagcttaaagataatagtgaagaaagaacgaaggacaaggcacgaagaccacaactgctatgaagctgcttcttaatacattttccacatggtgcttataaagctttagaaattagtacattacaaaaaaattttaataaaaacattgatggaatttctaactcaataccagggtgggttgttagcatctca

SEQ ID NO: 35464 - DNA, 506 bp, Homo sapiens
tttttatgctggccttattcccatgagattgccacaatgaaacatcctaacttcctgagttatagtataatttcaaagcatagtatgcctaaaacacaactcataggaagcaggtatagagaaggagaatgaagtgggttattctgggaattctgggccacaccagctgtaactgtgtgtgggggcaatgctgaggctaactgcagaagagaaaatactttgtgtctctctgttgagcctggagagaatgaacacgcacagagctgggagacaaagtcatgtgttagaggctggaggaagaaaccaaggtgttaaagcttaaagataatagtgaagaaagaacgaaggacaaggcacgaagaccacaactgctatgaagctgcttcttaatacattttccacatggtgcttataaagctttagaaattagtacattacaaaaaaattttaataaaaacattgatggaatttctaactcaataccagggtgkgttgttagcatctca

SEQ ID NO: 35465 - DNA, 597 bp, Homo sapiens
ttatctatcaatgtctaacccaaataagtcactattacgcctagatgtataaccaaatcatcaaaaacttgaaccgattgttcaaatctaggaggtaacttaattcaatgtttgacattggtatttgactatataacctattccgagtctcatacawtgtaactgacactagatagttcaaattagtcaaaccaacttaagtactgcgtcaaacaagcagatatccactttataaatatctagcctaacattttggaaactctttgctggtatgaacattcaggcaacattttcagcctttaactacgattatgatacaatgattataccactggattttatcaattattagaattatatgttcaaatgcttggtaattcctgaatgcgtaatgatgactatcaagctttactgaatttcctcgaattttacagatttattttatattcacactttaatacatatttatttaaagattactatctgcaagacttcaagagagctattgctgactttcttcataagcctgggagtcagaggtgtgttactataatgctctttcacacctcaaactgtgattcaaataccaagggtacc

SEQ ID NO: 35466 - DNA, 597 bp, Homo sapiens
ttatctatcaatgtctaacccaaataagtcactattacgcctagatgtataaccaaatcatcaaaaacttgaaccgattgttcaaatctaggaggtaacttaattcaatgtttgacattggtatttgactatataacctattccgagtctcatacattgtaactgacactagatagttcaaattagtcaaaccaacttaagtactgcgtcaaacaagcagatatccactttataaatatctagcctaacattttggaaactctttgctggtatgaacattcaggcaacattttcagcctttaactacgattatgatacaatgattataccactggattttatcaattattagaattatatgttcaaatgcttggtaattcctgaatgygtaatgatgactatcaagctttactgaatttcctcgaattttacagatttattttatattcacactttaatacatatttatttaaagattactatctgcaagacttcaagagagctattgctgactttcttcataagcctgggagtcagaggtgtgttactataatgctctttcacacctcaaactgtgattcaaataccaagggtacc

SEQ ID NO: 35467 - DNA, 597 bp, Homo sapiens
ttatctatcaatgtctaacccaaataagtcactattacgcctagatgtataaccaaatcatcaaaaacttgaaccgattgttcaaatctaggaggtaacttaattcaatgtttgacattggtatttgactatataacctattccgagtctcatacattgtaactgacactagatagttcaaattagtcaaaccaacttaagtactgcgtcaaacaagcagatatccactttataaatatctagcctaacattttggaaactctttgctggtatgaacattcaggcaacattttcagcctttaactacgattatgatacaatgattataccactggattttatcaattattagaattatatgttcaaatgcttggtaattcctgaatgcgtaatgatgacyatcaagctttactgaatttcctcgaattttacagatttattttatattcacactttaatacatatttatttaaagattactatctgcaagacttcaagagagctattgctgactttcttcataagcctgggagtcagaggtgtgttactataatgctctttcacacctcaaactgtgattcaaataccaagggtacc

SEQ ID NO: 35468 - DNA, 1239 bp, Homo sapiens
  misc_feature (1)...(1239): n = A,T,C or G
tnnnnnnnnnnnnnnnnnnnnnnnnnnnnnnnnnnnnnnnnnnnnnnnnnnnnnnnnnnnnnnnnnnnnnnnnnnnnnnnnnnnnnnnnnnnnnnnnnnnngcatgcatgcatccacttctacatcccagcctctgtgttgcaactccctgggtctctggtcattccagagtaactcttgaagttctcaaagcccttacctctaaatttaattctaatgtagtttattttttaaaaatccacatatagtaatataattatttaaaaagaggacatgtgtcagaggtagaggtaggaagatgtagctgttttgtaaagccagctaacaaaggtgaacgtctgtaataccatcagaggtagaggaaggaagatgtagctgttttataaagccagctaatgaaggtaaacgtctgtaacaccctgatagttgagatttgctgtattttatcgaatctaagttaccaattttcagcctactttgttatttcatgcatcactaagaaagaagaaactgttgattaaaaaaattaaacatgatcatcataggttctagaggttctagttgtatcttaattccagagatatcaaaacgttaaaaagttgtgcattatggaatgcatgaagtacctattagtttaatgtgtctataagaaaacacattgcttatgaaaattactttttcattatcattagtgtgtaggtgtttggcttcacgcagaatagatgtatatgtttaaattcagtgatccttaatgttacagtgtaatttttgagcaacagcaacagcaattctgttaatctattcatttttattgttctgttttatatttcattttcattcgtttgcttattgtcccacttgtgaagcttatctcttaaatactgagtaatctgtctttaaacaacctattcacatgcactaggggcaatctgctagttcaaaatggcatttcatattaaggtaattctggttgggcaaaagattgtgccctaatgttctgtttagattgactcatgttgtaactcctcaaaatgatgagataaactttttatttcattggtgtgctggttcttaaaagttaccctttgagttccttatggaagaataagtatggaaaatcagccaagttaattctgaaaataaataatattacgaacaaggrcaggcacggaggctcacacttgtaatcccagcactttgggaggccgaggtgggaggatcacgtgagtccaggagttt

SEQ ID NO: 35469 - DNA, 2197 bp, Homo sapiens
atctcttattgaaacagcaggggtttggtctgggttcatttcctatatacacagaaagccaatcactgagatgactgttgctaaggaagaggctttattcagatgctgaagtccggcaacaatactctttactggcaatactcattgtctcagtgattggctttctgtgcagcatgcaaccagacatataccaaatttctggtgtttcagtaacacatatatggcttcaaatgtgatttctgacacttactagctctgtaaaattgtgtaaattacttgacagctttgaatgttagttccttgtttttaagaatgtggatgatatttactattctggactttgtgagtattacatgaagccccattatagggccttcatagatgatagtgcttcttattttcctgacaccagattcatctctctgaagcaggatagtatcctactccttttttgtatctcctgtgtctaacaccatgcctggcacatgggatgcacccacttgataaatgatgaatcaacaagccaactaggaagttcaaggacaactcagaatcttaagtattttatgcctaatttttcttataacctatagttttatttcagtgtatgtttatgaggcattactcctgatagagttcctgaggccatgtcaggccctttcaaagaatacctaaactgcctgaggggagggtaaattagtctctccagttaactttgaatcaggaaggagccaaagatattctaaaatctagacattttcgcattcctctgggtcttggctgagactaaattggacctcaggcctatggagaacacacaggatgaatattaatttgtctgcacatattctgttcaatgttagacctgcttctaagccattgtatttcttgggtgcatttttgctgcatgataaattgctgcatgttttggtgttcagtggtgaacaagaaaaccrcactgagctccatagctgacataggtgtatgtcagtgattcttaatgcagcaattttgctccctgccctctacctgctctagggaacaactggcactgtctggagatattttgacatgtgacaactcgcaactgaggggagggtactactggaacctagtcggtagagctctctaatgttgctaatcataccacaatgcatgatgagacagccccctccaccactatgataaattttcagccccaaatgtcaatagtgttaacactgagaaaccccagtatatgtatttcttttatgattgaattttgaaaaaataattataaaacctatgatgtaccctcaaaaattaaaaattaaaaaattaaaagaataaacaagaaagaagaaacaaatgcactgcatgcctatatcaaagcatctcatgtaccccagaaatatataaacccactaggtaacctcaaaaattaaaaataaaaagatttttaaaaagaaaaataattataaactgatgacaaagttctaaataaaaaagacttgttatgaaaagcaaattttttaaatggttaacttgacacttgagcagatcatacatagaaaagaaaggcaccatctgtttgaaaatttgatgaaaggcaaagggagtatactacataatttcactcaccaggcttttattttatattaataaatgaattcacatatatagatgccatatctgtctctgcataattggctttatataaagtacttataaagaaagaatattcttcctacatatttctcctaatttcttatttcagctatctaggaaatagtaaatttagttcagaagtatctataatgcagcttggcaatttaatgctgcaaatatttgtgaccattttgaaaggatccttaaacgtttctcaggaagaccattttgttttgctttaaaaaataaaaatatgtttgtctgcattgcagatgggcatgaaatcagttggccatgtgacttttttcccccaaggagccaaaaaaaaaaaaaaaacagggggccaatatgactgaattgtgaatgtatctactctggtaatcaattacttctgaaacacagctctgcaagtcttatattttagaatggaaatagccctctgagggagtattaggtattccttcccattctgaaagtaaaccttgcattgtaaatgtagcaaataaaaaagaattgggagtttatttaaatagatctgtgggtttagaag

SEQ ID NO: 35470 - DNA, 2197 bp, Homo sapiens
atctcttattgaaacagcaggggtttggtctgggttcatttcctatatacacagaaagccaatcactgagatgactgttgctaaggaagaggctttattcagatgctgaagtccggcaacaatactctttactggcaatactcattgtctcagtgattggctttctgtgcagcatgcaaccagacatataccaaatttctggtgtttcagtaacacatatatggcttcaaatgtgatttctgacacttactagctctgtaaaattgtgtaaattacttgacagctttgaatgttagttccttgtttttaagaatgtggatgatatttactattctggactttgtgagtattacatgaagccccattatagggccttcatagatgatagtgcttcttattttcctgacaccagattcatctctctgaagcaggatagtatcctactccttttttgtatctcctgtgtctaacaccatgcctggcacatgggatgcacccacttgataaatgatgaatcaacaagccaactaggaagttcaaggacaactcagaatcttaagtattttatgcctaatttttcttataacctatagttttatttcagtgtatgtttatgaggcattactcctgatagagttcctgaggccatgtcaggccctttcaaagaatacctaaactgcctgaggggagggtaaattagtctctccagttaactttgaatcaggaaggagccaaagatattctaaaatctagacattttcgcattcctctgggtcttggctgagactaaattggacctcaggcctatggagaacacacaggatgaatattaatttgtctgcacatattctgttcaatgttagacctgcttctaagccattgtatttcttgggtgcatttttgctgcatgataaattgctgcatgttttggtgttcagtggtgaacaagaaaaccgcactgagctccatagctgacataggtgtatgtcagtgattcttaatgcagsaattttgctccctgccctctacctgctctagggaacaactggcactgtctggagatattttgacatgtgacaactcgcaactgaggggagggtactactggaacctagtcggtagagctctctaatgttgctaatcataccacaatgcatgatgagacagccccctccaccactatgataaattttcagccccaaatgtcaatagtgttaacactgagaaaccccagtatatgtatttcttttatgattgaattttgaaaaaataattataaaacctatgatgtaccctcaaaaattaaaaattaaaaaattaaaagaataaacaagaaagaagaaacaaatgcactgcatgcctatatcaaagcatctcatgtaccccagaaatatataaacccactaggtaacctcaaaaattaaaaataaaaagatttttaaaaagaaaaataattataaactgatgacaaagttctaaataaaaaagacttgttatgaaaagcaaattttttaaatggttaacttgacacttgagcagatcatacatagaaaagaaaggcaccatctgtttgaaaatttgatgaaaggcaaagggagtatactacataatttcactcaccaggcttttattttatattaataaatgaattcacatatatagatgccatatctgtctctgcataattggctttatataaagtacttataaagaaagaatattcttcctacatatttctcctaatttcttatttcagctatctaggaaatagtaaatttagttcagaagtatctataatgcagcttggcaatttaatgctgcaaatatttgtgaccattttgaaaggatccttaaacgtttctcaggaagaccattttgttttgctttaaaaaataaaaatatgtttgtctgcattgcagatgggcatgaaatcagttggccatgtgacttttttcccccaaggagccaaaaaaaaaaaaaaaacagggggccaatatgactgaattgtgaatgtatctactctggtaatcaattacttctgaaacacagctctgcaagtcttatattttagaatggaaatagccctctgagggagtattaggtattccttcccattctgaaagtaaaccttgcattgtaaatgtagcaaataaaaaagaattgggagtttatttaaatagatctgtgggtttagaag

SEQ ID NO: 35471 - DNA, 2254 bp, Homo sapiens
tgagtgtgatgtctggcacccagaagcatgataaatgcctgctgctctcacagcccagggctccagccaggtaagggctgggtccctacagaacccagaggcctgaacatgtgtgtgatgattccaaacttcccaggccagtttttcataggacactaccctgacttccttgcagaaccctagcagtaggtagctgagctatttcagaggcttaagaccagtgtgcggagagcggttaggccagagggaggaaagacatccgttgccatcaacatcttgtgagtccacaaaacaaatcagcaaatatttacaaaatgctttgcttggagctacaagcttagcttggtctgtgttagaatataagctactaaaagttaagtgtgttgatttgtatcagcttgggttaagcaggaaggaatatttcagacaaaagctgaattcttgaatgcagattcattttgcctgtgccctttggcatttccgaatttctagcttcttcagccctgaatctggaatccagggaactcaccactgtgtcttttcatccacggttcctagctcatgattcttacagccattgttacaatctattgttataatgttgggtgccttaggcctcaggaacaaaatctttctctctgaccttctcctgtcctcctttcacctggcccaggccggactctaatctgattgtgggtcattagaccctccttccagagagggtcctgccccataccctagaggaaggaatgctgcagagaggcctggggaatctgaacagacaggccttgctgggcttagactgcaccctttttatccaatcacacttttttaaattttttttttttttaattgagatggagtcttgctctgttgcccgggctggagtgcagtggcacaatctcagctcactgcaacctctgccgcctcctgggttcgaacgaccctcttgccttagcttcctgagtagctgggactacaggcacgcgccaccamgcgcagctaatttttgtatttttagtagagacagagtctcgccatgttggccgggctggtcttgaacttctgccctcaagtgatctaccctcctcggcctcccacactgctgggatgacaggcctgagccaccacacccggcctttccaatcacattttgacatgatgcccatgcctcaaccacagacaaccaatgaagtctccataagaagcccagaaaacagggttcagggagctcccagaaagccgagcacatggaggccaacaggaaggtgaagaagaactcacccccatgccacaagggcaccccaactctgtggcaccccaactccatggaccccaactctgtggcaccccaattccgtggcaccccttccagaccttgctccatgtgtctcttcatgcggttgttcatttgtatcctttgcaatatcctgtctaataactagtaaacaaacataagcaaccgtttcccagcaaattaattgaacccaaagagggggtcgtgggaacccccacctgaagccggtggatcagaaattccagatgcctggaattgcaactagggggaaggaaggggtggtcttgtgagactgagccctcaccctgtggtatgagacgctacctccgggtagatagtggcagaattaaactggaggacacccagctggtatccactgctcgctgtgtgggaaaaaccctacacctttgctcacaggagtttcctgtgtcaatgatggctgtggcgctgtgagagcagaggaaaaactcgggtttagagttttttcctgaaacacattcccgaggtatctagtggatctgccttctccttgccaccttccagagtcttatgtttgcttttaagataaaatccaaggttttgggctgtaattagagggaagagtaggggaaaatacatcttttccaacttcccagaaacacagtcctggtatgttagtctttttaatagatttgcaatgatattgaactcaaaagaaatcaagagctactaaagaagttttttaggataccatataattaatgtcccagacccacagttccctaccacgcacacaatggcctattgtatcacagcactcaggacaatgatatttccacactaattttatcattcagggtcaatacatcgctaagaaaatgaaactgctaatgtcagtctgtgaattttccccactgctttcaaaagtttccttcagcaaaaacttagtttcaaaaatatcacagagcaaaacattac

SEQ ID NO: 35472 - DNA, 2254 bp, Homo sapiens
tgagtgtgatgtctggcacccagaagcatgataaatgcctgctgctctcacagcccagggctccagccaggtaagggctgggtccctacagaacccagaggcctgaacatgtgtgtgatgattccaaacttcccaggccagtttttcataggacactaccctgacttccttgcagaaccctagcagtaggtagctgagctatttcagaggcttaagaccagtgtgcggagagcggttaggccagagggaggaaagacatccgttgccatcaacatcttgtgagtccacaaaacaaatcagcaaatatttacaaaatgctttgcttggagctacaagcttagcttggtctgtgttagaatataagctactaaaagttaagtgtgttgatttgtatcagcttgggttaagcaggaaggaatatttcagacaaaagctgaattcttgaatgcagattcattttgcctgtgccctttggcatttccgaatttctagcttcttcagccctgaatctggaatccagggaactcaccactgtgtcttttcatccacggttcctagctcatgattcttacagccattgttacaatctattgttataatgttgggtgccttaggcctcaggaacaaaatctttctctctgaccttctcctgtcctcctttcacctggcccaggccggactctaatctgattgtgggtcattagaccctccttccagagagggtcctgccccataccctagaggaaggaatgctgcagagaggcctggggaatctgaacagacaggccttgctgggcttagactgcaccctttttatccaatcacacttttttaaattttttttttttttaattgagatggagtcttgctctgttgcccgggctggagtgcagtggcacaatctcagctcactgcaacctctgccgcctcctgggttcgaacgaccctcttgccttagcttcctgagtagctgggactacaggcacgcgccaccaagcgcagctaatttttgtatttttagtagagacagagtctcgccatgttggccgggctggtctygaacttctgccctcaagtgatctaccctcctcggcctcccacactgctgggatgacaggcctgagccaccacacccggcctttccaatcacattttgacatgatgcccatgcctcaaccacagacaaccaatgaagtctccataagaagcccagaaaacagggttcagggagctcccagaaagccgagcacatggaggccaacaggaaggtgaagaagaactcacccccatgccacaagggcaccccaactctgtggcaccccaactccatggaccccaactctgtggcaccccaattccgtggcaccccttccagaccttgctccatgtgtctcttcatgcggttgttcatttgtatcctttgcaatatcctgtctaataactagtaaacaaacataagcaaccgtttcccagcaaattaattgaacccaaagagggggtcgtgggaacccccacctgaagccggtggatcagaaattccagatgcctggaattgcaactagggggaaggaaggggtggtcttgtgagactgagccctcaccctgtggtatgagacgctacctccgggtagatagtggcagaattaaactggaggacacccagctggtatccactgctcgctgtgtgggaaaaaccctacacctttgctcacaggagtttcctgtgtcaatgatggctgtggcgctgtgagagcagaggaaaaactcgggtttagagttttttcctgaaacacattcccgaggtatctagtggatctgccttctccttgccaccttccagagtcttatgtttgcttttaagataaaatccaaggttttgggctgtaattagagggaagagtaggggaaaatacatcttttccaacttcccagaaacacagtcctggtatgttagtctttttaatagatttgcaatgatattgaactcaaaagaaatcaagagctactaaagaagttttttaggataccatataattaatgtcccagacccacagttccctaccacgcacacaatggcctattgtatcacagcactcaggacaatgatatttccacactaattttatcattcagggtcaatacatcgctaagaaaatgaaactgctaatgtcagtctgtgaattttccccactgctttcaaaagtttccttcagcaaaaacttagtttcaaaaatatcacagagcaaaacattac

SEQ ID NO: 35473 - DNA, 634 bp, Homo sapiens
acataggtttatctctgagctcaatattttggtccattgatacttatggcatccctacacctttttttattagcatgattagttaagttattaatggagcctttrtatgttgacatagattttgtagtaagtatgtcaatattctaaaaaattttgaaaaatacctatgtgggccctgtggtgtttgggagagggaagggctttaaatactaggttgatttctttgttacttgagtattctatttctatataaatatattttcttgcactaatgttagtgttttatatccgtctaggaatttttccattccatctaagttttcacatttattagcatataattgaataatcttattttaaaaaaatttagttgtgttctagttatgctcccttcttgtacattttatttggatattcactctgtttgttcttgattattattgccacaggtctattgtagtaatctttgcaaagatacacacttttgttttgttaatcttctccacggttttttcttctccagttcagtgacttatgcttacctccttatgttttgcttccttattactccatagactttgccatgtgttccttttccaacctctctacttaaatgtgtactctttgcttttaa

SEQ ID NO: 35474 - DNA, 634 bp, Homo sapiens
acataggtttatctctgagctcaatattttggtccattgatacttatggcatccctacacctttttttattagcatgattagttaagttattaatggagcctttatatgttgacatagattttgtagtaagtatgtcaatattctaaaaaattttgaaaaatacctatgtgggccctgtggtgtttgggagagggaagggctttaaatactaggttgatttctttgttacttgagtattctatttctatataaatatattttcttgyactaatgttagtgttttatatccgtctaggaatttttccattccatctaagttttcacatttattagcatataattgaataatcttattttaaaaaaatttagttgtgttctagttatgctcccttcttgtacattttatttggatattcactctgtttgttcttgattattattgccacaggtctattgtagtaatctttgcaaagatacacacttttgttttgttaatcttctccacggttttttcttctccagttcagtgacttatgcttacctccttatgttttgcttccttattactccatagactttgccatgtgttccttttccaacctctctacttaaatgtgtactctttgcttttaa

SEQ ID NO: 35475 - DNA, 1412 bp, Homo sapiens
gccgttattgtcattgtcatcacaggtcgagtagcagctggaggaagagtcctccccttcagtaattcaccgagtgcatgcattgagcacttatcatgtgtcaggcacagttcaaggatcaggagtgctgctctgaggttacaggtgttcagtaggtggccatgacaggccttgcccagaaaagaaaacttgagcaaagacttgacgaggctagaaacaggagacagccatgcaacygccctagagaaggagcaagcctagaacgttccaggccagaggggctgaacaaagtgagccagagggaatggggtgggagtaaaggtcagacaggaaagactgcttctggggtggaggggcaagtgtcaaaataaaccaaactcagatctgatcaagtctcgccatcaacttaaaggtacagaaatacaggggcagatcaacatggtaatacagagcaacatgataataccttgagattatcatcagcacaagtaaggctgtggaagactctacaggaaaagtgacctagtttcttcaaaaacagccaaaaactgaaaaattgcaagaaagaggtaatgaagaggctcctatggattaagacttgaacaaatcaaccaatcccactataaaaaccttatttggatcccaattccaaccagcaaactgtcttaccactattcatcagcatcttataactgagaaaatataaacaatggctggacttttaataataataaagaattgctacaaattattttaggcatcataatgaaattgctttgtgggcttttttgagcccttatctttgagagataggtactgaaatcgttatggataaaatgataggatgcctgaaatttgcttcagaaataatcaaggggtgggggaaggaggtggaactgagagaaagactgtccatatttggcaactgttgaagctgtgatgggtacataaagatgtattatgctattccctctactacactgttttatgtacatttgcaatttcccataataaaaggttgcaaatacacctgccagtgattctgaagcattgcctcaaactcctccaggacactccctccacaattactacgtttgactggaatccacccatcccctacctggaatctcttggacatcctcagaccctccagtgatcactgaatggaatgctgattttctccagtgcttaaagccaaaagcaggtttttccaggcccacctgaccttccacagcttgagggcatccagccaacgtgcctgactgtggttggtaaacaaccagtgagctcacaatttctaagggctagagagacccaagaaaatctcatgcacatatgcaacaaaagactgtttataagaatgtttatagttgctatattcctaattgccaaaaatggaaacagccaaatgt

SEQ ID NO: 35476 - DNA, 1412 bp, Homo sapiens
gccgttattgtcattgtcatcacaggtcgagtagcagctggaggaagagtcctccccttcagtaattcaccgagtgcatgcattgagcacttatcatgtgtcaggcacagttcaaggatcaggagtgctgctctgaggttacaggtgttcagtaggtggccatgacaggccttgcccagaaaagaaaacttgagcaaagacttgacgaggctagaaacaggagacagccatgcaaccgccctagagaaggagcaagcctagaacgttccaggccagaggggctgaacaaagtgagccagagggaatggggtgggagtaaaggtcagacaggaaagactgcttctggggtggaggggcaagtgtcaaaataaaccaaactcagatctgatcaagtctcgccatcaacttaaaggtacagaaatacaggggcagatcaacatggtaatacagagcaacatgataataccttgagattatcatcagcacaagtaaggctgtggragactctacaggaaaagtgacctagtttcttcaaaaacagccaaaaactgaaaaattgcaagaaagaggtaatgaagaggctcctatggattaagacttgaacaaatcaaccaatcccactataaaaaccttatttggatcccaattccaaccagcaaactgtcttaccactattcatcagcatcttataactgagaaaatataaacaatggctggacttttaataataataaagaattgctacaaattattttaggcatcataatgaaattgctttgtgggcttttttgagcccttatctttgagagataggtactgaaatcgttatggataaaatgataggatgcctgaaatttgcttcagaaataatcaaggggtgggggaaggaggtggaactgagagaaagactgtccatatttggcaactgttgaagctgtgatgggtacataaagatgtattatgctattccctctactacactgttttatgtacatttgcaatttcccataataaaaggttgcaaatacacctgccagtgattctgaagcattgcctcaaactcctccaggacactccctccacaattactacgtttgactggaatccacccatcccctacctggaatctcttggacatcctcagaccctccagtgatcactgaatggaatgctgattttctccagtgcttaaagccaaaagcaggtttttccaggcccacctgaccttccacagcttgagggcatccagccaacgtgcctgactgtggttggtaaacaaccagtgagctcacaatttctaagggctagagagacccaagaaaatctcatgcacatatgcaacaaaagactgtttataagaatgtttatagttgctatattcctaattgccaaaaatggaaacagccaaatgt

SEQ ID NO: 35477 - DNA, 509 bp, Homo sapiens
taacccaagcttaggctcaagagggaatatcagcagagagataggaaagtgaagagtggtaccatgggatggcccaagttcagataccctttgaaggcagggctggagactgtgttcgattgggaatgggagaggccctgtcctcagcctgtggagccactggcccctgtgctttcttgttctaattcacagaaycaggaaagaggagagggtgggatgggaagggctggcacccctgctgcatccacctctagcctttggaaggcgatcaggaagctgtgctgatggtactggacgggcagctgctgactgaggaagcgatggctctgtgcccaaggtgggctttgtgaccaggggaagtcctttccagaggaagcccttgaagccaagtatcctataaggggaggattctgtgtcttctttttcttactttccttttttgagaaagcctctagactcgtaccacccgagtcactgtttatttagcgctcttgcaaggctggctcttg

SEQ ID NO: 35478 - DNA, 597 bp, Homo sapiens
gttgttgttgagacggggtttcatcatgttgcccaggctggtctcaaactcctgggctcaagcgatctgcccgcttcagcctcctaaagtgctggaattacaatgtgagccaccgtgtccctggccacctttttttttttttttggaggaggctttgcatttttattgtacagtgagccccagaaatgatgcagcgctaaccaaaccactgacgtttgcacttaccaaatgcccgtggctctttctatggtggtgctgactgtattcaacctcccagacctcaagagccaggctgagcagctctgctacatgatgaggggtgtttcctgagcaggaggaagatgactataggggcaagaaggaggttggaaggaattcctgtaggtgctagcttcaccctgctcctggcctacacctctttctctccagctatccttcctttccccccaactctgcttgccctcaccatactggagtatataaggtgtggagtaagaattctggaattgggacccagttctcctggttcctgagcccacgctstcctcactaaggatgcctatggacagagaggtatgcttcagacttctgaatgtc

SEQ ID NO: 35479 - DNA, 671 bp, Homo sapiens
ttgtagttcattgaaatgaataaaccatgcaacttttaagctgcagaatcttgccaatgtgatcagaagaatttgttgttgttgttttttgagacagggtcttgctctgttgcctaggctggagtgtagtggtgtgatcacggctcactgcagcctcgatctcccatgcttaagagagcctctcacttcagcctctcgagtagctgggactataggcacgcaccaccattcctggctaatgtttattttttgtagagaggaggtaccactacgttgcccaggctggtcttgaactcctggactcaagcaatcctcctgcctcagccttccaaagtgctgggattccaggcatgagccatgccyagctgatcagacaaatttgtattctgatttgtggcaaggtgtggagggctctgtgggctccacagatctaatgatccaacatagtgcatttttgtgccttcatcaactactgaagaatgaccctgtggaaatgtgaaacattgcctcagtcatgggtattttatactggtcacgtgcaaggagttttgaattaaaatgtatttgctgcaattcagaaagcgtaacattcaaaagtttttcctgcaaattgtctcacagccttaaggaacagctttatattttacagaaagcattttctttgtgaccct

SEQ ID NO: 35480 - DNA, 698 bp, Homo sapiens
catacaaaaataatacttggatataagaagacctaccattggatagcacaacagggtgactatagtaaaaaataatgtaattgtacacttaaaatatttaaaatacaataactggattacttttaacttgaaggataaatgcttgaagtgacagataccttatttaccatgargtgattattactgcttgcatgcctgtatcaaaatatctcatgtatcttataaatatacacacctactatgtaccctaaaattaggaaataaaataaaattcttagaatctgaaagagaaaatatgcttagcaaacttaatattcaaaatggaaaatacaatgttgaacccttcacttatgctgtatacaaacattaaaataaatcaaatacctaaatgtaagaactaaaatacaaagtcttttgaataagttataggggagagcttcatgctattgaatttaaaaaagattacttgtatatgacacaaagataactggcataaaagaaaaaaatatgacagatttcattgaatttcaaaacttttgataattaaaggacagtaaagaatgtgaaaatgcaatccacagaatgtgagaaaatgttttcaaatcatatatctgataaagtatcgggggaaccagcccccagtttttcaacgtaggttcttttctattttccctaagtgttggctggtctgagaaata

SEQ ID NO: 35481 - DNA, 698 bp, Homo sapiens
catacaaaaataatacttggatataagaagacctaccattggatagcacaacagggtgactatagtaaaaaataatgtaattgtacacttaaaatatttaaaatacaataactggattacttttaacttgaaggataaatgcttgaagtgacagataccttatttaccatgaagtgattattactgcttgcatgcctgtatcaaaatatctcatgtatcttataaatatacacacctactatgtaccctaaaattaggaaataaaataaaattcttagaatctgaaagagaaaatatgcttagcaaacttaatattcaaaatggaaaatacaatgttgaacccttcacttatgctgtatacaaacattaaaataaatcaaatacctaaatgtaagaactraaatacaaagtcttttgaataagttataggggagagcttcatgctattgaatttaaaaaagattacttgtatatgacacaaagataactggcataaaagaaaaaaatatgacagatttcattgaatttcaaaacttttgataattaaaggacagtaaagaatgtgaaaatgcaatccacagaatgtgagaaaatgttttcaaatcatatatctgataaagtatcgggggaaccagcccccagtttttcaacgtaggttcttttctattttccctaagtgttggctggtctgagaaata

SEQ ID NO: 35482 - DNA, 524 bp, Homo sapiens
tgggaggagaaagcccacctctgcctggaggccaggtaggtccagctgctgcttcccttccctgccctattccaaacatcaaagttgagtggagacccagaagaggatgcccatgggtggccttaggtatcacgctcctgtgttactgtatygactctcccctcttttgttgtctatcttgtcgtttttttaaaaaacaactctgtatacttaaaggcaaagagaggctgatggagaagcagaaatggacagatagagattatctagaagactagccctacaggctaatgtgcgcatacccagaagcacaagtgacaggcagatgggcagatgttggtagaaagaccccacacagggcagttgacaaactgcagcaacagattacacaatacaggttgtatatgtaggcattgctagcaggccagcagactggcagacaaacagaggtgcaagagctgtggcagaagggatgaagttgggtgcatgcagtcttggggaagcagggactggcagctacccttagg

SEQ ID NO: 35483 - DNA, 524 bp, Homo sapiens
tgggaggagaaagcccacctctgcctggaggccaggtaggtccagctgctgcttcccttccctgccctattccaaacatcaaagttgagtggagacccagaagaggatgcccatgggtggccttaggtatcacgctcctgtgttactgtattgactctcccctcttttgttgtctatcttgtcgtttttttaaaaaacaactctgtatacttaaaggcaaagagaggctgatggagaagcagaaatggacagatagagattatctagaagactagccctacaggctaatgtgcgcatacccagaagcacaagtgacaggcagatgggcagatgttggtagaaagaccccacacagggcagttgacaaactgcagcaacagattacacaatacaggttgtatrtgtaggcattgctagcaggccagcagactggcagacaaacagaggtgcaagagctgtggcagaagggatgaagttgggtgcatgcagtcttggggaagcagggactggcagctacccttagg

SEQ ID NO: 35484 - DNA, 1090 bp, Homo sapiens
cttgagcccaggagttcaagagcagcctgggcaacatggcgagactctatctctacaaaaaataaaaacattagctgggtgtggtggcacacacctgtagtcccagctactcaggagagtgaggcaggaggatcacttgagcccaggagtttgaggctgcagtgagctatgatcacgccactacactccagcctggcaacagagcaagatactgtctctaaaatttttatttgtttgtttgagacagagtcttgctctcacccaggctggagtgcagtggcacgatctcacctcactgcaacctgcacctcccaggttcaagcgattctccttcctcagcctccccagtagcagggattacaggtgcgcaccaccatgtttggctaatttttgtatttttagtagagacggggtttcgccatgatggacaggctggtctcaaactcctgacctcaggtgacctgcccaccttggcctcccgaagtgctgagattacaggcrtgagctaccacacctggccaaaaaaaatttattaaaaaaaaaaaaaaaaactgcaaaacattttttaaaaatttaaaacattaaaaaaaatttttttaatgactgcagcttgcatcttgagcactcttggtcgcttgtcacttgtactatttctctcagaccccccaacctggggaaagccgcatcacgaacagtcctatggagaggcccacagggtgaggcattgaatcctcctgccaacagccaagtgggtgagcttgaaagcagactgccagccccagtctaatcttcagatattgcgggctctccctacagcttgaccgcagcctcatgaaaggccctgaaccagaaccactcagccatgccattcccagcttcctggcacccagaaactgtatgaaataataaatgtttattgtttaggctcactctcttgggtcagttttaagctaccaaatttgggggtaatttgttacacagcaacagataacagatatacttccccatcagacttcaatagcactcagagctgggaccagacctgcttcccagactgatctcctatttcccattcctcccttgagggagg

SEQ ID NO: 35485 - DNA, 1090 bp, Homo sapiens
cttgagcccaggagttcaagagcagcctgggcaacatggcgagactctatctctacaaaaaataaaaacattagctgggtgtggtggcacacacctgtagtcccagctactcaggagagtgaggcaggaggatcacttgagcccaggagtttgaggctgcagtgagctatgatcacgccactacactccagcctggcaacagagcaagatactgtctctaaaatttttatttgtttgtttgagacagagtcttgctctcacccaggctggagtgcagtggcacgatctcacctcactgcaacctgcacctcccaggttcaagcgattctccttcctcagcctccccagtagcagggattacaggtgcgcaccaccatgtttggctaatttttgtatttttagtagagacggggtttcgccatgatggacaggctggtctcaaactcctgacctcaggtgacctgcccaccttggcctcccgaagtgctgagattacaggcatgagctaccacacctggccaaaaaaaatttattaamaaaaaaaaaaaaaactgcaaaacattttttaaaaatttaaaacattaaaaaaaatttttttaatgactgcagcttgcatcttgagcactcttggtcgcttgtcacttgtactatttctctcagaccccccaacctggggaaagccgcatcacgaacagtcctatggagaggcccacagggtgaggcattgaatcctcctgccaacagccaagtgggtgagcttgaaagcagactgccagccccagtctaatcttcagatattgcgggctctccctacagcttgaccgcagcctcatgaaaggccctgaaccagaaccactcagccatgccattcccagcttcctggcacccagaaactgtatgaaataataaatgtttattgtttaggctcactctcttgggtcagttttaagctaccaaatttgggggtaatttgttacacagcaacagataacagatatacttccccatcagacttcaatagcactcagagctgggaccagacctgcttcccagactgatctcctatttcccattcctcccttgagggagg

SEQ ID NO: 35486 - DNA, 642 bp, Homo sapiens
agcccccatacttcctctccagcatttccacctggcagagaagggtcgaggggaacaaggtcagaaagtcatggcagcctcatctccctaggcactcaaccacaccacccccactggaatcatggctgactgcttacagccaccgagagcgccaggctaggtgctcagtgttgtctcctcacttgaatttcagataacactagtcaaatgggattggattatgttttgttttcttatttgcaagaagaacatattgattatttgaaaacaggaaacaaacagagaagccaaaaaaaaagaaagcaaggtagaaataaatggagagcaagaaggaaagaaaggaggaagaaagagaatgagaaaggagaaggagagagggagagagaaaggcagagaaggaaggaaggaaggtaggtaggtaggttgaattacctacattccaaacacctaagcataactagaatatgtcttttggtgtagggtatatgtttttgtatatgtccttccagttttttcctatatgtagtattttgttttccctccacctttctttttagcyaaacaatctattgtatggcactcttctgaaaaggtcaactgatgtgtgttcttcctgttagactgagttttttggggactgga

SEQ ID NO: 35487 - DNA, 769 bp, Homo sapiens
ttccttgaaggaggtaaggtggttaaggaaacgcaaggccaggccacaccacttttcagcagatgcatacttgctcctgctaaacataagtactccggtattccaggacttgaccatcagccagagaatctccatttctgggtagtctttctrtaatccaagaacagaaattttgcagttattactgtcacagttcattgtggcactacctgtatccatgctatgtccctttattactaaacaaacaataggagctctgctgatgtttaggaaggtctgtgctcctggagagtgcaggaggagagcactttgaaggtttgtcagctgtagaatgttccatagcaagatctcatgaagagacgtaaaccgaggtcctctctgactgaaggaaagaattagaaagattcctaatcttcctgaggcacgagaaaaacttgcatactgtttggggcttcccttgattctgtcttcagtcaattacctccctaatacctacctctacttttcggataaggttgtcaagaagcagttttattgaatttcttaatttctgtcaccagaattagtccatatttggagtagaaattatattcatcttcagagttaacgatatctacctagctatgaacacagcacacatttctaagatggtcccttagccttatcagtggtctttaacatgactaatcacaagattatatttgcttcttcacaatactttgcaatagtgaaaagtattagtctaagaagctactttcttggttcttgc

SEQ ID NO: 35488 - DNA, 769 bp, Homo sapiens
ttccttgaaggaggtaaggtggttaaggaaacgcaaggccaggccacaccacttttcagcagatgcatacttgctcctgctaaacataagtactccggtattccaggacttgaccatcagccagagaatctccatttctgggtagtctttctawaatccaagaacagaaattttgcagttattactgtcacagttcattgtggcactacctgtatccatgctatgtccctttattactaaacaaacaataggagctctgctgatgtttaggaaggtctgtgctcctggagagtgcaggaggagagcactttgaaggtttgtcagctgtagaatgttccatagcaagatctcatgaagagacgtaaaccgaggtcctctctgactgaaggaaagaattagaaagattcctaatcttcctgaggcacgagaaaaacttgcatactgtttggggcttcccttgattctgtcttcagtcaattacctccctaatacctacctctacttttcggataaggttgtcaagaagcagttttattgaatttcttaatttctgtcaccagaattagtccatatttggagtagaaattatattcatcttcagagttaacgatatctacctagctatgaacacagcacacatttctaagatggtcccttagccttatcagtggtctttaacatgactaatcacaagattatatttgcttcttcacaatactttgcaatagtgaaaagtattagtctaagaagctactttcttggttcttgc

SEQ ID NO: 35489 - DNA, 627 bp, Homo sapiens
ttcctaaattcgctcatttccagtcatactgcctttaaccacggattccttgtcacttgggctttgccctagctaaacccaaaccagttttccatatcccttccatttctcatcccatycctgccccactcttctttactcattcttatgctgccctcctctcaatacactgctctctctcatttccatttctatattctctccttctctgcaaattttcctcctctctcatcccccactggtagccctttttgatttcttttcagtatgttccactcacttaaatggagattactttgacataatccttgtgcggtaatgagagcagatgtattatatacacttttttacaaagataatatctgaagcttgcaaagtttaatctacttgtctaacataatataaccatttgccataagagttatagacccaaagcctccttgtcatacttggtttatctaatgatcccccctccctcttgcagctaaagatggagataacaaattgactctattgactatttttctcaagtcatatcaacatctgtgtgtacctttcttagaaagataactttcatatttttgcaacaagtaaaacatgcaatgcttggaaagtccctgtacaaaa

SEQ ID NO: 35490 - DNA, 1471 bp, Homo sapiens
ccggcaggttcacagagtggagctgggagagaattcagcagagatcagtacagagcagcaaatcccacaaatctccaaagtttaaatcctttgagagcttccccaacaccacaccctccatcccctggaccctccctgcatctctctcttcctccctctttccctctttctctcttctccccttccttctttcatcttctcttcctccctccttatcttacccctgcttcttttcttctttctctctgctccttttcccatattctgcatcacccacagagcacctgcccacagaacaacacatcgttcttttttatgatcacaaagtaattgccaatgacttgtgttgtctgtgactaggaggtggcatctttgctaactacttagcagctccttcttcaagctcctcattcccattcccaccgcctcctttcaaaagtcttgaggatccagctttggattgactctctcaagggaacaacagagtcaggcaaggagagtgcacagcctcatactcaaggcatagagaccctttgtttaccaatttcagatcagaggaggcttaggtccagaaaaggaattcaaatttctccaaaaattctcttctatcccaaggacttgaccataatattatggctcaatgatcaagaaaaaataattctggggaaaatggaggctttgtagctggatgacacagatttgagtactggctcttcctcttacaagctgtgtgactgtgggagaaatgtttcacctctctgtgctttagtttccttgtcggtaaagtgtagataattgtggtacctacctcacagagtttttgtgaagattaaggagcttagactagtgcctggaatttacttattcagtaaatattgtgtcattactattatttattttagccaagcttggtttgagatacttactttttcttaggttaaatgtttacttgaataattagttccttaggtaggagaaaagtgtcaataggagagagcataaaatcatattccatacacttgtccatacagcaaataatttgaagtgctcactgtatgccagacgttgtgcatggccctggagtgatgggagtaaacatgaatgacaatctttgatgtcaagaaattcatattatagtggtagagagccaatttaaaaataagtatataatattctttcagagggtgattggttctctaagaaaaataaagcagagaaataagatacagagcatcttaagatggtcttaactgtttagatagatttagatagattcagtaaaaacctaaatgaaatcaggaaacaagycttctgaatatttgggaaagagcatccctggcagagaaaacatcgaatgcaagtatcctgaggaggaaatacgcttgtacaaggaggaatgagaaggcaagggcacctggagctgaccaagtaagggggcaggggttagttatcggtgtctgagaaataggaa

SEQ ID NO: 35491 - DNA, 1377 bp, Homo sapiens
gcatttctaattcaaacaaagacaccattaagcctggcagggggacctggatatgctggaaaccaacaggaagaaaccaaaaggaagttcatttttcaggtatgcccataaggcagtgaagtgcattctagacctgaaatgaacccagctcttacttggatgctggccaagtggccacagaaaccaagtggggagaggtaccccctgccaggataaaccacccaaacccttctaaattctggaggtggaaatctgcccacacaagactgagtgggtgaggtaggaagccagaaaggaagtctgctgggcctgttttgaacaagtctttctctgtggctcaagaagcttcaaaattttccctctcctaagcttgaggcctccctctcagaaacccccaaaaatcttacctaggaatccaggtctggtgcaaatggctggggaagaaagaaggaaatgagtgaggtcaatttccaaggctttattcaaagaacacaactctagaaggccttcacagaactgtgtgagacaagagtggtagatgcagagcctccaatgtcagtcctgttgggaccttcttcttctgggatgaccatcctccaaggacacagggacactggctaggaatcacagagaccaattccaccacagctaactggttcagcctgctttcttcacacgtgatggtggatagattggttttctattctagtcaattagattgattggttgttactgcctgaagaaaagtgtggtgatacagcctcttggctcaacaggaaagagtgctggaggccactgggaagatgcactggccggtggaggtaaagatgccatggtgggcagagcagaaattagggcaaaggggcaggatatgcctgtgttcatcggcacagcatttagaccaggtaagcaaactcttactgtaagaggccagacagtaatattttcagttttgtgggccatacagtgtctgttgcaaccactcagctctgccattgtagcctgagaacagccacatatatgtatgcaagtgaggacggctatgttccattaaacctttattagacactgaaatttaaattttttgtcattttcatgtgtcataaaatagtatttytcttttgcttttttcctaccatttaaaaatacaaacctcattatcagcttgcaggctgttttagctgatttagatgaatagctcaggaagtagctctatatgtagttccaaacctccagattccagcaccagcctgtctttaaaacatgggggtttcttcctgcaggatctctgtatatttggactcctttctccataaggtccctcctaatgctgtagagagtcctgggccctgtaacctccaggagtccctgaggcct

SEQ ID NO: 35492 - DNA, 557 bp, Homo sapiens
ggacatatcaatgttgaaaatcaccaaaatattttacttttgtaaacaaaagaaagaatatctaaattcataatgtttcttttgcaatgagactattctgttcattgaattagatttctgttgagggttgctgtgagtagtgagcactgggaatacaaatacgagtaagattgagttactgccctcaataattcagacatattcactgaaaagcaatgtattaaattctgtaacagagcagtgtacaaaatgctatgacacagagaaattcaagcactaaccacttgaaatgactgaagaagatatcactgaataagtcacgcacactactgtatattgaatttacttaagtaggcaagtgggacaacataaagggtaataatgtagcacagtaacaacagcactttcgaagaaaggcacaaaaccatgaaatagcatagtgtttttgaagaatacccattgttggatatgactaatgtacataagtggtgggatgggggtkagaaagagaggttgtaaaagcaataatggggactatatatattgggatgtttttt

SEQ ID NO: 35493 - DNA, 1193 bp, Homo sapiens
tcatttcccaaacatgtatggccacagaatctcttttaatggwgcagcatcacacaggactaggttttgcagaccccactgtgggaaacaatgtgcttagcagtttttccattcattcatcaggcactacctgaccacctacaacactcatgcaagacaatcacttctgggccatagagatgaagccaatactttcctggacctcacagaaggcaggtctaggagaaaggaaatgaatgggctcgaaaagttgaatgcaccagggggagcacaatgccagtgctacaaataaaatactacggggtcctatggagaaattcatcctgactctagacagaggaaggcttcatggaagacccagcacttcagccaagccttaagctgcggggggttctggccacatggagatgggaggaagggatatggcccaggagcccaagtccaaggggtgaaagagaagagagggtgcttgtagtagaataataagtgttccctttagctggagcatactgtgaaggaagcagagtagtaagacaaatagctggaaaggattgcagcttgaaacgtcagaccaaaaatgtttaagcttcctcctataataaatggggacccatccaagctttctgagcattgggtaagagtggtcctaaacaagtcactctatgagccttaggtgtttcatctgtaaaagggagccccattttatctgacctcggtgtgtgaggatcagagaacttggccacagggcagtggagccctgagcaaagtttattactcagcagcagaacagctgtttccagttcctttggaagaatgtgtgtctcagaaacacctgacacgtgatatttcatctctgtggcagggccagatgggaaatccaagcaaaaatgaacgcttcgaaacagaacatatttgaaagttctcctgtagcagtcaaatcagatctgtatttgatttcattttattttgtttagaatgacatagggactgcaaggaaggaacagctgctggaaacgaagacacagaaagacacagaagacacagaaagaatataaacggcagattacctgaccttcatgtcaagtactaagacaagaggtgtgtgtctctatgtgtgtgtgtgtctgtgtgtgtgtcagagagagatcaaaagagtgtatgtatgagtgtgtgctccagagagtgtatatgca

SEQ ID NO: 35494 - DNA, 1398 bp, Homo sapiens
  misc_feature (1)...(1398): n = A,T,C or G
tagttgtagagtttattctgtgccacataatacttggtctcctgctagttctgcccagttgtgttcagttaaagttaatagcaatggcattagctcactaagcctcacagcatcccagggaggtaggtcacccctaagcacattatccccccttaacagatggggaaatgacgccacaggaagattaaataacttgcccagcctcacacagcctgccacaggtagagcaggagatgatctcagccctcatgccrgctcatggacaaagaatactctggataaagccctttgcaattttaggatcccatgaagtgtgggtggtttgcattacagaggttgaaaaagaaataagcacaggggtaaccttctttttttttttctttttttgagacagagtctccctctgtcacccaagctggagtgcagtggcacgatctcgtctcattgcaacctctgcctccgcctcccgggttcaagcaattcttgtgtctcagcctcccaagcagctgggattacaagtgtgtgccaccatgcctggctattttttttttttaatttttagtagagatggggtctcaccatgttggtcaggctggtctgaactcttgacctcaagcaacccgcccgctcagctccgaagtgtgggatacaggatgagccatgggccagcccaggggtaannnnnnnnnnnnnnnnnnnnnnnnnnnnnnnnnnnnnnnnnnnnnnnnnnnnnnnnnnnnnnnnnnnnnnnnnnnnnnnnnnnnnnnnnnnnnnnnnnnnaatcccttttatgtcgactcttaaagtatcccccttaaaactgcttcaggcctggcacagtggctcatgcctgtaaccccagcactttgggaggctgaggtgggcagatcgcttgaggtcaggagttctagaccagcctggccaacatggtgagaccctgtctttactgaaaatacaagaaaatagctgggcttggtggtgcgcacctgtggtcccagctgcttgggaagctgaggtggcaggatcgcttgagcctgggggagcagcagttgcagtaagccaaggtcacgccactgcactccagcctgggtgacaaagcaagaccctgtctcaggaaaaaaaaaaaaaaaagcatgcttcaattgtctctcttttcccatgtctccccagaacaccataagagaggaatactttttaatacacagctatgaactgaaagatggtatgggcactgatgcaaggcgaggacggaaccgactgggaggcagcaaagggcctcagtgaggaaggatcaaaggagaggcgaggccaagtagggttctatcagtgactctgtacctcagaaagctaggcacaaactggtgactgctagcctgaaattatgcccgtttcattcct

SEQ ID NO: 35495 - DNA, 542 bp, Homo sapiens
ctcagcattgtgccttgctcacagtagacactcaataagtgttagtggggcaaaatgcaggaaggcaatttaatttctgagtaacgcagaacaactgtgaagaagacacccaaaaaatgcccccattttcttttaccaattgatatctagtcaggagaactcctactacctacctaaaatttgctatgttctgccccacacggagaccagggaatacttgccatcagcttctcacccaagaacactgtgaaaattaacgatgaggtaatgtctgaaatgctcagagctctttggagatgtatggcaaaaggcatcactatctttaatattcaaagwgattctacccaactctgatctctttttctgcagactaatgttacgtccacaggataaggtgatgccagattgacccctaaataaacctctccaacagacagtgccaacacaggtgcatactgctgagccctcacatgtggctgctggggtccagaaccataaggcaggagtggtttctgaccaccccaacgttgccaaagacttca

SEQ ID NO: 35496 - DNA, 1666 bp, Homo sapiens
  misc_feature (1)...(1666): n = A,T,C or G
cacaaatcgtccttgccaaattttattgagacctaatatttgttaggcactgttctaagcggtttatctcattttaataaccctatgaattatatattaatatccccactttataaatgagaaaaccaaggccaaatgttcccctggtcactcaactagtaagagcttggattcaaatccaagaaatctagtgaaagaaactaaataataagtccaagtcagctattgaaggggagagggatgatagagcttccaggcagagagaacagcctatgggaaggctctaaggatggaaaggaacacctattagatgctatgtattttaatatactaacacaaaaactccaacaagcaagtatcatgtgtcttttttgcagacaagagactttacatggtctacagtacctgctcaagatcatccacatagctggtgtggtgattgagtcagaatttaannnnnnnnnnnnnnnnnnnnnnnnnnnnnnnnnnnnnnnnnnnnnnnnnnnnnnnnnnnnnnnnnnnnnnnnnnnnnnnnnnnnnnnnnnnnnnnnnnnnaactttggtaggattctatattcaactcaaatcctactaaacagaagccccttgtagagtacaggmataagcagagtaaatctaaatgaaagtaactgggggatgttggggaggcactagactagcctggaccccctccagctaacacattccctaaattctggaaacagtgcatggacagtccccagacgcaggggaaagtcttggaaggttcctctcctatcttcggtgtaggatagggagagggagggatgatctagattttcttaaaaacaaggctttattcatgttttgttactatgtactgtgtactgcaacactgtgtcagcctgttctttgaatcagagggggatgttctggaaaggatctgggccgtggagccagaggtagcttgaatgccagctcttgttagctttatgaccttggacaactaatgtaacctctcagttttctcatcttaacacacagataatactgaccttgaagggtgttgtgagaattaaattaactagtaaggataaagcacctagcacaggctctggggtgttgcaggcattcaataaatggcagctattgttatacattttgaaactcccagatcttgacacttttaagtctgccttgtcttttgaaactggtggagtttgggtctttctttcttccttttttcccttcattcttttttaggcaaattgactggtattaagaaagatgatacttcttgcaaaggaagtttccataaaaataacatggtctgtaatcccagcactttgggaggctgcggtgggcagatcacttgagctcaggagtccaggaccagcctgggtaacatggcaaaatgcagtctctacaaaaaatacaaaagcaagctaggcctggtggtgcatgcctgcagtcccagttactcaggtagctgaggcgggaggatggcttgagcccaggaggtcaaggctgcagtgagcccagattttactgcgctccattgcactccaacctgggtaatagagcgagaccctgtctctaaataaataaataaataacatggtgacttatgaaaaaccatgtacttattgatgccactgaagacattatgtgttattttcataatctg

SEQ ID NO: 35497 - DNA, 1666 bp, Homo sapiens
  misc_feature (1)...(1666): n = A,T,C or G
cacaaatcgtccttgccaaattttattgagacctaatatttgttaggcactgttctaagcggtttatctcattttaataaccctatgaattatatattaatatccccactttataaatgagaaaaccaaggccaaatgttcccctggtcactcaactagtaagagcttggattcaaatccaagaaatctagtgaaagaaactaaataataagtccaagtcagctattgaaggggagagggatgatagagcttccaggcagagagaacagcctatgggaaggctctaaggatggaaaggaacacctattagatgctatgtattttaatatactaacacaaaaactccaacaagcaagtatcatgtgtcttttttgcagacaagagactttacatggtctacagtacctgctcaagatcatccacatagctggtgtggtgattgagtcagaatttaannnnnnnnnnnnnnnnnnnnnnnnnnnnnnnnnnnnnnnnnnnnnnnnnnnnnnnnnnnnnnnnnnnnnnnnnnnnnnnnnnnnnnnnnnnnnnnnnnnnaactttggtaggattctatattcaactcaaatcctactaaacagaagccccttgtagagtacaggcataagcagagtaaatctraatgaaagtaactgggggatgttggggaggcactagactagcctggaccccctccagctaacacattccctaaattctggaaacagtgcatggacagtccccagacgcaggggaaagtcttggaaggttcctctcctatcttcggtgtaggatagggagagggagggatgatctagattttcttaaaaacaaggctttattcatgttttgttactatgtactgtgtactgcaacactgtgtcagcctgttctttgaatcagagggggatgttctggaaaggatctgggccgtggagccagaggtagcttgaatgccagctcttgttagctttatgaccttggacaactaatgtaacctctcagttttctcatcttaacacacagataatactgaccttgaagggtgttgtgagaattaaattaactagtaaggataaagcacctagcacaggctctggggtgttgcaggcattcaataaatggcagctattgttatacattttgaaactcccagatcttgacacttttaagtctgccttgtcttttgaaactggtggagtttgggtctttctttcttccttttttcccttcattcttttttaggcaaattgactggtattaagaaagatgatacttcttgcaaaggaagtttccataaaaataacatggtctgtaatcccagcactttgggaggctgcggtgggcagatcacttgagctcaggagtccaggaccagcctgggtaacatggcaaaatgcagtctctacaaaaaatacaaaagcaagctaggcctggtggtgcatgcctgcagtcccagttactcaggtagctgaggcgggaggatggcttgagcccaggaggtcaaggctgcagtgagcccagattttactgcgctccattgcactccaacctgggtaatagagcgagaccctgtctctaaataaataaataaataacatggtgacttatgaaaaaccatgtacttattgatgccactgaagacattatgtgttattttcataatctg

SEQ ID NO: 35498 - DNA, 532 bp, Homo sapiens
agaggaacaaagaagttttctgggtactggaaatgtatcatatctttgtctggttgtagttgcacagaaatttacacagtaatttatccagctgtacatttaagatttgtgaactttactgtacatgcattatacttaaaacataattaaaaataaaargagaaaagagtagaatataagcgaaagattcaaaggtgggacaaatgataattgattaatatgggtattacgataatgttaatatacttacttcatctccctcatcaattaatgcttgaatggtgttaaaaagagatccatatgctcctactgtcacaaggatttctttatttgaatcaatttgcttttgataaagcttttcatacagataggacagagctttcacaagtgatggatggccctgttggattaaaaataagaacaaaaccttgaatttaaatatgggacctactgtttgaggtaatatggctctaaaatgtaagaatttttaaaatttggatttgatgtttataattaccccaagaaaatttat

SEQ ID NO: 35499 - DNA, 314 bp, Homo sapiens
cagagaaacagaataatactctaggctccttctttctgatatgtatctgaggtatggcagatgctgggggaatatatggagccagtattaccctgatgccaaaattagacaaagacacaccccagaaagagagaaagttacaggttaaaatctctaataaatatcgatacaaaaatcctcaacaaaatactagcaaactgaatacagcaatrcattagaaagatcattcatcatgaccaaatggggtttacctgtgggatgcaaggatggtgcaatatacacaagtcaatcaatgtgatacatcatattaacag

SEQ ID NO: 35500 - DNA, 592 bp, Homo sapiens
gggtaatrttttaacacgtgaacacacaactgtgtcccttccagagtactccagcatgcttacagtttgtaacacttaagtgtgtacgcgtgtgcatccacacaggtgtgcatcgacatgccgagcacgtgcataaaacaagacaagaagaattcgtaccaaaagttaagggtggttttctctgagtggtaggctcatgggtaaatttaatttccttctttgtgtttttctgtatttttaaaaagttctgcagtgaacatgtgttacatttctcatcagaaaagccatcgtgattgtgtgtatgtgtttaaagggaaataaatgatcaaaataccatatgacccagtaattccatttctaggaatataaatttagagaaagttggagatatataaacacatttatggataaggttttttacataatattgaaaaaaatagaaacagcttaatgtccaaaagcaagagattactcaatatattaaaacccacccatatggcagaacaacttgtaggcattatcaatcaaagcataggatgatacggtacagtgaatgaaattggattcaaaatgtgggaagaattttactcac

SEQ ID NO: 35501 - DNA, 527 bp, Homo sapiens
ccaaattaaaatattcaaaatactggccgggcaaggtgcctcacacctttaatcccaacactttgggaggccaagcaggaggattacttgagactaggatttcaaggacagcctgggcaacatagcaagacccgatctctacagaaaaataaaatgaaaaactagctgggcatggtggcgcacatctgtagtcctagctacttggaagctgaggtgggaggattgcttgagcccrgttcgaggctgcagtgagctattatcatgcaatgcagcaagaacccatctctaaacaaaacaaacaaacgtagcctattgttaaacttaaagattggattcttaaaatcctatcaaagttatattctgtataaacatagttttcttgattgtcaatgatactctactgagttttaaatgcattgaccactgtcaatactcataactttaagctcacatggaactcctacagcgcatgagcctcagttgcattacctgtggtagtgaccacctcatagtcatttatatgtatg

SEQ ID NO: 35502 - DNA, 722 bp, Homo sapiens
atgatgcttgaggcctactcctagagattctgatttaataattctgtggtagaatgtaggcatccatgactttttcaagttccccaggtgatactaatatactgttacatctgtaccactcttctgcaccatttccctttactctcataattataattcacattttgcattgtccttacagttttcaaagttttgaaaaaatacatagctcattgtattagtctgctttcacgctgctgataaacacctaactgagactgggaaatttacaaaagaaagaggcttaatggaactcacagttccacatggctgcggaggcctcagaatcatggtggaaggcaaggaggagcaagtgacatcttacatcgatggtggcaggcaaagagagagcttgtacagggaacttctatttttaaacccatcagatcctatgagattcatccactatcatgagaacagcacaggaaagagccacccccataattcaatcacctcccaccaggttcttcccatgacatgtggcaattgtgagagttacagttcaagatgagatttgagtggggacacagtcaaatcatgtcattccactcctggcccctcccaaatctcttgttctcacatttcaaaaccaatcatgccttcccaacagtcccccaaagtcttaactcatttcagcattaactgaaaagtccacagtccaatgtctcatctgagacaaygag

SEQ ID NO: 35503 - DNA, 583 bp, Homo sapiens
tgcctcctgaaccaaaaagagggtcaaagtcaagggcccaggcatttctcagtagcaaaataccaccccagggaggtgttatgtgttagtggaaaggatcacacagtctggaacagagagattcttaatggtacccagtggacaaaggaccaatgactacatctcagatgatgtggcactccctataactaactttaggaattcagcacaactctatggtgtggcaagtcccagtagtgacttcaactgaattctctaccactctagcaaaatagactatgagaacaattkttgttaattttataaaaaatgagctatttcatatacattggagtttgtggtctagatgtcatatatgctacacaaaccttggcgtcaaatagaatgaggtctgacttaacttttggtcatcttacttaatttctccaagtcttacttctgtcatctgtaaatggagaccaaaggtagaattttattcatttgttattataagttgcgagcaatagctgtatgctcagtgcttagtccagtacctggaacatagtcagtgttcagtaatggtcattatttttattcagtttga

SEQ ID NO: 35504 - DNA, 609 bp, Homo sapiens
gaagtccaaagccccctggctgtccaaaccctgggcctcctctccagcctggcagaggcgagtgacaatgctgggcaggcccccatcccctggytcacacacagggaggtgcacagttccaaggcaagggaccctcatggtccctgcacactgggccagctacctcccaggaagccacctgtccccacatctctgctggggagcccggggtgctgtctgcccctctgcccaggccccagcacccacggggcctcgctctgggccgagaacaaacagagcaggcgggactgaaacagcatcatggggcaggtgagggcctgtccgctgccatggcgcccaggccggccaggtgtcttctgtcatcccccagctttgtttggccccaactatcgccaaaaacaccacaagttgagtaaataatagcaactgcagaataccctgacatctgtaaactgagcccagggacagcacaggccgcaagtgttgacgcttattggcatggctaccagtcctctccctggccgagaactcctttttgaattcatacttgaaggcaaggtttgtttcctttttctggcagttgactttgaggatgtcacctttcacttt

SEQ ID NO: 35505 - DNA, 1007 bp, Homo sapiens
tctgtcacactctgtaacagcagcatcaatgacttaattttaaaagtgaccttcaaattccatcttcatttccctgaaattagatttgattccagtccaggcagccatctctaagcaccgacagatcctgctggtttgaatagaaccggaagggcatattgtgtccatcagacaatgaaacttctaactacattagaaaatctcacataccacttagaaaacaaataacatcacagttagtgacctatgttttaacaggaagaagaaagttaaaaaaaaaatccgccatagagtttccgcgggtcacttttcaggtgcagacgcagcctgtgattctatcctttcctttctctctccgtgattcacttttcctcctcttcacaatgcagtgataaggagcgaagctgggagacctgttcttcagagatgagcccaaccaggaagtgagaaacaaggttgtggatgatgacacaagtctccctagcaacaactctgcagaggcgcgcaagcccctggcctttgctgcrtgaagcgggaagtcatccagctgcctaacgcctgagagtcagcaacctcaaggccgaggactcaccaagtgggagtgagcagatactttcctgaatgcctgagcaatggtgaaacagagaggtctgagcaagggaagtaaaggatggtgtaaaacaatcccaagacaactggcaaagcaactgaagtcactggaggctttctttttcccctctcatcctggaaaacttactggcagctgaaagagacagacttatcttctctgatgatctcggaagccagatgacctggtctgtcagaaggaaagaagactgtccacagtgagcttcctcctttctccctgggcagtgtttccacaccagatggagaggagcagggaacacgcaacaaagcctggggcccgggctccctggacgttcatccgtgcccctaggcatattgtgttttgtttggagtagtggtcacggttagttttaatcctg

SEQ ID NO: 35506 - DNA, 506 bp, Homo sapiens
ccagcctgaccaacatggagaaaccctgtctctactaaaaatacaaaaattagctggccatggtggcacgtgcctataatcccagctacttgggaggatgaggcaggagaatcacttgaacccgggaggcagaggttgaagtgaacagagatcgcgccactgcactccagcctggagacagagcgagactctgtctcaaaaaaaaaaaaaaaaaggattattgtaatacaaatcagatgtatccttcatttttccatctactccatgcgtttttcaataagggtaatatcaccccaaaggggccaaaaaatggttctcagaggatgaaaaaaatcttagtcttttaatatatgaagtacaaatataatcagtatacagatatgtagtatatctgaggtattaaactctcatggtgggcagagaataggggacaaatgtctaaaaagtttccttaggttgttratttgaaaaacttgaattttagtgaaaataaaataagtagggtt

SEQ ID NO: 35507 - DNA, 1701 bp, Homo sapiens
gcatgaagtgcacacacccacataaatacaaaacatacatacacaatataacaaaaccattcatacacaatataacaaaaacaagatctaaatattcctttataagaaggtaagtttaattatgagtaaataacaagcattacatgtaataattttaaaattctagaccaataaataattttcacacattagaatacaagattattaatgaagcctgtgggttcagtgaggcagcctcttcccaattctgaactatgcagttaagaaatatttagcctccctttctgacaaatttcacttcctgacagtattctggcaatagttataatatttttaaaacataaacaacagtgtatttgacctgattcaatcaaaaattatttaaagcaagcaacatatttaccgtaagattttcttgtaatttttatctttttatagtctcaaactaccacttttctcctaggcctacgtaatactgcccctactcactactcttaacatttacacgaaaactatttaatggattagtgttcatttgtttccctagaataactacccactgtaggaactctaatgccacttttgattctaaaagcattttaaaacatgtcaagaacatgctaaaaaaatgaagtttccttacagttttcttcagtgggggcatggtttgggttcttctttttttttggcatttgatcactcctccccctctttaacccctcactgtttcataaatcacagcaaatgtttctccatgattttttggaaaaaattttggaagaagagaacatttttgccagtctttttgcctaaatgccaaatatctgtgagtgctattctcatatccaaataaccaaagcagatcctattttttttggtggctaacagtaccttcaccatagaaacagctttctggctatagttgtgaatcacatatacatagtgacagyaacgagttcccgattctgcaacacattttaacccattcagtacacaacagatgtcccacatatattgatcactccttgtttcacctacttcatttgaatagccacctgaccacatgcatttaacttctctctgtcccaaaactctattaaatcaaatgtagaaaagtaaacaagtaaaaaataaaaaataattacctacaaagacaaggaaaatggaagagaatgtaataacagatgaatattttaaaataattttgtaaaaatgtggatactggagtggtagctatattagcaaattttaaaaaaggaaaaaggagatttgcaatctatatacctacagaggggtaagcctaaaaagaagaaacccctgaaaggctcagctctcaaagactataggaacttcagtccataagggtagattacacaaataaaaacaagtggcttatagaaagcatgtacatagatcatttgtcctccctataccctttatgtgcagccatctgtcaaccccttccatagaaaagactggggggttatatttcgggtaaataacacaaatgtgaggtgcaatgggggcaagttggatgtgtaagtctcaaaaaagggggcatgtgaagtctgacatgtaagaccttcattccacatttttggtagaatactgcaattagctgatacaactcccaccttcccaaccaagcttcagattggatgattcttctctgaagaaatgtaagaaatgaacagttccatg

SEQ ID NO: 35508 - DNA, 1701 bp, Homo sapiens
gcatgaagtgcacacacccacataaatacaaaacatacatacacaatataacaaaaccattcatacacaatataacaaaaacaagatctaaatattcctttataagaaggtaagtttaattatgagtaaataacaagcattacatgtaataattttaaaattctagaccaataaataattttcacacattagaatacaagattattaatgaagcctgtgggttcagtgaggcagcctcttcccaattctgaactatgcagttaagaaatatttagcctccctttctgacaaatttcacttcctgacagtattctggcaatagttataatatttttaaaacataaacaacagtgtatttgacctgattcaatcaaaaattatttaaagcaagcaacatatttaccgtaagattttcttgtaatttttatctttttatagtctcaaactaccacttttctcctaggcctacgtaatactgcccctactcactactcttaacatttacacgaaaactatttaatggattagtgttcatttgtttccctagaataactacccactgtaggaactctaatgccacttttgattctaaaagcattttaaaacatgtcaagaacatgctaaaaaaatgaagtttccttacagttttcttcagtgggggcatggtttgggttcttctttttttttggcatttgatcactcctccccctctttaacccctcactgtttcataaatcacagcaaatgtttctccatgattttttggaaaaaattttggaagaagagaacatttttgccagtctttttgcctaaatgccaaatatctgtgagtgctattctcatatccaaataaccaaagcagatcctattttttttggtggctaacagtaccttcaccatagaaacagctttctggctatagttgtgaatcacatatacatagtgacagtaacgagttcccgattctgcaacacattttaacccattcagtacacaacagatgtcccacatatattgatcactccttgtttcacctacttcatttgaatagccacctgaccacatgcatttaacttctctctgtcccaaaactctattaaatcaaatgtagaaaagtaaacaartaaaaaataaaaaataattacctacaaagacaaggaaaatggaagagaatgtaataacagatgaatattttaaaataattttgtaaaaatgtggatactggagtggtagctatattagcaaattttaaaaaaggaaaaaggagatttgcaatctatatacctacagaggggtaagcctaaaaagaagaaacccctgaaaggctcagctctcaaagactataggaacttcagtccataagggtagattacacaaataaaaacaagtggcttatagaaagcatgtacatagatcatttgtcctccctataccctttatgtgcagccatctgtcaaccccttccatagaaaagactggggggttatatttcgggtaaataacacaaatgtgaggtgcaatgggggcaagttggatgtgtaagtctcaaaaaagggggcatgtgaagtctgacatgtaagaccttcattccacatttttggtagaatactgcaattagctgatacaactcccaccttcccaaccaagcttcagattggatgattcttctctgaagaaatgtaagaaatgaacagttccatg

SEQ ID NO: 35509 - DNA, 479 bp, Homo sapiens
ggtttcaccatgttggccaggctagtctcgaactgctgacttcatgatctgcccacctcatcctcctaaattggtatctttatatgtccaaaagagtcaactggtggcaatttagtgaggtttaatctaataggaaatgatagagctgggatcgaacagagccatgtgaactcaaaacctatgcttccccttccacctttttgaaaaacattgtctaggctgggcacgrtggctcatgcctgtaatcccagcactttgggagacggaggtgggtggattacatgaggtcaggagttcgagaccagcttggccaaaaattagccaggcgtggtggcgcgcgcctgtggttcccactgaagcacaggaggctgaagcacaagaatcacttgaacccgggaggtggaggttgcagcgagccgagatcgcaccactgcactccaacctgggcaacagagagactctgtctcgaaaaaaaaaaa

SEQ ID NO: 35510 - DNA, 581 bp, Homo sapiens
ttcctagtgatggttctgattttttttaaaaaaagtctaaatatgtttaatgttgtctcagaagacaaaatatattttagacagatattcctcagtgatgagtaagcctcagctatctggaaaatkcatgcaggcgccagagatcgttactgagtaattcaagctaactgcgtcatgctggttgtaccctgcatgccaatatcagctaaaagcagcaccacgaaagggaaatacgaatctcactaagcactcgcccattcttgttaacgacactggaactgatcatccttaataatacacagataaatctatcaggagcatttccttgcttcctgtgaaaggaagcactcattccatgtgtcctgtgaaattcatccaacttcaggaagctggaggaatacatatggccaagctatctgggcagagagtagacagggaatggaggttgggcacagtggctcacacctgtaatcgcagccatttagaaggcaaaggcgggcagatcacttgagctcaggtgttcaagaccagcctgggcaacatggctaagtcctgtctctgcaaaaaataccaaaaactga

SEQ ID NO: 35511 - DNA, 1034 bp, Homo sapiens
tttctactgctatgtgtcacactttgccaaacaggatgtggaaaatgaataagcggttttcttaggcacttcttaacagacaattggtcaaaatgaactccattgcttaagaaacacataaacaccatttagtcactgaacatagctatatgtatggttgttactatgggaaatcttgttttgccaattttctttgaaaattctggcagaccaaggttctttttgtttacataatacttgaaaaataaaaatgaacaagctaacaaactaccaagttttcacttacataaatgtagttgcatacagaaaatgtgactgtgaattaatttttctaggacttttaaactataagcactatttgcacaaaagagaaccaatctatcaattacaaactcacataattttacagatttttttttcctacacagcacataaaacagaaggaatttgaagccacmctccaaacacaggggaaggaggctgtgtgtatatcctcattgtctttcacattctaaggtggttccactcagtgactgaaatccttaagcgttgtattagtctgcttgggctaccataacagcagcttaaactgttgtttagccactcagacttaaacaacagaaatttatttccttatagttctggaggctggaagttcaaggtgccggcaaggttggtttctggtgagacctctctccctgtcttgcagatggctgcctcctccctgtgtcctcatagagcctgtcttctgcttttacacttctggtgtcatcttccttttttttttttttttttttttttttgagacagagtctcgctctatcgcccaggctggagtgcagtggcccgatcgatctcggctcactgcaacctctgcctcccaggttcaagcaattctcctgcctcagcctcccaagtagctgggactacaggtgcccaccatcatgcctggctaatttttgtatttttagtagagacagggtttcaccatattggccaggctggtctcgaactcctgaccttgtcatctgcct

SEQ ID NO: 35512 - DNA, 1034 bp, Homo sapiens
tttctactgctatgtgtcacactttgccaaacaggatgtggaaaatgaataagcggttttcttaggcacttcttaacagacaattggtcaaaatgaactccattgcttaagaaacacataaacaccatttagtcactgaacatagctatatgtatggttgttactatgggaaatcttgttttgccaattttctttgaaaattctggcagaccaaggttctttttgtttacataatacttgaaaaataaaaatgaacaagctaacaaactaccaagttttcacttacataaatgtagttgcatacagaaaatgtgactgtgaattaatttttctaggacttttaaactataagcactatttgcacaaaagagaaccaatctatcaattacaaactcacataattttacagatttttttttcctacacagcacataaaacagaaggaatttgaagccaccctccaaacacaggggaaggaggctgtgtgtatatcctcattgtctttcacattctaaggtggttccactcagtgactgaaatccttaagygttgtattagtctgcttgggctaccataacagcagcttaaactgttgtttagccactcagacttaaacaacagaaatttatttccttatagttctggaggctggaagttcaaggtgccggcaaggttggtttctggtgagacctctctccctgtcttgcagatggctgcctcctccctgtgtcctcatagagcctgtcttctgcttttacacttctggtgtcatcttccttttttttttttttttttttttttttgagacagagtctcgctctatcgcccaggctggagtgcagtggcccgatcgatctcggctcactgcaacctctgcctcccaggttcaagcaattctcctgcctcagcctcccaagtagctgggactacaggtgcccaccatcatgcctggctaatttttgtatttttagtagagacagggtttcaccatattggccaggctggtctcgaactcctgaccttgtcatctgcct

SEQ ID NO: 35513 - DNA, 1163 bp, Homo sapiens
gttccactgcgtttatccagatttagtatcacaaagactttgctctgagaaaaatgtgattttttttttttttttttttttgagacagagtcttgctctgtcacccaggatggagtgcagtggtgcaatctcggctcactgcaacctccgcctcccaggttcacgccattctcctgcctcaatctcccgagtagctgggactacaggcgtccgccaagatgcccagctaatttttttttttttttttttttttgagacggagtctcgctctgttacccaggctggagtgcagtggcgcgatctcggctcactgcaagctccgcctcccgggttcacgccattctcctgcctcagcctccggagtagctgggactacaggcgcccgccactacgcccggstaacttttttgtatttttagtagagacggggtttcaccatgttagccaggatggtctcaatctcctgacctcgtgatccacctgcctcagcctcccaaagtgctgggattacaggcatgagccaccgcgcccagcagatttttttttttttttttgagatggagtcttgctctgttgcccaacctggagtgcagtgttatgattttggctcactgcaacctctaccatgttcaagcgattctcccacctctgcctcccgtgtagctgggatcacaggcacacgccaccacacctagctactttttgtatttttagtagaaatggggtttcaccatgttggccaggatggtcccgaactcctgacctcaagtgatcctcctgcctcggccttccaaagtgctgggattacaggtgtgagccactgtgcctggccaaaaatgtgatttcttatttcccacattgccaattccatttcaattaactataatagctatgtctattgagcactcaagcgtattctagaaactgttcctgattctggggatatatccatgaatgaactatagtccctgttattaagtaatccgtagtctgactaaaccattagaaattaaaaaaaaatggctactttcaaagacatcttggagttcaggagtcccacactgcgaaccatattacctaataatccaacctgcttgtaattcacttatttaaccaatatttattgagtgccaactttgagcctaagatacagcagtaaacaa

SEQ ID NO: 35514 - DNA, 789 bp, Homo sapiens
gggtcatgtgtgtgcgccctgtgtgaggaggaggggatgtacgactcccatcctgaggagcacttctcaaaaggaaaagatactgggaggtcaataaatgaatgcaatgtcactgctgagggtgctagaacttgaaccacacctattagatgctttgagaagcaagtaacagagacattctaaatcaaactggcctcaacaatgctcatggtatgttatgaagtcaagaggcagggtggacacctgatcaagggctcagtgatgttatccgggggcttaggttttttctgattcagggtcaacttcctctcaagtcagattccttcaatatgactgtcagtggcaatgagggctcccagcttcctggtccacagcaagcaacagagggtgagaaatggctccctttggcaaaaagtaaaagcctttcctgctctctaattgggccaacctaggtcatgtgctcacctctgaaacaatggccacagctaaggaatactacatactgattgaccaatcagcatccactcctggagaaaaggatagggtcaccttccacatggggcatggtggatatttggacaaaactggggtctccttaggaaagagtgggagaaggatgttgagtggtcagtcaacactgaaatcctagtaagatttcattagttrgagaggaaacatgcggttggatacagtggagaggcaatttctggccagaaggtagaattccagggaataccctggtcatagctgaccaagatgcagaagcaagtttgcaaagctttcctgcag

SEQ ID NO: 35515 - DNA, 602 bp, Homo sapiens
actttcctggacgaaatgttacatttcccagagtttcttccacttaaggaagtttctgtcaattccatgcatggggcattgatgtaatttttactttaaatttttttatttttaatttttgtgggtacataataagtatatatacatggggtacatgagctattttgatacaggcatacattgcataataatcacattatggagaatggggtatccatcccctcaagcatttatcctttgtgttacaaacaatccgattatactcttttggttattttwaaacgtacaattaagttattattgactatagtcaccctgttgtgctattaaatagtaagtctttctcattctttctaattaatttttttgtacccattaaccattcccatctccccggcagcccctcacccacccttcccagcctctggtaaccatccttctactctctaagtccatgagttgttttgatttttagagctggcgaataagtgagaacatgtgacatttgtctctctgtgcctggcttatttcatttaacataatgacctccagttccatccacattgttgcaaatgacaggatctcattcttttttatggctg

SEQ ID NO: 35516 - DNA, 602 bp, Homo sapiens
actttcctggacgaaatgttacatttcccagagtttcttccacttaaggaagtttctgtcaattccatgcatggggcattgatgtaatttttactttaaatttttttatttttaatttttgtgggtacataataagtatatatacatggggtacatgagctattttgatacaggcatacattgcataataatcacattatggagaatggggtatccatcccctcaagcatttatcctttgtgttacaaacaatccgattatactcttttggttatttttaaacgtacaattaagttattattgactatagtcaccctgttgtgctattaaatagtaagtctttctcattctttctaattaatttttttgtacccattaaccattcccatctccccggcagcccctcacccacccttcccagcctctggtaaccatccttctactctctaagtccatgagttgttttgatttttagagctggcgaataagtgagaacatgtgayatttgtctctctgtgcctggcttatttcatttaacataatgacctccagttccatccacattgttgcaaatgacaggatctcattcttttttatggctg

SEQ ID NO: 35517 - DNA, 741 bp, Homo sapiens
ccatgcaggtcacaccctgatacccatcttgaaaagccctgcttagaaggtctaactggctggacgcaaacacagcttgatttgaagctgaaaggcctccctggttacacgtaagcttcttgagggtcagagacatcacttgggcttctgtgcctcccagtactaaagagmacacacgctgtccctcacataggcgctcaataaaccctaattgattcgttgattgggaacaacaattatatcgttgaagtgcctggaaagacaatctcccagggctgccagccagctgggggctcaagggacaggtgatttcaaatcaatgtgcttgctcatccccaaggcaaagtttaaaacggatgactgaagcattcttttagaacagtgcaaaactgcaaacatgcaaatagccagcagtagggggatagctaagctaactgggttatattaagattctggaagactctacagttattttaaaaagcaagtatgttgtctattttaatacagagaaatgtgtatcaggtaccaaaatgggagaagcagaatttgaaaagaatgtagaaataaacatacacttagaaagacaagaagaaaaggtgaccatgtagtagttccccataccccgcctccctttttttgtaaagttcattcagcaaaagggatggttataacagggtcatgtctctcatactgtgtggtgtcatgggaggagtccctgggccagatcaccagatgacccag

SEQ ID NO: 35518 - DNA, 741 bp, Homo sapiens
ccatgcaggtcacaccctgatacccatcttgaaaagccctgcttagaaggtctaactggctggacgcaaacacagcttgatttgaagctgaaaggcctccctggttacacgtaagcttcttgagggtcagagacatcacttgggcttctgtgcctcccagtactaaagagaacacacgctgtycctcacataggcgctcaataaaccctaattgattcgttgattgggaacaacaattatatcgttgaagtgcctggaaagacaatctcccagggctgccagccagctgggggctcaagggacaggtgatttcaaatcaatgtgcttgctcatccccaaggcaaagtttaaaacggatgactgaagcattcttttagaacagtgcaaaactgcaaacatgcaaatagccagcagtagggggatagctaagctaactgggttatattaagattctggaagactctacagttattttaaaaagcaagtatgttgtctattttaatacagagaaatgtgtatcaggtaccaaaatgggagaagcagaatttgaaaagaatgtagaaataaacatacacttagaaagacaagaagaaaaggtgaccatgtagtagttccccataccccgcctccctttttttgtaaagttcattcagcaaaagggatggttataacagggtcatgtctctcatactgtgtggtgtcatgggaggagtccctgggccagatcaccagatgacccag

SEQ ID NO: 35519 - DNA, 485 bp, Homo sapiens
atttgatttgtaagttaaaataatatctttgttttagtttccactggaggtatattaaggatttaaaaatctatccactaatatatatcaaaattttaaatgcaattattttcaagaccaacaattccactttgmggaatttatcctacaaatttattcccacatgtgtacaaaaacacgtgcaaggtttaaaagatgggtactccagccttatggtaatagcaaaagggagaaacaagctaaatgctaaatacatcagagttcacctatgatggaatgatatacagtcattaaaaaagacgaaggtatataggcatgtgctgtctatataacagtcttatttatgcaaagtaaggaaaaaatgtgcttatatagatgcagagaatagttctagaaaggattcacaaaaactggcaagagttacctttgataaatgggactggatgaaaaatatggatttactttttactactatattcttttgt

SEQ ID NO: 35520 - DNA, 485 bp, Homo sapiens
atttgatttgtaagttaaaataatatctttgttttagtttccactggaggtatattaaggatttaaaaatctatccactaatatatatcaaaattttaaatgcaattattttcaagaccaacaattccactttgcggaatttatcctacaaatttattcccacatgtgtacaaaaacacgtgcaaggtttaaaagatgggtactccagccttatggtaatagcaaaagggagaaacaagctaaatgctaaatacatcagagttcrcctatgatggaatgatatacagtcattaaaaaagacgaaggtatataggcatgtgctgtctatataacagtcttatttatgcaaagtaaggaaaaaatgtgcttatatagatgcagagaatagttctagaaaggattcacaaaaactggcaagagttacctttgataaatgggactggatgaaaaatatggatttactttttactactatattcttttgt

SEQ ID NO: 35521 - DNA, 482 bp, Homo sapiens
acaaagaaggctaaggtgagaggactgattgagcccaggaggttgaggcagtgagctgtgatcatgccactgcactgcagcctggacaacagagcaagactcggtctcaaaaaaacaagtgtttgggtaataaaattmaacaataaggttgtataacctagacacagtataacctagacacagtgatttaaggggatataatttcatatgactggtgttttaaaatcgcatgtactaataaacttttttggccaggtgcagtggctcacacctgtaataccaacactttgggaggccgaggcaggtggataacttgaggtcaggagttcgagaccaccctggccaacatagtgaaaccccatctctaccaaaaaatacaaaaattagctgggtatggtgctgcatccctgtggtcccagctactcaggagtctgaggcacaaaaatcacttgaacctggcaggcagaggttgcagtgagcca

SEQ ID NO: 35522 - DNA, 839 bp, Homo sapiens
agtagtttcaccttcatgagcctatcattttcttacctaagcccaaagatgtctatttttgcctcttagtctcaaagtaaaagtttcaaagtaaaaacaaaaaagttattctgactgctgtcaaagataaacccagccagacattcgttaaagtagtgaaaacagattttattcagtaaaccactgatagtaggggaaagggctgagctcaattctcatttgtgcagaggtgactggccattttaaaaaagagagtaagggagtggcagggagccagccgcaagaagagtcagagaagagaaaccttaaagtgttggtcagtgtaaacgccatactacctggcaattagtaagttactattctatcctctcacacagactgggagacaaagcccctatccctcctgatgattacgtttcaaagaaatggctytcaaagatacttgaagggacacttcagagttggaagagatacatattaacaattgtaagcctgtttcgtaaatgctctaaaaagggaacgagaggggtctatcaattaggtgttgactagaacaaacagtaaattctccccctagctttgagctttttcaggcaggcattttaatggcgggggcggcggggggcggcctggggtcaccctaggggcaggccttacattgctagaagataaactagtgtcgatgtctttcagtgcagaagttttgactgagtcatcacgtcctaggagttctgcagttgtcactacctcgggatagtcctcatctttatttccccacaactagcttgctgcctacttagtgcaaacagctattagaaagtcaacaggtgaaggtaaaa

SEQ ID NO: 35523 - DNA, 1809 bp, Homo sapiens
tgcattttctcactgtctgcagatcctgtggagaataaacctcccccctgggatgaagaccttggctgtgtaatttgggacatgctacctcaaagggaaaatgaaagcgtgattctcttctgagggaggaattggacatctcccagactaagcaaatggcagctgcagacggtactgcgaggcacagatctgctgctgggaacgacatccttcgaggtggaagatgtgaggggcccagggtgcggtgggccctgggaacactgtgaactcatgtgaaaattcctaacgttgaacatgcagggagaacccagcgttttgccaaatgttttcaggagcttaaattttaagcatcattttcctgcacttytgttctttttggatattcttgaggacattttagtttctttattttgtccctctctggctccattttgggcaagaaagaaatacaaatcttactctaaaagatactaaccagctctttcaaaagggaaataaagctgagaactccagtgtcagtgggaagtatctcaccaactccatttcagccccccccggggttcttcctcaggagctccagagttgatggggacccattggtcaatgttcagaggggtcacagcaaacacatttcacactcacacagaagcttacagtcctgtcgctcaaagggactgcagggcctctgcagttcacccctggttttaacgatgagcaaacgaaggcttggtgatgggcagtgacctgtcgaaggtcacatagtgatgcaggggctccccagccagcatctcctcccacagcaggctgcccacttccccagcggacgtggagcaacagactggaatgagccccctttcctttccctgaaatactcagtgcagtgactaacataaggttcagaaatattatttgtttgtttataatttatatacaattgcttcctagaaagacttgcaggaggcagggccatgctgctggctgtggatggggtctctcttcacgtctgctcctgacaaacacagagcagtgatgtcagacggcagctgccatgagtgagaccaacgacaggacagcgacagaacagccagaaagcaaagctttgttccagcatccccaggaagtcttcgtgtggcttttccctctctccactggaaacctcactttagggtgaatccttccatgtaggagccacgaagtcattttacatgtctaattaagagtagtcattcttccaagaaacatgcattgaacacattggcatcgggcatggaaagatggaaaaggtaggttctcaaagcagtagcagtccacttagcatgtgaggtggtatctatcaggatcacaggcgaacttgttaaaaatacagatttgctgtcccctgtaccccactggctgacttagtgtggccctgggttggcccttgggaatcagtattttaataagtttctcatgtaaatgatccgagtcccacatattccgaatgctggtctaatgtgcagaggaatcctttgagacaacagccacagatccttctctactgttggctttgtaggcgatctccaggaagcaggaaagatcaccctttcctattttttctcccaacaaaatcggaggggaagggggaggaagcatgcttggatgaagaaggcaggtttaccatctccaggtgtgcaatgtggccctgtttcctctcctagaaaatctctcagctaaactcctgccctaagaaaaggaggcactgaagctgtttaaggaaagagaaaactaggtgaaactctttgcacttagattccattttataaggggcag

SEQ ID NO: 35524 - DNA, 787 bp, Homo sapiens
ttacaatcctgactctgccactaatctttttcagcttatgtagccttttagctgatgtggctccaattttctctctcaatgttataatagggttaaatcaaatgtcccaaactcaagttctcacaggaggcacacagatatgcatgtaagcgaatttggccagatggggacttcctcaaactagagaatgtttgtccttyctaaaagtggcccctactcctcagttcaagtcagttgttcaatgttgctagttcttccatatttttcaagagaaacatgaaatccgaatttttatctaaaagcactatattttacaatttaattaaaacattttaacactgtgaagaccaatcatgtcagtttttacttctggactagtgtgtagagactaatacaaaactggatgcaaactattaattattaggcatgtgccaagacaagagcaacatgaataattaaaaatttgtgtatgctgtagtctgaagtatttcattgataatactttttttttgaatgaggagggtagtgttatcactagaatgcttaagaactcagcatatctgcattcaaaaaaacaatgtctgaattaaaacacacaagatatgttgttaaacactaaatcagctttccgtgtctgcattttacaaatgctgaaacatttgtacatcccattgtctagaacaaaactcctgctttcattttgttcatcttgcttacactggaattaacaagttttaatatattatcttaaaggatttaaaatacctttgtggaaatgtaacatgtt

SEQ ID NO: 35525 - DNA, 787 bp, Homo sapiens
ttacaatcctgactctgccactaatctttttcagcttatgtagccttttagctgatgtggctccaattttctctctcaatgttataatagggttaaatcaaatgtcccaaactcaagttctcacaggaggcacacagatatgcatgtaagcgaatttggccagatggggacttcctcaaactagagaatgtttgtcctttctaaaagtggcccctactcctcagttcaagtcarttgttcaatgttgctagttcttccatatttttcaagagaaacatgaaatccgaatttttatctaaaagcactatattttacaatttaattaaaacattttaacactgtgaagaccaatcatgtcagtttttacttctggactagtgtgtagagactaatacaaaactggatgcaaactattaattattaggcatgtgccaagacaagagcaacatgaataattaaaaatttgtgtatgctgtagtctgaagtatttcattgataatactttttttttgaatgaggagggtagtgttatcactagaatgcttaagaactcagcatatctgcattcaaaaaaacaatgtctgaattaaaacacacaagatatgttgttaaacactaaatcagctttccgtgtctgcattttacaaatgctgaaacatttgtacatcccattgtctagaacaaaactcctgctttcattttgttcatcttgcttacactggaattaacaagttttaatatattatcttaaaggatttaaaatacctttgtggaaatgtaacatgtt

SEQ ID NO: 35526 - DNA, 534 bp, Homo sapiens
ttggcacccataaataacataccattcactaaactactattttaattttatctactatgtcctcatgatgaggttcatttatgctaaagttgattattatttacctttcagagtcattcattcattcaaaaaatggactaagagcctactttatgccaagtaccctgtcccaaccttggatcatggatatataaagacagacaacatacgcacactcaaggaagtttcactagagaaacagttatgagaacaatmgagaatatctaaaatacagatttgagagtaataaaagtaattactataagtaacagggaaggaaagacaaatagagaagaaagactatcatagaagtattcactaaaagcgtaaaatgaaccataagactatgcttgaaggatgaaaaggaattgttcagtagacaggggtaaaaaaaacattccaggtggaatcttaatatgatacagcacagatgcttgataaaactttcttcagtgtgtaggtttagaaggaaaaacaaaaacaggcaaagaccag

SEQ ID NO: 35527 - DNA, 534 bp, Homo sapiens
ttggcacccataaataacataccattcactaaactactattttaattttatctactatgtcctcatgatgaggttcatttatgctaaagttgattattatttacctttcagagtcattcattcattcaaaaaatggactaagagcctactttatgccaagtaccctgtcccaaccttggatcatggatatataaagacagacaacatacgcacactcaaggaagtttcactagagaaacagttatgagaacaatcgagaatatctaaaatacagatttgagagtaataaaagtaattactataagtaacagggaaggaaagacaaatagagaagaaagactatcatagaagtattcactaaaagcrtaaaatgaaccataagactatgcttgaaggatgaaaaggaattgttcagtagacaggggtaaaaaaaacattccaggtggaatcttaatatgatacagcacagatgcttgataaaactttcttcagtgtgtaggtttagaaggaaaaacaaaaacaggcaaagaccag

SEQ ID NO: 35528 - DNA, 1279 bp, Homo sapiens
tatgtacatacacacgtgtgtgtgtgtgtgtgtgtgtgtgtgtgtgtatggagagagagaaagaaagagagacagagagagattgagagagagagagagatagacatggggtttcattatattgcccaggctgatcttaaattatggcctcaagtgattctcctgcctcggtctcctttagaggcatgagccaccacacatcccaaaatcactttctatcaaaactctctatttttctattctactacatttcaaaataagccaagaaggaaactcaaactaagaagaaaagcacawtttcccaaaagtatacctactttggaagctcccagaaacagctgattgttgacttcacactaataaagtgcactaattttggcttccacccaggaaaatctcatcactgaactaccaaagacacatatatatctcaatatagaggcaagctttagcatcaccacaccagaaatttcttaggttctaattacacattgttatactgaagcaggcaaaggagagttggaaacccaacagcaggccaagcttgatgaataggatataacatttagcaaatgaatgggatggcattagctattagtccgtgataaaaatctgtagataaaagtccttccagttaccatcatagtctattatgtactaatggtgtggcttttgcctataaatttagcccattgttgctagaagtagagtaaatcaaccacctacatctgaataacttgaggtgcttgttaaaaagtgaggattctttgggtccattccaaatctattaaatcataatcactgagattggagcctaggaatctctgtctttaacacttcccaggtggtttttatgcacaataatgtctgcatggaaacctgactgaatccctgactgagcctcagattccttatctgtaaagcagaattgactgtcatcatactttcctatttcacagttgttgagtattgaggatcaatcaaaaatatatgggaaatgctttttaaagctgccaagtgctacaaaaatgattataaccatctaaacttctaccacctacacttctaccaacacctcttctaaaaactaaaagtaaaaaaaggtaaaaataatttttcaaagacactacagatatcttaattcttgcaactaaatctcagataactagaatactcagaaaatagtcttcccgttaatatttaactgaacattctggtcactcttttgaaaaaccttaaatgtgttcctacattgtctttccttggtaaatgcataact

SEQ ID NO: 35529 - DNA, 1342 bp, Homo sapiens
tatatatatatatatatatatatatatacacataaaataaatttagatttttatatagtcaaaaagattataatgtatagtcaggatttccaataatttttcataaaatttttcttttgttcttagtaagaaaatgtcatatatcttttgcagtttttagataaaacaattggtaaatgaaatacagtacattaaaatactttgaggctttaaaaaaataagaaagaaaagtaatttcagtggaattatcattttagcaagactaagatcattccatgaagaagacagaggtgggtaccctggtgaagccctggcttgtgtatgtgcccacacgtacacatgtaccatttggcaacagacttttracaagtaaaacatcagtaaggcaatttaaaaattgttgccacgaatcattcacattccctcctcgggtgaaacatggcaatggtcttaaagttaaacataagcactgcacacaccgtagctatggggaaatgcttgtaaccataacctactggctttcacagatatctttaatttaaggctctggctggcgcagaggtgagagctgaagcaaataatgtcaagggagtgaacagttacctcaaaacacaaggatattttctattgtgtaagaaaaggagagaattaaccaaggtaaggaacaacttagtagtttaattatgagtcttttaatgtcttttcataatcagttaataaataccttaacaataaaattgaatttaagcttttaataggccgtgttggcttaaacctaaacaaaggaattagcagctccaggcattgtgcaataactgctcactgtttggtgccaggagaaacaaagcatttcaagtgcgttttttgtaccttactataataaacgcttgtaatattccccaatttctggagtgtaagacgcagatcttatttatcacagtatgtgacacacctggcacgcggatcaggaaacaactgttttacttcatttctgtcatcaccttccaacagatttctttcacattccaatttggataggaggacttgactttctctccataagttctccattaacagtttcacagcagaaggcgccattggtccgcttcctctcgcagcaattaattacacagagcggcgtgttttgacgcggaccacagcaaacgcgtcaggtcacgggcatttacgcgtatctgagagcaacgtctttatcatcagcacggtgcgttccctgcaaaggtaatgaattgtcatagttcctcagacaggcaatgacgaacaccgtgtcaagtcagcagcacaaattaccaacttcaactcccttcagtcacttttattaata

SEQ ID NO: 35530 - DNA, 855 bp, Homo sapiens
tgcatgtccagcaccatgccaagggtgtgagatatttattttatttaatcattacactaattctgcaatgtaggtgctatctgtcttttgcatattaataaactgacactgagagcatttagaaactcctctaaagtggtgtatctaaaaagtgactgagttcaagacctggtctcttaaccrctaacccagattggaatgagaggatgcaagaggagaaggtgccatggagctaccattttgggaaagggcctctgatgacaggatgggagacatcatggatctaaccaactgtaagaacctaggcatgtgtttattggatctgctggatggcagaagcccctgatcagaatcagctgcctatcctgagagttccagatggaatgtgtttggaggaacatattcaaggcttctcacaaatggctctaatccttcctatatttaagcattcagttcacaaagactcctcaagaagaatatccagagaagctcttgttggccaaggctctctattgggaagtatacttgggaattgcttatcaaaggtaatccctgctccatgtcatcaatgggatgttagaagtgtcttttttatcatggcttttgacaaagccaggaattcagtactaagtaaatagagataatcaaggatctgctctccaagctctggaattagcaacaacaggactgaagagacaaggagtgattcttcgggttattttctctccctttctcctaccactagttgtgtccctcccatagccttctgctttctaggttttgccagctgtggtgagagatttgctgatactcattcagattcctttggattgctcttactgtttctgcacattt

SEQ ID NO: 35531 - DNA, 756 bp, Homo sapiens
aacaggagaggagtcgggggtaaaactccacgggagaaggaaatctctagctgaactttgtaataatttgaatggggtgagaagcctcctggccagaactcacaggagggcacaaatctggtgtgcagactgtacaagtaggggaagaaccaagcctttctctttcacagctgggaagcaggtagcctggggcaggttttcaagtccatgtaactctccacctggaaatggactgggggctgttggtgaggcatggtgagagtgasactggcccttcagtttgtatgggagctggttgaggcctgtgactgccagctttcccccacttccctgacaacctgcatgactcagcagaggcagccataatcctcctaggtacacaaatccagtgacctgggaatctcacccacatcccccacagcagccacagaaagacctgtcaaaggagattctgagctcagacattcctacccccacccccacctgatggtccttccctacccaccctggaagtggaagacaaagggcatataatcttgggagttctagggccccagccactgctggttcctctcatactaccacagctgatgctctctggaaagcaccacctcctggcaggccaaccagcacaaaaatagagcattaaaccaccaaagctaagaaccctcacgaagtccattgcacactcccccacccccaccaccacccctccactggaataggcactggtatccacagctgagagacccacag

SEQ ID NO: 35532 - DNA, 654 bp, Homo sapiens
agaaaaaagttagtaagataattatttccaccatttttggtgaatcactgagtgacagcttyggttgtggtggtggtgggttaaatcagagaataaatgtttgcataatgaacattgcaaggagtgtaatcacctggcaggctctttctgcctgctgcacaaacaaaaccaattcagtgagaccactgtattgcagtaaagaaagagtttaattaacacaaggcttctgagtgaaatgactggagttatcactcaaatctgtctttccaaaagctcggaggttagggtttttcaaggatagtttgagggacaggggactagagattaggtgctgatgattgattggggatgcaatcacaagggtgtggaaaacagccgtcatgcactgagtccacctttggtttgggggccaccaggccagttgagtcatgagtcacaaatcccgatggggtcagccatttgctgttatttgaaagtctgaaaaacatctcaatagaccagtgttaggttctacaatagtgatgttatctacaggagcaattggagaagtcacaaatcttgtgacctcgggccacataactcctgagcagtaagggattatagaaattatgcttacatttaggccaggtgcgatggctcacgcctgtaatccca

SEQ ID NO: 35533 - DNA, 386 bp, Homo sapiens
tcctgggccaacagctgagcacacccaacagaaatagaatrgtcactgacgctgaccacaaggcaggccccacacaagtaagtgctttacctgccctttatcatgtaactctcatggcaaccatctgaaataggcatttttaatttccatcttaaagatgaggagacagaggcactgaggggctaaatagcttgtcaagctatttgtatagaagttaacacaaccggcaagaagcagagagtcaggagcccgggtctttctgtttctttaagcaacattgcctccctgtgttcagggctgactattctctctcaggttttcagagccatttacacagatgttcaaagaacaatgccatggttcactcatacaacatggaaaaacat

SEQ ID NO: 35534 - DNA, 1413 bp, Homo sapiens
gacatggatggagccggaagccatcatcctcagcaaactaacacaggaacagaaaaccagacactgcatgttctcactcataagtgggagttgaaaaatgagaacacatggacacagggaggggaccaacccacaccagggcctctcagggggtggggggcaaggggaaggatggcattaggacaaatgcctaatgcatgtggggcttaaaacctaggtgatgggttgataggtgcaacaagycaccatggcacatgcatacctatgtaacaaacgtgtacattctgcacatgtatcctggagcttaatattttaaaaaataatataaataattaaaaaataaaaaggcacaacaaagggaaggaatttaatttttgaaaaagaatattttgtaactgagaaagatagtaaataaacaaaccaaataaactgacaaattaaggggaagtgtgagcgttttgcagtagagtgaaggactctctaatgaggtgacctttgagctgagacctgtatgacaaggaaatgccacagggtgagctaaggtggagagagttctggacagaggcaagtgcaaaggccctgaggaagagtgagtctggtgggacccaagaacagagaggccagggcagctggagtggaggccagtggtgaggatagcagcacgtgagtccagacagaccgggagggacagattcactgtcttcctcctatagctttgctctttggctccttctgaaggcatcattccaccgagtatcaccttcccctccaatcactccccgatccacttttatgccgaccccgccaccccaaggacctgtcagctcctccataaactgatatctcaccagttcgaattaatttccccctctttgattcacacgtcaaactctgttgacccttttatacccaatcctcatgtactctccaatttttctaccagattggaagctgtttgagcacagggagcttttgtcttactcatcttcagtgagggcaaagtcttcgtagttgcattgttatgtttgtttcatttgctttgctttgctttggttttgtggtctatgacatagttaagtacgaaacaaattttttttcgtttggtgaaatgagtgaacatatatttaatgaatgttgttctggcaaaaattttgaaaaactagtgcttaaaacatagcttagaattaagtctttgcatgaaaaaagacacgattattagaggcagtagaatgtgatgtttgagagcacaaagtctgaatttagactgcggggacataatcccagccctgccacttactaactgtgatcttgggccagttacttaacttcccatgccattgtcatctcatctgtagaatggggatagttgtatgtaacccacagggttgttttttaggttgaatgaataaatgc

SEQ ID NO: 35535 - DNA, 613 bp, Homo sapiens
gttggttccatagcaataatgagttttataccatatgctgcaagatgtataaaggcaatccaagtggcactttttgatagtcataaatctggtgagagacagcataggcaatcggtgagtatgttgctcctttcttgcttcacagtatttttttttttttttttttttgagatggagtctcactctgttacccaggctggaatgcagtggcacaatcttggctcactgcaacctctgcctcctgggttcaagcgattctcctgcctcggcctcccgagtagctgggactacaggcacacaccactacgcccggctaattttttgtattttagtagagacgatgtttcactgtgttgcccaggctggtcrcggactcctgagctcaggcaatctgcccacctcggcctcccaaagtgctgggattacaggcgtgagccaccgtgcccggcctattgcttcacagtatttactggaagagccttagtcattaatgtaagtgctttttgagctcagggtccattttatttccctcactatctttctcggttcccagcacactgttcagcccatggtagatactttatacaagtttgctctataaatggttgaatag

SEQ ID NO: 35536 - DNA, 872 bp, Homo sapiens
ccatgaacactgcttctgctgagacctggaatctatctcccttcccttggacgttaccactggaatgtgctggaaggggcagcatgtgattttcagggctgagcctttggaagatttccagcttctgatttagcctcctgggatgccagccrgcacataaagagttgtcattgttctgctggagtggccatgtggaggtgccttagctggtagacacacaagtgaggtcatgtggcgtgccccagccctggccacgctcttggctgaaggtggacacttgagtcacccactctgatacaaatggggacacaggagcacccagctgagcccaatcaatcaacagaaccgtgaaaaacaatgaagggctattgttttaaatctctgtgcttcgggctggtttgttacacagcagtaggcgagagaagcacctgggtggggaggctgctggccaaaaaaaaaaaaaaaaaaaaaaatgtagggaaaagaacattgaaggagggaggagtgtgatttgagatcaaaattcctctgcgctgcatacagataatagagagctgattacatatagggatttctctcagagagaaaagtattaagttccccctcttttctccatccgctaacaacttcaatattgagttgtatgagagttacataagcccttttgtatagaacagaaatagccctcatgcgaagtggccaattgagttatttatggtattttaacagctagtttgcatagctctgcagttgatccagctgattattcctcaatcagctgctaacacaggcacggaaaaaataaaataaaatcaacggctgtgcagccgatcagtaaccacaaatagatgcggtcaggctgaacccaaagt

SEQ ID NO: 35537 - DNA, 872 bp, Homo sapiens
ccatgaacactgcttctgctgagacctggaatctatctcccttcccttggacgttaccactggaatgtgctggaaggggcagcatgtgattttcagggctgagcctttggaagatttccagcttctgatttagcctcctgggatgccagccagcacataaagagttgtcattgttctgctggagtggmcatgtggaggtgccttagctggtagacacacaagtgaggtcatgtggcgtgccccagccctggccacgctcttggctgaaggtggacacttgagtcacccactctgatacaaatggggacacaggagcacccagctgagcccaatcaatcaacagaaccgtgaaaaacaatgaagggctattgttttaaatctctgtgcttcgggctggtttgttacacagcagtaggcgagagaagcacctgggtggggaggctgctggccaaaaaaaaaaaaaaaaaaaaaaatgtagggaaaagaacattgaaggagggaggagtgtgatttgagatcaaaattcctctgcgctgcatacagataatagagagctgattacatatagggatttctctcagagagaaaagtattaagttccccctcttttctccatccgctaacaacttcaatattgagttgtatgagagttacataagcccttttgtatagaacagaaatagccctcatgcgaagtggccaattgagttatttatggtattttaacagctagtttgcatagctctgcagttgatccagctgattattcctcaatcagctgctaacacaggcacggaaaaaataaaataaaatcaacggctgtgcagccgatcagtaaccacaaatagatgcggtcaggctgaacccaaagt

SEQ ID NO: 35538 - DNA, 872 bp, Homo sapiens
ccatgaacactgcttctgctgagacctggaatctatctcccttcccttggacgttaccactggaatgtgctggaaggggcagcatgtgattttcagggctgagcctttggaagatttccagcttctgatttagcctcctgggatgccagccagcacataaagagttgtcattgttctgctggagtggccatgtggaggtgccttagctggtagacacacaagtgaggtcatgtggcgtgccccagccctggccacgctcttggctgaaggtggacacttgagtcacccactctgatacaaatggggacacaggagcacccagctgagcccaatcaatcaacagaaccgtgaaaaacaatgaagggctattsttttaaatctctgtgcttcgggctggtttgttacacagcagtaggcgagagaagcacctgggtggggaggctgctggccaaaaaaaaaaaaaaaaaaaaaaatgtagggaaaagaacattgaaggagggaggagtgtgatttgagatcaaaattcctctgcgctgcatacagataatagagagctgattacatatagggatttctctcagagagaaaagtattaagttccccctcttttctccatccgctaacaacttcaatattgagttgtatgagagttacataagcccttttgtatagaacagaaatagccctcatgcgaagtggccaattgagttatttatggtattttaacagctagtttgcatagctctgcagttgatccagctgattattcctcaatcagctgctaacacaggcacggaaaaaataaaataaaatcaacggctgtgcagccgatcagtaaccacaaatagatgcggtcaggctgaacccaaagt

SEQ ID NO: 35539 - DNA, 533 bp, Homo sapiens
gatcatgtgtaaaacttcataaactatgaagcactaagataacatataatcaatattctgattgtagaattgacatattcatttattccacatcagtgataatcacttccatttgcattactcctgtagcatatgccaacaagtgtatcaagcatagcagccagaaaataaacaactaaatatgtttattttgtggtcagatgaataaaaagcggtgtcctaatttgctaggacaatatctcattaaactatactaaacttcctttcaatcaaatgagttacagaaaataaattcraagttttttcaaatgtaataccatgcaactctatcccattaaataaatacactgatctttggtatataactgatcaatattaatatgcagaaatcatatttctcaatatattaagcataccttcttaaaaattaacacagtgcaattatttgtaaaatagtaagtcaattggataaataagtcaataaaaattaagatccaacacatgttaaagcttaaagttaagaaattttgcat

SEQ ID NO: 35540 - DNA, 1219 bp, Homo sapiens
cctcttttcacagaagagacacagaggcatagataattaatgaactcatagattttgcacaactaataacaaacaggggctcttgaactcaggcagtctgcttctagaccccaagttcttaatcactgtactttcatacctcttaggtataatcagatctgcttttgtggaagaagtacattctactcctatctataattttcaaccatgaatcaggaaatgtccccgttcagaacatacaagcaacattactaaagcaactacccttggcagaaatttgtcttacagcctataaatgataaaaagagttattatatttaccaaaaagatcttggaaatcttttagtgcaattcttgacctaggctttttgatacggaagcaggtaatactattaaagaatctgaaaatatttgtaaatacattataggttaccaacatgttaaatatggcatttactagtactaattagttctgtgttagcactttgtgatgtcgtgctccctgagccctggactatctcaagtgaaaggtggctagttccattagattttgctggtgaactgtgagtgtacattattatatttttctatgtattgtactttaaataaaataaactttataaaagtaattatttatatttttcctttgtrtttattgcaaatgtttataaattttatccctctgctaattttcttattattttttcaaacctgtactctccaagcatctgtctgaatatttacttaagccaaggcaacactagcagcttttgagaagtctcatatgtgatatagaataaacactattgtgtaatggaaagacaggatttggagaatataatcctggtctatgatttattagctagtggtcttggacaagttatcttacctctcgaagcctcaggttttcaccaatagaagtggaattaacaattattttcaatatttttctcaataagaaaaggtatttaaagcctggcacagtttaatcaattataatatcaattctctcctgcacagttcatatttctaaggaatcattttcatttttataaataacttccaccctttatcaatacaaatcaggcttaaagaatttcagggctccaaggcaaaagaaaacctagaaattatttatcttggcttatttcatattcagagagtggtaattgttagaacattaagtcaaaatcttcccctctctccaatttgtatccct

SEQ ID NO: 35541 - DNA, 1300 bp, Homo sapiens
tgctacacaataagcgtttcttggatgaatatgtgatggtcaagtaaaaggtgtgcattttcttttgaatatactctttgtaagtctgagtctctcaccttctcagaactattaaaatccaaaatcaccaactaaaattttggctatctcttcgatatatttaatattaaatgatatagtatcacaagatgctacatattttaataccaagtgtattagtcaggattctctaaagggaaccaataggataggtgtatatataaaggggagtttattaaggagtactgactcacattatcacaaggtgaggtcccacaataggccatctacaagctgaggagcagggaagccagtccaagtcccaaagctgaagagcttatagtctgatgttcaagggcaggaagcatctagcacaggagaagatgtaggctgggagactaagccagtctagtccttccttgttcctctgccagcttttattctggcctcaatggcagctaatgagattgtgctcacccagattgagggtgggtgtgcctttcccagtccactgactcaaatgttaatctccattggcaacaccctcacagacacactcagcaacaatatttcgcatccttcaatccaatcaagttgacactcagtgtgaaccatcacaccaagctatccattttttttccttccatagtatttaaatcaagtttctgaatattgtcatgtaattttttggttttcactggacaaagtgcttcatccttgtttatcctccactccattttactttatgtatgtatgtatgtatgtatgtatgtatgtatktatttatttatttatttagagacagtttcactctcgccccccaggctagagtgcaaaggcacgatatcagttaactgcaacctccacctctcaggttaaagagattgtcctgcctcagtgtcccgagtagctgggattacaggcgcccaccaccacacccagctaattttttgtatttttagtagagacagtgtttcaccatgttggccaggctagtctcaaactcctgacctcaggggatccacctgccttggcctccctctccacttctttttaatctttatttgtcatgccacttgattcccatagtcattgtgggctttttttttctctctgaacttctaatctatctacatttctttgctactgaagcagtttaaactgaatggcactttgatgcagttcaacagaattacataaggaaggctatcacccatgtgtcccatggtgtcatgagtctttgcctgcagatcaaagtaac

SEQ ID NO: 35542 - DNA, 1318 bp, Homo sapiens
gcataagccaccagcattcctgttcatatcccttttcaaaaaatggtgaagagtctcttttatagtccataaagaattgaaatcatatggtgaatcctgataattgctttcagaaggagctcttggcacaagctctagggtcttcagttcactcatgtcgggaacacagaccgtcactgcatatagatgagtacagcacccagagagccacccagctgcagagttttcccaaggttggaaggatccatgtcagcttgaaatcttatctctactccttcctcaccaattagcatttttgtcacccacatcattcctttcttatgaagtcaagttaatattttacacaagtcaacagtgctctcagagaaatgtgaaactcttttcctctgaatacagatttcagtctaagcggactgagaaaagaatagaaaaataaccaacatgtacattagcactagccatccatttctgggccacacagatgcacactgccacttcaatgtttcactgaaagtagggccaaagaagaactacagagggagatgaagtggtgggaagaaacacgctctgtctaagcataacacgtcttccttcttttctctcctctccctttctctgggttctccttaggttataaactctcaggatgaattcttccaagataatgctaacaaaatcatctcactctggtccctgaattcacagcaactgtaacagcaacatcctcttccatgagatttcttatattgttgctttgtttcaccatttattatgtgtatatgatttacatgcactccaggtaaaagccataaagtagagaatgtatgttgtccgatggtttcatctacattccttctagtgcatagtactgagaacatgggtttttaaaaaatatttgtaaaatgaataaacattaactttagaagccagtttcttaggagtagtgggattagtggcatgcacaggatttagctgagagtaactatgttaatgaaatcttgtataaagagaagtaaacataattcctactagaggaaaggggagcaagctgggaatyaggagctgaaaattcaacctgtccatggtgcattcacaagggccaaatgtttcaactcaggctaagaccacagaaagctcttaatgctattcagtagagatttacatggtagggattgtaaagagaagtcaaatcaatttatcaaagcatattattttatcatctgcatgacttcttttggaaataatgttttctagtcacctagcatagcttagtattttatctcatagccctgggtagtagcgtgttggttggcttatc

SEQ ID NO: 35543 - DNA, 886 bp, Homo sapiens
cataagtcaaatattacaaaaccaaattttaaaaaattaaaagcttagaaaaaataaagtaaataacaaaatgtagtcttgtaatctaaattttccagtaacatcttagtaaaatagtctttaacgcaagtatgtgtttgagtagaaagaacactaattttatagtttaataatatctggatatgaatgttggccctggttaagcccaggtgtgcacttgtgatttggggcatattatacacattctttttctcctctgtaagtagggaatgattgcacctaccttacaagcacattgtaagcttgaattaggagctatatataggaacagctagcacagaactgctcaggaaggatgcaatgtcttcagtgcatgttacctataattttattgataatctttcacaaattgactaatactttttggaaccaagcagttaccagtctcctgcttgtgaggagcatcttattttcaccaccaggaagatatgaaaagcaaaggaaggtggaaaccgtcattcagcatctttcatttgctaggcactgtttagtattaaatatgttacagatattaaaatatttagccctcaaaaaatgcaatgaggaatacattatcaacttcatttttcagatgaaccatggttatttaccttgctcaagatcayttaactcgtcactgatcttaccagaatgagaatctacctaagtgagcctttttgtccatattcctttcactacttcagatcaatctctagaacaattacaaatagcctgtctcctgatttaacataagttactccctgttatctcttcctccagcttctattttagttttagggccctttatagttcacagcccattttaagaaaactaaaagttgatgca

SEQ ID NO: 35544 - DNA, 1467 bp, Homo sapiens
ccagggccactttccacactaaaaaaagcacaagtgattgtgcttttttaaaaaagcaaaagtgattgtgcttttttaaaaaagcaaaagtgatttgctggtacccaatagcaaatatccagggccacttttccatgctaaaaaagagcacatgtgattgcactgctcatcttttaggtttcactaacttaaactttggatgaattggtactgaatcttctaaggttgcctttggccaaggagagaatgaggtggctacccgagtttcatgaggtaggctgagcatttctgatagggagaccagtgtggagcagaagggagctgtactgtgcctggacagtgccaatgatagcgatctcccctcctattttcttytacctcaggagcagcacacaaacatgcaacctaagcaggggttttagaaggaagccatgcttcccactgtggaactgggaacctctggaaggaaataattgatgctctaggcatcctagcacagcacctggccttctcattcctggaagatttttatagagagtgcataaaactggtaaacaacaatcttcacagcatagacccttctatgtaggaaagttactattaattggtattatgtttccttattggcatgtaattgggaaaggagagctccaaggggatccctgatatgaaacattagtctctattataaaaacacgtaactagagatgatggtacctgtacaagcaactctacacattttcgtaatacagcaaattacaacattctagccaaaacaacatttagataatgatcaattcctattacgttgggacaaatacgagccccaaagaatggaagataaatttatctttcagtggcctgcataaatcccttagttgggagaggggaaagggatgtgaaatatcactaagaaaatcaatatctttattgattaatcaagctactgtgatttattgggcactcactcatttgtttgttacagtcatttcatgcattgcctctggctgtgataaatggtctggcctcctctttggcaaagagggaggctttttagctgtccttctaaaagtgtgggcccttccagatacctgcaaatttgcttctatggcaagttaaagcctacagactgctgtgaaatatggccttgaaaataccagattcacccaatgtgaggagcccaaagagcagtgcacatagacatcaactctgggtgcttccaaatggaaacagaaagctaaagcagaagcgtgcttgatatccaggatataattatactgacagggttaggagctactgtctcaaaatcagctggcattttctgtatatattgcagatattctcattaggatactagcagtctaatttctataacagcttagttatttttgtctcccaggtccttttaaactgcattcagtggacatcattcccctttgcctctagatgaaaactgttgtgagacat

SEQ ID NO: 35545 - DNA, 583 bp, Homo sapiens
agggggaagtcccttttaaaaccatcagatctcgtgagaacttactatcatgagaacaggatcggggaaaccacccccatgattcaattgtctccacctagtccctcccacaacacatggggattatgggaactacaattcaagatgagatttgggtggggatatagtcaaaccatatcggagtcagcaagggccagcttcacatctttctccccaagagtayggttagcttcctaaattgctaatttttaatttaaaaattcagcacaaatttctactttgaaattatgaaattcttgtagaagtatgtaataattataggaaaaaggaaattatcgcctcaaatttctttcttgactactttcatcttttctttaaagccactctggggaccattagtagtgttcctgtcttcgcaagaagacccatgcctagaacacagtctcccttcactacttccaggaagaatttttttaaatactcatatgcatccataggtacatcatacatatgaatgttcattgtagcatcgttggcaataatgaaaaaaaataatgctcatcaagaagagtgttttaaaata

SEQ ID NO: 35546 - DNA, 583 bp, Homo sapiens
agggggaagtcccttttaaaaccatcagatctcgtgagaacttactatcatgagaacaggatcggggaaaccacccccatgattcaattgtctccacctagtccctcccacaacacatggggattatgggaactacaattcaagatgagatttgggtggggatatagtcaaaccatatcggagtcagcaagggccagcttcacatctttctccccaagagtacggttagcttcctaaattgctaatttttaatttaaaaattcagcacaaatttctactttgaaattatgaaattcttgyagaagtatgtaataattataggaaaaaggaaattatcgcctcaaatttctttcttgactactttcatcttttctttaaagccactctggggaccattagtagtgttcctgtcttcgcaagaagacccatgcctagaacacagtctcccttcactacttccaggaagaatttttttaaatactcatatgcatccataggtacatcatacatatgaatgttcattgtagcatcgttggcaataatgaaaaaaaataatgctcatcaagaagagtgttttaaaata

SEQ ID NO: 35547 - DNA, 583 bp, Homo sapiens
agggggaagtcccttttaaaaccatcagatctcgtgagaacttactatcatgagaacaggatcggggaaaccacccccatgattcaattgtctccacctagtccctcccacaacacatggggattatgggaactacaattcaagatgagatttgggtggggatatagtcaaaccatatcggagtcagcaagggccagcttcacatctttctccccaagagtacggttagcttcctaaattgctaatttttaatttaaaaattcagcacaaatttctactttgaaattatgaaattcttgtagaagtatgtaataattataggaaaaaggaaattatcgcctcaaatttctttcttgactactttcatcttttctttaaagccactctggggaccattagtagtgttcctgtcttcgcaagaagacccatgcctagaacasagtctcccttcactacttccaggaagaatttttttaaatactcatatgcatccataggtacatcatacatatgaatgttcattgtagcatcgttggcaataatgaaaaaaaataatgctcatcaagaagagtgttttaaaata

SEQ ID NO: 35548 - DNA, 2045 bp, Homo sapiens
caggagaggaaagagaaagactccacctctcctggtgtctggaggctgctgggggccttgtaggcatcaggattctgaattagcagaggacaatgaggccagcaggacacagtttacatccactttgtcagtttccaattccatagacccccatctcgggtctgggcacctgtcatctctatgaaagattttccagttcagttcactgaatcctgggctttgtccattgctctctaccctctgtggcaggttgtttggcctgaggctgtcatcaacatgtgggagggctgctctgctcagctgcagggccagcgttggtcccagtctagacaatcgcagttgctcagatctccaagatcacacacattttctcacaaaatgcctgtgaagcttaccagcacttgagtggcaacataggggcatctttcttctcctttacctgcctccatgcctaggaaagactagtgtgggtagggygtaggctagtcaggaggagtcaggctgggggctatgccctgagccttccccttccgagggactggatactggctcctctgccgagagcatcatcccctcagcctcagcaagcagtgaaaaaggcatgccctgcagaagtgaacacacttgtctcggctcagccactccactcacttttgatgcaacctttcccttctctgggaattctacatgaatctttgggaagatttattttacgtgtcaatgtggctaattcacggtacccagttgtccaaacaccaatctggaagtctctgtgaaggtgtttttcagatgtgattagcagttggatcagtagatgtgagtaaagcagagtctgctccataatgggggtgggctttacccaatgagttaaagaagttaaaacatttgggtcccccaaggaggagggaattctgccttcagactgcccttggcctttagctacatcaactgtgcctgggcctccagcctctcctgtagactggatttgccagtctcacaatcatgtgagccaattccttcaaatctttctctcttttttctctctctctctcgacatcctatttgttttgtctctggagaaccctaatacaatctccttaggctcattagcccaacaaaccacatagagaacttctagtgtatagagaataaatcaaatcaaatggcagttttcagccatttgtgggcatccagtaggagacctgtaggatccatttctttttagagtggggtttacctgaagaagctagtgatgaacggccagatgttatcaggagactgctccattttcataaaccagatttccttgtggtttgctctgaagccggcttcctcacgttggagtgactgggagcagtggaccagcagacagtgacagtgagttccaggcgagagaagcacggagtaggggctctgctttcgactcacttgagaggctgcaaggaagtgatttgaattctgagttttcccacaaattccatgaggtcaagttacttccgctaaatttcatattggttatgaactctgttttcaaatgcagcatgtaaactccttctgtaaaataaaaggaagtaggatattcagcaattctttactggatgtgatcagcaaagacaagacatctgcagctgatgggatcacctagatttggaggttggggaacagggaagatctaaacacccttgttttcttggcctctttggtctcagccacatggaatcagattatttgactaggactattaatgcataagaagggagaaacacaaaaaggtgatttcttgaggtttcagcttaccttgtcaatgattctgcaactgtgtgccatgaattcttagtcctgcaacatggtcataaagacagaaacattccacaaagttgtatatgatggtcttctcctcctacttggagagttccctgctattgttagcccttctagggccccctactctccctcaaaagagcattttctcaaacagaagtgcccactctagaagaccactttgtttttgatttggaaaatcaagcttggctttggtaagttca

SEQ ID NO: 35549 - DNA, 2045 bp, Homo sapiens
caggagaggaaagagaaagactccacctctcctggtgtctggaggctgctgggggccttgtaggcatcaggattctgaattagcagaggacaatgaggccagcaggacacagtttacatccactttgtcagtttccaattccatagacccccatctcgggtctgggcacctgtcatctctatgaaagattttccagttcagttcactgaatcctgggctttgtccattgctctctaccctctgtggcaggttgtttggcctgaggctgtcatcaacatgtgggagggctgctctgctcagctgcagggccagcgttggtcccagtctagacaatcgcagttgctcagatctccaagatcacacacattttctcacaaaatgcctgtgaagcttaccagcacttgagtggcaacataggggcatctttcttctcctttacctgcctccatgcctaggaaagactagtgtgggtagggtgtaggctagtcaggaggagtcaggctgggggctatgccctgagccttccccttccgagggactggatactggctcctctgccgagagcatcatcccctcagcctcagcaagcagtgaaaaaggcatgccctgcagaagtgaacacacttgtctcggctcagccactccactcacttttgatgcaacctttcccttctctgggaattctacatgaatctytgggaagatttattttacgtgtcaatgtggctaattcacggtacccagttgtccaaacaccaatctggaagtctctgtgaaggtgtttttcagatgtgattagcagttggatcagtagatgtgagtaaagcagagtctgctccataatgggggtgggctttacccaatgagttaaagaagttaaaacatttgggtcccccaaggaggagggaattctgccttcagactgcccttggcctttagctacatcaactgtgcctgggcctccagcctctcctgtagactggatttgccagtctcacaatcatgtgagccaattccttcaaatctttctctcttttttctctctctctctcgacatcctatttgttttgtctctggagaaccctaatacaatctccttaggctcattagcccaacaaaccacatagagaacttctagtgtatagagaataaatcaaatcaaatggcagttttcagccatttgtgggcatccagtaggagacctgtaggatccatttctttttagagtggggtttacctgaagaagctagtgatgaacggccagatgttatcaggagactgctccattttcataaaccagatttccttgtggtttgctctgaagccggcttcctcacgttggagtgactgggagcagtggaccagcagacagtgacagtgagttccaggcgagagaagcacggagtaggggctctgctttcgactcacttgagaggctgcaaggaagtgatttgaattctgagttttcccacaaattccatgaggtcaagttacttccgctaaatttcatattggttatgaactctgttttcaaatgcagcatgtaaactccttctgtaaaataaaaggaagtaggatattcagcaattctttactggatgtgatcagcaaagacaagacatctgcagctgatgggatcacctagatttggaggttggggaacagggaagatctaaacacccttgttttcttggcctctttggtctcagccacatggaatcagattatttgactaggactattaatgcataagaagggagaaacacaaaaaggtgatttcttgaggtttcagcttaccttgtcaatgattctgcaactgtgtgccatgaattcttagtcctgcaacatggtcataaagacagaaacattccacaaagttgtatatgatggtcttctcctcctacttggagagttccctgctattgttagcccttctagggccccctactctccctcaaaagagcattttctcaaacagaagtgcccactctagaagaccactttgtttttgatttggaaaatcaagcttggctttggtaagttca

SEQ ID NO: 35550 - DNA, 2045 bp, Homo sapiens
caggagaggaaagagaaagactccacctctcctggtgtctggaggctgctgggggccttgtaggcatcaggattctgaattagcagaggacaatgaggccagcaggacacagtttacatccactttgtcagtttccaattccatagacccccatctcgggtctgggcacctgtcatctctatgaaagattttccagttcagttcactgaatcctgggctttgtccattgctctctaccctctgtggcaggttgtttggcctgaggctgtcatcaacatgtgggagggctgctctgctcagctgcagggccagcgttggtcccagtctagacaatcgcagttgctcagatctccaagatcacacacattttctcacaaaatgcctgtgaagcttaccagcacttgagtggcaacataggggcatctttcttctcctttacctgcctccatgcctaggaaagactagtgtgggtagggtgtaggctagtcaggaggagtcaggctgggggctatgccctgagccttccccttccgagggactggatactggctcctctgccgagagcatcatcccctcagcctcagcaagcagtgaaaaaggcatgccctgcagaagtgaacacacttgtctcggctcagccactccactcacttttgatgcaacctttcccttctctgggaattctacatgaatctttgggaagatttattttacgtgtcaatgtggctaattcacggtacccagttgtccaaacaccaatctggaagtctctgtgaaggtgtttttcagatgtgattagcagttggatcagtagatgtgagtaaagcagagtctgctccataatgggggtgggctttacccaatgagttaaagaagttaaaacatttgggtcccccaaggaggagggaattctgccttcagactgcccttggcctttagctacatcaactgtgcctgggcctccagcctctcctgtagactggatttgccagtctcacaatcatgtgagccaattccttcaaatctttctctcttttttctctctctctctcgacatcctatttgttttgtctctggagaaccctaatacaatctccttaggctcattagcccaacaaaccacatagagaacttctagtgtatagagaataaatcaaatcaaatggcagttttcagccatttgtgggcatccagtaggagacctgtaggatccatttctttttagagtggggtttacctgaagaagctagtgatgaacggccagatgttatcaggagactgctccattttcataaaccagatttccttgtggtttgctctgaagccggcttcctcacgttggagtgactgggagcagtggaccagcagacagtgacagtgagttccaggcgagagaagcacggagtaggggctctgctttcgactcacttgagaggctgcaaggaagtgatttgaattctgagttttcccacaaattccatgaggtcaagttacttccgctaaatttcatattggttatgaactctgttttcaaatgcagcatgtaaactccttctgtaaaataaaaggaagtaggatattcagcaattctttactggatgtgatcagcaaagacaagacatctgcagctgatgggatcacctagatttggaggttggggaacagggaagatctaaacacccttgttttcttggcctctttggtctcagccacatggaatcagattatttgactaggactattaatgcataagaagggagaaacacaaaaaggtgatttcttgaggtttcagcttaccttgtcaatgattctgcaactgtgtgccatgaattcttagtcctgcaacatggtcataaagacagaaacattccacaaagttgtatatgatggtcttctcctcctacttggagagttccctgctattgttagcccttctagggccccctactctccctcaaaagagcattttctcaaacagaartgcccactctagaagaccactttgtttttgatttggaaaatcaagcttggctttggtaagttca

SEQ ID NO: 35551 - DNA, 1737 bp, Homo sapiens
aggtacctgtctgtatgtcttcaatatctttcagaggcctgaaatcctattattcttgtttcctccttatagatttttgatttctaagggactcatttaggacatacacatcctcagcctgcagcagctggtcattttagagggatgccagtggccgaaggcagggccatgatgggaatggaaggctggatgatggagacacagaagtgggagagtgggcgaggtaaactgtgcctacctcacagttttgttgaaggctggtcctggtgttattttacatcatgtagggtacttcccactatgtcaacacaaagcagttctgagacacatagccgggggagtaagtgcaggagccagcctgatgggggctggcagattcttggtggcctggcaggcatgagacttaccaggaaggggccctgccctgccctgaagtgtgctttgcagggcaagactctgggacagcacagcattgcccaagtagacgctgatcatgcccagggaggggtgtcttctacagtgaacagtagctctcctccaagatgtgcagggtgatgggcttgattctagacccttctcacagccctgtctggtcctactgtttgctttgacattgacagaaccctgtggttctaggaaactggtgtgcagtggtgagggcttaggacctgtcccaaaccagctcctgcctctcatattaatatggttgatgggatcccacctggtctcacaccgcccctgtcagggcctgacttgcagcgggagggctggggcctcaggccataagtccccttggcaggcaaccctcgatctgttggtccatttggtggcggaaggtgcagtttcagggtgtatttgaatgaccctagcaatgatcctaacatgcttccgtttcctttcatcttggtcctgcatcactgtgccttgagcaagctgttagactggtttgaasaggcagttccagaatagttagcataatcccaggcccaggtatgttcactgatgagaaagtgggtgaaaggtcccaggaggctcattacctccagtaactgtggagaatccagccttgcccggccctcccagccagtggcgatgggaaggctgcaaacctttgagttctacctggatcttcagctttcctttcatgtttttggtctcatctttttactgttgccttaatatatatgtgtttctgatttttttctttttctttctaacaatggagatcaaagtcaatgtttctgtttttttttttttttcctaatggtggaaacattttctttcttgtattgtctcactcttcattctcaatcctctaggttcactttcctgctgttcttttttttgtggagcatttgcttttgcgcatgttccaagccccctgtccgcatgcttggaactagtgtgtgctgtagacagggatgttgtgtctcaatcaacccatcaatgtctgcttgtggcaccgaaacttctgctagaagatactggttaggatttagatatgctgatgggacatttccccagaggctctggaattgtgaaagaagtattaaactccttttctgttagacctcactgtgtttttgaaacgtttatggtcttgttcttagcggaggaaaggaggaaagggaaaactccagaagccatcaaaggcttcccagtgaggctggcattagggctgttggacagcaaggcctctgctctagcactgacgcttctgcagctgtcaaagggaaa

SEQ ID NO: 35552 - DNA, 1173 bp, Homo sapiens
tcctcaagaggcggtgcagsgggaggaagcgccctagcataataagagctttgagtgcctgggacctgctccaaggggggtaaacaaggtgcagaggtgacctgagatttctcaaacttgcagatcattaggagggcatttcctttattatatgcttgaatttagaggaacaagccactcactctcccactccaccactgcagctccggatcaatcatatatttcctggttagttcctcatttttattaattttctaagcttcaggttcatacatctaaatgcccactaaatgtctagttcagtatgtcatcttcccaaacttgcttcttctcctttcatctttcttatctcatttatgttatcagcatcaccgccaacaccaaccacacaggctaaagattcagaaaatatcttatctccacactttccttcaagcccaactcctaccctagtatcatgtcacccattactaaattctggcaatttcactttttaaatatttcttgattcttcccaccacttttctctttttccattgctggtttatcatttcttgctgtatagtactgcttggtgcataatagacacttaaataatgtttggtttggggccgggcccagtgattcacgcctgtaatcccagtactttgggaggccaaggtgggcagatcacgaggtcaagagttcaagaccaggctggccaacatggtgaaaccccatctctactaagaatacaaaaaaattagctgggcgtggtggcacgtgcctgtaattccagctactcaggaggctgaggcagaagaatcacttgaacccaggaggcagaggttgtagtgagctgagatcgtgccactgcactccagcctgggcgacagagcaagacaccatcttgaaaaaaaataatgataatgtttgcttttgattgaatataaaatggatcttcccactaatttatactatagagaaaatgacttttttagattctttttttttaagagttaggctaaagaaggaaaactgaacaggattacttgagatattctgaaagaaagagtgttaaaaaggtacacacccccattttttctgcttttctcagcctggagtcacaaagcaatcattgggctactctacaaaatgccccactctcctgttgaaaaagcccttcagagctag

SEQ ID NO: 35553 - DNA, 1587 bp, Homo sapiens
atatgaagtgggtaacactaagtaccatttaaaacatactttttaagtgcttcacatattttaccaatttaatctcattttacagataagaaattgagaccaaggaattaaacaggtttttccagatcagtgactccagcattctctaataatggccatagagaaccagtgaagaaaaccttgttttctttaaaggacttagcaccatgtgtgggacagaggaagtgctcatataattgttagttcccttacttgcccttgcctattatgggctgaaaaggagaaatccaggagctaaaaggatgggaatgccacagtggcatatttcactggggcactatcacaagccttacagttttgggggccataagcagttaacttgggatgttgtctcctgaaaattgttgcctataagctgtggctgactctgactcaggaatactcctgttttgaacaaaaatgatcaatccaaagtcaggagaccatgattcctcattaatggagtcctccacgaggcgccgtaccttaaaaagctgcccaactgttccttccagtggaaagatggtaggggctcagcattgcaatcctatgttcaaaatgaggacttgagctacggaatgcgttgctggatgagaagttctgcctatgctgacagttttaaaacaatactctatttttgattccaataccatatgatactagggaagccttgaaaaccagaaacatttttcacccaagtccacggcaaagttcaagaatgactccatggctaatacttaggttgcaaatcgataaatgagctcctctcggatccaatgaattgaattgaaaaataaaactataattacagtaggaagagtgcaataaaagatgaaaacccaggctccaagcccctatttttcttttgttcaaaacaccattattggtttcaaatatgcttgtctgtcaacaggggttagtatcctatttgcctaaaggcaagaggcttgatctgatggttttctagggccccttcctggtctaagaactctaatctaatgtggttttactaaacccagagctctccaaaatcatgactttcgtcttaattgcctgcaggaacctgggggttaccctcaagctctcactgaataaatgatacctaaagtaaatgctgaaaactgcctttcctatttatgaagtgcgtattcagaataatatttcttttttcttcaaatttgattaaagtagccattccattatgccttttcataagggagtcacattgaagtcataaaaatgttactggaatcattttcattccaacaaattagatattaatgagggtttatccttacaattgaagaaaggarctaattcattaggaaaatgagtaacacatatatatgcttatcaagggaccctaaaagaaatactttcatatgaaagatgtgtttttatatcctaaaattatttccaacatttggtatggagccaaggcaattcagtaactttgccatttatagcaaagtttaggccaagttgcggggcacacaaaaaagtatacttgcttgacaatttaagtccatagggccaatctgaatgtcc

SEQ ID NO: 35554 - DNA, 531 bp, Homo sapiens
tgccatttaagtgacctctttttgattcaagtgttacttatcatagggcgaactttggagaaagccacagttcagtttctatgcactgaaaagtgtgatctcagtgacggtaagcactgctagccagcacagtggtgatagactaggagagtaatttaagttggtgatatggtttggccatttgtcctgcccaaatctcatgttgaaagataatcaacatgttagaggtgggccctggtggaggttgtgggagtggatttctcatgactggtttagygccatctccttggttctgtcctcacaatagtgaatgatttctcacaagatccggttgtttaaaagtgtggcaccttccccatctccctctcttgctccatcctgccatgtgacacactggctccccttcacctgccaccatgattgaaacttcccaaggccctcaccagaagtagatgctggcatcatgcttcctgtacagcctgcagaactgtgagccaattagacctcttttccttgtaaactacccagctt

SEQ ID NO: 35555 - DNA, 531 bp, Homo sapiens
tgccatttaagtgacctctttttgattcaagtgttacttatcatagggcgaactttggagaaagccacagttcagtttctatgcactgaaaagtgtgatctcagtgacggtaagcactgctagccagcacagtggtgatagactaggagagtaatttaagttggtgatatggtttggccatttgtcctgcccaaatctcatgttgaaagataatcaacatgttagaggtgggccctggtggaggttgtgggagtggatttctcatgactggtttagcgccatctccttggttctgtcctcacaatagygaatgatttctcacaagatccggttgtttaaaagtgtggcaccttccccatctccctctcttgctccatcctgccatgtgacacactggctccccttcacctgccaccatgattgaaacttcccaaggccctcaccagaagtagatgctggcatcatgcttcctgtacagcctgcagaactgtgagccaattagacctcttttccttgtaaactacccagctt

SEQ ID NO: 35556 - DNA, 944 bp, Homo sapiens
atgtggccggagaagggcggctgtgacagtgaggaaagagccacgtggactctgctaccgcacaccatggcacgtgcccagccctctctgtgaatcagctcagctcaccctcctgacaacccacgttgctgttgattctcctctcacaggtgaggtcactcaggcacgatgggtcacggagcttgkccaggatcgtggcagagccagcatccaacaaggccctagagcccaagctctcagcctctctcagaggccaggctagtcctctgtggggagggccgcctgcacctgctgaggggtgaacccatggagatgcatgtgatcacagaggaaaggagcacacggcgggcaaaggcttgtgaccagaacctgggtgacagctatgctaggaggtggaggaagaagaacagccagccctccatgaagtcctcgtcagtgggacctgtgctgtgaaggtgaaggaaattctgggaggacagtgagggaggggaaccaggggcggtaatatgcatgagtcagtgtggaggaaaggccggtggggcctgcccagaggacgggaaggcagcaggaagcgggcaggagggagaaggtcttgaaatgtaaaacctcaagagggaaagtggtgcagggaggccctggggtgaggagaggaacagcttcaggaatggagttgaaagcggcagctctgaaggccaaggccaggtcttaactcggagatgggaggcatcagcatcagcagaggactctgggaagaggcttccagggtggcgaggaggacgctgaagagccaccgggaaggggcctcactctctgtggtgagcagaaggcggagtcaagttcggcatgaagagcagaggagtccagcccctggaagctgctgtgacaggcacgggaagtcagcaaaggagagcccaactgccagcgccactcgaggactgagggca

SEQ ID NO: 35557 - DNA, 944 bp, Homo sapiens
atgtggccggagaagggcggctgtgacagtgaggaaagagccacgtggactctgctaccgcacaccatggcacgtgcccagccctctctgtgaatcagctcagctcaccctcctgacaacccacgttgctgttgattctcctctcacaggtgaggtcactcaggcacgatgggtcacggagcttggccaggatcgtggcagagccagcatccaacaaggccctagagcccaagctctcagcctctctcagaggccaggctagtcctctgtggggagggccgcctgcacctgctgaggggtgaacccatggagatgcatgtgatcacagaggaaaggagcacacggygggcaaaggcttgtgaccagaacctgggtgacagctatgctaggaggtggaggaagaagaacagccagccctccatgaagtcctcgtcagtgggacctgtgctgtgaaggtgaaggaaattctgggaggacagtgagggaggggaaccaggggcggtaatatgcatgagtcagtgtggaggaaaggccggtggggcctgcccagaggacgggaaggcagcaggaagcgggcaggagggagaaggtcttgaaatgtaaaacctcaagagggaaagtggtgcagggaggccctggggtgaggagaggaacagcttcaggaatggagttgaaagcggcagctctgaaggccaaggccaggtcttaactcggagatgggaggcatcagcatcagcagaggactctgggaagaggcttccagggtggcgaggaggacgctgaagagccaccgggaaggggcctcactctctgtggtgagcagaaggcggagtcaagttcggcatgaagagcagaggagtccagcccctggaagctgctgtgacaggcacgggaagtcagcaaaggagagcccaactgccagcgccactcgaggactgagggca

SEQ ID NO: 35558 - DNA, 944 bp, Homo sapiens
atgtggccggagaagggcggctgtgacagtgaggaaagagccacgtggactctgctaccgcacaccatggcacgtgcccagccctctctgtgaatcagctcagctcaccctcctgacaacccacgttgctgttgattctcctctcacaggtgaggtcactcaggcacgatgggtcacggagcttggccaggatcgtggcagagccagcatccaacaaggccctagagcccaagctctcagcctctctcagaggccaggctagtcctctgtggggagggccgcctgcacctgctgaggggtgaacccatggagatgcatgtgatcacagaggaaaggagcacacggcgggcaaaggcttgtgaccagaacctgggtgacagctatgctaggaggtggaggaagaagaacagccagccctccatgaagtcctcgtcagtgggacctgtgctgtgaaggtgaaggaaattctgggaggacagtgagggaggggaaccaggggcggtaatatgcatgagtcagtgtggaggaaaggccggtggggcctgcccagaggacgggaaggcagcaggaagcgggcaggagggagaaggtcttgaaatgtaaaacctcaagagggaaagtggtgcagggaggccctggggtgaggagaggaacagcttcaggaatggagttgaaagcggcagctctgaaggccaaggccaggtcttaactcggagatgggaggcatcagcatcagcagaggactctgggaagaggcttccagggtggcgaggaggacgctgaagagccaccgggaaggggcctcactctctgtggtgagcagaaggcggagtcaagttcggcatgaagagcagaggagtccagcccctggaagctgctgtgacaggcacgggaagtcagcaaaggagagcccamctgccagcgccactcgaggactgagggca

SEQ ID NO: 35559 - DNA, 576 bp, Homo sapiens
gggattacaggtgtgagccaccgcgcctggcctcaactcagtttttctgatgtctgataatttttcagataatttgaggaaaaagagtccatgatatgtactctaatattagcatactgttttgtaggaaaagtcttttagcctcactgttaaattttgctaagatctcattcctgagtcattgcttttacaacgcagtgggagtgaggaaaagaggactgtatggcttctcaggctacaaggaaggaagatacagtttctgccctctgcttttgttttgttttgtggtttatgttttgagacagamtctcaccctgttgcccaagctggagtgcagtggcatgatcttggctcactgcagcctcgacctcccaggctcaggagattctcccacctcagcctcccgagtagccagaactataggcgagcaccaccacacctggctaatttttttgtatttttagtagagacaggttttcaccaggctggtctcgaactcctgggctcaagcgattcacccacctcggcctcccaagtgctggggttacaggcaggcccagcctgccctctggatgc

SEQ ID NO: 35560 - DNA, 532 bp, Homo sapiens
caggggtggtcctggacagcacccctctcataactacagagaaggcgacagctgtaaatcactgcttctccctgaccttaagcacctagccagggggtgtcccagcacctttgggaggagtgagactggaacaggattatagagaaaggctgtcatgagcacagctgtgcttcagcaggcaatgcagcagaaaaagccatgcagcagatgyagaagctgaaggtgagaggttattattagcaagatcagagacctatctgccaggagcagcaccttgcctggatcacagagcagcttggccaaccccatagctggccagagaaatccaatcagcaggacagggcctccaaactgcacaagatcacaactacagagaattccaaatatccccggggtttcatctagacagcaacctcaagaggggtggcagaggtttggagatgcactgaaggttaaacgccaggtcctcatgcccagctatcatctctcaacaggacagggcagctggacgcccaagctgctgacctgtgcg

SEQ ID NO: 35561 - DNA, 563 bp, Homo sapiens
atgtacgcagagtgcgtgaaagaagagaatatgattaagtgtccttggtgttcatggtgctttgtatgccatcatttaattactgcaacaactatctaaaacagataccattcccactttacagaacaaaatacaacagaggctgagagattgaacaggaaggcagcaaaaaaattatttgtgcagtgaagccacagttaaggtttcaagtcatcaaagaaaaggtgaaggttttgaaggcccctcaatgactatagagatacagtcgatggccaaattccaaatagaaaaaaaaaaaaaagaaagaaagaaaaagaaaaagaaaaaaatggtactttaactatagatgtaatgtgaaaagagaaaataatttgggttttttcctatgggcttactttttgaaaaaatccagaaaaagggagaaaatcaccattcagaaatttcccaataaagagtctaggayacaatgcaattattgtcatattttctaacacttgactactgttttatcagctaatgtatgtcaaataacttaatgaggttttgtttttctttttaggaca

SEQ ID NO: 35562 - DNA, 868 bp, Homo sapiens
ttagaagcaaatgttatatctattttttctatgtaattcataagtattatttgtaatatatattctttcttagaaggacattcaatcacattgctcacactaaaaatttacttcatttttatcttaccatcttaaagtgtatttttgtgtatgttttataccaaacatatttttcatatactacctgtgcataatgtagaaacatataaatgtctactgattggggtctgtgttcatgctttgtgagttgtggtgcgtgatcatgaaagctcagaggccactgctctagagaatgggagaaacgagagccaagcaggggaacaaaaagagggaaggagaggaagacacaggggagcagccagtagaggggagggaaggggagcgcagggaggggcaaatgtagggataagccccctccattcagaggtcccacgctgaccaaggccccactcaggagcgctggtgtcccaggagaacagacatcgtgacagaaataagtctgcctgtgtcagtcctgtctcaggacctgcaagccggcccagcctgcscctgtcgccccacagccacgtcagtgggtctgaagtatgggagtctctgctgctttgtgagaagccagagtctggggtgagctgtggcccaatgagcactctactgccatagccagagccaccttcaacccgctgacggatagcacgccgacctggagctcaggggggcctgttctgagcacaaggacttgagtgtagtcagcagagccccactcacctgatgttctctgccagctcgattagtagcatttcccccagtgtaaggcactagagggatccctccagaactctctcttctatcttgggatagtgtcacgtaa

SEQ ID NO: 35563 - DNA, 868 bp, Homo sapiens
ttagaagcaaatgttatatctattttttctatgtaattcataagtattatttgtaatatatattctttcttagaaggacattcaatcacattgctcacactaaaaatttacttcatttttatcttaccatcttaaagtgtatttttgtgtatgttttataccaaacatatttttcatatactacctgtgcataatgtagaaacatataaatgtctactgattggggtctgtgttcatgctttgtgagttgtggtgcgtgatcatgaaagctcagaggccactgctctagagaatgggagaaacgagagccaagcaggggaacaaaaagagggaaggagaggaagacacaggggagcagccagtagaggggagggaaggggagcgcagggaggggcaaatgtagggataagccccctccattcagaggtcccacgctgaccaaggccccactcaggagcgctggtgtcccaggagaacagacatcgtgacagaaataagtctgcctgtgtcagtcctgtctcaggacctgcaagccggcccagcctgcgcctgtcgccccacagccacgtcagtgggtctgaagtatgggagtctctgctgctttgtgagwagccagagtctggggtgagctgtggcccaatgagcactctactgccatagccagagccaccttcaacccgctgacggatagcacgccgacctggagctcaggggggcctgttctgagcacaaggacttgagtgtagtcagcagagccccactcacctgatgttctctgccagctcgattagtagcatttcccccagtgtaaggcactagagggatccctccagaactctctcttctatcttgggatagtgtcacgtaa

SEQ ID NO: 35564 - DNA, 868 bp, Homo sapiens
ttagaagcaaatgttatatctattttttctatgtaattcataagtattatttgtaatatatattctttcttagaaggacattcaatcacattgctcacactaaaaatttacttcatttttatcttaccatcttaaagtgtatttttgtgtatgttttataccaaacatatttttcatatactacctgtgcataatgtagaaacatataaatgtctactgattggggtctgtgttcatgctttgtgagttgtggtgcgtgatcatgaaagctcagaggccactgctctagagaatgggagaaacgagagccaagcaggggaacaaaaagagggaaggagaggaagacacaggggagcagccagtagaggggagggaaggggagcgcagggaggggcaaatgtagggataagccccctccattcagaggtcccacgctgaccaaggccccactcaggagcgctggtgtcccaggagaacagacatcgtgacagaaataagtctgcctgtgtcagtcctgtctcaggacctgcaagccggcccagcctgcgcctgtcgccccacagccacgtcagtgggtctgaagtatgggagtctctgctgctttgtgagaagccagagtctggggtgagctgtggcccaatgagcactctactgccatagccagagccaccttcaaccygctgacggatagcacgccgacctggagctcaggggggcctgttctgagcacaaggacttgagtgtagtcagcagagccccactcacctgatgttctctgccagctcgattagtagcatttcccccagtgtaaggcactagagggatccctccagaactctctcttctatcttgggatagtgtcacgtaa

SEQ ID NO: 35565 - DNA, 868 bp, Homo sapiens
ttagaagcaaatgttatatctattttttctatgtaattcataagtattatttgtaatatatattctttcttagaaggacattcaatcacattgctcacactaaaaatttacttcatttttatcttaccatcttaaagtgtatttttgtgtatgttttataccaaacatatttttcatatactacctgtgcataatgtagaaacatataaatgtctactgattggggtctgtgttcatgctttgtgagttgtggtgcgtgatcatgaaagctcagaggccactgctctagagaatgggagaaacgagagccaagcaggggaacaaaaagagggaaggagaggaagacacaggggagcagccagtagaggggagggaaggggagcgcagggaggggcaaatgtagggataagccccctccattcagaggtcccacgctgaccaaggccccactcaggagcgctggtgtcccaggagaacagacatcgtgacagaaataagtctgcctgtgtcagtcctgtctcaggacctgcaagccggcccagcctgcgcctgtcgccccacagccacgtcagtgggtctgaagtatgggagtctctgctgctttgtgagaagccagagtctggggtgagctgtggcccaatgagcactctactgccatagccagagccaccttcaacccgctgacggatagcacgccgacctggagctcaggggggcctgttctgagcacaaggacttgagtgtagtcagcagagccccactcacctgatgttctctgccagctcgattrgtagcatttcccccagtgtaaggcactagagggatccctccagaactctctcttctatcttgggatagtgtcacgtaa

SEQ ID NO: 35566 - DNA, 868 bp, Homo sapiens
ttagaagcaaatgttatatctattttttctatgtaattcataagtattatttgtaatatatattctttcttagaaggacattcaatcacattgctcacactaaaaatttacttcatttttatcttaccatcttaaagtgtatttttgtgtatgttttataccaaacatatttttcatatactacctgtgcataatgtagaaacatataaatgtctactgattggggtctgtgttcatgctttgtgagttgtggtgcgtgatcatgaaagctcagaggccactgctctagagaatgggagaaacgagagccaagcaggggaacaaaaagagggaaggagaggaagacacaggggagcagccagtagaggggagggaaggggagcgcagggaggggcaaatgtagggataagccccctccattcagaggtcccacgctgaccaaggccccactcaggagcgctggtgtcccaggagaacagacatcgtgacagaaataagtctgcctgtgtcagtcctgtctcaggacctgcaagccggcccagcctgcgcctgtcgccccacagccacgtcagtgggtctgaagtatgggagtctctgctgctttgtgagaagccagagtctggggtgagctgtggcccaatgagcactctactgccatagccagagccaccttcaacccgctgacggatagcacgccgacctggagctcaggggggcctgttctgagcacaaggacttgagtgtagtcagcagagccccactcacctgatgttctctgccagctcgattagtrgcatttcccccagtgtaaggcactagagggatccctccagaactctctcttctatcttgggatagtgtcacgtaa

SEQ ID NO: 35567 - DNA, 868 bp, Homo sapiens
ttagaagcaaatgttatatctattttttctatgtaattcataagtattatttgtaatatatattctttcttagaaggacattcaatcacattgctcacactaaaaatttacttcatttttatcttaccatcttaaagtgtatttttgtgtatgttttataccaaacatatttttcatatactacctgtgcataatgtagaaacatataaatgtctactgattggggtctgtgttcatgctttgtgagttgtggtgcgtgatcatgaaagctcagaggccactgctctagagaatgggagaaacgagagccaagcaggggaacaaaaagagggaaggagaggaagacacaggggagcagccagtagaggggagggaaggggagcgcagggaggggcaaatgtagggataagccccctccattcagaggtcccacgctgaccaaggccccactcaggagcgctggtgtcccaggagaacagacatcgtgacagaaataagtctgcctgtgtcagtcctgtctcaggacctgcaagccggcccagcctgcgcctgtcgccccacagccacgtcagtgggtctgaagtatgggagtctctgctgctttgtgagaagccagagtctggggtgagctgtggcccaatgagcactctactgccatagccagagccaccttcaacccgctgacggatagcacgccgacctggagctcaggggggcctgttctgagcacaaggacttgagtgtagtcagcagagccccactcacctgatgttctctgccagctcgattagtagcatttcccccagtgtaagscactagagggatccctccagaactctctcttctatcttgggatagtgtcacgtaa

SEQ ID NO: 35568 - DNA, 532 bp, Homo sapiens
cacatctcaaatatctgaatagcattatcaagttatttttgtgacccatcacataagttagagtatgtcaggtaacacacagtttctttactctctttccattcggtactaaatgtatgttttgtttaagctttagggtcaggaggaaggccaacctgtacttaaatttccctttctagcagtttaaataaaactgagctttaacaaaattcttaaaagcttaagtcacacactcaaaatagtggaatttcaacactagatttatttttgtcttccttttgatgcacgtgcattccacattaggatagacattttatttaaatgcttccatagcctgtgtatkgattttctaaagataagtaatccttcatgtcaaatactttcaataaaactaatttctgctacttgtatattgccagcattgaatggctaggagggagtcataaaagtttaatcaaaccaagcatacatttgttattttattgttcattgttacaatagtgacagcaataacactaagtacagctaaaag

SEQ ID NO: 35569 - DNA, 532 bp, Homo sapiens
cacatctcaaatatctgaatagcattatcaagttatttttgtgacccatcacataagttagagtatgtcaggtaacacacagtttctttactctctttccattcggtactaaatgtatgttttgtttaagctttagggtcaggaggaaggccaacctgtacttaaatttccctttctagcagtttaaataaaactgagctttaacaaaattcttaaaagcttaagtcacacactcaaaatagtggaatttcaacactagatttatttttgtcttccttttgatgcacgtgcattccacattaggatagacattttatttaaatgcttccatagcctgtgtattgattttctaaagataagtaatccttcatgtcaaatacttkcaataaaactaatttctgctacttgtatattgccagcattgaatggctaggagggagtcataaaagtttaatcaaaccaagcatacatttgttattttattgttcattgttacaatagtgacagcaataacactaagtacagctaaaag

SEQ ID NO: 35570 - DNA, 570 bp, Homo sapiens
cccaaacactaagtttccactgttctcaggaatgttttgtcttgctagcatcttaatgtgtggcagtatgcagaatattgccaacccaaagctccccaagcttttggtgttcagagattttttttttttagattgtcaaaaatataacaaaaaatttaccttacccattttgagtatgcagtataatagtgcattctcagaaagaaagaaggaaggaaggaaggagggagagaggaaggaaggagaatgttaatttctcttttggtaaaaggaacagagtaaaacaatttgtgcacaktttgtgcaacatctccagaacagatatccaaatctttttttttctttaatttttctagaactttttttgtcttacaaaattaaaactattcattgaacagctcccttttccctctcccacttccctccagctcctggtaatctccattctttgtgtttctaaaagtttgagtattttagatacctgaagtagctgtctttttgtaactggtttatctcagcataatgtcctcaaggtttattcatgatgtagcatatgacaaagtttcctta

SEQ ID NO: 35571 - DNA, 573 bp, Homo sapiens
ttgttttgatgtggtagaacatttgggaagtagaaaaaggcatttaaaaaaggaaaaaaatataccctttctgaggcagtcactttaaatattttagcctgtttccttttttcccctatacattttttgcttaatgttacatcataaggctgtccctgtgtcattaataatgctttgtatgcatcatttttgttagctacctaaagtacaaccaggggaactcaactgtgatatccttggatatcacctcatatttctcatgttttaaaagtacaggaaaaacagatatggggagtcactgccacattttggaccaaggaagggacagacctaaaaacagtcttccccagctccatcccaaggccgatactctcatatcatggtgctgtcattggagagggtgcagtgtaatgtggcccactccatggcagagaagttagatgaggcatcagaggccagagctggcaagcaggaaattacccactggggttccagggagacttgctgggaagctgccctttgggattctggtgaaacctgctaggaaaccacctttagaggcgccacygaaag

SEQ ID NO: 35572 - DNA, 1187 bp, Homo sapiens
tattacatctaatgagactatgactgataatataggaatctaatatggcaagctgcctttaattcacaaacaaacaggggagtcatgctgtttattaaaatgctatctgtgaggaaagccaagctggtaaatgtatgtcatgccaaaaatgacactgttttgaaatttatgaagtatctgtaaaatgtatggagtggtgttttaaaagaaaaaactacattgtctataaaaatattactacttttgatcatctctttgatatgttcaggtgtgttaggttaatccagctttaaaattaggtaaaggaaagaagaaacttctttattgagcactctggatgccaaatgttatcaataggtgacctatccccccccccccccaatctatttattcatctatctatcttgtatttatctaccttctcatgtctgtgaggcaggtattattccccactattaaagatgaagacacagcagcgatggcccataaaaccttgtctaatgtcaccagagcaaactgggagcttggactcagacctgctggtttccagcctaggtaacttcttctgtgatgacagctttgtttgcagtgatgaccacattgcatcatgatggtctttttggctgctaccctctccaacggattataggttcttagttgcaggggtagtcacataataattatgatatccacatccaccagcaacatggctggcacatagcaggccctcagcaaatacatgtttaattgaactgaaaacatgttgcctgcactggtttcacagcattataaatccagatatttcaacagtctacatcttgcaaaatacagtgaaatggagacaaggactggtgtgaactaacctaaatgctatgtggtggccaattctttaccagcatcctcattattaagttaaacatcacctgacatcaactcaattcacatgagaacaaggggaactttcacccattactttttttattttggcaagtgtggtttccatgtccttttttyccacccaaatatttatttccccaacactaggaaaattgtatttctcctgtttccaaacaatagtagtcactggttcagcttgttacaattttatatcttcacaatgtgctagtatgcctgaaattcacacaaagtaaataaattctattagcacgaggtagttatttttatca

SEQ ID NO: 35573 - DNA, 745 bp, Homo sapiens
cttgatcttgactggctatgatcacagctaaacaagcctgggttgcccctagcatctttcacaaacctctacctatttttatctkccagaaactctctttacaggcccgtagtcctgtctcacatctgtccttcccttctctgttcaagcctccttaacacagcaatttggcaaagagctctcctgccacacactgatttctgtggtcacctcccttcttccttcattactgggacgcagactaccctgtgtgggattgcacagtgtcatgtacatttttgagagcttcccagccctcttgagacagctatcccacccagagattcgtggcatggaaccctgcctgtctttttgctgaaatattggcagtctgactttggaaagtctgttccaggcccaagtctgttccaggccctccacagctctcatctggatggctgcaagaacctccttgctggtctccctgctgcactctgagcttctcacggcctctcccacccacccaatctctgtaccagcattgagtaatatttctaaattgcacacccagccctgcccctgcactggcagaagccaggataaattggttagacaaggttgacagcatgactttcaaagcccaccgtggcctggtttcttcccctctccacctgcacctcctctctctctctctctgtctctctctctaccccatcacttaactaaatatctaattgtgctcactttccctggacatactaggtta

SEQ ID NO: 35574 - DNA, 579 bp, Homo sapiens
tgagggagaagctgaggtggaagacccaaccctactcccgggaccccccrggtccatggggagaaccagcctctgccctcgggagcctcaggtctgaagacggaggcccattcctgcccagtccaagagtggaggccagtctctgggccccaggagcccctccttgcttccaagggtgaactagacccaccgaaggctcagggcctcaggtaacctctgggaacaggctgcactggagggcaaagaccctaagggaggccatggctagtcaggcctcccaaaaggctgagtaccctcccggcctcatttcagggcagggcccttctctgtcctggtacacatcctagctttggtctattttcttcccccagaagtcccatcacctgctgtttatttttttaaaggtaccagggtcaccaaagagctcaccaaggctaataaatgctagagggatttactctcagggcatggaagccctgcccgcctctgtgccttctccctggcccttccaggcttcctttctgcccctctccccgggctccctcccctccagcctcgacatgttgctcagcccagcgt

SEQ ID NO: 35575 - DNA, 590 bp, Homo sapiens
taggcacatgagtgaggttttcattcagagaggtcgcctgagaagggaggagctgctaatcaatctgctttgttcagtgaatkttgttgttgttgttgttgttttgaaacagagtctcactctgtcacccaggctggactgcagtggcgcgatctcagctcactgcaacctctgcctcctgggttcaagtgattctcccctctcagcctcctgagtagctgggattacaggcatgtgccaccacccccagctaatttttgtatttttagtagagacggggtttcgccgtgttggtcaggctggtctcaaactcctgacctcgtgatgcacccgtctcagcctcccaaagtgctgggattacaggcgtgagccactgtgcccgaccttgtttttgttttgtaatttacttatttatatcaacagctgaaaaaatggaaaaggccaaagagcaaatctttgtccctgccctttcccagtcccactgttccctcccttccagcagcttctgcagtggtggatccagcctgaactatcctgtctcccatgaactatcccgtctccagaaacattcatttgtcagagcatcttgc

SEQ ID NO: 35576 - DNA, 590 bp, Homo sapiens
taggcacatgagtgaggttttcattcagagaggtcgcctgagaagggaggagctgctaatcaatctgctttgttcagtgaatgttgttgttgttgttgttgttttgaaacagagtctcactctgtcacccaggctggactgcagtggcgcgatctcagctcactgcaacctctgcctcctgggttcaagtgattctcccctctcagcctcctgagtagctgggattacaggcatgtgccaccacccccagctaatttttgtatttttagtagagacggggtttcgccrtgttggtcaggctggtctcaaactcctgacctcgtgatgcacccgtctcagcctcccaaagtgctgggattacaggcgtgagccactgtgcccgaccttgtttttgttttgtaatttacttatttatatcaacagctgaaaaaatggaaaaggccaaagagcaaatctttgtccctgccctttcccagtcccactgttccctcccttccagcagcttctgcagtggtggatccagcctgaactatcctgtctcccatgaactatcccgtctccagaaacattcatttgtcagagcatcttgc

SEQ ID NO: 35577 - DNA, 1858 bp, Homo sapiens
agacccaccccaatgggaagacaaggtaagaagcccatcctgggcttcctggccaggttcctggaataggtggcaggttcatggtgggtgactggggctcaaatttggcatctctgggacacgggaattggaagggcttgtcatgggccatctggtttaagcctatgcagagaaaagaaaggcattaggattcccattacctagatgaggaaactgaggccttgggagggggagagttgtacctaaggttagctggagaagcagcagcagaatcaggctcagaacttctgtaagagcacctccatttgtgtacaagggtgggagtatggggcagtgagctcaccaggacaggaatcagcagacctaggcaggctgtttcctcttctgcaaaatgggagtgccaaaaagttgctcctagggtgtggagaggattagacgagatgggcataagtaaagcaccctatgaacattaatttccttttccccacagatcatttgtcctgggtgggagtcttcagtgcacctcagtgtgtgtttgtgtgtgcatgagtgagtatgctgtgtgtgtgaaagcatgcacaagcccctccgtgtgtatgtgttagtatgtatgtgagtgtgtgatttgcaaatcctgaccaggcggccattgtgaggggaagtggcaatgtttaccgaccttgggaggtattagaggttggagcctctaggattggcctggcatgggctgaggtggcgggactggagttggaggtgctctggatcccccaggcttctgtaaaccctgaaagctgctgctctggacactaacagggcagggcagggtcacgcagctcctgttaggggcttaggcaaagtcatcaagtgactcggagtaggtctttaggaggtccccctgggcatttgttggggagtccagccaggggtgtctgagcagagatgagggaatgggctggagggcaccagggagaggagaagaagcagggctcctctctctgcctcttcagggcaaagaattctgctttctttgtagctggaggtgacctcaacttcctccccttgctctgggaagaggcctgaatataagtcaagtcatttgtgctaatcgttgacatttttgagacgtgccttccctgggagtttgggggcctagtatgcaaatctatgcacattatgtgacatcaacagaaaaattggaacctcagggaattgctggagcagagaggttctccttcagaactgcttctaagctgcctataattccccccattaaattcacagaggcaaaatgtgttagatcctggagggtcaagactgaggccagatcacaatggcctttcagtccacggtctcactttacagatgaggaaagtgaggcccagaggggaggcatgacttgcttgagattatacagtcagtggcaatgctggggtcagacctggcccaggatcatccagattcattttttgacttaatatgcacaacacacacacacacacgcacacagacacacacacacacagcctatccttcgcacagtacccacagctttattttgcttcacagcagtacctgaccttgyatgtttacatttccttctccttctgcctgaccagaataaagctccataggggtgagaagtgtgcttgttttttcatgttgtattcactgtcgtatcgtcagcatctaaaacacagaatggtgggattcattcattcatttgctggtcgcctctctgatgtgccctctccattccagaccctggtgaaacagaaaggtgtcagacctggcccctagaccctggctcaggtggcttcaggccctttcttctgggccccagttgcctggggggtgggag

SEQ ID NO: 35578 - DNA, 1017 bp, Homo sapiens
actaatacattatacaacttatttcaagccatttttcaaaaattgcaaaatagatttaatttcttggtatttcatctctatttctttctgcttatcttgttctacatttttcttccatcttaaattacttttattttcttttatagtcactttaattttctatcacattacattttaagccaattgctaccatcattaggaagagattaagaattttcaaggccaaaaacattatctgctataataatgtgaaatctgtgtaacagtgctcaagaatactttctttcaataagaaaaaaattgaacctactagttcaaatttaaaatgaaagataacaaaatatcttccatggatacttcatttatgataattaaaatatacatacattttactcataaacattttaatatatgcttaggacagaacaattttgtctaatttgactgatttcctactggtcartcattttggaggacttagttatgctttaaggtaatcctgcatagcattcaggaacatatacatatgcatatgtgtttatgtacacaaagatcttgacatatctgcaggctacagtcaaaattaaatgttcctctaaagcagtttctaagtgaaagaaaaatttattattccttgtttctctttttagactttataaaatgtagacaataaaattaccagttgcccatataactaatataatctgatgtttctaaaatagtctaaactgcaaggcttatactgtttcataaatattatttaaaatctgttttttccatgaaattgaaaagctaaaaatccaaactccaatagataaaaaaaaagactaaaaaataagagatgaagagatggagttacaaaaatacccaattgtataatttgagaggctgccatgagaaccaatgaaactagggtaataaatagagaaggctttagaaaagacgccaacatcccaggaaatgtgaattggctgtgatgcttataaacctgaggcttgaggcctctcacttactggg

SEQ ID NO: 35579 - DNA, 553 bp, Homo sapiens
tactttatagctaagggtatagaggtgcagtaatttagctaagttcacagctaacaaatagcatccactatttaaacatagtgtgatatgagactcgactctaccacttgcacctttaaccattgtttcctttatcgcatgcatgcgtgcacatgtgcgcaaaatttaaaagataccatggcaacaaataagccatgttcttttttcccctaatgctaaggcaaaataaaatgcctagttaatatagtgtagtagttaaaagcatagagtctggattgacaaggttggaatccagtttcttccatcttttacctttatatagctaaccaagtcacttaacctgttgagcctccacttccccagatataatgtaataataataatacttccctcatgaagctatttgaaagraaagtaacagcaagtgcaggaaagaaacatcatttattgaatgtctatatgccagttactacagtaggtatttaggttcattgagtcctcttggaaaagctataagtatcaatattctattttaccaatgaagaaactacaa

SEQ ID NO: 35580 - DNA, 896 bp, Homo sapiens
aaaagattattctccctactcctgctatggttttctactgtttttatctatttcagcagctatcatgaacttgaatacctggtatccacaggaaagaatacttgataggcagacacttgatcttgctgtgattgagcttggcatgattttaacctccaagtgcaagaaatcatctttattaatctgcttctcgtgagtctgttggggagatgaactttagccaagaatattacagtcatctagtactgttgatacaaaaagtcccagtatatttgtgtgagtagtagcatcacatagggaaaataaagtaatattatttagagtctgactgtccgaatttgaattccagctatgctaccttctaattgtataaacttggtcaaacactaaacctctctaaatcttagtttcttcatctatgaaatggagataataataatgcttgcttcaaaagtggctgtgcatctgtataccccacagaatacagtcacgtactttctctgcacaaatatattaatgttgactgcatgccaaaaatttaataaatgcataactttagtgctgtgaccctgagattactcaaccaatgtcattaaagatttcacatttttattcagtcttaaatgttgccctcgttttgtataatattctacrtggattgcaatggcttgcaattcatcttttcttaattaaccgagtcaacagaataatcacaagtacagttatttttattgtgtacttactaagtgtccagcacagagttaatcagtatatggaatatgaaagaaatagacgctgcagtccctgaacttaatgagttcagcatctaactagggaggtagaaagcaaatgatatatgcataaaaagttaaatagaaatacaaaaatatctgaaa

SEQ ID NO: 35581 - DNA, 505 bp, Homo sapiens
gcaactttccttttcttagtactcactcaaagcaaactctgctcatcatttatcctttaaaatatcagcagatgcctccagcttccctaacttctgggctctggatcttaatcagcccagtccttcaaaagctgctttcagcttcacccaatttcctgaccttgggtccctcccagaaccttctaaccagacctgagatttcctttgtgagatgctttgagtcacagccattacaacagaattcagtcaacaactactaaataaacaactgcagagattattttttatttataattcaaaattactgatactttattagacatttgaaaatggtgttgggtgacaacacaaatactactgtatgtagcaaaactttgtaaaaataacttttgaaatatgtttatatgataatattctgatatagctaagcttttaagcctccagttataaaaacaaaataatagaaaaaaamcccataaatctcgttatatttaatcaattttat

SEQ ID NO: 35582 - DNA, 916 bp, Homo sapiens
ccaagataggagcccagcccaggagtcctagctccccagaaatctccccaaaaccctgaataaagatttgaagtacctgggatagtggagtggaggagaaagagttccctgaagcacactttcattttctggagagttcagccgagggctgggtgctcccctcactcacatggcaaagctgcagcctatcccagagagggaaagccaagcctgcgcctcaggggcaccccatcccgacccctgcttgaatccagagagagggacagccacttacccacgaaacctcctctctatggctcctggggctggatctgcaacgatgttctcagccggtgctccttaaataaggcccccacccccgccccagccgcctcccgcccccgccccatgctggctcttctgagaaaggaggaaggtgtgggagggccaggaaccctgcccagagagccctttctaacctcaagccagagcgggaccccgcccccgccattctttgaagcctccccttcctcaccttggtctctaactgagttcttcccaccccttgagaccagcccgctgggctctctctctactctgcctgaaaaatctgccctttatgccaaattcaagtccagtttctcattttgaagcaggatgayggggaatggaggtgctaggggaagcctcagcgtaggtttctagcttttcccaccagctaaggcgatccaggcacccaaacaccagctgcaaaattcactggaaggaatggcggtgaaaaggcatccctctgcctcctttagctctgtgccgcttcaagcagtaccaaagggcagtggggagtctgttcccattttggggagagagagactgagacctgaggggaaagaaaatcaggggctgaagttccagccagcttcagaatccctcagggcag

SEQ ID NO: 35583 - DNA, 622 bp, Homo sapiens
tactcaggaggctgaggcaggagaatcacttgaaccaggaaggcggaggttgcagtgagctgagattgtgccactgcactccagcctggatgacaagagcgaatctccgtctcaaaaagaaaaaagtaattttgtaatatttcaaacaacaaatcaatacaatctgagtaagaaaagcataattcataattcagcacctaggatttgaatctaaattattaagcagctttttaaaaattttattattattattattatactttaagttttagggtacatgtgcacaatgtgcaggttagttacatatgtatacatgtgacatgctggtgcgctgcacccactaactcgtcatctagcattaggtatatmtcccaatgctatccctccccactccccccaccccataacagtccccacagtgtgatgttccccttcctgtgtccatgtgctctcattgttcaattcccacctacgagtgagaacatgtggtgtttggttttttgttcttgcgatagtttactgagaatgatgatttccaacttcatccatgtccctacaaaggacatgaactcatcattttttatggctgtgtagtattccatggtgtatatgtgccacattt

SEQ ID NO: 35584 - DNA, 622 bp, Homo sapiens
tactcaggaggctgaggcaggagaatcacttgaaccaggaaggcggaggttgcagtgagctgagattgtgccactgcactccagcctggatgacaagagcgaatctccgtctcaaaaagaaaaaagtaattttgtaatatttcaaacaacaaatcaatacaatctgagtaagaaaagcataattcataattcagcacctaggatttgaatctaaattattaagcagctttttaaaaattttattattattattattatactttaagttttagggtacatgtgcacaatgtgcaggttagttacatatgtatacatgtgacatgctggtgcgctgcacccactaactcgtcatctagcattaggtatatctcccaatgctatccctccccactccccccaccccataacagtccccacagtgtgatgttccccttcctgtgtccatgtgctctcattgttcaattcccacctacgagtgagaacatgtggtgtttggttttttgttcttgcgatagtttactgagaatgatgatttccaacttcatccatgtccctacaaaggacatgaactcatcattttttatggctgygtagtattccatggtgtatatgtgccacattt

SEQ ID NO: 35585 - DNA, 622 bp, Homo sapiens
tactcaggaggctgaggcaggagaatcacttgaaccaggaaggcggaggttgcagtgagctgagattgtgccactgcactccagcctggatgacaagagcgaatctccgtctcaaaaagaaaaaagtaattttgtaatatttcaaacaacaaatcaatacaatctgagtaagaaaagcataattcataattcagcacctaggatttgaatctaaattattaagcagctttttaaaaattttattattattattattatactttaagttttagggtacatgtgcacaatgtgcaggttagttacatatgtatacatgtgacatgctggtgcgctgcacccactaactcgtcatctagcattaggtatatctcccaatgctatccctccccactccccccaccccataacagtccccacagtgtgatgttccccttcctgtgtccatgtgctctcattgttcaattcccacctacgagtgagaacatgtggtgtttggttttttgttcttgcgatagtttactgagaatgatgatttccaacttcatccatgtccctacaaaggacatgaactcatcattttttatggctgtrtagtattccatggtgtatatgtgccacattt

SEQ ID NO: 35586 - DNA, 855 bp, Homo sapiens
tttttgattttcaaattgtttagactttatatattttcacaaagaatttgagacgaaaatcaaaatcaggagacaaaataggctttccaagtgatagtttcagaattcatctaagaagtgtgccagatagatgcctattttagcctaacataaatatgattaatcagctgaaatcattctttcttatattcaaatttcaaaatcttggcagggcaaggtgattcattcataatcccagctctttgggaggccaaggctggaggattgctggaggccaagagttccagatcagcctggatgacatagtgagaaccctatctctacaaaaaaattaaaaagttaattaactacatgtggtgcacctgcctgtagtgccagctactcaggaggcagaggtgggagaaacatttgaggttacagcaagccatgatcacatcactgcactccagcctgagcaacagagtgagaccctgtctcaaaaaaactttttttaatcttcccaggtttaataaaaatagcgttttgcttcaatttatgcattttgctccctcacctaagaaaacagtatgttgtattatacatagataattagctttaattagagaccaacatatatttcattaattattgtatctaaatcacacacttatcaagtctaatactctttccctctgatattaaaaaatttttgaatagtatctttggwctacaacttccaagaaaaaaagaaaacggtttttactctctctcatccaacatacagcttatttattactttgaactgacataaaaaaatgcttgttaatttttaataaacaagctacaaaatatattaaaatgatatgaaattaagcc

SEQ ID NO: 35587 - DNA, 855 bp, Homo sapiens
tttttgattttcaaattgtttagactttatatattttcacaaagaatttgagacgaaaatcaaaatcaggagacaaaataggctttccaagtgatagtttcagaattcatctaagaagtgtgccagatagatgcctattttagcctaacataaatatgattaatcagctgaaatcattctttcttatattcaaatttcaaaatcttggcagggcaaggtgattcattcataatcccagctctttgggaggccaaggctggaggattgctggaggccaagagttccagatcagcctggatgacatagtgagaaccctatctctacaaaaaaattaaaaagttaattaactacatgtggtgcacctgcctgtagtgccagctactcaggaggcagaggtgggagaaacatttgaggttacagcaagccatgatcacatcactgcactccagcctgagcaacagagtgagaccctgtctcaaaaaaactttttttaatcttcccaggtttaataaaaatagcgttttgcttcaatttatgcattttgctccctcacctaagaaaacagtatgttgtattatacatagataattagctttaattagagaccaacatatatttcattaattattgtatctaaatcacacacttatcaagtctaatactctttccctctgatattaaaaaatttttgaatagtatctttggactacaacttccaagaaaaaaagaaaacggtttttactctctctcatccaacatacagcttatttattactttgaactgacataaaaaaatgcttgttaatttttaatawacaagctacaaaatatattaaaatgatatgaaattaagcc

SEQ ID NO: 35588 - DNA, 749 bp, Homo sapiens
tctccctcctcccatcctctcccgtccaacaggctccggtgtctgttattcccctctatgtgtccatgtattctcatcatttagctctcattattatgcagtatttggttttaygttcctgtgttagtttgctaaggataatggccttccaaagggcatatttttaaataaaaatatgttatgtttgagaaaatataaaaggaaacagaaacgacttgccgcactcagctgctcctggtttcgcctcactctctctatctccggggtcatgcttaccggagtggccttgtagttttgctctttatactggagctgagagacaaggtgcaagacagtttgagattatgggaaataaatacgtcccaaaacattgcaacagattttttttaaatgtcacatggctacagaacattcattaataagatcatcatcaggatttcatagtgaaatatgtattgcttatagattttatcttcttggcgatgccagtcttttccttgtcaagtggttttgttgttgttgttgttgttttatttttgagacaaggtcttgctccgttgtccaggctggagtgcagtggcgtcatcacagctcactgcagcctcaacctcccaagctccagcgatcctcccgactcggcctcccaaagtgctgggattacaggtgtgagccaccacacccaacccttatcaaatgttttaagtcacactttttgttgttttccttcagattatattatttattggtgg

SEQ ID NO: 35589 - DNA, 1333 bp, Homo sapiens
ggtgatggtctccttcagggacacatgtttggaacctattagagagagctagagaaaatcttggtgggaatacagcatttggtaaatattttgagatggtttacagggaatattttctgttctggttccatttgataataaraaatttctgatattctcaataccttacaaactgattttaagtaatcagcaagaactctttaaaaaaagaaaaactgactttttttattattttgtgtcttgaaatcaataacaaaattacaaatgaaataaatttagatttccttcagtactttatacagtaggtggcacaaaagcaatgattcactctgcctggtcgtcccttaaatatatagtcttagagtctcactctatcacccaggctggagtgcagtggcacgatctcagctcactgcaagctccacctcccaggttcacgccattctcctgcctcagcctcccaagcagctgggactacaggtgctcgccaccacgctcagctaattttttgtatttttagcagagacagggtttcaccatgttagccaggatggtctcgatctcctgaccttcatctcctgacccaccttggcctcccaaagtgctgggattacaggcgtgagccaccgcgcccagccacagtcttattgccctcttcacccttctgctatacttttaccatattttcgtcactggttctgtctctcctaagtttgtagtgcctaaaggatattcactgaacaaagatggtggactcttcaacagccttccgctggaatgacacttctgactcagccagattcattaacactgtattagctaaatggtaaaagtaggttatatgatctttgcacacacagagcccatcatactgtttttgcaaactctgaggtttccagcataattacactagagtatttgaaaatgatactgataaattcctttgttattaaaccttgcatatgctctcccaagtaaatgttacagacaccccttcctcaacttatgatggggttgcatctcagtaaacccaccgtaagttaaaaatgtaagttaaaaatgcaccatatacccctaacctaccaaacatcacagcttcgcctggcctaccttaaacatgctcagaacaactcccttagcctatagctaggcaaaatcatctaataacaagcctgttttacacacgttgaacatctcatataatttgttgaatactgtaatgaaagtgaaaggcagaatcattatatgggtacttgaagtatggtttctactaaatgtgtatcacttccacgccatggtaaggttaaacagtcttaaactgaaccactagaag
